United States Patent Application Publication US 2005/0228172 A9 - sequence listing, part 36

SEQ ID NO: 126105 - DNA, 549 bp, Homo sapiens
aaaggcgatacagggaacagaatcttgtccaggctctggttcctcagatgccctaagtcagctcttcaggygtccagcctgagagaggctgtaactggctaaagcctcattccctttctagttctacagatttgcctactctacacatttcatataaataggatcataagaaatgcagtcttttgtggttggcttcttccatttagcgtaaggttttcaaagttcatcctccatatatctgtttaaaataagtgaataaatgaatgggtaactctgtctagtgcaaccctgaatcagaactctgagtaagtagacccctttctgaccctctacttcatgataggaaaggaattccctctccacagaagccacaataaatgatgtctacttcctaagggagttttcaaataaactgtcttgtaagggttctatatggacaatgaatgccacataagacctgggtaagtatccaatacatggcattagtttttcttttaaacacatatttattaagggtctatcaagcacatagtgtcacactaagctctt

SEQ ID NO: 126106 - DNA, 410 bp, Homo sapiens
aaaattctaggttgggcacggtgtctcatgcctgtaatccctgcactttgggaggccaaggagggaggatcacttgagcctaggagttcaggaccagcctgagaaacacagtgagaccccgtctctgcaaaaaattaaaaaacgagccaggtgtggtrgtgcatgcctgtggtcccatctacttgggaggatgaggcaggaggattgcttgagcccaggaggttgaggctgcagtgaaccatgagaacctatctcaaaaaaaccaaaccaaaaccaaaacagaaacaaaattctaggtgaaaatgaagttaaaattttaaaaagccacaacaacaagagttaaaagaacaaaagacaatcattttggtgagaaatataatgcaaacttttgtttaaagttgaaaattggc

SEQ ID NO: 126107 - DNA, 540 bp, Homo sapiens
acaggtagaaacactagcctccacccggtaatgcacctgttattttctgtgaattgctatcactttcaagacacacagaagtacttggtctcccaaagtaaataaactttagaaatgccagcatctcttgataaatgttaattgacccctttttaacgtgtattattctaatgtctgcagcaaactttacttaaagcctttgatcgtctaccaaatattcccctgtcatttttttttggtaaactttacaaacatttgggggttgcagaatcgtgttcagctttcttcccagaatttctttgtacaattgcaatttagctttctttccaaatggattcattgtggcgtgagwcttgatagaatgtgaagcaaattctcctcctggaatttggctgtaagcctagaggatgggctgcataaattattctaaatgccatagaatcttgcatgttgtttctttctagactgttttaaatctgcgtcaggatgcctggaagtgagacactgaacaagcaagagctcattgcacaaaagagaaat

SEQ ID NO: 126108 - DNA, 599 bp, Homo sapiens
actgaaagaagacaaggtggcccactcacatcacacctattctgcacagtcctggaagtcttagccaaagcaattaagcaagagaaagaaataaaaggcattcaaataggaagacaggaagtcaamctatctctctttgcagatgatatgattttacacctagaaaaccccatagtctctgcccaatagctcattgatctgatatacaacttcagcaaaatttcaggatacaaaatcattccacaaaaatctgtagcatttctacataccaacaacatccaaggtgagaggcaaatcaagattgcaatcacatttacaatactcacaccaaaatttacctaggaatacagctaaccagggaggtgaaagatctctataacaagaattaaaaacgttgctgaaaaaaatcagagaggacacaaacatgaaaacattccatgctaatggataggaagaatcacctttgttagaatggccatactgcccaaggcaatttacagattaattactatttctatcaagcttccaaaggcattcttcagggaactaggaaaaactattctaaaattcatatggaaccaaaaaagagcccaaggcaa

SEQ ID NO: 126109 - DNA, 599 bp, Homo sapiens
actgaaagaagacaaggtggcccactcacatcacacctattctgcacagtcctggaagtcttagccaaagcaattaagcaagagaaagaaataaaaggcattcaaataggaagacaggaagtcaacctatctctctttgcagatgatatgattttacacctagaaaamcccatagtctctgcccaatagctcattgatctgatatacaacttcagcaaaatttcaggatacaaaatcattccacaaaaatctgtagcatttctacataccaacaacatccaaggtgagaggcaaatcaagattgcaatcacatttacaatactcacaccaaaatttacctaggaatacagctaaccagggaggtgaaagatctctataacaagaattaaaaacgttgctgaaaaaaatcagagaggacacaaacatgaaaacattccatgctaatggataggaagaatcacctttgttagaatggccatactgcccaaggcaatttacagattaattactatttctatcaagcttccaaaggcattcttcagggaactaggaaaaactattctaaaattcatatggaaccaaaaaagagcccaaggcaa

SEQ ID NO: 126110 - DNA, 599 bp, Homo sapiens
actgaaagaagacaaggtggcccactcacatcacacctattctgcacagtcctggaagtcttagccaaagcaattaagcaagagaaagaaataaaaggcattcaaataggaagacaggaagtcaacctatctctctttgcagatgatatgattttacacctagaaaaccccatagtctctgcccaatagctcattgatctgatatacaacttcagcaaaatttcaggatacaaaatcattccacaaaaatctgtagcatttctacataccaacaacatccaaggtgagaggcaaatcaagattgcaatcacatttacaatactcacaccaaaawttacctaggaatacagctaaccagggaggtgaaagatctctataacaagaattaaaaacgttgctgaaaaaaatcagagaggacacaaacatgaaaacattccatgctaatggataggaagaatcacctttgttagaatggccatactgcccaaggcaatttacagattaattactatttctatcaagcttccaaaggcattcttcagggaactaggaaaaactattctaaaattcatatggaaccaaaaaagagcccaaggcaa

SEQ ID NO: 126111 - DNA, 418 bp, Homo sapiens
aatcattccacaaaaatctgtagcatttctacataccaacaacatccaaggtgagaggcaaatcaagattgcaatcacatttacaatactcacaccaaaatttacctaggaatacagctaaccagggaggtgaaagatctctataacaagaattaaaaacgttgctgaaaaaaatcagagaggacacaaayatgaaaacattccatgctaatggataggaagaatcacctttgttagaatggccatactgcccaaggcaatttacagattaattactatttctatcaagcttccaaaggcattcttcagggaactaggaaaaactattctaaaattcatatggaaccaaaaaagagcccaaggcaatcctaagcagaaagaaaaaagccgggggcatcacatttcccaacttcaaatg

SEQ ID NO: 126112 - DNA, 586 bp, Homo sapiens
acttcagcaaaatttcaggatacaaaatcattccacaaaaatctgtagcatttctacataccaacaacatccaaggtgagaggcaaatcaagattgcaatcacatttacaatactcacaccaaaatttacctaggaatacagctaaccagggaggtgaaagatctctataacaagaattaaaaacgttgctgaaaaaaatcagagaggacacaaacatgaaaacattccatgctaatggataggaagaatcacctttgttagaatggccatactgcccaaggcaatttacagattaattactatttctatcaagcttccaaaggcattcttcagggaactaggaaaaactattctaaaattcatatggaaccaaaaaagagcccaaggcaatcctaagcagaaagaaaaaagccgggggcatcacatttcccaacttcaaatgatactatcaagctaaagtaacaaaaacaacttgrcactggtacagaaacagacacatataccaacgtagcagaatagaaaacccagaaataaagccacacatgtaaaactatctgatcttcaacaaagttgacaaaagcaaga

SEQ ID NO: 126113 - DNA, 574 bp, Homo sapiens
aggaaatggcaatggatggaagaactcagtgggttcaggaaactgaaataatggatataaatctccaatatatagaatacagagtgacaaagaggccaggacagttaatggtggggatggagtgggtgggtgatcagccataggcaaccttgaatgtcatggtctgtaggtaaaaacaataaatggtctcatatttttaaaatataaaatgtataaaatgatttcaaaagtcaccaggtgatagatgcaattctaaaaaaaatgtrgatctttagaaaggttattaaagcgactaaatgagcaagttccagattttaactgattctagaggtttggatataaaatgagatatttcatatttggcttgcttgtactgaacatttactgacagatgtgcttttcttctgaactaattctaccatgtgtgtgctaataaattttatgtaaaaacgtgtccacagtcaattacatctggtaaacgctaatttgaaacaaaagtcttctttgaacccttaacctggtaaacatttaaaatctccaaaaataatgtagaaatgcagcagttactacattt

SEQ ID NO: 126114 - DNA, 579 bp, Homo sapiens
gataatttactatgcatgaatcaattgactaatgtgtcaatgaaggacagatagcaagcaaacacctgcctactataatttattactcaatataaatgaaacttatcacattctctttttctgattaccagaaaaaaaaatccttttagttcattttggaagaaaattgaaacctacattaaaagcattataatttttggtaaaatatacccttgagcaaatatatgatatgaaaaatgttaattgtaagttggctgtcattcctacctaacrtgtagtttatctcaacacaaagctgagcagccaagcacaaagataatgctaattttttatagccattaatagttaatgctagaaaaactgtcatattttgttttaaaatattccctagaatgtagtatttcatatctatgacatttcataggaatacaaaaatgcatacctctcaacatttataacaacaacaaaatccttcaggtgtgatattttggcaaaaataaggaagaaagttccaacttttgaataaattaatctttagtactttttcttatagttgaaaaatgagacagaaaaattctt

SEQ ID NO: 126115 - DNA, 579 bp, Homo sapiens
gataatttactatgcatgaatcaattgactaatgtgtcaatgaaggacagatagcaagcaaacacctgcctactataatttattactcaatataaatgaaacttatcacattctctttttctgattaccagaaaaaaaaatccttttagttcattttggaagaaaattgaaacctacattaaaagcattataatttttggtaaaatatacccttgagcaaatatatgatatgaaaaatgttaattgtaagttggctgtcattcctacctaacgtgtagtttatctcaacacaaagctgagcagccaagcacaaagataatgctaattttttatagccattaatagttaatgctagaaaarctgtcatattttgttttaaaatattccctagaatgtagtatttcatatctatgacatttcataggaatacaaaaatgcatacctctcaacatttataacaacaacaaaatccttcaggtgtgatattttggcaaaaataaggaagaaagttccaacttttgaataaattaatctttagtactttttcttatagttgaaaaatgagacagaaaaattctt

SEQ ID NO: 126116 - DNA, 628 bp, Homo sapiens
gatcatggttccctcgaactcctgggctcaagcaatcctcccatctcagtctcccaaggagctgggactacaggtgtgtgtgacatcatgattggcttaatgtttaaatttttttgtagagacgggatatcacaatgttgcccaagctggtcttgaactcctggccttcaggaattctcctactttgggctcccaaagtgtttggatcacagatgtgagccactgcgcccagccttcgtccattttgtcatcaagacactcatcctggctgcttgtcctcattgtgtccccagaagaaacaaagtgaaggataacagtaaaagcaccaaagaaacccacctagggcagccccaagagcaaaggtggagagcaccagtgagaaggcatgactgttccctcttccaggctgttccagcaatgcttagccytgcctgactccgcaaattacctgcccccagaagccaagaaactgccctctgcttgaacagcaagttcccgatcccccactctgcatgaccatgccccccttgaatcttggattccctattatccttcccacttgttaccagaacaaatttggaccagggacatctaactcaaagctctcattcactctttctcctgcacc

SEQ ID NO: 126117 - DNA, 637 bp, Homo sapiens
actactcagccataaaaaggagcaaaataatgtcattcacaacaacctggatgaagttggagaccattatgctacatgaagtaactcagaaatggaaagccaaacatcatatgttctcactcataagtgggagttaatctataaggacacagaggcataagaatgatacaatgaactttgggggcatgggagaatgggtgggagtggggtaagggataaaatatcacayattgggtacagggtacattgcttgggtgatgggtgcaccagaatctcaggaaacaccactaaagagtttatccattgaaccaaataccacctgtttccccaaatctattgaattttttaaaaaaatacaactattttcttccaatctatcattttgcacttgacttgttcatataaatatatattttgctatgcaaaatcttaataatcatttatgttcttaaaattcagcttttagtttagttgttttaacaattagcttgacagcttctgaatttcttctcttgcttaagaaccgtggcacagttgtgcagctgctaattaaaggaaatcacacttttctcaaatctccaacaaaaaaatttcaaaattcttgcttaggcaaacaggaaaccaaatgtagtattga

SEQ ID NO: 126118 - DNA, 631 bp, Homo sapiens
cacagctcatttgttaccactgtctaataaaatgtcagacagagaaataaaatacccatgctcctgttggtctggatatcacaggacattccatcttgagtcttaataaggtagaaagaacagaacaagaatcttcatattccaaattatagcctttggagtatttccatgtaccaagcaagacaggaaatctctgtctagatatgtataacataacagagtgacttaatgtacatgattccctgaagactaaagcatcaaaaatcaggaatctcctgaatctaaacaaattgggttggttaaagaagtcccatggggaccaggccyggtgactcacgcctgtaatcccagcactttaggaggctgaggcgggtggattacccgaggtcgggagttcgagaccaccctgaccaacatggagaaaccccatctctactaaaaatacaaatattagctgggcatggtggcacttgcctgtaatcctggctactcgggaggctgaggcaggaaaatctcttgaacttgggaggcagaggttgcagtgaaccgagatcgtgctattgcactccagcctgggcaacaagagtgaaactccgtctcaaaaaaaaaaaaaaaaagaatcccacaggga

SEQ ID NO: 126119 - DNA, 631 bp, Homo sapiens
cacagctcatttgttaccactgtctaataaaatgtcagacagagaaataaaatacccatgctcctgttggtctggatatcacaggacattccatcttgagtcttaataaggtagaaagaacagaacaagaatcttcatattccaaattatagcctttggagtatttccatgtaccaagcaagacaggaaatctctgtctagatatgtataacataacagagtgacttaatgtacatgattccctgaagactaaagcatcaaaaatcaggaatctcctgaatctaaacaaattgggttggttaaagaagtcccatggggaccaggcctggtgactcacgcctgtaatcccagcactttaggaggctgaggcgggtggattacccgaggtcgggagttcgagaccaccctgaccaacatggagaaaccccrtctctactaaaaatacaaatattagctgggcatggtggcacttgcctgtaatcctggctactcgggaggctgaggcaggaaaatctcttgaacttgggaggcagaggttgcagtgaaccgagatcgtgctattgcactccagcctgggcaacaagagtgaaactccgtctcaaaaaaaaaaaaaaaaagaatcccacaggga

SEQ ID NO: 126120 - DNA, 632 bp, Homo sapiens
aattaaacaacatacatgttgaagggcttagcggctcatagtttataggtgttctatacttctcttattccatcttctgtctcactttgctacctctatgttagggtcaaaaggacctgttttaggagatggctggctgtgtctcacttgtgttggttctgtgcagcaaaaccacactgacaaatcagtgtgaggatggtactgctttaagcatgtgctgtgccccgcagarcacaagatcaggccaggtgtgccaccacactcaaaggcttcatgcctactaccatggctggaagcaatcatctcatcagcttttaaataacaaattcgtagattgtgaccctcttggaaccctaaatgctcattctaatgcttcacttatattacatttgctgtccttaggagggaaccttgcaaattaaaagctcaagtcaaatcatttgtcttaaggtagagtggggaagaagacagcccagtccactctatcactttaccagacttaacaaacactgctttataagtgagtaggtaaatttaaacttgtaaaaatgactttatgcataaatttataataaaagaataaagcacaagggggggcttattttagaatgaaaataaatcggctttacaag

SEQ ID NO: 126121 - DNA, 632 bp, Homo sapiens
aattaaacaacatacatgttgaagggcttagcggctcatagtttataggtgttctatacttctcttattccatcttctgtctcactttgctacctctatgttagggtcaaaaggacctgttttaggagatggctggctgtgtctcacttgtgttggttctgtgcagcaaaaccacactgacaaatcagtgtgaggatggtactgctttaagcatgtgctgtgccccgcagaacacaagatcaggccaggtgtgccaccacactcaaaggcttcatgcctactaccatggctggaagcaatcatctcatcagcttttaaataacaaattcgtagattgtgaccctcttggaaccctaaatgctcattctaatgcttcacttatattacatttgctgtccttaggagggaaccttgcaaattaaaagctcaagtcaaatcatttgtcttaaggtagagtggggaagaagacagcccagtccactctatcactttaccagacttaacaaacactgctttataagtgagtaggyaaatttaaacttgtaaaaatgactttatgcataaatttataataaaagaataaagcacaagggggggcttattttagaatgaaaataaatcggctttacaag

SEQ ID NO: 126122 - DNA, 608 bp, Homo sapiens
tagcttgaatttaggaggtggaggttgcagtgagctgagatcatgccactgaactccagcttgggtgacagagtgagattctttctcaaaaagaaaaaaatatatattatataatatatatttattatatataatatatataataaatatataatatattatatataattaatatatataatatattatatatayatatataagctgggcacagtggcatgcacctatagttctagctactcaggaggctgaggagggaggatcacttgagcccaggagtttcaagttacagtgagctatgatcattctattgcacccccagcctgggtgacagagctagaccctgtcttttttttttttaaaacaaaacaaaacaaaacaaaacaaaacaaaacaaaaaaccgcacacataaaaaactaagaagataagaatagcatggaattgtattgtgagaaactatcttgggtgttttaaactagtactggataaattgcattaatctttatctactaaaactattaatacaaaacggtaatgaattcacttattaccttctagaatcattattaatccagaactcaaataacttaaaaacacagcctactgc

SEQ ID NO: 126123 - DNA, 582 bp, Homo sapiens
catgccactgtactgcagcctaggtgatagagagatgaagtggaatatatgattggataaggacttacagggaagagggtggtagtttacatattaactgtggcttccctggaactgcttaatgtaaatacggatctttctataatctggattatgcatactaatgctttagtttctctaaaatcaatgacctaaattgagagaatactgattattaaaagaarataatgtcaacaaagatgtcagaaatgttattaaggtgaaattgtaaccagaactcacttttgaaacaaaacaggtactgaactagtgtttattttttaacagccaagtcctaatttactatgtatattttacttttatttttggaaaacatatcaaagtatacaagcttgcaataaaaagttctactatattaggaagtcagagtttaggaggtacacaaaggcattttgacaaaaatgcacagatggtagatacactagaatattttagctgtattgagtgaagctacattgaattactaacatctgaggatatatatgaaggcacaaaaatgatcctaacatctttctgtaggat

SEQ ID NO: 126124 - DNA, 557 bp, Homo sapiens
tccaacgtctgtgtgagtttgggtgtgtctggggattttatggccttagaagggcggaagtacttgctgattggtccatgagtggccacgtgcggccaggaaaaagcaccataaattctcattccaggctacgaactcaatcctgaattggcagccgggctcctaggattcaggcagtccctggcttgaaagtggagtttcactggggacctgcccctctctgctcaraaacgtgtctgtctcctgccatcaacatgctgtccatggcacccaggctcttcctgctaaagtgtgcctgcaggcccggctgactgccttcatcacttccccagcttccctcccatactcgtctgtgcccaaagtctagagggggccaaggtggtggtgggggctgaccgagtcagtgctacctcaagggcgtgcacacccatctgagttgccacaatgcccgggcttttacacatctttgctgtgaaattggagcaggtgccaggagtgtggagaggccaggttgctggagcaggcacttctgagcctatgggggctgggggacttcc

SEQ ID NO: 126125 - DNA, 557 bp, Homo sapiens
tccaacgtctgtgtgagtttgggtgtgtctggggattttatggccttagaagggcggaagtacttgctgattggtccatgagtggccacgtgcggccaggaaaaagcaccataaattctcattccaggctacgaactcaatcctgaattggcagccgggctcctaggattcaggcagtccctggcttgaaagtggagtttcactggggacctgcccctctctgctcagaaacgtgtctgtctcctgccatcaacatgctgtccatggcacccaggctcttcctgctaaagtgtgcctgcaggcccggctgactgccytcatcacttccccagcttccctcccatactcgtctgtgcccaaagtctagagggggccaaggtggtggtgggggctgaccgagtcagtgctacctcaagggcgtgcacacccatctgagttgccacaatgcccgggcttttacacatctttgctgtgaaattggagcaggtgccaggagtgtggagaggccaggttgctggagcaggcacttctgagcctatgggggctgggggacttcc

SEQ ID NO: 126126 - DNA, 557 bp, Homo sapiens
tccaacgtctgtgtgagtttgggtgtgtctggggattttatggccttagaagggcggaagtacttgctgattggtccatgagtggccacgtgcggccaggaaaaagcaccataaattctcattccaggctacgaactcaatcctgaattggcagccgggctcctaggattcaggcagtccctggcttgaaagtggagtttcactggggacctgcccctctctgctcagaaacgtgtctgtctcctgccatcaacatgctgtccatggcacccaggctcttcctgctaaagtgtgcctgcaggcccggctgactgccttcatcacttccccagcttccctcccatactcgtctgtgcccaaagtctagagggggccaaggtggtggtgggggctgaccgagtcagtgctacctcaagrgcgtgcacacccatctgagttgccacaatgcccgggcttttacacatctttgctgtgaaattggagcaggtgccaggagtgtggagaggccaggttgctggagcaggcacttctgagcctatgggggctgggggacttcc

SEQ ID NO: 126127 - DNA, 668 bp, Homo sapiens
tttcagatccatctcttaaagggaataataacaaaggataataaacatattgttaaaccaccatggaatatttgtaactttatttaatccagattttcctgaagtaatcttaccatagaaatctatattaaagtaacatgtttctaaggattccctaaaagtacccatgacataaccaaattctatatggttttatttgaatatatatatgaagaaactttttcaagagaaaaagcttgagtctttctaaaatattcaagcagcttgagtgtttctaaaatattcaagcagcttgacgactgttttcaaatactcccttgaattgtatttatagtttttgaytgtttctaataattcataactgttgatcatgatctaaattggcaatcctaattttggattatacaattggacataaaaatatatgttttggagagacattttctatctgtaacttggcatatactgctgtattttaaagtttaagtggtgttattaagggtgctgactaggatcactattctgcaatgtgaaactgttatgagcaggaatgaaatacagtttttaaagcagagtgttctattttttcaacaaccaacagattggtaaaatggaacattttgtaaaataccctccacaatctaagggcaaggaacacccagaggagt

SEQ ID NO: 126128 - DNA, 520 bp, Homo sapiens
gttatccgcctgccttggcctcccaaagtcctagaattacrggcgtgagccacagtgcccaggcttttttttttctttgacggagcctccctctgtcaccaggctggataatggcgctatctgggctcactgcaacctccgcctcctggattccaagtagctgggattacaggtatgcaccaccatccccagctaattgttttgtattttttagtagagatggggtttcaccacgttggccaggctggtctcgaacttctgacctcaggtgatccacctgtcttgctctcccaaagtgctgggattataggtgtgagccactgcacctggcccctgcacaccattcttctgccaaaaccaccatccatgagcttatagaatacctttttactctcatggtataatgcacagcactgattttgatcaaggaactaacttttatgtataatccatacactatcagcaacaaaatccctttcatcttagtagctttcattacataacaacctacattctataa

SEQ ID NO: 126129 - DNA, 520 bp, Homo sapiens
gttatccgcctgccttggcctcccaaagtcctagaattacgggcgtgagccacagtgcccaggcttttttttttctttgacggagcctccctstgtcaccaggctggataatggcgctatctgggctcactgcaacctccgcctcctggattccaagtagctgggattacaggtatgcaccaccatccccagctaattgttttgtattttttagtagagatggggtttcaccacgttggccaggctggtctcgaacttctgacctcaggtgatccacctgtcttgctctcccaaagtgctgggattataggtgtgagccactgcacctggcccctgcacaccattcttctgccaaaaccaccatccatgagcttatagaatacctttttactctcatggtataatgcacagcactgattttgatcaaggaactaacttttatgtataatccatacactatcagcaacaaaatccctttcatcttagtagctttcattacataacaacctacattctataa

SEQ ID NO: 126130 - DNA, 520 bp, Homo sapiens
gttatccgcctgccttggcctcccaaagtcctagaattacgggcgtgagccacagtgcccaggcttttttttttctttgacggagcctccctctgtcaccaggctggataatggcgctatctgggctcactgcaacctccgcctcctggattccaagtagctgggattacaggtatgcaccaccatccccagctaattgttttgtattttttagtagagatggggtttcaccacgttggccaggctggtctcgaacttctgacctcaggtgatccacctgtctygctctcccaaagtgctgggattataggtgtgagccactgcacctggcccctgcacaccattcttctgccaaaaccaccatccatgagcttatagaatacctttttactctcatggtataatgcacagcactgattttgatcaaggaactaacttttatgtataatccatacactatcagcaacaaaatccctttcatcttagtagctttcattacataacaacctacattctataa

SEQ ID NO: 126131 - DNA, 533 bp, Homo sapiens
taagacatactttgaattatatctgcactttaaaatttgttgatatttgctttataacaagcatgtatttgctttaggtaaaygttcttttcatacttgaaaaaagttaactttgtcattgttgggttcactgttttatatatgtgaattggattgagttttgtttttgatgtttaagttaatccaaagctgtactgatttgtgtgtgtttgttttctatcaatcacggagagaagcatgttaaagtctcacttggcattttaaaacattactaattttagttctgtccatttttgcttttgtattttgatactatttcattaggtacacacacaaattgagacactaaatcttcgtatcttggtgtattggcattgtctaattttaaaagacctccttcatatatagtaatgctttgcctttttttttgccttgaggtctcctttagctgcaccaaggggcttttgacaagcattcatgtagtacacatttttccatcccttaactttcaaccttctgggtttttactttta

SEQ ID NO: 126132 - DNA, 533 bp, Homo sapiens
taagacatactttgaattatatctgcactttaaaatttgttgatatttgctttataacaagcatgtatttgctttaggtaaacgttcttttcatacttgaaaaaagttaactttgtcattgttgggttcactgttttatatatgtgaattggattgagttttgtttttgatgtttaagttaatccaaagctgtactgatttgtgtgtgtttgttttctatcaatcackgagagaagcatgttaaagtctcacttggcattttaaaacattactaattttagttctgtccatttttgcttttgtattttgatactatttcattaggtacacacacaaattgagacactaaatcttcgtatcttggtgtattggcattgtctaattttaaaagacctccttcatatatagtaatgctttgcctttttttttgccttgaggtctcctttagctgcaccaaggggcttttgacaagcattcatgtagtacacatttttccatcccttaactttcaaccttctgggtttttactttta

SEQ ID NO: 126133 - DNA, 615 bp, Homo sapiens
aacaatcctactctatcttgtttttgtctgcttagtaccccaccactttgttgtgattaaggctctacccccttggcaaaagtactgaacatgtcacrtaactgtcctggggatattaactgagcacgcccattactgtatcttaataccccagactctactttcatttggtgtgtttgtgtacattgaaaactaagaatctgacagagtagggactttcatgatttctttttttttaatttcaacttttattttaggtttagggggtacatgtgcagatttgttacatgggcgtattgtgtgatgctgaagtttgccatatgaatgattccgtcacccaggtagtgaacatagaacccaataggtagtttttcagccctttccctcttccctttctcccctccctagtaatctgcagtatttattgttgctctctgtgtgtccgtaagtactcgatatttagctcccacttataagtaagaatatatagtatttggttttctgttcctgtgttaattcacttaggataatggcctctagctgcatccatgttgctgcaaaggacacagttttttttctttttgtggctgcataatattccatggtgtgtatgta

SEQ ID NO: 126134 - DNA, 615 bp, Homo sapiens
aacaatcctactctatcttgtttttgtctgcttagtaccccaccactttgttgtgattaaggctctacccccttggcaaaagtactgaacatgtcacgtaactgtcctggggatattaactgagcacgcccattactgtatcttaataccccagactctactttcatttggtgtgtttgtgtacattgaaaactaagaatctgacagagtagggactttcatgatttctttttttttaatttcaacttttattttaggtttagggggtacatgtgcagatttgttacatgggcgtattgtgtgatgctgaagtttgccatatgaatgattccgtcacccaggtagtgaacatagaacccaataggtagtttttcagccctttccctcttccctttctcccctccctagtaatctgcagtatttattgttgctctctgtgtgtccgtaagtactcgatatttagctcccacttataagtaagaatatatagtatttgkttttctgttcctgtgttaattcacttaggataatggcctctagctgcatccatgttgctgcaaaggacacagttttttttctttttgtggctgcataatattccatggtgtgtatgta

SEQ ID NO: 126135 - DNA, 552 bp, Homo sapiens
ggtcatggtatgcaacagttttaatagacacctggatttaacttgctgatttttacatacaatttaygtactgtattgcatccatattcatcagtgaaattctttagagtgttctttttattctgtctttgtcaggtctgggaagtaaggttatgctagctttgtaaattgaattgggaagctttccatcttttgctatggtcagaaatgttttgaataacataaggattatctgttcactgaaagttagatagatttcagctgtaaaaccatctgggcctgacacatattttagtaactagataatttttgaagagggtttgtggtatagtgggaagaaaactatctttgtagtcagagccttatatttgatttcctgtccaaagcattgttgactgtgtgacttggataagggacttcttttttttttttcctgtgaagtagtgatctacctgttacctacctacctattttggagggaagactacttccttggaaactttattaatgagaaacattaagtaaggagctgagtagtatctgacacgaagt

SEQ ID NO: 126136 - DNA, 661 bp, Homo sapiens
gtctctagcactcacttgccaggtctcccctgtgccattaaataactaactttagcaatgcaaattttttttcaagacgaattatgttcccatgtgtaaagcataaagactgtgtctgcctcgtggaacatgcatattcacagctgtaggctcacatccttgcagaaagcatcaccaatgaggatttcccattttcttgtttttaggtgactccaagaaacctgagggtatttagactgatgaatgatgtgcttgactccagtcttgtgcctgcccggctccagagtttatctgctttctgtttgttttctgtgctcctattaggttgttgttmgttacattctgatgtttgtagtttggggaaatctgtatctttgttatttatgttatcaataatgtgacctgggccttcctcagcaatgttccaactgttcccaggtcctgaatcactaattatgcagatgaacagattgtggaaactctttccttatggctgcattctggaggagttgtttttattaaattgccagtgtctcgaattataattaggtactggcccatatttatagcatttctcttctctctgtctctctctcctcccgccccccaccctgtcctctcttcacttttctcgctcccttcatcatatcctctccttttc

SEQ ID NO: 126137 - DNA, 465 bp, Homo sapiens
tttggtcaataggctggcactaggaaatgggtacttttcaggatccgcagttgtgtctgcaataggtgcataggaagatgtccttccttctgggtccctgagtgagctcctactgggtcactgaatgagttcctggacaggaaggactggccctgaaacatagctgagaggggctaaaactagtcataggggtgtttcaggcttcacagtttagactgaggtctgcaagcctctctctaggggcacaggcatatatgcttttataggtcctgggggacagaattgcccctagactgtggctgaatagagtcaggccacaggwtgcttcaggatctgcagtgagattcaggctggtgggccttcctctaagagaagcatggaatggtgtgtctcctggcaggtccatgtgagagcagcactaatctatggctagagctaaaaggggctggaacttagttaccaagc

SEQ ID NO: 126138 - DNA, 465 bp, Homo sapiens
tttggtcaataggctggcactaggaaatgggtacttttcaggatccgcagttgtgtctgcaataggtgcataggaagatgtccttccttctgggtccctgagtgagctcctactgggtcactgaatgagttcctggacaggaaggactggccctgaaacatagctgagaggggctaaaactagtcataggggtgtttcaggcttcacagtttagactgaggtctgcaagcctctctctaggggcacaggcatatatgcttttataggtcctgggggacagaattgcccctagactgtggctgaatagagtcaggccacaggatgcttcaggatctgcagtgagattcaggctggtgggccttcctctaagagaagcatggaatggtgtgtctcctggcaggtccatgtgagagcagcactaatctatgrctagagctaaaaggggctggaacttagttaccaagc

SEQ ID NO: 126139 - DNA, 567 bp, Homo sapiens
attaacattgtcgcctcccacccccgccccctccaccccttgcaaggagcagtcttgcgcgccgatgatcaagatgatcaaaggtcagtttctggacaacataagtaaataaacttatctagataaacttctgcacgttcttttgcacctacttctcaccctctgcctcagggtwagagaattacctgccttcagtttttattctctcctgaagctttgaaaaacctcccggccttccaagaaggtttgtgtctttccctataacttttcttataacttttcccatcatcctgacccatctcctacactttcccagtgccatagcctggaaactctcaccaggcagtaagccgaggtaatctttggggtccctggtttgtatctcatctcataggaatgactagatcattgtgttgtgtttcctaatgctcagtggcttgaaaagtattgactcatattttgttcagtttttagttgtttcatgtaaaatagtattttgggtctttgttactttatcttggtcagatgcagacgtttcctaagctatttaaatttcttttctaaaaa

SEQ ID NO: 126140 - DNA, 586 bp, Homo sapiens
taggtgagtattaaatgaaattgtgtatgtcaagtgcttaacagagtgtcaaggtccaaggtaagtactcttattgttaatgttattatcactattattatttttaatgattgtgggattcattggtaaacataggtgtcgaattttgaattaagtgcaagagaactaatgatattaaaagggtgagataagaaataaaattcattctttctaatgttgtatagcactattttattttattttgcacagccatcgtttctctttccttctgtggccttggatctcctttgagaaaccacactttcctctttcttaattacagagtttggatggtttcatcaattatrtcccatgcctttgaccacatagtgatggttcaggaatggggttagtcactcagttgggaccaataagacatttgcaagggtagttttatttttctctcttcctgatacagaagagtgtagatgtgagtctacacaaggagctataaccatctgggtaccacatggagtttcaaaatggacccagttcagagggaatagagttgaagatgaacctagtgacaccctgtgaagtgggaatc

SEQ ID NO: 126141 - DNA, 586 bp, Homo sapiens
taggtgagtattaaatgaaattgtgtatgtcaagtgcttaacagagtgtcaaggtccaaggtaagtactcttattgttaatgttattatcactattattatttttaatgattgtgggattcattggtaaacataggtgtcgaattttgaattaagtgcaagagaactaatgatattaaaagggtgagataagaaataaaattcattctttctaatgttgtatagcactattttattttattttgcacagccatcgtttctctttccttctgtggccttggatctcctttgagaaaccacactttcctctttcttaattacagagtttggatggtttcatcaattatatcccatgcctttgaccacatagtgatggttcaggaatggggttagtcactcagttgggaccaataagacatttgcaagggtagttttatttttctctcttcctgayacagaagagtgtagatgtgagtctacacaaggagctataaccatctgggtaccacatggagtttcaaaatggacccagttcagagggaatagagttgaagatgaacctagtgacaccctgtgaagtgggaatc

SEQ ID NO: 126142 - DNA, 543 bp, Homo sapiens
aagttgctaggaataatggactagtggtgttaactgaggcaatggaagaggaaaaatctctacagcttattgtgagatgagttatttcagtcccaaatgagaaatgacatttcatgagaaggtcggtgagtgctaatagaccttcacacaatgtagattttctaacttatatttgatgaggcaaggaccacccagagccaacctgtgtgttgaagaaagaagctctcagcatctcagaataaagaagttctcagtaggacacttgctattgaaagatcggccctgaatttgagggtctggcataattcaaattatgagtggccattataataagatgattggcagtttcgaaaggcacagaagagacraccatgaaaccgatttacaaacattaaggtacaagaagaattctccttctcttctcatcataactcctcctctatacctctccaaaggtctcagatcatccttttttttaactggtaaggaggaagaggtgtaaggaatataataatatcaagcttctctcttactggagttccc

SEQ ID NO: 126143 - DNA, 654 bp, Homo sapiens
attaaagcagagagtgtttttgcatcccaattcagagaaaaaaaaaacacacacacacacataacaagcatctttgtgtctgcttgtatttggttgtcacggataacgagaagacaaaaccctgtcctaaaggagttaccagttaatagatgaagaagatttaaaaatagtaactttatgaatagggcaagcatggagttcggtggaagcttgaggctgagagaaggcttcctggaggaggcaatgcctatgctgaatggtaaggcmtaagtaggagttatccaaatgaagaaggaagatgttgcaggcagaaggaaaaccatgagcacaaaatgaaggacaaaaagtggaagccagtgttagagagtggacggaggccagatccaggagagtcctgtgtgccaagttaagttgtttagactttatgtcctatgggcactgaagagccattgaaggatattagccaggggtgtggaaccgtcagatttgcttagagaaagatgagtctggctgctcatccaagaaagctaaactctgaaaatggtggttagcttttactgtaggcacgtttcctttttctcatgtagagtcaaaaataaatagtgtgctctgtgtgatctggaccataacattttttcattgaaaaattaatgc

SEQ ID NO: 126144 - DNA, 592 bp, Homo sapiens
aacttggcacttcatcattaactatgacaccataagattgtaaatgttctttaatccccaaattatacatcctatgaggtcattattattatcatcattattcatgttacttccagatgctcgccaagcaattacagtaactgtctcacttctgatgaaagagagagctattcaagctggagaatatgtacttcagaattgacaatactatgtaactgcattagctaggtttcttctcttsgcagatctagggatttcactaatacttggaaagtagccacttgggtattttataaggggagggggaaactactgaacatagtaggcaactattagcaaaggcaaatttcctaccaaaataaaggtaggcagttaaaatgagatattatgaaaagtgggtttttgtggtctataaaatattgtacagtgttaactgctattgcagtgatggttgtgattgtcatggcttgttagtacctctaggaccctgggaaacctgtgaggtttagagacagagtgaatgctcaggatccacaagatatatcataggctgtgtggaggttcctggaggcctttaggatgccaataaact

SEQ ID NO: 126145 - DNA, 592 bp, Homo sapiens
aacttggcacttcatcattaactatgacaccataagattgtaaatgttctttaatccccaaattatacatcctatgaggtcattattattatcatcattattcatgttacttccagatgctcgccaagcaattacagtaactgtctcacttctgatgaaagagagagctattcaagctggagaatatgtacttcagaattgacaatactatgtaactgcattagctaggtttcttctcttggcagatctagggatttcactaatacytggaaagtagccacttgggtattttataaggggagggggaaactactgaacatagtaggcaactattagcaaaggcaaatttcctaccaaaataaaggtaggcagttaaaatgagatattatgaaaagtgggtttttgtggtctataaaatattgtacagtgttaactgctattgcagtgatggttgtgattgtcatggcttgttagtacctctaggaccctgggaaacctgtgaggtttagagacagagtgaatgctcaggatccacaagatatatcataggctgtgtggaggttcctggaggcctttaggatgccaataaact

SEQ ID NO: 126146 - DNA, 621 bp, Homo sapiens
tttgttgaaaaagacagccttttctcttttgaattgtctttaaaccttgtcaaaaatctattgccgtttctctgagggtctgtttctggactctattctgctatgtgtctgtcccttcatcaatactccattttttttattacygtggctttaaggtaaatcttaaaatgtggtagtgtgatttctccaactttgttcttgttttcaaattcattttggctattctattctgggtctttgtctttccatataaattttactatctgcttgtccatatctacaaaaagtcttgctgggatttttttgtgttaattctacagattgatttggagggggtaggaattgacatctttagcatgttaagtcactcaatctataaggtatgagaattttatgtctctgtttacttaggtcttattttatctctttgattagcctttattagctttcagcatgaagatcgcatatactttatatgatttacatctgttgtattttttgtaactattgcaaatggcattatattctcttttttaaaattagagatgaggtttcactatgttgcccagactgaagtgcagtggctattcacagatgtaatcatagcacactacagaccca

SEQ ID NO: 126147 - DNA, 621 bp, Homo sapiens
tttgttgaaaaagacagccttttctcttttgaattgtctttaaaccttgtcaaaaatctattgccgtttctctgagggtctgtttctggactctattctgctatgtgtctgtcccttcatcaatactccattttttttattaccgtggctttaaggtaaatcttaaaatgtggtagtgtgatttctccaactttgttcttgttttcaaattcattttggctattctattctgggtctttgtctttccatataaattttactatctgcttgtccatatctacaaaaagtcttgctgggatttttttgtgttaattctacagattgatttggagggggtaggaattgrcatctttagcatgttaagtcactcaatctataaggtatgagaattttatgtctctgtttacttaggtcttattttatctctttgattagcctttattagctttcagcatgaagatcgcatatactttatatgatttacatctgttgtattttttgtaactattgcaaatggcattatattctcttttttaaaattagagatgaggtttcactatgttgcccagactgaagtgcagtggctattcacagatgtaatcatagcacactacagaccca

SEQ ID NO: 126148 - DNA, 461 bp, Homo sapiens
ggacccataaatacactgggcctgctgwaagatgaacctcagctaaaactgaattgatcacttgaactccataaacccatatgctcactggttggtcacaatgatgttttggatctgctgaaattagtgtaagtttggagctgatgttcaataatccctaaaatttctgattattttcttctccccagtgcaaagttaccctcataaaaagccacaggctcccctatgagaaaatctgagagaaagattaacagtataaattttctgtcgtgtatcagggtccttcttcaggagaacccaaccttccccttattcaaggagttggggtctgaaaattcatctaaacatcggctcatgtctggaaattgattgagggaccattactcagtttttagattcaggctagatttttattcacttgacctaaaagttttctgcttatacagatcaaatgaaatgta

SEQ ID NO: 126149 - DNA, 461 bp, Homo sapiens
ggacccataaatacactgggcctgctgtaagatgaacctcagctaaaactgaattgatcacttgaactccataarcccatatgctcactggttggtcacaatgatgttttggatctgctgaaattagtgtaagtttggagctgatgttcaataatccctaaaatttctgattattttcttctccccagtgcaaagttaccctcataaaaagccacaggctcccctatgagaaaatctgagagaaagattaacagtataaattttctgtcgtgtatcagggtccttcttcaggagaacccaaccttccccttattcaaggagttggggtctgaaaattcatctaaacatcggctcatgtctggaaattgattgagggaccattactcagtttttagattcaggctagatttttattcacttgacctaaaagttttctgcttatacagatcaaatgaaatgta

SEQ ID NO: 126150 - DNA, 461 bp, Homo sapiens
ggacccataaatacactgggcctgctgtaagatgaacctcagctaaaactgaattgatcacttgaactccataaacccatatgctcactggttggtcacaatgatgttttggatctgctgaaattagtgtaagtttggagctgatgttcaataatccctaaaatttctgattattttcttctccccagtgcaaagttaccctcataaaaagccacaggctcccctatgagaaaatctgagagaaagattaacagtataaattttctgtcgtgtatcagggtccttcttcaggagaacccaacyttccccttattcaaggagttggggtctgaaaattcatctaaacatcggctcatgtctggaaattgattgagggaccattactcagtttttagattcaggctagatttttattcacttgacctaaaagttttctgcttatacagatcaaatgaaatgta

SEQ ID NO: 126151 - DNA, 614 bp, Homo sapiens
taatatgatcatatgattatttacttttattgttaatatgatgaattacatggatgattataaatgtaaaatcaactgtgcattccaacttggccatgatgtgttatcttttttatataktcttgaatttgacttataaatttgctgtgctttttagcatttgtgttcatgaggaagatggaccaattttctttcttgatgaattttagtaacaaaattatattggtctcataagcaagctccttctttttctattttcgtgaagagtttgtgtacgactgatgttatttcttccttaaatgtttggaagattttactggtaaaggtacttacttaggcttatgaaaaaatgctcaccatcactggccatcagagaaaggcaaatcaaaaccacaatgagagatcatctcacaccagttagaatggcaatcattaaaaagtcaggaaacaacacgtgctggagaggatgtggagaaataggaacacttttacactgttggtgggagtgtaaactagttcaaccattgtggaagtcagtgtggcgattcctcaggaatctggaactagaaataccatttgacccagccatcccattactgggtatatacccaaag

SEQ ID NO: 126152 - DNA, 607 bp, Homo sapiens
tttatctctccaagggtcctgaacatttttcctctattctgatgtcacaatctccaaagtgataagaaacctgcattcaagagcacctgttagagctttatagttgattataaaaccagcttctaaagaggaccaaaacaagacaacaattgttgatgggtgacaaaaagtcttagggtggccatagtcaaagacacagttgacaatctgttacctctgtgacacacaataatttaacataaaaattataattattactgataatgtacactgagatatcagaattataggagtttcccataactttggtacacataccartaacatatttatacaaatataacccaaagtaagccaaacaccattttatatttgacaatgctttttgtatgatttttgtaccacataagtgaaaattcacctttacattagtgtactattaatgttaaacccaattcttaataaaaccttatagacatatctacccaattttaatgtttgatcataaggtaagattctcataaaccttttataatcttttactatttttgttgaagaggagtttagtgttctaagagaaacctgttgtgcttttatttcagtgttc

SEQ ID NO: 126153 - DNA, 571 bp, Homo sapiens
ttgggctgttgactgaaaagtagatgatttagtccagttctcttcccattaccgctctaattagagtatatctctatgatttcagagtttcagctttaaaaaattttaatcactctgcctataactctatgaccagctaatggagtaaataatcattttgaatttctgcaagcagcctttaataatctgaatcagaatcctttaagaattctgaaaccccctcatggtcagacagaataaggacttcttggagtttcagagcagcagagacagatgttaaccaatcagcttgatgtgattgaggatctactatgtacccagtactgtgactggttctctctgtgacagaggtattgattgactgactgattcattcattcatccattcatttaataatcttgtattgagcrcttaatatgctcctgatactgttctaaatgaagggcatgtgatagtcacaagacggagaacgtgtcagtcctcattttgccttgtcttggtgaggagataaagctgtttgaccagacactgttcataaacaatgctcaaaagcatttaagaaattgctag

SEQ ID NO: 126154 - DNA, 596 bp, Homo sapiens
tcattggtttcttatttagcttggtgaggtcatgtttaccttgatgttcttataacttgcatacatttgtcaatgtttgggaattgaaaagtcaggtacttatttcagtcttcacagtattgagcttgtttgtagccatccttcttgataaggctttccatgtattcaaaaagaattaagtattgttatctaagactatgatgtttccagcttcatgagcactacgagttaccttaagcacacctactgcaactcttagtgacttctagaggccctaccttggtggatttgggtaagtttcaggagacttatctggttgccggtgagagtctctcactcttccctctcttcccccaatgagaaggtatttctctccacgctgagctgcctggagttggtggaggggtaacatgagcactcctgtggcctctacagctggcactgcactggktcacacctgaatccactacagtattgggacttgcccaaggcccatggcaactactacctgactaatactgacgtgtattcaaggcctaagggctctttagtcagcaggtggtgaatcctgccaggactgggttctagctttcagg

SEQ ID NO: 126155 - DNA, 501 bp, Homo sapiens
gaattcaaaaggttgattattaagctgctcaagaagatatcagagaaaggtgaaaaccaacttaaataaattgaaaaaacaatacagaatatggatgaaaaattctccagagaaatagatattataaagaaaaaacaatcataactgtaaataaaagacactggcaagtgtcaacaatagactagaacgatagaagaaagaacttaagagctcaaagacaaggctttccaattaagccaatcagataaagacaaagaaaaaaaaaagaacaaagcctccaagaaattttggattatgttaagtagccaaacctaagaataattggtgtccctgagaaagaagagaaatctaaaagtttgaaaaactcaaatgaggaaaaaatcaagtaaaacttccccagccttgctagagatctatacatccaaatacaagatgctcaaagaacacctgrgaaattcattgcaaaaggatcatcaccttggtacatagtcatcaggttat

SEQ ID NO: 126156 - DNA, 590 bp, Homo sapiens
gtaccaactagatctcgggttacgtgacctcactggctctatataacaactagacttcaaatatctttgaagaaaaattgccttaaacataagttttggtcagctaacactagatgcatttgtgttgcataatctaatttttaaaatcctggtgttttgtttctctcagtcatgtcgtatcaatttacatttttaaaagttttctgtgtgaattaagaacagtgttatttagcaaaggcaattatttgattacctcccctgtgctagtcacagcctggcatttaatctggctgaggcccacagaccgcaatttgaacaatcagggtagttttctgtaattgcaataaatcatatcataaaccatgacagacttttcctcccacagactttytttttcagtagcagttaactcctgaactcctcatgaaggccagacttctctgtagtctagtgaatttcatagtcagctggcacaacataaagacggagtttgtgttggaaaaacagtgatgtcccaagagcggagcccgaagaggtcattctaactttaagagatgtaaggctcaaatgaatatgccacacaccgaggc

SEQ ID NO: 126157 - DNA, 530 bp, Homo sapiens
gctaatgtttccatgtggatttttttaaatgaaaacagaaggattctttggttaaaaatgtatcttcattataaaatttctctcaactctatcttttgcagttatatccctataaaggaaaggatgcaaatgrtggtttaaaaataactacaaaaccaacaaatgaaaagtataaaaaatttagaaaaatgccacaaatcaaaaagaatacaataaaaagaataattccattatacaagtgactaattatgcttaacattctgggtacgtttgtgtgtatgtaaaaatgcctcttacttataaaattacattgtattattttataaccagcactttttatttaagatgctatgaataacgtcctaggccattaagtagtcttctccacctcactgctaatggatatatgatttcaactcagtaatgtgccataatttgaccaattccctgtggctaaatttccaagcctcactccaagtctattgtatcagaatgataaaacccagaatctgtattcccggtgattctgg

SEQ ID NO: 126158 - DNA, 451 bp, Homo sapiens
ataagttctggtgagtcagtcactatcattcccaaacaacatatttttatatgaatatggtactgttgactgatttcagctatgaaaaygagtttttctcaaaccattcatttccccacccttcctgtataattactaatgatccatgggatcctggagtatggcatctacattgaagagtgattccactcagagaggatgcctatgccacccaccgctttatcatccttccctaacaaagtgatcaaccatctactctatgacaagcaactaatagatccagcaatagttaaattagtgcttcctggttgacatccatctgcactttccttacacagaagaggggataacatggactgaaagccaggaggattcaatccagggatattggttatcattcaatatttttataaccacaaccagcagatctttgtatatatacggcttacct

SEQ ID NO: 126159 - DNA, 629 bp, Homo sapiens
tatgagaggagcaggatgaccccgggaagcccatttgtgtttgagcccttgcatgcgtagaagtctgtgattgacggcgtctggaaggcaagcacaaccttatgtgtaccccamattttaccctgatgtagaccaaaagacatctgcccctgagtaaggagtaagaatctcagaacttgacccttatttgaatatctgtcccaggagagggatagaaaacctgttcccaccttacattgatattaggtaaaacccatatgctactaaaaaggatcagaatgcctgttcatacccaaatcttgtaatgatataaggcaaaattctgccgatcctgagggggaacccacttacacagaagaccacccaccaatacagggctgagttaggctgctgtgaaggtagagacagggaaattgcttctgatgtaagcatggactcaatagaaaggggagactgtctaccactggaggaagagaagtgatgctcaggaagtcctgctgccaaaactcaggcccagagggtctgcctaagactgagactgaagaggaactactgagaaattgtcccacctcagactatgctaacagcacctcaatgagtaacaagcaacaatcatgcaaagaaacacc

SEQ ID NO: 126160 - DNA, 527 bp, Homo sapiens
aatctgtgcaaaagcagctaatgtttcatttttcaaagtggttactaagtagacagataacccatttagaattttaaaatgtagaacattttcattgttctttcacaattagggagcaacyaggcaatgtttttctagtgctcttctaatgcaggaaaactttccttgcaagttttcaagaaatcctaggtttaaagaaagagtgacaagatgactatctcagagggtccccactgtcagtgaaatgataatttagctccacgttgtcactttagaaaggaatcaaaagtccctttataaaaggcattaagggatgtgatctgatacagcacttgcatttttactgcagccacaaaaagatgattaaatatttagatcagtatgtttttataaaacacaatgaaatttttcaaataatttgaattacttttcaactttagagaacacaaataagtggggatggcattatttgttcaattattgtgttgagacaattggataaacatttgagaaataaaaataattac

SEQ ID NO: 126161 - DNA, 527 bp, Homo sapiens
aatctgtgcaaaagcagctaatgtttcatttttcaaagtggttactaagtagacagataacccatttagaattttaaaatgtagaacattttcattgttctttcacaattagggagcaactaggcaatgtttttctagtgctcttctaatgcaggaaaactttccttgcaagttttcaagaaatcctaggtttaaagaaagagtgacaagatgackatctcagagggtccccactgtcagtgaaatgataatttagctccacgttgtcactttagaaaggaatcaaaagtccctttataaaaggcattaagggatgtgatctgatacagcacttgcatttttactgcagccacaaaaagatgattaaatatttagatcagtatgtttttataaaacacaatgaaatttttcaaataatttgaattacttttcaactttagagaacacaaataagtggggatggcattatttgttcaattattgtgttgagacaattggataaacatttgagaaataaaaataattac

SEQ ID NO: 126162 - DNA, 568 bp, Homo sapiens
agtagttctttacatggttgtctttcctgcttagcctgtgagcttaccaaagacaggaatcacatcacctctcagaacctagtgagcacagtaggaaatataaaaaccattaataaatacttgttgcctaaatggctgaatgggatggcccaagatagcagtcttttaattccaacatcactttgaaatatctttggaaaaggcctatgacttttgtctaacatttggactccgggaatgctcttgcatcacaaggcagcacccaaagaggttgagctcaggatgcccttgccttattcaagattcacagcctatgatgtttcactcaaccttccatgtgttctgcattcgggccctctttcttatttcttggcctccaartcaccccatgcatctgacacttttcactcttgatcttcatgatctctactcttcttccttgactatcattggaacacgatcacccttctgacgagctgaggtagccttctgccaggtcttcctgcctgaacacaggccttcttagaagactttaggctcattcctgccacaggccttagtacatact

SEQ ID NO: 126163 - DNA, 586 bp, Homo sapiens
acctcttaggtgtttcttatgcccttctgcactggcttcagagtctacatgttccagaagccatcacagaaatatggaggaacccttgctaaatcccatcaaatggtgagagagtggagaaatacacatgtggcgctaagccactgaaacttcatggcctgtgtatacagctaagacaggctatcctgataaatattaaagtgaatgaatcaagttataaggagtatatagcaggttttgtataatctaagttttaaaatgttcttaaagcatagatgtaaacctgatgatagtgctgaccrtgagtctgtggaaagccagggattaagagtggaggcaatgaagggccaatgaggaagaaggtgagagacttccatttttacttttatacaaaccaattaatgttgtcttcttttgtgatgaacacaatttactttaatatttttaacctatatttttactgggaagaacctggattttatttatttacattttaaaaatttgtaattattatggatataaaataggtgtacatttttgtggggtacacgtgaaattttcataccagcatacaatgtgtaatgat

SEQ ID NO: 126164 - DNA, 586 bp, Homo sapiens
acctcttaggtgtttcttatgcccttctgcactggcttcagagtctacatgttccagaagccatcacagaaatatggaggaacccttgctaaatcccatcaaatggtgagagagtggagaaatacacatgtggcgctaagccactgaaacttcatggcctgtgtatacagctaagacaggctatcctgataaatattaaagtgaatgaatcaagttataaggagtatatagcaggttttgtataatctaagttttaaaatgttcttaaagcatagatgtaaacctgatgatagtgctgaccgtgagtctgtggaaagccagggattaagagtggaggcaatgaagggccaatgaggaagaaggtgagagacttccatttttacttttatacaaaccarttaatgttgtcttcttttgtgatgaacacaatttactttaatatttttaacctatatttttactgggaagaacctggattttatttatttacattttaaaaatttgtaattattatggatataaaataggtgtacatttttgtggggtacacgtgaaattttcataccagcatacaatgtgtaatgat

SEQ ID NO: 126165 - DNA, 570 bp, Homo sapiens
tcccttttctccataccctcaactacatgttattttttgactttttaataataggcatgtgaatataattttaatatgaaaataaagtggccaggtgtggtggctcatgcctgtaatcccagcactttgggagaccaaggctggcgggtcacaaggcaagagatcttggccaacatgacgaaatcccttctctactaaaaatacaaaaattagatgtgcatggtggtgcgcacctgtcrtcccagctgctcaggaggctgaggcaggagaatcacttgaacccgggaggcagaggttgcggtgagccgggatcatgccactgcactccagactggtgacaaagcgaagactccgtctcaaaaaagaaagaaaaagaaaagaaaagaaaattaatgcacggttttgatattaaatggattgaactgaatattcacagttgtttttgctagtaataagagagcagatatggagcaacagaagacttcccccagagcatgcagaagtgaaatatctatcagcaaaatattatctgaactttaggcttttgcctatctttatttgacagtgcat

SEQ ID NO: 126166 - DNA, 214 bp, Homo sapiens
gaattctgaagattaataataatctatgtaaagggcaagtcacgtagtaggtcctggctaaacaataggttgtcttatgatgatartgtttagctattttgaaccatttacatatatggtttttttgtttttgtttttgttttattttagttaaacaatcattttattgcttgagtacacagacaaatttatgcgaccagggcagaggctgtag

SEQ ID NO: 126167 - DNA, 631 bp, Homo sapiens
ctcgcagaaacagctttgcggtgcatgctgggtacatcctaagtaaaagatgttatatagaggttgattgtmgttattaataaacatttagggtaatttttcaactaaaaatataactgacatactttcttaattctattatagatattccatgtacagagtcttgattgtgttaagagtatcctagaaggtacatcttatctatttctgatattagtataatcattattattattactatcattttataaattaaagggacccctattaaaaggataccaattcaaagggggcatgtattagagaaagttcactttagtaccttattcaatttcagacttcacacatcatttacaataaaaatctgctgcaatagaaagagtccatactttgaggtatcaacaggttgtgggttaaagttcccttcagaatccattgatgactgtttttccatcatactgacataatttgactccatgtagtctggaggcaaagctcccgcaactgcactcaggcaaggcagtgccagtttgaaaagttcttgttcatatttctgggaaaaatggaggaccaaaaaaaaaaattactatatggcaaaagttgtcagcatgatcatcagggctgacagaag

SEQ ID NO: 126168 - DNA, 631 bp, Homo sapiens
ctcgcagaaacagctttgcggtgcatgctgggtacatcctaagtaaaagatgttatatagaggttgattgtagttattaataaacatttagggtaatttttcaactaaaaatataactgacatactttcttaattctattatagatattccatgtacagagtcttgattgtgttaagagtatcctagaaggtacatcttatctatttctgatattagtataatcattattattattactatcrttttataaattaaagggacccctattaaaaggataccaattcaaagggggcatgtattagagaaagttcactttagtaccttattcaatttcagacttcacacatcatttacaataaaaatctgctgcaatagaaagagtccatactttgaggtatcaacaggttgtgggttaaagttcccttcagaatccattgatgactgtttttccatcatactgacataatttgactccatgtagtctggaggcaaagctcccgcaactgcactcaggcaaggcagtgccagtttgaaaagttcttgttcatatttctgggaaaaatggaggaccaaaaaaaaaaattactatatggcaaaagttgtcagcatgatcatcagggctgacagaag

SEQ ID NO: 126169 - DNA, 568 bp, Homo sapiens
cagcactttgaaactttcgctttgtgtaggagaatacagatgtttaccattggatttctatctattagtagtagagtcattattcttttcccttcttgcatagtaacagaaccttagatttttagatgggcacatgggtggccagaaatttccagacgtctccctagcagttagatgggtccatgtgactaagttctggccaaagagatataattgcaattgtcaaagagcagcttgtgagaaccttcctcaaaagacagcaaagaccaccatttgaaactctccccctgcctttttttgtcctttgcttcttctggtgctgaaattcatacatcatctctgaagtgggtgcagccattttggaccatgtggtaccttgaaatgaggcctcatktgtggaataataggatagaaggaacctgggtgtctgaggacttcagaaaactggatcagctttggactgcctaccttttgattctcatgagaattttagtccctgttatttctgttttctgttactagtagcagaaacctctgatgaagaagagtgccagtggtgggcactctt

SEQ ID NO: 126170 - DNA, 450 bp, Homo sapiens
cactaattagaatgataacatcacatttagttactttcctagccagagtgaacttccagttgctggaaaatgcatcagtgaagaagagggtgaggtgtacaaaaaagaaagatttagcaaaaaaaaaaaaaaaagtcatactattttttttaaaagaaatgttttaccacagtcaagcacattttatattttaattaatcttgcttcgtgtgaagatttcatttagtctctttgcaattagagttcatattggtattatataaaatgttgccccactgttgtgaaattaggaacaaggaagactagrttgatgaccagaaaagctaccttttgtgccttgaggaaaaaagaaacgtcttatgaatctgtcatagccctagtctgtgagaaatgtaaaggactttaatgggtattttagtagaaccacttaaaattaagtgatgaattgga

SEQ ID NO: 126171 - DNA, 548 bp, Homo sapiens
atgaacatctagcaatcattctgaacaccatataattcacttaatacgttttgcctgaacacccaacacatctgaattaccaacacccatatgtagccaagaaactggcaatcatttataaattatcacctatgactccatctgctctacgcacttattttttaaattttattcatttatttattatttttatttgttgtagagatgggatctcactatgttacccaagttggtccagaaacagaaacagacccacactaatttcataaatcagatgaccatacagtcattcgatttatgaaaaaaagtgccacatggtgyggaaggaaaaggatggtcttttcaataaatggtgctggatcaagcagacacatccatgtagtaaaaagtgaatcatagccaggtggggtggctcacacctgtaattccagcactctgggaggctgaagcgggcagattacttgagcccaggagttcgagaccaacctgggaaacatgttgaatccccatctctacaaaaaatatgaaaattagccaggcatggtggc

SEQ ID NO: 126172 - DNA, 548 bp, Homo sapiens
atgaacatctagcaatcattctgaacaccatataattcacttaatacgttttgcctgaacacccaacacatctgaattaccaacacccatatgtagccaagaaactggcaatcatttataaattatcacctatgactccatctgctctacgcacttattttttaaattttattcatttatttattatttttatttgttgtagagatgggatctcactatgttacccaagttggtccagaaacagaaacagacccacactaatttcataaatcagatgaccatacagtcattcgatttatgaaaaaaagtgccacatggtgcggaaggaaaaggatggtcttttcaataaatggtgctggatcaagcaracacatccatgtagtaaaaagtgaatcatagccaggtggggtggctcacacctgtaattccagcactctgggaggctgaagcgggcagattacttgagcccaggagttcgagaccaacctgggaaacatgttgaatccccatctctacaaaaaatatgaaaattagccaggcatggtggc

SEQ ID NO: 126173 - DNA, 548 bp, Homo sapiens
atgaacatctagcaatcattctgaacaccatataattcacttaatacgttttgcctgaacacccaacacatctgaattaccaacacccatatgtagccaagaaactggcaatcatttataaattatcacctatgactccatctgctctacgcacttattttttaaattttattcatttatttattatttttatttgttgtagagatgggatctcactatgttacccaagttggtccagaaacagaaacagacccacactaatttcataaatcagatgaccatacagtcattcgatttatgaaaaaaagtgccacatggtgcggaaggaaaaggatggtcttttcaataaatggtgctggatcaagcagacacatccatgtagtaaaaagtgaatcatagccaggtggggtggcycacacctgtaattccagcactctgggaggctgaagcgggcagattacttgagcccaggagttcgagaccaacctgggaaacatgttgaatccccatctctacaaaaaatatgaaaattagccaggcatggtggc

SEQ ID NO: 126174 - DNA, 584 bp, Homo sapiens
tgtggcttctctaaccaaaggagcctagcgggttaacaattgtcaagagcagttggtggttctgaaatacaatcctcagccaaggatccctcctgtgttaaagatggatcagctaaaacaattcaacactgaagatacaaagaatgaggttaggttcattgaaaccagggtaacacctttgratgagctaaacacaaagatgacactgaccttgagcaggtatagaagctcagagacatgcctgcaaaatgaaatccctgaggaactttgtagctacccagagatacgtggttcaaattaaaatgtctgactgatcactcccggcatgtgctgcacagttatgtgaacgtgtcacacctaacttgggtccattgtcttcagactgagcacaggttgccactggcatggtctgagaataggaatagagccatgcccactgacccatcctatgtctgggcttccaaatggaactatagtttcattcaaatcttcacgtgcctataggtcctgcctgcaggaatgacatctctcagcttagtaagggctgcttactgtgggaatatgactcccatctggaagaccag

SEQ ID NO: 126175 - DNA, 584 bp, Homo sapiens
tgtggcttctctaaccaaaggagcctagcgggttaacaattgtcaagagcagttggtggttctgaaatacaatcctcagccaaggatccctcctgtgttaaagatggatcagctaaaacaattcaacactgaagatacaaagaatgaggttaggttcattgaaaccagggtaacacctttgaatgagctaaacacaaagatgacactgaccttgagcaggtatagaagctcagagacatgcctgcaaaatgaaatccctgaggaactttgtagctacccagagatacgtggttcaaattaaaatgtctgactgatcactcccggcatgtgctgcacagttatgtgaacgtgtcacacctaacttgggtccattgtcttcagactgagcacaggttgccactggcatggtctgagaataggaatagagccatgcccactgacccatcctatgtctgggcttccaaatggaactatagtttcattcaaatcttcacgtgcctataggtcctgcctgcaggaatgacatctctcrgcttagtaagggctgcttactgtgggaatatgactcccatctggaagaccag

SEQ ID NO: 126176 - DNA, 547 bp, Homo sapiens
gcaggagacacaccccctctggggctggagcgaccccgcgcttaggactgcaggcctcgcgctgccgcaccgccccgaatctgacttccaggcacgggcacgcggtgcagtcgggcaggcttcagaagagcccccagctctcccagaggtggccttaggtcactctcaaaaagaataaccaacgtgtcaatggcacttgtagttattttctaatttaaatttattaacagattttgcagatgggcttccactgaaataagcctttgagaaaaagaaaaactttttttttcaacaggattagaataccaagaaataggaagtaaagccatgccgtccacccagctaaaaactttgaaaacttgatattttatctaaggcaaatgtttgcataactttaggtcatgccattatttaaagtcaatttcarttaacaatttcattgcaactgaatctatcttgtataagaaaactaagatacatccctgataatctacctctcccctcctatactccatccgtcagcaaatcctactggtttttaccttcc

SEQ ID NO: 126177 - DNA, 596 bp, Homo sapiens
aaactaggacacaaacatgttagagggtaaggtagtgagaggcatgtttgggggtggtggtgatgagcaagtatgtgaaggagagatagtgcctacrcttgaaaatcaaaaaggaataatatctatttagacataaggagataaataactaaatacttgcttctatgtgatgaaactctgggagtacacaaggggactgctgttttactaaacaaattttccagtctatataactttgataaggtatccaaataaaaaaattcctttcccatatatgtatgtgtatatatatgtatttgtatacacatatatgtttgcatttttgtattttgaatataaatttttatagagtcctgtgaacccctcttttcaattaggatttgagtttgatgtcatgcatgcaatgtgatcccactgtgtgactacagaaatgttggcaaaagtaagttcagaggaaatggtaggcaagtacttcccagttttggccagaagatggagaaaaaaagaattctcataaaatattaaaagtatgacttgttacagcttcttttcatagtaatttggatagaaattagcaaaatcagaaatgtataaat

SEQ ID NO: 126178 - DNA, 588 bp, Homo sapiens
acccgccaggctcagagccctgccgcccctcactcaccccgagcctcggccgccgcgacccggttcacaacatccgcccaacctctcggctacggcgtccgttcagggccaaatcacgcgcacgctcgcgcgctgagcctccagccgcgcacgcgcaccggcccgcgcccagcctccgctaggggaccccctccgtggcttcccaccrggttgttccaggcctcagcttcgccgaaaggcctcaccacctccgacctccgcctgccccggggatgctcccagccctgctgcggcagaacgcgacgtgctaaccggaatccctaggccgcctgtctcctacccatacttggaggccccgctcagacggtcctgaaaacgtctgaaaggcggttcctgccagagtccctgctacctgttacctccacccctatttagtcctagtggacagcctcgctcaccttccctgggatgacacttctggcggctgagatgagcgagcctctctgggctctgccgccgggcgtgggctgacctgcctacagctggggcctgataaggcagcagcaaaagggtggaggggaggcagtg

SEQ ID NO: 126179 - DNA, 588 bp, Homo sapiens
acccgccaggctcagagccctgccgcccctcactcaccccgagcctcggccgccgcgacccggttcacaacatccgcccaacctctcggctacggcgtccgttcagggccaaatcacgcgcacgctcgcgcgctgagcctccagccgcgcacgcgcaccggcccgcgcccagcctccgctaggggaccccctccgtggcttcccaccgggttgttccaggcctcagcttcgccgaaaggcctcaccacctccgacctccgcctgcccyggggatgctcccagccctgctgcggcagaacgcgacgtgctaaccggaatccctaggccgcctgtctcctacccatacttggaggccccgctcagacggtcctgaaaacgtctgaaaggcggttcctgccagagtccctgctacctgttacctccacccctatttagtcctagtggacagcctcgctcaccttccctgggatgacacttctggcggctgagatgagcgagcctctctgggctctgccgccgggcgtgggctgacctgcctacagctggggcctgataaggcagcagcaaaagggtggaggggaggcagtg

SEQ ID NO: 126180 - DNA, 402 bp, Homo sapiens
taagtagggaggcctctcagggggctagctgtgctaggcccttgcaactgasctgtgggacctgaggcctggcccctcatggctcctgtcaccaggtctcaggtcagggtccagcaggccctgagctgacgtgcggagccagagccacccaatcccgtagggacaggttttgcaacttcccggatggggctgtggtgggtcacagtgcagcctccagccagaaggatggggtggctcccactcctgctgcttctgactcaatgcttaggggtccctggtgagtgcccccaaccttgatccccatctgccttcaggaggggcttggccccattctcctattctgggatgagaaaaaagtcagggagccagaggctcagtgggcatggggcagtgaccttggcc

SEQ ID NO: 126181 - DNA, 402 bp, Homo sapiens
taagtagggaggcctctcagggggctagctgtgctaggcccttgcaactgacctgtgggacctgaggcctggcccctcatggctcctgtcaccaggtctcaggtcagggtccagcaggccctgagctgacgtgcggagccagagccacccaatcccgtagggacaggtttygcaacttcccggatggggctgtggtgggtcacagtgcagcctccagccagaaggatggggtggctcccactcctgctgcttctgactcaatgcttaggggtccctggtgagtgcccccaaccttgatccccatctgccttcaggaggggcttggccccattctcctattctgggatgagaaaaaagtcagggagccagaggctcagtgggcatggggcagtgaccttggcc

SEQ ID NO: 126182 - DNA, 402 bp, Homo sapiens
taagtagggaggcctctcagggggctagctgtgctaggcccttgcaactgacctgtgggacctgaggcctggcccctcatggctcctgtcaccaggtctcaggtcagggtccagcaggccctgagctgacgtgcggagccagagccacccaatcccgtagggacaggttttrcaacttcccggatggggctgtggtgggtcacagtgcagcctccagccagaaggatggggtggctcccactcctgctgcttctgactcaatgcttaggggtccctggtgagtgcccccaaccttgatccccatctgccttcaggaggggcttggccccattctcctattctgggatgagaaaaaagtcagggagccagaggctcagtgggcatggggcagtgaccttggcc

SEQ ID NO: 126183 - DNA, 327 bp, Homo sapiens
tattcataccatgaaagaccaggggaaagtgcgaacgcagtcccctactactgttgtgggaatcaggagaacagagagaccaatgggtggaacaggaggatttattgactgcactgaggcccagcagatgaaaatccaaaggctgagccccaaacaaagacagggcttaactttatacacacttctgaaagggggtyggctagtttgaatggcgcagcgggaatttgatggcatgaaactcaggggcaggcaagagggcttatagaagcagaacaaaggcagctaatcaaactgtcacaggtcttgcaatgcaagtatagctggtga

SEQ ID NO: 126184 - DNA, 327 bp, Homo sapiens
tattcataccatgaaagaccaggggaaagtgcgaacgcagtcccctactactgttgtgggaatcaggagaacagagagaccaatgggtggaacaggaggatttattgactgcactgaggcccagcagatgaaaatccaaaggctgagccccaaacaaagacagggcttaactttatacacacttctgaaagggggttggctagtttgaatggcgcagcgggaatttgatggcatgaaactcrggggcaggcaagagggcttatagaagcagaacaaaggcagctaatcaaactgtcacaggtcttgcaatgcaagtatagctggtga

SEQ ID NO: 126185 - DNA, 535 bp, Homo sapiens
agctgcctctgctgtagggtataaacaaggcagataattcttagctacagggtcaagagaaatactaagataagcaatgtgcttgttatgagttcctcgtttttgaaggagtacccctaaactacaaccatgcttttaggtacacaatttagcatagttaggaatacccaagtcagggcttatatgtttaagaatggtaaatgacttcttgacatttggctcccaaggaaaaggttctaggtcattcaatttatttacttagagcagttaagccaattaaattatggcaaatatcaaacattgatttatttcaacattcttttttatagggtgatggaacaaatttgggtttatcagtggtcatctgggaagtatcaaagacagtctgggtataaaggacatctgagcagttttattattttgaatttgtgkcctgaattcggtaaaagcaatatctaggctgggtgaagtgcctcacacccgtaatctcaacacttcagaaggctgaagtgagaggactgcttgagcccaggag

SEQ ID NO: 126186 - DNA, 586 bp, Homo sapiens
gttaaatgtgtgcaatttttatatatcaattatacctcaataaaactatttttaaaaagatggacagaataatatgtaatttttaaaaacaaaaaaccaacacaattgtttatttgtacatctgtggtaaaaataaaaggatagatgaaaaagatacataccaatttcaattcaccaattacctcaagggcttccaggctgctagcaggctattgttttatttcagacaagaggcaggctttaaaggaatcgtctgcrtgaaggctttgaagaagatgctcctgactggagagacactgaagggacaggcttccaaatacacacatgcacacatcgtgcaagcatgtagctattaacaacaaaggaatccttctcctagcactttgttttatttctggagctaatggtccagctggatctgaaaggatgagggattcaggtcccctaactttacaagggcttatactcaaatcatgtgcttcagtgaatctatttgcgcaaacatttcccatcctccatattcaaggctattgtgtgtagatatggaaacttcagggtaaaaattctactaattatattatcattt

SEQ ID NO: 126187 - DNA, 541 bp, Homo sapiens
attttagattaataaattcttttatgtagaagaaaatttaaaaataccgttaaagtaaggaacaagatctagaacctgaaaaagtcaaatcaggttgtctaaatgagatgtgggaacygcagaaatgtgaatccccgcagaaaactgaatccactgtgtgtgggtataacccagaattaatgctactttaccctgtaacgcttcagtgtgtggctcctttgcctctgtttgtttacaggtagaattggaggtatacgacttcttctttgaaaggagtgcacctatgacagtccacatctccatcagaacagcagatacaaatgccccccgtgtatcctggaatacaggtaaagctcaatataaggcatagagcaacatagccctgaagggaatacaagaaagtagatgggtcaggaaagaaaggtagttttattcctatgtcatacatgtggcaactgaaacccagacagattaagggcatcacatagtagcttttgttgttgtttttttattcctcctggcagcgtgagaaatttaaatc

SEQ ID NO: 126188 - DNA, 431 bp, Homo sapiens
agtgttggtttttaattaaaaacaaacaaaccaacccatcttcatcatctcttagatacactgtgttgcaagattagaaccatcatatcaaattacatggaagaaagttttgacaggacaatttaccctcaagaatttcagaatgtgagactcaaacctaaaataattctttaatcaacaaatacttaccaggtagctatcatctcccaatcttttatttcccatgaggcactgagaataagacaggcatgctccctttttctatggagttgaatggaaagagggagagacatgaaagaaatagaaacacataaaatttaaaagataattacctgctggccaacattatgggcatatgacstatgtgatcacacagggctctgactttagaagggccacacacttggcttaatgctttacttttgccttcc

SEQ ID NO: 126189 - DNA, 542 bp, Homo sapiens
ggattacaggcgtcagccaccgcacccagccagtttcttaaaatatcttcatatatatatatgattgttttgataatgtagcagggaaaaggcagatgggtgtagggtagaaccaaaataattcattttatctcaatgagattcactttctttatttgcaaacctacaccacagagtagtttgagggttatatgaggcaattgttggtatatactttctctggcaaattacttaatctataaattggggataacaccagcccttacttcagagaastattgtgagaattaaatttaaaaattcatgtgaagtgcttagaatagtgtctagctcacagaagtcactaaaatcaacatcaatatataatttttttattaagctgcaaacctgaaacttacttaataattaaagagagtaaataaggaagaagagaaataatgggaacacagataagtacaagactggataatttacttttaaaataaccaggagtttactaagaagtgtgctgatgccctaaaaattgggactatagacaactg

SEQ ID NO: 126190 - DNA, 593 bp, Homo sapiens
gtgtcaggaaaaacggaaagccaaataactcactggacacttattgcattccaagcatgatactacagatggttcccaacttgcgatgtttcaacttaacaattttttgattttatgatggtgcaaaagtgatatkcattcaatagaaaccatacttgaattctgaattttaatctttttccaggctagtgataggaggtacaatactctcttgtggttctgggtagcagcagggacccgcagcttccagttaatcctgtgatcacaagggtgagcaaccggttctctactgtgttgccagatgattttgcccacctatagtctaatgtaagtgttctgagcacatttaagctaggctaggtatttagcaggttgggtatattcactaggttgcgtatattaagtgcattttttacttaaagtatttcagcttacaatggctttgaaggattgtaaccttatcaagagtcaaggagcagctgtagatatttccgtgcattgttatcagaacttagtccttagcagaccctcataaataaggctgggatttttgttctgataacaagtaaggaaaatgagctcagaatcgtcca

SEQ ID NO: 126191 - DNA, 541 bp, Homo sapiens
tgttggtatttgctcaccgctatgtgctactggactttgggacataagtatggatcacacacctgattcactagacatttacaagtcccagccccaccctaaaaatgcctcaaaacgcttccctgtgtccaaatgttctaataattttacaaatggctttttacaattggtttctcataatcatgatcctaaaagagatgctcacattgcgtttgacttataagctttttaagtctcaatgtatgagagttccccctttgattatgtggtttgttatggaaaatggatcctttaatctrcagcatttcctgcattctagatttagcttgtttcatccccatagtgtcatttgccatgcttctctatacctgatattttctgaaaactggcctgataagattcaggttcagttctttgccaagaatactttatgggtagtcatctaaggtctgattgccccctgtttggtgatgtgaaggttgattaatgggcttagttaggtagtgtcagcccgatccatccattctgaagttcctcgcca

SEQ ID NO: 126192 - DNA, 527 bp, Homo sapiens
gaatttctcatagtagatccttatttttttgatatctgtaggatctgtactgatgatatcttcttatttattcctgatactgatatttgtgtcttctctcttttattagtcttaccagaggattatcaatgttatttttcaaagaacccattattttatttacttattttctctattgttttactgattttaatattatttctgctcttatctttattatttccttccttctccttgctttgagtttattttgctcttacttttctaggttttgaagtgggagcttagattatkgattcaagactctccctctcttttgatatatacatttgatgctataaattttcttctcagcattgctttagttgtgtccaacaaattttggtatgttgtactttaatttccacccattcagtatatttttaatttcccttgagactttctctgtgacttacagagattatttagaagtgtgggagattctttctaaaggttttgagatttttcttgttatctaaatgtttgga

SEQ ID NO: 126193 - DNA, 527 bp, Homo sapiens
gaatttctcatagtagatccttatttttttgatatctgtaggatctgtactgatgatatcttcttatttattcctgatactgatatttgtgtcttctctcttttattagtcttaccagaggattatcaatgttatttttcaaagaacccattattttatttacttattttctctattgttttactgattttaatattatttctgctcttatctttattatttccttccttctccttgctttgagtttattttgctcttacttttctaggttttgaagtgggagcttagattattgattcaagactctccctctcttttgatatatacatttgmtgctataaattttcttctcagcattgctttagttgtgtccaacaaattttggtatgttgtactttaatttccacccattcagtatatttttaatttcccttgagactttctctgtgacttacagagattatttagaagtgtgggagattctttctaaaggttttgagatttttcttgttatctaaatgtttgga

SEQ ID NO: 126194 - DNA, 399 bp, Homo sapiens
ataattatagcagttttttacataatagccccaacctggaaataaccaggatgtctttcaatakgtgaatggttaaataaactgcggtgcatctataccataaaaaatttctgagcattaaaaaaaaaccccaaagtattgatacaaggaacaacttcactgaatcctcagagatccatcctggagtgatggagaatgtgctgtgttttcaacgtatcgatgtcaatatcctactgtgatattgtgctataatttctcaagatgttaccattaggggaaactgagtaaaaagtatatggatcttttggtattcaacttcaagtgaagcaacaattatctcaaaatagtttagtttttaaaaatctatacaacttattcaagatattataaaaagaaata

SEQ ID NO: 126195 - DNA, 582 bp, Homo sapiens
aacagggtttacaagtgaccctttcataccataccataagggttttaattcacaacttgcagaactgccttcgcctcccttttgatcctgtgtactttgtattatgtctggatgatcatctctaccagacaataagctcctttgagggcaggggctgtgccttagtcatttttgtatctctctactctccctcctcccarcccagcctagtgctttgcagagtaaatactttaaaatgtttgccaaatataggcaacattttattctagtcacttatgtcaccctgtacggcaacttgatgtttttttattttttaatctcgcatcacaagctaagagagttaggtggttttctgtagtgcagcccaaagcgatatctcagaaacagagtcctgtaaatcagatagagaagggatagaaaaagtgctatcaggtggttcaggctggtgcctaattttcattaagttcattgccacattctcttgacaactttaaggtctgggcttctgaggaaagacccattttcttgtttgggaagagaaattatcactactattatttcacttgtcaaaattaagtaaaa

SEQ ID NO: 126196 - DNA, 623 bp, Homo sapiens
actttctctgaccaatgaaatgtgacaaaaaatgctgcatgttccttcaaagcagaagctttaaaatcctacacatggttcagtatctctcattttcctctgccataatacaagcagtatttcttattgagactgctccattaacctgaattcagggtgaagatcaaatgaaggggagttccagatgacctccaaaatgggcatgcagcaagagaaagaaatatgcctttgttattctaagctgctatcatttgttgctgcagcatatcctagcctatcttgactgatgatgcatttcttgaattaataaaatgaactataatttggcttcagcagtttgtgtgagttctgyctatgtaagcatatgtgcacacactggagtggagacaaaaatattcacagatatggcccatgtggctaataaacatatgaagtggttgaggaaacaatctatatgtttgtgataaattaaatgtcaccatagaatagtaatacagcatttgttatacccctcctatttgagcgagatgggatagactatttagatttattaagaccagcagatccataaaaatttggtctgtacttaagatagatgccagcttcctctttgcagagccttg

SEQ ID NO: 126197 - DNA, 556 bp, Homo sapiens
gttctaataattctgtgcttctaaagcgttccttcaagaatagagagaatttcctgtatcagtcctataaacctgtctgagccttggccatgccatggtatgaacagggcatcatagggctgtctgatcttgtacaagagaggagaaggagtttatgggctgtggtccaatttaacccagtatttctcttttggcaggatttaacatagggtatccaatctcattctcttccaggcgtttcttccattgtatatttttatttgagattctggaattctgactagagcagaactttactcagcttcagagaagaaagaggcagaaaagttgccagttgggtttaagaaaggcctccgacttattcaagtctgtagataagatgttccctgctccttggatcagcctagtcctcctcgtttctcctgtgcttaggaatttcccactgctctttatgtctttcaagattttcctgtagctttgcagtcaagttggtggtaattttccactggtttgcartgaaacttcagatgtgacctatgatctcaatgtcaccata

SEQ ID NO: 126198 - DNA, 623 bp, Homo sapiens
gaacctttttctttcttaaggtttttttttaaaaaggaaataaaaattccctctatgcaagcatagttgggtcataactattatatttggcacacttaaagaactccttttccacgaaagtggagaaatatatttgaaacagcttccccatttctcttactctmaagaaaaagcaaggggtataaaattttgcagatcctacaatgttctttctttaaaagaagctaggaacacgtataaaacaggtttttagagatgtacaaaaactgtattaaaatgaaaccaatgactcctcatcttctgtaaaggatattgataaatactgatgaaagtgtctttatttccacttttgaacagagattatattttatacttgattatattttaattaaacagctccacccagattaccatctctcaaaaataaataattcgccttcattgtttcttctgttccttacatctcactgctaacactctggttaaaataacttgggacactgctgctttctaatatgaaaaaaggaaggaaccaacgaacagtacattgttataacttaagaggcagggcttagctctcaattcagccacttactgtttgggtcaagtttaacgttactatg

SEQ ID NO: 126199 - DNA, 513 bp, Homo sapiens
attacttatctctcactcaaaaagtatctcttccatgaagctttcctggattatctcaactagaaataatgcttctcttctctatatcatatgatcgatcatatatcaatcttctattttatttaacttagtttcatgtctttcaatttaatccataaactcttgaagcactatggctctgaattcacaccccaaytcattcattcaacaggtaagatactgggccatgcattatgcaaaatgtaaagataattaagacacagctgccatcaccaatttgattttagtttaattaatgaaataagatatataattaccttgacatgattcctataaattctcttacatctaaaaatatgagaacttgaattgaaggcttttctcagcattcctggcccctgcttctttatgtacctcacataacaaaatgtcatggacaaggtagggactaaataaatacatgttggatgaatatttgttgaaagaagtttttaagattttgatattaggcct

SEQ ID NO: 126200 - DNA, 556 bp, Homo sapiens
cacagatatttactgagtaccacttagatgtaaggtaccgtgctaaacagtatgagaatgcaaaaatgaataaactctaacagttcactcattgatgtgatatttagaaaataataaattatatacaaacatttaaaattacctgaattatttaaaacagaagacaataaaagatgccagaaacatccaatttgggcaagggttcaataatgggcactcagaaaggtgatttggctgttcttgtcaagccatttacttgagtgtttcatgaggggtactattggcatttcaggcaaagaaatctttattgagtagaactgttgtagcattaccaaagacttagtatcctggctgctggatgctctgttgtgataaccaaaaatgcttccttctatttccaaatgccctcaagggtagtaacctcagttgtgaaccaactgtatcagtcaaaataagctaggttatgctrtagtaacaaataactttaaatcccaggaacttaatacaacaaaagtttatttctctctcaccctacatatcaaagcaggtaatgagg

SEQ ID NO: 126201 - DNA, 568 bp, Homo sapiens
taaaccacaaatttatttgggatttttgatcaaccaacttgttcaaattttgatcagggagatgctggaattctggccctragtggtatttctggaacatttgggtagcagctgtgaaacattcatgcctctcttcatccaggaatgaaaataaatcaggtaaattttaatatggaagctagtttgaaaaattatgacatattttacccttatttattcaagactttctttctttctgggttttggaaaagtgctgatttctcagggagcagtatttaacaaatgattggcctaggaagaagagattcacagatggggcatccagcacagagccataatggcagtggatcagtgcacaccgtccagacttagaaaaagctccacaaactatttaaaaagctttcccatggattcactgtctgctacaaatacttcttagctccagtgatccccaaacagctgcccaacaggccaaactttcaacaaatttcatggttcttatgtctgatcagacaccatgtgtctgataacatgaaggagaggtggaagtgacctttccccaagagaa

SEQ ID NO: 126202 - DNA, 568 bp, Homo sapiens
taaaccacaaatttatttgggatttttgatcaaccaacttgttcaaattttgatcagggagatgctggaattctggccctgagtggtatttctggaacatttgggtagcagctgtgaaacattcatgcctctcttcatccaggaatgaaaataaatcaggtaaattttaatatggaagctagtttgaaaaattatgacatattttacccttatttattcaagactttctttctttctgggttttggaaaagtgctgatttctcagggagmagtatttaacaaatgattggcctaggaagaagagattcacagatggggcatccagcacagagccataatggcagtggatcagtgcacaccgtccagacttagaaaaagctccacaaactatttaaaaagctttcccatggattcactgtctgctacaaatacttcttagctccagtgatccccaaacagctgcccaacaggccaaactttcaacaaatttcatggttcttatgtctgatcagacaccatgtgtctgataacatgaaggagaggtggaagtgacctttccccaagagaa

SEQ ID NO: 126203 - DNA, 535 bp, Homo sapiens
ggatgcccactctcaccacttctattcaacagagtactggaagccctagctagagcattcagacaagagaaagaaataaagggcatttaaattggtaaggaggaagtcaaactgtcactgtttgctgatgatatgatcatatacctagagaaccctaaagactcctccaaaaagctcctaaaactgataaattcagcaaagtttccggctacaaaattaatatacataattcagtagccctgctatacaacaacagtgacaaagctgagaatcaaatcaakaactcaaccacttttacaagagctgcaaaaaaaaaaaaaaaaaaaattggaattatacctaaccaaggaggtgaaagacctctacaaggaaaactataaaacactgctgaaagcaattacaggcaacacaaacaaatggaaacacgtcccatgttcggggatgggtagaatcaatattgtgaaaatgaccatcctgccaaaagcaatctacaaattcaatgtagttcccatgaaaataccaccatcattttcac

SEQ ID NO: 126204 - DNA, 536 bp, Homo sapiens
cagtctttcctttatgggctgtgcaaagaaaggcaataagaaacactacaaagacagaaccacttcaaattgtacaaacatattaatagacagatctccttggaagttccatttcatatgtttgaagtgaatatacaactttttcccaaataactagccatttttttaaaccatttaaataatacctctcttttttccaattgacatctttatctatttctagagtttttagtatttaataagggtaaataaatacaagaatgtatttttctgcatttccaactgaggtactgggttcaactcactggggcttgttggacagtgggtgcagcccacagagtgtragctgaagcagggtggggcatcacctcacacgggaaccacaagcgactggggaattccatttcctagccaagggaagccatgacagacggtacatggaaaatcaggacactcccacgctaatactgcacttttccaatggtcttagcaaatggcacaccaggaaattatatcccacgcctggctcggagggt

SEQ ID NO: 126205 - DNA, 560 bp, Homo sapiens
aacaatggggatgcaaatggtcagtgtctagtgactttcagttacaaggaagtgggtcaaagtgcagagtgattaatgcttaattataactatatttctgtccagaattcttggtaatcctggacaggcgcagtggttcacrcctgtaatcccagcacttttggaggctgaggtgggcggatcacaaggtcagaagtttgagaccagcctgggcaacatggtgaaaccccgtctctactaaaaatacaaaaattagccgggcgtggtggtgcacgcctgtaacctcagctactcaggaggctgaggcaggagaatagcttgaacccagaaggcggaggttgcagtgagccgagatggcaccactgcactccagcctgggtgacagtacaagactccatttcaaaaaaaaaaaagaattcttggtaatcctgtgaagatggcttcaaagccatttacaatcgctccaaacaaaataaaatacttaagtataagcttaataaaatattttaactatgctgaaaagtacaaaatggtaatgaaatgaattaaagaagaccaaa

SEQ ID NO: 126206 - DNA, 591 bp, Homo sapiens
ctagggtcagaaatcctatctataggaacaatggggatgcaaatggtcagtgtctagtgactttcagttacaaggaagtgggtcaaagtgcagagtgattaatgcttaattataactatatttctgtccagaattcttggtaatcctggacaggcgcagtggttcacgcctgtaatcccagcacttttggaggctgaggtgggcggatcacaaggtcagaagtttgagaccagcctgggcaacatggtgaaaccccgtctctactaaaaatacaaaaattagccrggcgtggtggtgcacgcctgtaacctcagctactcaggaggctgaggcaggagaatagcttgaacccagaaggcggaggttgcagtgagccgagatggcaccactgcactccagcctgggtgacagtacaagactccatttcaaaaaaaaaaaagaattcttggtaatcctgtgaagatggcttcaaagccatttacaatcgctccaaacaaaataaaatacttaagtataagcttaataaaatattttaactatgctgaaaagtacaaaatggtaatgaaatgaattaaagaagaccaaaattaa

SEQ ID NO: 126207 - DNA, 560 bp, Homo sapiens
aacaatggggatgcaaatggtcagtgtctagtgactttcagttacaaggaagtgggtcaaagtgcagagtgattaatgcttaattataactatatttctgtccagaattcttggtaatcctggacaggcgcagtggttcacgcctgtaatcccagcacttttggaggctgaggtgggcggatcacaaggtcagaagtttgagaccagcctgggcaacatggtgaaaccccgtctctactaaaaatacaaaaattagccgggcgtggtggtgcacgcctgtaacctcagctactcaggaggctgaggcaggagaatagcttgaacccagaaggcggaggttgcagtgagccgagatggcaccactgcactcyagcctgggtgacagtacaagactccatttcaaaaaaaaaaaagaattcttggtaatcctgtgaagatggcttcaaagccatttacaatcgctccaaacaaaataaaatacttaagtataagcttaataaaatattttaactatgctgaaaagtacaaaatggtaatgaaatgaattaaagaagaccaaa

SEQ ID NO: 126208 - DNA, 568 bp, Homo sapiens
ttggggccctagtccctctgtataccaggaaagccttctcaagaagggcaggcacagattgcaaagcccagattgcaaagactataataaattcctaactctttattgcccagacaaacatctacaagcatcagcaccagccaggaaaacatgatctcaccaaatgaactaaataaggcaccaaggaccaatcccaaagaaamagagatgtgacctttgagacagagaattcaaaatagctgttttgaggaaactcaaagaaatttgagatgacacagagaaggatttcagaattccatgaggtaaacttaacaaagagattgaaataattaaaaagaatcaagcagaaattctagagtcaaaaatgcaactgacatactgaagaatgcatcagagtccagtcccttaatagcagaattgaacaaacagacgaattagtgagattgataacagtctatttgaaaatacacagaggaggcagggcactgtagcccatgcctgtaatcccagcactttgggaggccgaggtgggtgggtcacatgcagtcaggagttcaagaccagactg

SEQ ID NO: 126209 - DNA, 552 bp, Homo sapiens
ggactaaccacattctaacaataaacttaaatgagagttcaaggtatttaaactctcattaatttagaagttaatcaaattaatgaatccgattgatctgattcagacctatactttgatccaagggctgcacagatatctatcaatctatgctgaggagcaagagaaaggatttggaaggcaggyaggctgatggtcaaactgcaggccagctactttgttaactatgggatcatgaggcaattaatcagctctaatccatagttgtttatttaacagtaggttataggaacacagatgttatgatggctttatgagatgataaatgcatagaacatattaggatgtctagcccagaatacaacactcaacagatattagtttcttccatctatattttcttagttaacataattttttaaatctatgaaatcttacctgactgcagattcatcaggaattccaacatctattaaagaaaaaggtaaaatgcattttaaatcaataataaatgtacagaatattaaaatcataagaatgcacagtgatgca

SEQ ID NO: 126210 - DNA, 552 bp, Homo sapiens
ggactaaccacattctaacaataaacttaaatgagagttcaaggtatttaaactctcattaatttagaagttaatcaaattaatgaatccgattgatctgattcagacctatactttgatccaagggctgcacagatatctatcaatctatgctgaggagcaagagaaaggatttggaaggcaggtagkctgatggtcaaactgcaggccagctactttgttaactatgggatcatgaggcaattaatcagctctaatccatagttgtttatttaacagtaggttataggaacacagatgttatgatggctttatgagatgataaatgcatagaacatattaggatgtctagcccagaatacaacactcaacagatattagtttcttccatctatattttcttagttaacataattttttaaatctatgaaatcttacctgactgcagattcatcaggaattccaacatctattaaagaaaaaggtaaaatgcattttaaatcaataataaatgtacagaatattaaaatcataagaatgcacagtgatgca

SEQ ID NO: 126211 - DNA, 554 bp, Homo sapiens
agggctgcacagatatctatcaatctatgctgaggagcaagagaaaggatttggaaggcaggtaggctgatggtcaaactgyaggccagctactttgttaactatgggatcatgaggcaattaatcagctctaatccatagttgtttatttaacagtaggttataggaacacagatgttatgatggctttatgagatgataaatgcatagaacatattaggatgtctagcccagaatacaacactcaacagatattagtttcttccatctatattttcttagttaacataattttttaaatctatgaaatcttacctgactgcagattcatcaggaattccaacatctattaaagaaaaaggtaaaatgcattttaaatcaataataaatgtacagaatattaaaatcataagaatgcacagtgatgcatgcctctaatccaaactacttgggaggatgaggcaggaggatcacttgaggagcccagaagtttgagaccagcttgggaaacatagtaagactctaccttcataaaaaaattgtgcacacttgtg

SEQ ID NO: 126212 - DNA, 609 bp, Homo sapiens
catgcaatacaagtgagctaaaaatcattgtaaaacattgcaggagctaacagacaaaatagcaagtataaagaagacataaccgacctaatagagctgaaaagcacactacaagaattttcataatgcmgtcacatggtgattatgtgtgactggattatgaaaattattgtagtgtgtgtgggcacccgagattgccctgtaagcaggtgtggccagacaggggtcctgggagaggcaagcagactaaggagcgctgaggtcacaccagttccatctcatgtgcaagaccacccagcagaatagaccaagcagaggaaagaatcccagagcttgaaaactggctttctgaaataaaacaggcagacaagaatgggggaaaaaagaaggaaaatgaataaacaaaacatccaagaaatatgagattatataaacgaccaaatctatgactgattagtgtacgtgaaagagatgaggagaatggagccaacttggaaaacatacttcagaatatcattcatgagaatatccccaacctatccagacagaccaacattccaattcaggaaatccagagaatctcagtaagataagccacgagaagatcat

SEQ ID NO: 126213 - DNA, 549 bp, Homo sapiens
attttcataatgccgtcacatggtgattatgtgtgactggattatgaaaattattgtagtgtgtgtgggcacccgagattgccctgtaagcaggtgtggccagacaggggtcctgggagaggcaagcagactaaggagcgctgaggtcacaccagttccatctcatgtgcaagaccacccagcagaatagaccaagcagaggaaagaatcccagagcttgaaaactggctttctgaaataaaacaggcagacaagaatgggggaaaaaagaaggaaaatgaataaacaaaacatccaagaaatatgagattatataaacgaccaaatctatgactgattagtgtacgtgaaagagatraggagaatggagccaacttggaaaacatacttcagaatatcattcatgagaatatccccaacctatccagacagaccaacattccaattcaggaaatccagagaatctcagtaagataagccacgagaagatcatccccaagacatataatcatcagattctccaaggtcaaaatgaaagaaacaatgtta

SEQ ID NO: 126214 - DNA, 350 bp, Homo sapiens
aagactgagagtgagacttaggttgattaatgaagaaacattatgagaacattctccagaaccattgtttagatagcaggactaatctactttgacacataattacacatttagaaaaccccgctgtaactgtacacatgagattttcttgaatagaaaatttgactaaatcawataattgataaagagaaaaaagaagcagcaagtgaacctctgtctttttgaagttggactttctgtttctccaaagccaggagctctacttgtaacatgcctacctcattctttttactattattatactttaagttctggtacatgtgcacaatgtgcaggtttgttacatatgt

SEQ ID NO: 126215 - DNA, 638 bp, Homo sapiens
taacactgggattgtcatacagcggcttctggaataagcactgtgttggttttctgtttttataagtatctgtagcagcagaaatactgtgactttctatctgaatcatatgcttcatttctttggggtgggtaaaccacaaatcaaaaaggckttctggatctctagactgagaccaatgcctaatttccaattagtggtatttgggtttatatatttttccatttgcatgtcaaactcttaatcatctttcatttcaatcataattactgggttccttactttttcagtttctatatcataacaaaaatttccatcatctgtgttagaaacaagctgtgtgtctggtttgttatcatttttatagtctgatttattttaaattaaatgaagcttagaagatgactggtaagtgtatttcagggacctggagtgtgaatggaataaaaagacatttgacatgggcttcctctgttcaggcgctgcctggactgccacagagctagaccctccagatacatttttctcctcacaatcagggacatgattcatcagactagagggcactccttttttgttcatccctctttagagttaccatgtaggagctcttcctcagggcaagtagtaattttgga

SEQ ID NO: 126216 - DNA, 638 bp, Homo sapiens
taacactgggattgtcatacagcggcttctggaataagcactgtgttggttttctgtttttataagtatctgtagcagcagaaatactgtgactttctatctgaatcatatgcttcatttctttggggtgggtaaaccacaaatcaaaaaggctttctggatctctagactgagaccaatgcctaatttccaattagtggtatttgggtttatatatttttccatttgcatgtcaaactcttaatcatctttcatttcaatcataattactgggttccttactttttcagtttctatatcataacaaaaatttccatcatctgtgttagaaacaagctgtgtgtctggtttgttatcatttttatagtctgatttattttaaattaaatgaagcttagaagatgactggtaagtgtatttcagggacctggagtgtgaatggaataaaaagacatttgacatgggcttcctctgttcaggcrctgcctggactgccacagagctagaccctccagatacatttttctcctcacaatcagggacatgattcatcagactagagggcactccttttttgttcatccctctttagagttaccatgtaggagctcttcctcagggcaagtagtaattttgga

SEQ ID NO: 126217 - DNA, 456 bp, Homo sapiens
tacaattcattaactttagtattttcagagttatgccgtcatcattacaattaattttagaacattttcatcaccctaaaaacaaaccccacatcatttagccatcttcactagttttcccttcctccctcagccctagggaaccacccagcttctttgtatagatttgcctataagcctctgaaataaaaagcaagtggtctgctgggactggcttatttcacttagcataatttttcatgctgcatctgtgctgtagcaggtatggatgcygggtttttgctccttagttcagctacatctgggttcttctctcgtgaccaggaaaaattaagcatgcagacacattgaggagggcagaatttattatgtgaaaggacagctctcagcaaagagaggggtcctgcaaacaggtttccacctcacaattgaataccaggagcacatgagctgaag

SEQ ID NO: 126218 - DNA, 326 bp, Homo sapiens
ctttctttaactatgaagttcgcatgtccaaaatctatggtagttgctgtctgatttttgatcactgatggtgatacagatatttatcatcaactcacaacttcccaaatctttgaaaagtcttactattgatggttcaactagtagaaacatgatgtaaaatatctgaaaataaagtttttatttattagaatgtaaataataatacaaattgtaataaggtgtaaaagttctttcttcactgaagcagtaccatgttgtcctctaccccacaaatgcactactcccccgtggtcyaatgtattttaaaagtcttgtaattgcta

SEQ ID NO: 126219 - DNA, 430 bp, Homo sapiens
gttctgtaatcctatgtgagggacaaacattcagaccgcaagagcagtgttctgaaatyctatgttaagggaaacattgagaccccagcatgaatgttctggaatcctatgtgagggacaaacattcagaccacggcaggagtgttctggaatcctatgtgaggaacaaacattcagaccacagcaggagtattctggaatcccatatgagggataagcattcagaccctcgtagcagtgttctggaatcctatgtgagggagaagcattcagagcacagcaggagtgctctggaatcctatgttagggacaaacattcagaacctcgtaacattgtgctggaaacctatgtgagggacagacatttagaccctcgcagcagtgttctgaaatcccatatgagggtcaaatattcagatcctcgcagcag

SEQ ID NO: 126220 - DNA, 430 bp, Homo sapiens
gttctgtaatcctatgtgagggacaaacattcagaccgcaagagcagtgttctgaaatcctatgttaagggaaacattgagaccccagcatgaatgttctggaatcctatgtgagggacaaacattcagaccacggcaggagtgttctggaatcytatgtgaggaacaaacattcagaccacagcaggagtattctggaatcccatatgagggataagcattcagaccctcgtagcagtgttctggaatcctatgtgagggagaagcattcagagcacagcaggagtgctctggaatcctatgttagggacaaacattcagaacctcgtaacattgtgctggaaacctatgtgagggacagacatttagaccctcgcagcagtgttctgaaatcccatatgagggtcaaatattcagatcctcgcagcag

SEQ ID NO: 126221 - DNA, 608 bp, Homo sapiens
taataaataaaattgctattttaatactgaaataaaaaatatttaccaaacatattaaattccaaaaacattttaggcagtatcagacctagtatcagaattttaatgtcccatacacttcaaatttttaaaacttacaagcttattaagcttataattaaagaagaaaagaaagtgaagtactcataaatggaggaagcacagctgagtaaattacctctagttagctggatatcatgcaaattgtcctgcmctcagagtaagtcctcgctctgtaaccaaaatacttcgctctgtaggtattttgttttcagacaagttgcttctcttaggctccatggtttcttctaaaaaataaggattctgctaccttacttcactaggttgtttggaagatgtaatgagattacatgtttaaatgttcagagaaataataaagcaatgaaataatttattcttgaaccttcttgctgaaaccattttggaatcacaaataatgctcggtgtgtgtttttctataagttctaatattcaaatgttgcagttttcagaaaatgttattaagtgctaattttggttattacttgcattcgttgtggcttgtaatt

SEQ ID NO: 126222 - DNA, 459 bp, Homo sapiens
gaattctatgtgactgacaaacattcagactccagcagcagtgttctgtaatcctatgtgagggacaaacattcagaccgcaagagcagtgttctgaaatcctatgttaagggaaacattgagaccccagcatgaatgttctggaatcctatgtgagggacaaacattcagaccacggcaggagtgttctggaatcctatgtgaggaacaaacattcagaccacagcaggagtattctggaatcccatatgagggataagcattcagaccctcgtagcagtgttctggaatcctatgtgagggagaagcattcagagcacagcaggagtgctctggaatcctatgttagggacaaacattcagaacctcgtaacattgtgctggaaacctatgtgagggacagacatttagaccctcgcagcagtgttctgraatcccatatgagggtcaaatattcag

SEQ ID NO: 126223 - DNA, 489 bp, Homo sapiens
acttagttacagagcaatcatttcctcttcttaattttttatatttagaggcaatgctctttatctggctctgtctttttctaccagtcatttacagtaaacttctattctttaaaaagaaattaacactgacaaaattcaactgaaatgatgtacaattctcctgatcaggrattgagggggaaatgtataggctatgggagcacatgtatgaaaagtctagattctagaataagtatggagatactagatattaaaggtgatcttttaaagatcaccactagaggaatgtatctccagcctaaaagtaacaaagttataaaatgtaatgttcactccatttcctctgtaagccttgagttttgtttctatcaggtaattctctcaaatacagggtttcaaaaaagacaggctctttccagataatttatccctgaaattttaaaaatcagagaaaacactatcaatgacaaaggaatgatgtatatg

SEQ ID NO: 126224 - DNA, 537 bp, Homo sapiens
aatggggttatttgattttttttcttgttgatttctttaaattccttatagattctggatattagatctttgttggatgcatagtttgcaaatattttcttccattctgtaggttgtctgtttactctgttcatagtgttttgctgtgcaaaggatctttagtttagttaggtcctatttgtcaaattttgtttttgttgcaattgcttttggcatctttgtcatgaaatctttgccaggacctatctccagaatggtaattctgagrttaccttccagagttttcttagttttaggttttacatttaagtcagccattttagcccagttaataactcttgctgggctgggcatggtggctcacacctgttatcctagcactttgggaggccgaggtaggaggatcacttgagcccaggagttcaagaccagcccgggcaacatggcaaaaccccttctccacaaaaaaatacaaaaattacctgggtgtggtggtgtatgcctatagtcccagctgctcaagagactgaggtggga

SEQ ID NO: 126225 - DNA, 565 bp, Homo sapiens
attcagaaaaggtaaatacacaaatactcataccatgtttatatgcaatggcctaactctagtgacraaccaaatgtcaaacaactggtgaatggataaaatttgtggtatgtttatacaatgaagtagtcattaggcaataaaaaggaatgcaccactgatatttactacaacatggatgaacctcaaaataattatgcttttgtacaggtggaattatacaatatgtactaatatgtataaaagtatgaaaaagtatgaaaagtatggaaaaagcaaagtaatctttagtgacagaaagcaaatcaatgattgtctgggggaatggaggcatgtgagaaagggtaggtgagagagattataagagagcataaggtaacatttgagttgatgaatatgttgaggacataaggaaacatttgagttgatgagtatgttcattatcttaactgcactgatggtatatatagccatatatatatacatatatacatatatttatatatatatacacacagaaatttatcaaattatatgcttcaaacatattctttttattgtatgc

SEQ ID NO: 126226 - DNA, 565 bp, Homo sapiens
attcagaaaaggtaaatacacaaatactcataccatgtttatatgcaatggcctaactctagtgacaaaccaaatgtcaaacaactggtgaatggataaaatttgtggtatgtttatacaatgaagtagtcattaggcaataaaaaggaatgcaccactgatatttactacaacrtggatgaacctcaaaataattatgcttttgtacaggtggaattatacaatatgtactaatatgtataaaagtatgaaaaagtatgaaaagtatggaaaaagcaaagtaatctttagtgacagaaagcaaatcaatgattgtctgggggaatggaggcatgtgagaaagggtaggtgagagagattataagagagcataaggtaacatttgagttgatgaatatgttgaggacataaggaaacatttgagttgatgagtatgttcattatcttaactgcactgatggtatatatagccatatatatatacatatatacatatatttatatatatatacacacagaaatttatcaaattatatgcttcaaacatattctttttattgtatgc

SEQ ID NO: 126227 - DNA, 579 bp, Homo sapiens
ctgttttgcttcctaagcattgatgtttagaaaaaaaaaattgactagtttagtgaagctaaactatttgtacatttgctgagataatactatgcatttccattaataatgaatacttgtgccaaaagcaaactataagggttatagtgatgatgtgctggatgagaaaaccagaggagtaaaattctactttcaccagtaattagcagtgtggagttgagtaaataaacctctctaagtctcagtttctacatctactaaatctaarcaaattcaaaacagtgattatttcattagattagatattttgattagtcttaaatgtctaatatataataaacactcaacaggtagtagctattctatgttagaatacaagcaattcatttttaccttatcatgatactcatatttccccttctcctatttttcctttatcctcttaatcctattgcttctgtttataaaatcaaatcctttgcatagggagaccacatattaaaagaaaataaatacacacacacacacacacacacacacacacacaaataaataatatttttccaaaagaaaaatact

SEQ ID NO: 126228 - DNA, 484 bp, Homo sapiens
gttgagaaatatgaactttagctacccataaatacaagaacaggaatcaaggccactccctattgcttctggtgatttctgaaatttttttcaaaacagacaacagttgctttggagtctgtgagtttccttctcaagtagatgaaaacataagtcaaaatgctttagatttttatgtaaagtatcttcaaatataaagaaaatagagtctgtagtgttttttcagtaagatttcaaatgaagttcaaagccctaagaaagtgttttcacctttcagcagtagattcagagagcttaactctttccatttacaacagaaggtcaccatgcacattatcacatgtttatgcagtagaactagacaaagtttaatgttcccttttatatgttttcctggtaaacaaaaattgtctcagggttattatgcatatatgatattgtcaagaaactttctgggtrctgtggggcaaagtcttctccataa

SEQ ID NO: 126229 - DNA, 623 bp, Homo sapiens
aaggctgtagatttagatatggaggacactggtgtttgggtggtgatggcgctatatattacatggaattttcaaaatactcaaaacttcagttttccctcaataattaatcactttacatctttgtgatcttaaatctctttctgaccattgattgaaacttttgcttttaaaatttacattacctttcttaacagttccttaagattcatgcattgttgtaagtagttacttgcaccatttcattggattcacaccaacaattgttaaagtaaaatttatttttcctgtgttttagatgaagagatttaggcaggttatgtaacacacccaaggtaatatagtcaaataattgagccagaatttgagcccaagtctctttctgactctaggcttagagctttagggctatttcacaaaagggctgttcctaggtcaggcatgacaacttctatattaccttygtaaaagaagcaatataatctaccactattaaattttgcaggttaattttatattatgtttaaatacagaaaactttatttaaaactcagttgaatttctcttgagaaattggccatgtagtaaattatatttaatagaagagtttgtgtacttcccag

SEQ ID NO: 126230 - DNA, 574 bp, Homo sapiens
aaaatagatttcaagacaacaactataaaaagaaataaagatcattatataatgataaagaggtcaattcagcaaaagaatataacaaatataaatatatatgcacccaacactggagcaccaagatatataaagaaaatattattatagctaaagaaagatagtccccaatacaataacagctggaggcttcaacaccccaccttcagcattggataggtaatccagaccaaaaatcaacaaagaaacaacagactcatctgcactacagaacaaatgtacctaatagatatttacaccatattttatccaatggctgcgaaatacacattcctttcctcagcatgtagctcrttctcaaggataggccatatgttcaccataaaacaagtgtaaacaattcaaagaactaaaattatatcaagcatcttctctgaccacagtggaataaaactagaaataagtaacaagaaaaattttggaaatgacacatcacatggaaattaaacaatatgctcctgaataaccagtaggtcaatgaagaaattaagaagaaaactgaaaaattcccaga

SEQ ID NO: 126231 - DNA, 574 bp, Homo sapiens
aaaatagatttcaagacaacaactataaaaagaaataaagatcattatataatgataaagaggtcaattcagcaaaagaatataacaaatataaatatatatgcacccaacactggagcaccaagatatataaagaaaatattattatagctaaagaaagatagtccccaatacaataacagctggaggcttcaacaccccaccttcagcattggataggtaatccagaccaaaaatcaacaaagaaacaacagactcatctgcactacagaacaaatgtacctaatagatatttacaccatattttatccaatggctgcgaaatacacattcctttcctcagcatgtagctcgttctcaaggataggccatatgttcaccataaaacaagtgtaaacaattcaaagaactaaaattatatcaagcatcttctctgaccacagtggaataaaactagaaataagtaacaagaaaaattttggaaatgacacatcacatggaaattaaacaatatgctcctgaataaccagtaggtcaatgmagaaattaagaagaaaactgaaaaattcccaga

SEQ ID NO: 126232 - DNA, 543 bp, Homo sapiens
tgctgtgcagaacctctttagtttaattagaagccatgcccactcttaccactcctattcaacatagtactagaagtcctagccagagcaatcagtcaagagaaaaaaataaatgacatacaaataggaaaagaagtcacgttaccccttgtcactgatgatatgattctatacatagaaaaccctacaaattccaccaaaagtctcctagggaatacayaatttcagtaaagtttcaggatacaaaaatcaatgcacaaaaatcagcagcatttctaaatcccaataatgttcaagctgcaaagcaaatcaaacacaatcccatttacaatagccacaaaaaataacaaaatacccaggagtacatctaaacaagaaggtgaaagatctttacaagaagaagtacaaaacactgataagagaaatcatagatgacacaaaccaattgaaaaatatgccatgctcatggattggaagaatcaatatcattaagatggccctactccatgaaggaatctacaaattcgatgctattcttaccaa

SEQ ID NO: 126233 - DNA, 543 bp, Homo sapiens
tgctgtgcagaacctctttagtttaattagaagccatgcccactcttaccactcctattcaacatagtactagaagtcctagccagagcaatcagtcaagagaaaaaaataaatgacatacaaataggaaaagaagtcacgttaccccttgtcactgatgatatgattctatacatagaaaaccctacaaattccaccaaaagtctcctagggaatacataatttcagtaaagtttcaggatacaaaaatcaatgcacaaaaatcagcagcatttctaaatcccaataatgttcaagctgcaaagcaaatcaaacacaatcccatttacaatagccacaaaaaataacaaaatacccaggagtacatctaaacaagaaggtgaaagatctttacaagaagaagtacaaaacactgmtaagagaaatcatagatgacacaaaccaattgaaaaatatgccatgctcatggattggaagaatcaatatcattaagatggccctactccatgaaggaatctacaaattcgatgctattcttaccaa

SEQ ID NO: 126234 - DNA, 311 bp, Homo sapiens
cttcaaattacactgaaataatatgtacaacaaccccccaggacatgtgcttacctatgtatcaaacctttacttctacccccaaacctaaaataaaagttaaaaaattatactacaaggttatagtaacmaaaacagcatggtgctgggataaaaatagacacatggataaatgaaacaagataggaacatagaaataaagccacatactacaaccaactgatcttcaacaaagtcaacaaaaacatgcactggaaaataagatacactattcaataaatggtgctgggaaaattgtatagccatatgca

SEQ ID NO: 126235 - DNA, 380 bp, Homo sapiens
tttttacaaatagtgtcctataagtacccaaatacgcatttaattttgtggacaaagcaaagacaattgtgcatatctcccaattcccaagcatttaaaaatccaaaaataaaataataaaattaacaaacagatttttagaattatatctggcaggagtttggatcagtcatagagygcaatagcatacttgaaaataaggacaatatggccattttaatgatattgattcttcctatccatgagcatagaatgttttttcatttgtttcatcctctctgatatctttggtgtttttagttcttacagagatctttcacctcactagttagctgtattcctaggtatttgattctttttgcagcaattgtgaatcagat

SEQ ID NO: 126236 - DNA, 380 bp, Homo sapiens
tttttacaaatagtgtcctataagtacccaaatacgcatttaattttgtggacaaagcaaagacaattgtgcatatctcccaattcccaagcatttaaaaatccaaaaataaaataataaaattaacaaacagatttttagaattatatctggcaggagtttggatcagtcatagagtgcaatagcatacttgaaaataaggacaatatggccattttaatgatattgattcttcctatccatgagcatagaatgttttttcatttgtttcatcctctctgatatctttggtgtttttagttcttacagagatctttcacctcactagttagytgtattcctaggtatttgattctttttgcagcaattgtgaatcagat

SEQ ID NO: 126237 - DNA, 237 bp, Homo sapiens
taatggcaactcccattttatagtttctcagctcaatattcttggtgtccccttttaattctgtctctatatctctgtcactctcttcctgtatctgtctgattctctcccyctctctcctctctcttgctcactctcactcttgctctctctccctgcttcacacacacacaaatacgcacagacagacagacacacacacacacacacacacacattttcagatctgatgtgtat

SEQ ID NO: 126238 - DNA, 237 bp, Homo sapiens
taatggcaactcccattttatagtttctcagctcaatattcttggtgtccccttttaattctgtctctatatctctgtcactctcttcctgtatctgtctgattctctccccctctctcctctctcttgctcactctcactcttgctctctytccctgcttcacacacacacaaatacgcacagacagacagacacacacacacacacacacacacattttcagatctgatgtgtat

SEQ ID NO: 126239 - DNA, 546 bp, Homo sapiens
gcaaaaacaccactccaaaagcgtaattctctgcatgcctggctgctgaaattacctgctttaagctgaaaccagttttatcaaatggytactgaaacaacctcttgaacactaagactagctttacccaccactgtccctcacctatcagagcctgccagctctcaaaaactttactggtgccagtgaactttctcaaagagaaatacataccgtttttctctctgtctcccttttttataaaacctctaactttctctttatgttttgtacatactaaagacacccattctgcatgtatgtgtgaagttgtaatacttgtatctcaaataaaacattttaatttcagatgtttgtctatatttatttgactttgacaatctgatattatttagcattatttccagtctcccaaataatgtcaaaattttgttatgttagataggaatatcttgttattcaacttgaaggtaaactgcttgatcaatgcatgtaattccttgacagattgtcagcacctctaagacaacatgtagatattgctca

SEQ ID NO: 126240 - DNA, 546 bp, Homo sapiens
gcaaaaacaccactccaaaagcgtaattctctgcatgcctggctgctgaaattacctgctttaagctgaaaccagttttatcaaatggctactgaaacaacctcttgaacactaagactagctttacccaccactgtccctcacctatcagagcctgccagctctcaaaaacyttactggtgccagtgaactttctcaaagagaaatacataccgtttttctctctgtctcccttttttataaaacctctaactttctctttatgttttgtacatactaaagacacccattctgcatgtatgtgtgaagttgtaatacttgtatctcaaataaaacattttaatttcagatgtttgtctatatttatttgactttgacaatctgatattatttagcattatttccagtctcccaaataatgtcaaaattttgttatgttagataggaatatcttgttattcaacttgaaggtaaactgcttgatcaatgcatgtaattccttgacagattgtcagcacctctaagacaacatgtagatattgctca

SEQ ID NO: 126241 - DNA, 457 bp, Homo sapiens
tacataccgtttttctctctgtctcccttttttataaaacctctaactttctctttatgttttgkacatactaaagacacccattctgcatgtatgtgtgaagttgtaatacttgtatctcaaataaaacattttaatttcagatgtttgtctatatttatttgactttgacaatctgatattatttagcattatttccagtctcccaaataatgtcaaaattttgttatgttagataggaatatcttgttattcaacttgaaggtaaactgcttgatcaatgcatgtaattccttgacagattgtcagcacctctaagacaacatgtagatattgctcattattaactcatttcatcttttcatgataaattacaaaaatttaattttcatttttaaaatgcaaaccattatgccttgtattatggcattcttgcattactataaaggaataccta

SEQ ID NO: 126242 - DNA, 567 bp, Homo sapiens
attgctcattattaactcatttcatcttttcatgataaattacaaaaatttaattttcatttttaaaatgcaaaccattatgccttgtattatggcattcttgcattactataaaggaatacctaagcactacataatttatactgaaaaaaaagattgacttggctcacagttctgcaggctgtacaggaagctttgcattggcagttgcttggcttcaagaagggtcctcagggagcttttacacatggcagaaggtgaagcaaaagaaggtatgtcacatggccagagcrggagcaagcagggagaggtgccacacacttttaaacagccagatgtaatgagaactcactcactcttgcaaggacagtgccaagaggatggtgttaaacatgagaaatcagccctcatgaccgcatcacctcccaccagaccccaactccaacactgggaattacaattcgacatgagacttaaagggtacaacatccaaactatttcattccatccctggcccttcaaatctcgtgttcttctcacattgcaaaatacaatcatcccttctca

SEQ ID NO: 126243 - DNA, 567 bp, Homo sapiens
attgctcattattaactcatttcatcttttcatgataaattacaaaaatttaattttcatttttaaaatgcaaaccattatgccttgtattatggcattcttgcattactataaaggaatacctaagcactacataatttatactgaaaaaaaagattgacttggctcacagttctgcaggctgtacaggaagctttgcattggcagttgcttggcttcaagaagggtcctcagggagcttttacacatggcagaaggtgaagcaaaagaaggtatgtcacatggccagagcaggagcaagcagggagaggtgccacacacttttaaacagccagatgtaatgagaactcactcactcttgcaaggacagtgccaagaggatggtgttaaacatgagaaatcagccctcatgaccgcatcacctcccaccagaccccaactccaacactgggaattacaattcgacatgagacttaaagggtacaacatccaaactatttcattccatccctggcccttcaaatctcrtgttcttctcacattgcaaaatacaatcatcccttctca

SEQ ID NO: 126244 - DNA, 614 bp, Homo sapiens
ctcagtcctttggttgttaatctgactgggccggtgcacctaaataataaatatcctcctcaaccccatcagtctctctgattccttaaaaaatcccgctacagcctgggcacggtggctcacgcctgtaatcccagcactttgggaggctgaggagggcagatcacgaggtcaggagattgagactatcatggctaagacagtgaaaacccgtctctactaaaaatacaaaaaattagccaggcatggtggcagtcacctgtagtcccaactacttgggaggctgagacaggagaatggcatgtcccggaatgyagagcttgcagtgagctgagattgtgccactgcactccagcctgggtgacagagtgaggctccatctcaaaataaataaataaataaattaattaattaattattttttaaaatcccactacacaagaaaccattctttcatcctagacctctaggtctgtgctgggatgagctgctgcaaagatttctgaaatgccttcaaggcctttttttaattgtcttggctatcagcacctagctctttttcagttatgcaaatgtctctaataagtggttgctccacagcctgtttagattct

SEQ ID NO: 126245 - DNA, 614 bp, Homo sapiens
ctcagtcctttggttgttaatctgactgggccggtgcacctaaataataaatatcctcctcaaccccatcagtctctctgattccttaaaaaatcccgctacagcctgggcacggtggctcacgcctgtaatcccagcactttgggaggctgaggagggcagatcacgaggtcaggagattgagactatcatggctaagacagtgaaaacccgtctctactaaaaatacaaaaaattagccaggcatggtggcagtcacctgtagtcccaactacttgggaggctgagacaggagaatggcatgtcccggaatgcagagcttgcagtgagctgagattgtgccactgcactccagcctgggwgacagagtgaggctccatctcaaaataaataaataaataaattaattaattaattattttttaaaatcccactacacaagaaaccattctttcatcctagacctctaggtctgtgctgggatgagctgctgcaaagatttctgaaatgccttcaaggcctttttttaattgtcttggctatcagcacctagctctttttcagttatgcaaatgtctctaataagtggttgctccacagcctgtttagattct

SEQ ID NO: 126246 - DNA, 614 bp, Homo sapiens
ctcagtcctttggttgttaatctgactgggccggtgcacctaaataataaatatcctcctcaaccccatcagtctctctgattccttaaaaaatcccgctacagcctgggcacggtggctcacgcctgtaatcccagcactttgggaggctgaggagggcagatcacgaggtcaggagattgagactatcatggctaagacagtgaaaacccgtctctactaaaaatacaaaaaattagccaggcatggtggcagtcacctgtagtcccaactacttgggaggctgagacaggagaatggcatgtcccggaatgcagagcttgcagtgagctgagattgtgccactgcactccagcctgggtgacagagtgaggctccatctcaaaataaataaataaataaattaattaattaattawtttttaaaatcccactacacaagaaaccattctttcatcctagacctctaggtctgtgctgggatgagctgctgcaaagatttctgaaatgccttcaaggcctttttttaattgtcttggctatcagcacctagctctttttcagttatgcaaatgtctctaataagtggttgctccacagcctgtttagattct

SEQ ID NO: 126247 - DNA, 569 bp, Homo sapiens
gtagtaagaaaatggaattcatcagcaatgccttctaagtctggcyctgttttcccatgcagacttttccctgagctctgcttgtcagtcttgctagaacctcaccctaggcagcaacctccagtctgagattgcccttgacagtggctgaggtttgcattgttggaatggattagaaaaaacaaagggaagacagaccaaaacagatttaaatacagatcccatttgttgaagttttaagtaattttaaatgtttatttgcaccagctgcccactcccattgtactctcctcacccaaaaaggtgacttgatattctagtaaaaagccaaactgtgctttagagaaacccacttgttacttctttaaatccatattattttgccaaagtgaatttttcttaatatgctctggcagaatcagtaaactaattatttacaccagagtcacttaacctttcctcttggtcatttgcatgtaaattatttttatatgtataaaatttgcttactcaagaaagctcttgctatatatatatttttttctttttgtggtatcttaacatactct

SEQ ID NO: 126248 - DNA, 638 bp, Homo sapiens
ccatttctgagaaatccacccccatgatccaatcacctccctccagacctaccaccaacattggggatatcacaattcaacatgagatttagagggaacaacatctgaggtatctcatgcctcatgttgtgacttggtataatgtccataagattacactgactttacacatcatattgcagtttttgctagctcttctgtagtaagaaaatggaattcatcagcaatgccttctaagtctggctctgttttcccatgcagacttttccctgagctctgcttgtcagtcttgctagaacctcaccctaggcagcaacctccagtctgagattgcccttgacagtggctgaggtttgcattgttggaatggattagaaaaaacaaagggaagacagaccaaaacasatttaaatacagatcccatttgttgaagttttaagtaattttaaatgtttatttgcaccagctgcccactcccattgtactctcctcacccaaaaaggtgacttgatattctagtaaaaagccaaactgtgctttagagaaacccacttgttacttctttaaatccatattattttgccaaagtgaatttttcttaatatgctctggcagaatcagtaaactaattatttaca

SEQ ID NO: 126249 - DNA, 584 bp, Homo sapiens
cttggtataatgtccataagattacactgactttacacatcatattgcagtttttgctagctcttctgtagtaagaaaatggaattcatcagcaatgccttctaagtctggctctgttttcccatgcagacttttccctgagctctgcttgtcagtcttgctagaacctcaccctaggcagcaacctccagtctgagattgcccttgacagtggctgaggtttgcattgttggaatggattagaaaaaacaaagggaagacagaccaaaacagatttaaatacagatcccatttgttgaagttttaagtaattttaaatgtttatttgcaccagctgcccactcccattgtactctcctcacccaaaaaggtgacttgatattctagtaaaaagccaaactgtgctttagagaaacccacttgttacttctttaaatccatatwattttgccaaagtgaatttttcttaatatgctctggcagaatcagtaaactaattatttacaccagagtcacttaacctttcctcttggtcatttgcatgtaaattatttttatatgtataaaatttgcttactcaagaa

SEQ ID NO: 126250 - DNA, 499 bp, Homo sapiens
tgcagacttttccctgagctctgcttgtcagtcttgctagaacctcaccctaggcagcaacctccagtctgagattgcccttgacagtggctgaggtttgcattgttggaatggattagaaaaaacaaagggaagacagaccaaaacagatttaaatacagatcccatttgttgaagttttaagtaattttaaatgtttatttgcaccagctgcccactcccattgtactctcctcacccaaaaaggtgacttgatattctagtaaaaagccaaactgtgctttagagaaacccacttgttacttctttaaatccatattattttgccaaagtgaatttttsttaatatgctctggcagaatcagtaaactaattatttacaccagagtcacttaacctttcctcttggtcatttgcatgtaaattatttttatatgtataaaatttgcttactcaagaaagctcttgctatatatatatttttttctttttgtggtat

SEQ ID NO: 126251 - DNA, 607 bp, Homo sapiens
ggaaaactggaatgtaagttcaatatgttgcactaagtacatttgaaagtgcatgcatttttattttaattcatcattctcagtcaactatcrcaaggacaaaaaaccaaacaccgcatgttctcacttataggtgggaattgaacaatgagaacacatgaacacaggaaggggaacatcacactctgggggctgttgtggggtggggagagcggggagggatagcattaggagatatgcctaaggctaaatgtcgagttaatgggtgcagcacaccagcatggcacaagtatacatatgtaatgtatacatatgttaatgcaccaattctgcatcaagtcagtgcaatcagagacactgcaagaatgacttttggttttcttttcctagtttttgaaagtttctcaagtctgtcatactggactctgtattacatcttgaatttttttcactcactatagatctcctatacgctcaattgtttagctattaccttaacatttaccctgtgaacccatgacatttgaggctgccaaagtgattattacatgataaaacatatactcggttaaaggcaatatttaacaattgtaaaaccaataaatca

SEQ ID NO: 126252 - DNA, 607 bp, Homo sapiens
ggaaaactggaatgtaagttcaatatgttgcactaagtacatttgaaagtgcatgcatttttattttaattcatcattctcagtcaactatcgcaaggacaaaaaaccaaacaccgcatgttctcacttataggtgggaattgaacaatgagaacacatgaacacaggaaggggaacatcacactctgggggctgttgtggggtggggagagcggggagggatagcattaggagatatgcctaaggctaaatgtcgagttaatgggtgcagcacaccagcatggcacawgtatacatatgtaatgtatacatatgttaatgcaccaattctgcatcaagtcagtgcaatcagagacactgcaagaatgacttttggttttcttttcctagtttttgaaagtttctcaagtctgtcatactggactctgtattacatcttgaatttttttcactcactatagatctcctatacgctcaattgtttagctattaccttaacatttaccctgtgaacccatgacatttgaggctgccaaagtgattattacatgataaaacatatactcggttaaaggcaatatttaacaattgtaaaaccaataaatca

SEQ ID NO: 126253 - DNA, 607 bp, Homo sapiens
ggaaaactggaatgtaagttcaatatgttgcactaagtacatttgaaagtgcatgcatttttattttaattcatcattctcagtcaactatcgcaaggacaaaaaaccaaacaccgcatgttctcacttataggtgggaattgaacaatgagaacacatgaacacaggaaggggaacatcacactctgggggctgttgtggggtggggagagcggggagggatagcattaggagatatgcctaaggctaaatgtcgagttaatgggtgcagcacaccagcatggcacaagtatacatatgtaatgtatacatatgttaatgcaccaattctgcatcaagtcagtgcaatcagagacactgcaagaatgacttttggttttcttttcctagtttttgaaagtttctcaagtctgtcatactggactctgtattacatcttgaatttttttcactyactatagatctcctatacgctcaattgtttagctattaccttaacatttaccctgtgaacccatgacatttgaggctgccaaagtgattattacatgataaaacatatactcggttaaaggcaatatttaacaattgtaaaaccaataaatca

SEQ ID NO: 126254 - DNA, 618 bp, Homo sapiens
ctttttaatgaccatagatcctgacttgatgttttctacctacctctccaaccacatgtcatacacttcccttcttttcttatcacacccaaaacattcttaattatttccacagtctttgtatatgccaaccctttttctgcctctagaattttgtgcttgtttctctttctttctaaaataagctttctgtggctttttgtaaaattagatcattgttctttgaaatctcggctaagaagttttctgaaataccttaattaaagttccttccctggttattagcagtctcctcacttcgtttatttttattgtaatctttaatgattgctttctatttgtttgacttcttgatcaactcaaatttgtatcctcagctcttatcaaaatactaggtaactacacacctattgaaacaactaaacataaaaatagtgacaacaaaagytggcaatgatgaagaaactgtatcattcatacattatttgaattgtaaaatgttataatactctggaaataatttatcagtttctttaaaaactaaacatatatttataataagatccagcaattgcacccctggaaatttatctaagagaaatgtaaacctatatgcga

SEQ ID NO: 126255 - DNA, 591 bp, Homo sapiens
acgaatcttaatgactatctcgggagtatctaactgccattaaaaaatatggaattaaagtaaataaatgttaagcaaaaagagagaagaaaggaaagagagtttactagagaacagtattactactcattgaagaaaacaatagatagtattcaaacacactagaggactagtatattttattataatattattataagataataataagaataaacatagaaacatttataaataccagatgagtatatccygcgcctcaaattaaagtgtaaatacagggcaagattttatataaattatttatatagcaaaaacttatataacagaacttaacaccagcataacaggtatatcaaagacacaaatgggcttaactcaccattaaatggcgtacttttagattggctaatggagcagaatccaatctattctgtgtgcaagaaacatattgaacaaggcaattcagaatggtttaatgtaaaaggaagagcaaagatagatcttgtatgatagcaagatcctgaaatagttgtcagaattttgctattgagacaagatagaatttaagacaaaataaatttaacagga

SEQ ID NO: 126256 - DNA, 175 bp, Homo sapiens
gtcacagtatttccacttccaggcctatacaaataaataaaatcagtgttatacacagaataggtacrcacacacacacaagcgttcagatataaagatttcaactgtagcatcatttgtaataaacaatattggaaacaatgttggtatatattgctaagaaaatgtgtcgaga

SEQ ID NO: 126257 - DNA, 640 bp, Homo sapiens
taaaacaggtcctcaaataaagttgttttattcaaygttgttttgctataatgtagatgagaataaatattgattcctggacagggctaccatctgtgtagggtctgcatgttctccccatgcctgcatgggttttctccaggaactcctgcttcctctcacatccccaagatgtgcatgtctggttaattggcatttccccactgtgtgtcccaatgtgagtgaatgtggttgtgccctgccatggaatagcatcctgtgcagggtttattcctgcattgcatgctgagtaagaataggttcttgccacccgagactctgaactggaataattgggtaaataatcatcttacttgtttttatcaatctttttaaaaatgtatgtatacctcacacttatttcagtgttgaatgttataagtgttttagtctccatttagaagtacagtgataatattgtgaccagaaatatgcagtaggaacttatatcttgttgtatcaattggcctatggtaaaatttgtttcattgttcaccattttgctgatagttgcagtttccaataatctactgatattaaatgtggacttactatgtaaacaatagcaaggatcctaaatcctaggttatatctaagttta

SEQ ID NO: 126258 - DNA, 640 bp, Homo sapiens
taaaacaggtcctcaaataaagttgttttattcaatgttgttttgctataatgtagatgagaataaatattgattcctggacagggctaccatctgtgtagggtctgcatgttctccccatgcctgcatgggttttctccaggaastcctgcttcctctcacatccccaagatgtgcatgtctggttaattggcatttccccactgtgtgtcccaatgtgagtgaatgtggttgtgccctgccatggaatagcatcctgtgcagggtttattcctgcattgcatgctgagtaagaataggttcttgccacccgagactctgaactggaataattgggtaaataatcatcttacttgtttttatcaatctttttaaaaatgtatgtatacctcacacttatttcagtgttgaatgttataagtgttttagtctccatttagaagtacagtgataatattgtgaccagaaatatgcagtaggaacttatatcttgttgtatcaattggcctatggtaaaatttgtttcattgttcaccattttgctgatagttgcagtttccaataatctactgatattaaatgtggacttactatgtaaacaatagcaaggatcctaaatcctaggttatatctaagttta

SEQ ID NO: 126259 - DNA, 640 bp, Homo sapiens
taaaacaggtcctcaaataaagttgttttattcaatgttgttttgctataatgtagatgagaataaatattgattcctggacagggctaccatctgtgtagggtctgcatgttctccccatgcctgcatgggttttctccaggaactcctgcttcctctcacatccccaagatgtgcatgtctggttaattggcatttccccactgtgtgtcccaatgtgagtgaatgtggttgtgccctgccatggaatagcatcctgtgcagggtttattcctgcattgcatgctgagtaagaataggttcttgccacccgagactctgaactggaataattgggtaaataatcatcttacttgtttttatyaatctttttaaaaatgtatgtatacctcacacttatttcagtgttgaatgttataagtgttttagtctccatttagaagtacagtgataatattgtgaccagaaatatgcagtaggaacttatatcttgttgtatcaattggcctatggtaaaatttgtttcattgttcaccattttgctgatagttgcagtttccaataatctactgatattaaatgtggacttactatgtaaacaatagcaaggatcctaaatcctaggttatatctaagttta

SEQ ID NO: 126260 - DNA, 640 bp, Homo sapiens
taaaacaggtcctcaaataaagttgttttattcaatgttgttttgctataatgtagatgagaataaatattgattcctggacagggctaccatctgtgtagggtctgcatgttctccccatgcctgcatgggttttctccaggaactcctgcttcctctcacatccccaagatgtgcatgtctggttaattggcatttccccactgtgtgtcccaatgtgagtgaatgtggttgtgccctgccatggaatagcatcctgtgcagggtttattcctgcattgcatgctgagtaagaataggttcttgccacccgagactctgaactggaataattgggtaaataatcatcttacttgtttttatcaatctttttaaaaatgtatgtatacctcacacttatttcagtgttgaatgttataagtgttttagtctccatttagaagtacagtgataatattgtgaccagaaatatgcagtaggaacttatatcttgttgtatcaattggmctatggtaaaatttgtttcattgttcaccattttgctgatagttgcagtttccaataatctactgatattaaatgtggacttactatgtaaacaatagcaaggatcctaaatcctaggttatatctaagttta

SEQ ID NO: 126261 - DNA, 518 bp, Homo sapiens
aggaattcgagaccagcctggccaacgtggtgaaaccccatatcaactaaatatacaaataaaattcgtgggcatggtagtgcgtgcctgtaatcccagctactcaggaggctgaggcaggagaattgcttgaacccagggggcagaggtggcagtgagccgagatcatgctactgcactccagcctgggcaacagagtgagactccatctcaaaaaaaaaaaaaaaaaaaaaaagacattwtaaatcagtattgaaaattgatgctttcaaggtcacagctgacaatataagaacaaatcaagtgtagaaatagacatgtgctatattaattttcaagtcacagtgaattgtaggttagtaactcagatgtatttaattaatgacagttgtgtggaaagcattatattttatcagagagtaatgaaggattctccagtggcctattctgagttgagtgccataagctcaatttcagcttctgcaggttaaaaatgacatttattggatgtctttcgt

SEQ ID NO: 126262 - DNA, 592 bp, Homo sapiens
cccttcttccctaactcataccctcctgcacctcactgccttagaaactggtgtgatggacatagttatgcctcccacaccgcttcgaggataggcttgttgctcagctgcctggagtcttgtcgtcaggtagtgctcagttgatagcatctttggtatcacttaagctgtagagagacacctcattcaaggtcacactctttccaaggtaagatgaaccatattaaattattggttgagataatgatataaagacccagccattttggcccaatgaggggaagtctcacaggacatttcagctctggarctttctgtagattgactaggctaacagcaggcctgaagatcagcttgacttcacgctctgcccatcatacttccttcgtccccttcaaatgctgatcctagggtagcccctgataaatattccgcattctaaactccaactcagaaaagcccatgtgctaaacataatcatgaatcattataccttggtcttgccatgccatattattgcgattgaaacaattttgtgatcatcattttatctctgtttaacacaagaagataagtagatactcaataaata

SEQ ID NO: 126263 - DNA, 592 bp, Homo sapiens
cccttcttccctaactcataccctcctgcacctcactgccttagaaactggtgtgatggacatagttatgcctcccacaccgcttcgaggataggcttgttgctcagctgcctggagtcttgtcgtcaggtagtgctcagttgatagcatctttggtatcacttaagctgtagagagacacctcattcaaggtcacactctttccaaggtaagatgaaccatattaaattattggttgagataatgatataaagacccagccattttggcccaatgaggggaagtctcacaggacatttcagctctggaactttctgtagattgactaggctaacagcaggcctgaagatcagcttgacttcacgctctgcccatcatacttccttcrtccccttcaaatgctgatcctagggtagcccctgataaatattccgcattctaaactccaactcagaaaagcccatgtgctaaacataatcatgaatcattataccttggtcttgccatgccatattattgcgattgaaacaattttgtgatcatcattttatctctgtttaacacaagaagataagtagatactcaataaata

SEQ ID NO: 126264 - DNA, 592 bp, Homo sapiens
cccttcttccctaactcataccctcctgcacctcactgccttagaaactggtgtgatggacatagttatgcctcccacaccgcttcgaggataggcttgttgctcagctgcctggagtcttgtcgtcaggtagtgctcagttgatagcatctttggtatcacttaagctgtagagagacacctcattcaaggtcacactctttccaaggtaagatgaaccatattaaattattggttgagataatgatataaagacccagccattttggcccaatgaggggaagtctcacaggacatttcagctctggaactttctgtagattgactaggctaacagcaggcctgaagatcagcttgacttcacgctctgcccatcatacttccttcgtccccttcaaatgctgatcctagggtagcccctgataaatattccgcattctaaactccaactcagaaaagcccatgtgctaaacayaatcatgaatcattataccttggtcttgccatgccatattattgcgattgaaacaattttgtgatcatcattttatctctgtttaacacaagaagataagtagatactcaataaata

SEQ ID NO: 126265 - DNA, 470 bp, Homo sapiens
  misc_feature (1)...(470): n = A,T,C or G
taaatatgactttgaatactcataaaatcaaccttgaagcaatgtttttcaggtcaaaatcttttcctttcatatccttgctagttgctgcatttaatcaaaccattaatttatgtcatcaccacagcagtcatgttgtcagtgccaggatcatkggaagggggtggagcaatggggtgaagggtaaggctgggagaaccagaagtatgctgacctgacattgaagatgtagtgaggccattggctcatcaacaagggataaggtcagaagttntgatgtaggcacaagcaaggtttaggaagggctgtgcttcagaaacctagcagcatggacaaaaaccaggggacccaaatgctaaaagacacagttgattattctctcctttatcctgttaattaaatcattcattcaacaaacatttatcaggcactttctatgtcccagaccctgtaccaggcactaggaattc

SEQ ID NO: 126266 - DNA, 510 bp, Homo sapiens
tactctgagagtagctcccctttaaacaagtaatagaaaaatgaatcaggagcctatacgtggctaaatttgtgtgtatacaagaaaacttgtcaaacaaaataaaataatataaacatcaaaattcagacatctactttcattatttaactaaaataaattttatcacaaaataaccagatatagtcaaatatataaagtcttatgaagtataagccttttattatatcagtgtaagcattcttaaataattagctgagttttagaaaatattcatgtgataactctttaatgctgctctcattagatgattaactatgactccacagagaaagacacccacttattgtgacaactattcaatctctgcatttttttttgcaattaarggacaactagaccaagtatttacacttcatagccaggtacacgcctggatgcctgtacttcccatatgccctgggacatgacaattaccatcaataatggcacctagttgcctgcccagct

SEQ ID NO: 126267 - DNA, 510 bp, Homo sapiens
tactctgagagtagctcccctttaaacaagtaatagaaaaatgaatcaggagcctatacgtggctaaatttgtgtgtatacaagaaaacttgtcaaacaaaataaaataatataaacatcaaaattcagacatctactttcattatttaactaaaataaattttatcacaaaataaccagatatagtcaaatatataaagtcttatgaagtataagccttttattatatcagtgtaagcattcttaaataattagctgagttttagaaaatattcatgtgataactctttaatgctgctctcattagatgattaactatgactccacagagaaagacacccacttattgtgacaactattcaatctctgcatttttttttgcaattaaaggacaactagaccaagtrtttacacttcatagccaggtacacgcctggatgcctgtacttcccatatgccctgggacatgacaattaccatcaataatggcacctagttgcctgcccagct

SEQ ID NO: 126268 - DNA, 515 bp, Homo sapiens
gtttattttttccttttgttttgttttctgtctttaatagtggcattcctgaaatgtccatcatatttcagagtcaggtatcgaaaagcagataagatttgtggtaacagcatataygtgggccacttatttaagtgggggcttccaaatttaagagttttcatatctttttagatgtttcagaaaatatgccaatctccggctaggaagtataaatctggctgccagcattcttagatccaagtagagattaggaaatagatgtttcacgattcatatgcagacttgcattcattccctacctggagtttttttgacttatcacaacctttgctgtgcctggttcaatcttcagaaaataaatcggtcccagagtaagaaaaaatagtttcatgactatgccctgttttcatctttatgctactcctgccttctgaaaatcttggtcccttcatttctgagtctttttgatgttctatgtgaattttatctctctaaaactgttatttttaaaa

SEQ ID NO: 126269 - DNA, 515 bp, Homo sapiens
gtttattttttccttttgttttgttttctgtctttaatagtggcattcctgaaatgtccatcatatttcagagtcaggtatcgaaaagcagataagatttgtggtaacagcatatacgtgggccacttatttaagtgggggcttccaaatttaagagttttcatatctttttagatgtttcagaaaatatgccaatctccggctaggaagtataaatctggctgccagcattcttagatccaagtagagattaggaaatagatgtttcacrattcatatgcagacttgcattcattccctacctggagtttttttgacttatcacaacctttgctgtgcctggttcaatcttcagaaaataaatcggtcccagagtaagaaaaaatagtttcatgactatgccctgttttcatctttatgctactcctgccttctgaaaatcttggtcccttcatttctgagtctttttgatgttctatgtgaattttatctctctaaaactgttatttttaaaa

SEQ ID NO: 126270 - DNA, 515 bp, Homo sapiens
gtttattttttccttttgttttgttttctgtctttaatagtggcattcctgaaatgtccatcatatttcagagtcaggtatcgaaaagcagataagatttgtggtaacagcatatacgtgggccacttatttaagtgggggcttccaaatttaagagttttcatatctttttagatgtttcagaaaatatgccaatctccggctaggaagtataaatctggctgccagcattcttagatccaagtagagattaggaaatagatgtttcacgattcatatgcagacttgcattcattccctacytggagtttttttgacttatcacaacctttgctgtgcctggttcaatcttcagaaaataaatcggtcccagagtaagaaaaaatagtttcatgactatgccctgttttcatctttatgctactcctgccttctgaaaatcttggtcccttcatttctgagtctttttgatgttctatgtgaattttatctctctaaaactgttatttttaaaa

SEQ ID NO: 126271 - DNA, 515 bp, Homo sapiens
gtttattttttccttttgttttgttttctgtctttaatagtggcattcctgaaatgtccatcatatttcagagtcaggtatcgaaaagcagataagatttgtggtaacagcatatacgtgggccacttatttaagtgggggcttccaaatttaagagttttcatatctttttagatgtttcagaaaatatgccaatctccggctaggaagtataaatctggctgccagcattcttagatccaagtagagattaggaaatagatgtttcacgattcatatgcagacttgcattcattccctacctggagtttttttgacttatcacaacctttgctgtgcctggttcaatcttcagaaaataaatcggtcccagagtragaaaaaatagtttcatgactatgccctgttttcatctttatgctactcctgccttctgaaaatcttggtcccttcatttctgagtctttttgatgttctatgtgaattttatctctctaaaactgttatttttaaaa

SEQ ID NO: 126272 - DNA, 526 bp, Homo sapiens
tttgaattcattatagattttgaagattaaccccttatcagatatatggtatgccaatacattctcccatttaattgtaagctgccttttgaggctgttgattctttcatttgtgcaaaagctttttttttttttttttttttttttttttttttttttyagtgctatcccacttgtctatttttgcatttgttgcctaggtttttggtgttatatccaaaaatatcattacccagatcaatgataagaaattttttctctaggttttcttcccttaattttacagtttcaagtcttatatttagtttttaattgagttgatttttgtatattgtgtgatatagtgtaaaatttcattcatttttatgtaaatacctagttttcccaacaccatttactgaagagactatacattctcaattgcatgttcacatatgtggcaccttggtgcaagatcagctgaccataggtatgtagttttatttatgaactctctattctattccatttctctatgtccattttt

SEQ ID NO: 126273 - DNA, 544 bp, Homo sapiens
caaactccattcttgtctgatattaataaagatatgctaagggctgggcgaggtggctcactcctgtaatcccagcaatttgggagtctgaggcgggtgaatcacttgagatcaggagtttgagaccagcctggccaacatggtgaaaccctgtctctactaaaaatacaaaaattagctgggcatggtggttcatgcctgtagtccccgctattcgggaggctgaggcagcagaattgcttgaacccaggaggtggacgttgcagtgagctgagatcctgccrctgaactccagcctggaagaaagagggggactccatctcaaaaaagaaaaaaaaagatatgctaaagttttggggggaatgttaatatttacccgctatatcttttttcatcctttgactttcagacttgctgtgtcttatgacttcgatgtgtcttttataaacagtatatagcaggcttttaaaaaatgcatatgtagcttaacagaatgtataattaaacaatatattatcccctttcctaaatactgcaagaaaga

SEQ ID NO: 126274 - DNA, 525 bp, Homo sapiens
cctggaaaggggatcttatcacagcctgagataactcactggcatcacaccgtaacatcaaatacaacataagcattgagagtttcatgtaaatgtctttaaagttttaatgtcttcaaagttatactttggtctacttatagtttcttattattctcaagtgagagctatcacatttctatgcattactttaaagcacaatatggatgctttgtgacctcacaaactctaactttgtgaaaaataccactaaaggcacaaatatccagctatgcttggcaycttcctcaaaggtttgctgttcattatcatccacgctcaaaatatcacttttgaacatcaaatagcgaaggtaaaatctgaatatttgggagtgagaaaaatgagtcagtaatgttggaatatttgaataaaactgacagagtcagatcagcttgttaaaaaggtgagaggttaatgaaataagcaaagtataaattattataagtcagtataagggactgactgtgtcaatctaagttagac

SEQ ID NO: 126275 - DNA, 525 bp, Homo sapiens
cctggaaaggggatcttatcacagcctgagataactcactggcatcacaccgtaacatcaaatacaacataagcattgagagtttcatgtaaatgtctttaaagttttaatgtcttcaaagttatactttggtctacttatagtttcttattattctcaagtgagagctatcacatttctatgcattactttaaagcacaatatggatgctttgtgacctcacaaactctaactttgtgaaaaataccactaaaggcacaaatatccagctatgcttggcatcttcctcaaaggtttgctgttcattatcatccacgctcaaaatatcacttttgaacatcaaatagcgaaggtaaaatctgaatatttgggagtgagaaaaatgagtcagtaatgtyggaatatttgaataaaactgacagagtcagatcagcttgttaaaaaggtgagaggttaatgaaataagcaaagtataaattattataagtcagtataagggactgactgtgtcaatctaagttagac

SEQ ID NO: 126276 - DNA, 595 bp, Homo sapiens
tgaattcttaacatactcagcacacatactgtaatctatgactgaatagaggcctttctctcctcagggagaatggaaggatgttattttggggaacagtgaggctacctttaccattttttttctaactcacaaaatactgcaataaagtattgctcaactcagactgaaacaattttcccatctgtcaaaatattttaaatagtatcaagctggtattactttgtcaaaacatttcatcagagacagtatctaaatttaaacaagcagttcctcgaactatgtaagtaaggtgaataagctgccactggcacggtatatwttttggaaaatccacaaggtctcattagaaagtccttaaaggaaatgggtgtttaaaccaaggacgagtgtaccttgggctgaacatttcattgtccttgaaatgatttatttcaactcctcccaaacgccatagaacaagctcagctttacaatacttctggtcaaagtctcagtaaactcacaattatgcattgaaatgtgggtaatatggattgacttagagatctccacaaacacaagcagataatttgcatatattctccaaaggaat

SEQ ID NO: 126277 - DNA, 613 bp, Homo sapiens
ctaacctttggaacatacagaatatagttcacatttggaacattatgaaatatagcaaaaggttttaatgtccttttgtgctaattttaacatctgattgagttatgcattgttttgattggttgatttttcattatgtctcatgtttgtcttactcttcctggactcttcagcttcttctcaactctggaartctgccaggctttgtcttagtgcgccttctaagtgtgctgacccagaaattctcacaaggcagtaagctgggtaagagtaggagggtcacttcagttgtttcttatctctcaaggatgactggccttcattgcttgatgccagtgttttgaaaagtatttcatagattttgtctgtttttgttgttgttgttgttcttgtttttttatgtgtgaaacctttgttatgatttgatttgaagccattttccttttgcttccatactctccatattgcaagaacataaaattgcacataaagaattagaaagatgatcttatctgaagaattttcacccttttgtttttgtatcttacagtgttgaaactctagtttcaaatacattataaaatagtaaagttaatggtcaaaaagaaagcaa

SEQ ID NO: 126278 - DNA, 613 bp, Homo sapiens
ctaacctttggaacatacagaatatagttcacatttggaacattatgaaatatagcaaaaggttttaatgtccttttgtgctaattttaacatctgattgagttatgcattgttttgattggttgatttttcattatgtctcatgtttgtcttactcttcctggactcttcagcttcttctcaactctggaagtctgccaggctttgtcttagtgcrccttctaagtgtgctgacccagaaattctcacaaggcagtaagctgggtaagagtaggagggtcacttcagttgtttcttatctctcaaggatgactggccttcattgcttgatgccagtgttttgaaaagtatttcatagattttgtctgtttttgttgttgttgttgttcttgtttttttatgtgtgaaacctttgttatgatttgatttgaagccattttccttttgcttccatactctccatattgcaagaacataaaattgcacataaagaattagaaagatgatcttatctgaagaattttcacccttttgtttttgtatcttacagtgttgaaactctagtttcaaatacattataaaatagtaaagttaatggtcaaaaagaaagcaa

SEQ ID NO: 126279 - DNA, 560 bp, Homo sapiens
ggtgagggctacattcttgacttgcaaaaggccacctgctggctgycaactcacagatggcagacagagggagctctctgctgactcctctaataaggtactcatgcattcatggtgcacagcctcataaccttatcaaaacctaatcacctcccaaggtctcacctcctgatacattcccatggtggttggttagggcttccacaaaggaatctgaggactcactttgtccatggcaggtctcatctctgaccactctcctcattcaccacctcagtctcacagccgtttgtcttcccaaaacacccttgacatgcaccctgccagagccagccgctccaagtgcctgccccatcctgcgccatgtgagcctcactccctgggggccttctcaagtgccagccttcctggccttttctgttcacctctactccacggtgtggactcagctacacatttctaatagtccttagtctttttcttttttcctgtagcaattatcacccctaacatacaatttccaggctgtcatagctgatttttcgcatattttcctgaat

SEQ ID NO: 126280 - DNA, 533 bp, Homo sapiens
ctacacaacgagagtttccaaagtgctctctgaaagggaatgttcacctctgtgacttgaatgcaatcgtcacaaagtagtttctgagaatgcatctatctagttcttacgggaagataattcctkttccacctcaggcctcaaagccctccaaatatccacttgcagattctagaaaaagagtgtttcaaagcttctctctcaaaaggaaagttcaactctgtgagttgaaagcaaacatcacaaagaagtttctgagaatgcttctgtttagcttttctgtgaagattatcccgtttccaacgaaatcttcaaagaggcccaaacatccacttgcagatgccacagaaagagtgtctggaaactgctgtttgaaaaggaaccttcaactctgtgagttgaatgcagtcatcacaaacaagtttctgacaatgcttctctctagtttttacgtgacgataattcgttttccaccacaggcctgaaagctctccaaatgtccacttgcagaccctacgaaaagcatgcttctc

SEQ ID NO: 126281 - DNA, 533 bp, Homo sapiens
ctacacaacgagagtttccaaagtgctctctgaaagggaatgttcacctctgtgacttgaatgcaatcgtcacaaagtagtttctgagaatgcatctatctagttcttacgggaagataattccttttccacctcaggcctcaaagccctmcaaatatccacttgcagattctagaaaaagagtgtttcaaagcttctctctcaaaaggaaagttcaactctgtgagttgaaagcaaacatcacaaagaagtttctgagaatgcttctgtttagcttttctgtgaagattatcccgtttccaacgaaatcttcaaagaggcccaaacatccacttgcagatgccacagaaagagtgtctggaaactgctgtttgaaaaggaaccttcaactctgtgagttgaatgcagtcatcacaaacaagtttctgacaatgcttctctctagtttttacgtgacgataattcgttttccaccacaggcctgaaagctctccaaatgtccacttgcagaccctacgaaaagcatgcttctc

SEQ ID NO: 126282 - DNA, 533 bp, Homo sapiens
ctacacaacgagagtttccaaagtgctctctgaaagggaatgttcacctctgtgacttgaatgcaatcgtcacaaagtagtttctgagaatgcatctatctagttcttacgggaagataattccttttccacctcaggcctcaaagccctccaaatatccacttgcagattctagaaaaagagtgtttcaaagcttctctctcaaaaggaaagttcaactctgtgagttgaaagcaaacatcacaaagaagtttctgagmatgcttctgtttagcttttctgtgaagattatcccgtttccaacgaaatcttcaaagaggcccaaacatccacttgcagatgccacagaaagagtgtctggaaactgctgtttgaaaaggaaccttcaactctgtgagttgaatgcagtcatcacaaacaagtttctgacaatgcttctctctagtttttacgtgacgataattcgttttccaccacaggcctgaaagctctccaaatgtccacttgcagaccctacgaaaagcatgcttctc

SEQ ID NO: 126283 - DNA, 559 bp, Homo sapiens
gtttcaaagcttctctctcaaaaggaaagttcaactctgtgagttgaaagcaaacatcacaaagaagtttctgagaatgcttctgtttagcttttctgtgaagattatcccgtttccaacgaaatcttcaaagaggcccaaacatccacttgcagatgccacagaaagagtgtctggaaactgctgtttgaaaaggaaccttcaactctgtgagttgaatgcagtcatcacaaacaagtttctgacaatgcttctctctagtttttacgtgacrataattcgttttccaccacaggcctgaaagctctccaaatgtccacttgcagaccctacgaaaagcatgcttctcatctgctctatgaaaagcggggtgaaactctgtgagttgaacacaaacatcacagagaagtttctgagaatgcttctgtttagttttaatgtgaagatattcccgtttccaaagacatcttcaaagaggaccacatatccacttgcagattccacaaaaagagagattcaaaactgctctatccataggacgtttcaacgctttgagttg

SEQ ID NO: 126284 - DNA, 576 bp, Homo sapiens
cttctctctcaaaaggaaagttcaactctgtgagttgaaagcaaacatcacaaagaagtttctgagaatgcttctgtttagcttttctgtgaagattatcccgtttccaacgaaatcttcaaagaggcccaaacatccacttgcagatgccacagaaagagtgtctggaaactgctgtttgaaaaggaaccttcaactctgtgagttgaatgcagtcatcacaaacaagtttctgacaatgcttctctctagtttttacgtgacgataattcgttttccaccacaggcctgaaagctctccaaatgtccacttgcagaccctacgaaaagcatgcttctcatctgctctatgaaaagcggggtgaaactctgtgagttgaacacaaacatcacagagaagtttctgagaatgcttctgtttagttttamtgtgaagatattcccgtttccaaagacatcttcaaagaggaccacatatccacttgcagattccacaaaaagagagattcaaaactgctctatccataggacgtttcaacgctttgagttgaatgcaatcgtcacagagaagtttct

SEQ ID NO: 126285 - DNA, 643 bp, Homo sapiens
taaaaaattgcatataaatggatcaatgcagttcaaacccaaaaactcaaagatctccaaaaaattttccaatacatttattgtaaaaaactgcatgtaaatggaccgagacagttcaaacccatgttgttcaagggtcaactatacatgtgtatacagatatgtatatacacatatataatacatataataatgtatacagaaacaaagttctttttaaatacataattgatgatgtgaaagcaaatggatagtgtgtctatttggagtttctaaaagttattaggccctgaagattgttgactttggaaactgagtcacacagcttgaacttttaattactgacctttcaaaaatagattaacttccttcygaatttccttttttatggctaagaccacgtggccctgacataaaaaaagaccccttgactgagacaaaagaccccttgactattacgtctttctttaatatagaatgttaaatatgcctttcaaaaaaaaagaaatgctgcatataactaagcaaattgttgtaactattcactaaccctctatggaaaaataatgtaatctttttaatcttccccagaactttcctgcttaaatgatcttcaaacattccctctttggagcactgaccc

SEQ ID NO: 126286 - DNA, 486 bp, Homo sapiens
atgaagtcatgtaatttagctctagctaatagaacattaagcaaaaagtgatatgagttcttgtagatcagtcttttaagcattgggtatgcatcagctctgttctgtttctcaatctgctggctagatgcagttaacaaagaaacctacgtaatattgaaaccaaaagatggaagaagcctggatctctaattcactacttgaataaarctagtcatttgctaccttaaacaggaaatacatctaccttggacaagaaaaagtagtatcaggaaataaattgctaccgtctttgagccattataataacgtgggctctattttttgatgcagctggcattaccctaactatactcttccttgtcatctactaaattccagtatagtttatcatattaatgggaaactttggcatataaccaacattttttttctctctgtcccaaccctagcattatcatgagtaactggaatatccattagaca

SEQ ID NO: 126287 - DNA, 545 bp, Homo sapiens
tgaataaaactagtcatttgctaccttaaacaggaaatacatctaccttggacaagaaaaagtagtatcaggaaataaattgctaccgtctttgagccattataataacgtgggctctattttttgatgcagctggcattaccctaactatactcttccttgtcatctactaaattccagtatagtttatcatattaatgggaaactttggcatataacmaacattttttttctctctgtcccaaccctagcattatcatgagtaactggaatatccattagacaacttatccaaaactatgtcctctcaagtccttgacctctagtttcaaattatttccccctcaacctcagtttggttatttacactcataggaatgctttgaatattgtcatctcctataactcctccatcttcaaaatcaaaatcaaccaatctgccatatgactataatctcttcatcacaccagcttgttcaagcgctctcatgatgactactaattgatttcattgaaacggtcattcttctttcacttccttctac

SEQ ID NO: 126288 - DNA, 605 bp, Homo sapiens
tttcgaatcccctttgctctttctgcttctaggcctttttctatattgttatttggtaccctgcttcctgacctgactaacagctccactgaaatccctctagacagggttaaatacgcacggatgctgatgttgtaacctctatcatagagtttattacactgctttgccatttgcttgattatttccctctgtgggaccttagttttttgagtgctgatatcacatcttcctcattcccaactgcaccctsaggacttaacacagtgcccagagcagggcaagtttcatcaaatgggtgaacaactgtaggaaaaaaattgctaggacacctgatgaccctttggaaacaagagctcaccatggaggcagtggacactgccacagcattatgaaagtgaccagcaacaggacatggccacctagagaaaggagagggagaagtcaaggaaaaaggttaaaaggatattcatgaagatttaggacatctgttaggaacaacagatttggagtgagacagcacggggttcaaaattcagctctaccatttactggctgtacaccttttccgagttacttaacctccctactcctcaccctcatga

SEQ ID NO: 126289 - DNA, 605 bp, Homo sapiens
tttcgaatcccctttgctctttctgcttctaggcctttttctatattgttatttggtaccctgcttcctgacctgactaacagctccactgaaatccctctagacagggttaaatacgcacggatgctgatgttgtaacctctatcatagagtttattacactgctttgccatttgcttgattatttccctctgtgggaccttagttttttgagtgctgatatcacatcttcctcattcccaactgcaccctcaggacttaacacagtgcccagagcagggcaagtttcatcaaatgggtgaacaactgtaggaaaaaaattgctaggacacctgatgaccctttggaaacaagagctcaccatggaggcagtggacactgccacagcattatgaaagtgaccagcaacaggacatggccacctagagaaaggagagggagaagtcaaggaaaaaggttaaaaggatattcatgaagatttaggacatctgttaggaacaacagatttggagtgagacagcayggggttcaaaattcagctctaccatttactggctgtacaccttttccgagttacttaacctccctactcctcaccctcatga

SEQ ID NO: 126290 - DNA, 664 bp, Homo sapiens
ttttgttgctttcaaaatttagctttttaaattttaatgggttgatatattatttttacaaatcatatagatttcaaaactcatgaaggtggggattacatctccacatgacttaaaacatagtaggtgcttagtagttattggttgccttgagctgacttccattagagttaaaaagctcccgtttaaaaatagtaagttatttatgggagcataaattcccctaagggtaaattactgttcttcacttaggtaatcagattgataccttaatgagagttgcagcactgaagagatgggaggtttaattcttacaaggggaatacaatgatttttttttttaaagtaggcttgaggatgtagcaatatgccgtaagtgttaactgtgaagtaagcaagtactggatacttwatctcacttaacttgatctcagtaatgctcttcctattatattttacattttacctacttactcttggggtaaatgatgtttttaaaaaatcataaaaaatacagttctaatacctgacatgtactaagttttcagaactatttgtttgatgaataaatgagtgactttttaatctataggttgggagattgagaagcagcaaatttaagtgaattacccaagatcacgcaagcaatgattgactggattgg

SEQ ID NO: 126291 - DNA, 664 bp, Homo sapiens
ttttgttgctttcaaaatttagctttttaaattttaatgggttgatatattatttttacaaatcatatagatttcaaaactcatgaaggtggggattacatctccacatgacttaaaacatagtaggtgcttagtagttattggttgccttgagctgacttccattagagttaaaaagctcccgtttaaaaatagtaagttatttatgggagcataaattcccctaagggtaaattactgttcttcacttaggtaatcagattgataccttaatgagagttgcagcactgaagagatgggaggtttaattcttacaaggggaatacaatgatttttttttttaaagtaggcttgaggatgtagcaatatgccgtaagtgttaactgtgaagtaagcaagtactggatacttaatctcacttaacttgatctcagtaatgctcttcctattataytttacattttacctacttactcttggggtaaatgatgtttttaaaaaatcataaaaaatacagttctaatacctgacatgtactaagttttcagaactatttgtttgatgaataaatgagtgactttttaatctataggttgggagattgagaagcagcaaatttaagtgaattacccaagatcacgcaagcaatgattgactggattgg

SEQ ID NO: 126292 - DNA, 550 bp, Homo sapiens
tcattttgtagaaacaaagcttccactttattagactttttactaagcatgatttttacagtattcacttttgcagaaaaggcattatttattcaggttaaataatgcagtgtattatgatagctttgagacaatatttttatgcaataagcatttagtagttataaggatagttttgagagaaatgcgttatattagattggttttgattaagacgaagaaagtcagttattaaaaagtggaaacataacagttaggaaagtataacagttagratggacagaaaataaattgatatatgaagggctgtattagagagcaatatgaacaactgctttctgttttcatggaggatacatagtgtgagtgcagggaaggagaatttagatctaagacagaatatgttaaagaaaaaaatggttatattccagtgaataaaataaggactgcaataacaacgggcatctattaagggcttactatgatgtcagtataaccaaagcacttagcaatgcgttaacccatttaagcctcaaaaagcaaaattaaa

SEQ ID NO: 126293 - DNA, 567 bp, Homo sapiens
gtctcactctgtcacccaggttggagtgcagtggcgtggtatgatcttagactcaytgcaccctctgcctcctaggctcaagcagtcctccaacgtcagccccccaagtagctgggactacaggcatgagcgactatggcatgctaatttttgtattttttgtagagacagggtttcaccagattgcctaggctgttcttgaactcctgagctcaagcgatccacttgcctcagcctcctaaagtgctgggattacaggcttgagccactgctcctggcctcctctagtcttcttagtacctctgtgggccatcacaggggcttgtagaaacttgcacattcccaggattccaatctttgcgatgagactggtaatgtgtagggctctagagtccttagcttcctcctagtttataattcctatgcgatgatgtcccattccccacagtcaagccatgaaggtcctcctaccccttgtaccctccccatggtgtttctgctatgaggatgtgcacgttctgacccagcccttcttctctatcttcattttccctcatcccctagagc

SEQ ID NO: 126294 - DNA, 653 bp, Homo sapiens
gtgatgacaaccagaggtcacttttgttgctaccttggatttgacagggtttcgccagcttctttacagcatcctattttattattagcgggctctttgtgacctgtactttgtaaaaccagtcctgctgaactcctatctcaatttcaaatagcagtgaaacagcactaacattgggctaaatgtacaaatgaagatcatattgtcaataaggccaattaacattcaaaatgttacttagattcttaaaaattgcaataaaacaaccttggattgtgctaatgaaagaaataaaattgttaaatgagcaattttaagtagtcataaatttcaaagcatatggaattgtgttagtttcttatgactgccatgacaaattattgcaaattcattggtttaaacaacataaattgctattctctaacwgttcaggaggcaagaaatctgaactctaattgtcagtagggttggttgtttctgaaagttctgagggagaaatcagcccatacctctctcttagctaatggtggttatagtaaatccctggcttctcttggcttgtagatgcgtcctccaatttctgtcttcatcttcacatcttttctctgtctctctttttcttagaagaacacaactcattggtttagagctta

SEQ ID NO: 126295 - DNA, 528 bp, Homo sapiens
aacaaacaaaagaaagagacttaattggctcatgaaactgaaatgctacctgcaggcatggctgtatccaggcactcaaacaacatcaacatagtctctctctctcaccccgtccccactcacccatgtctcttggctctgttttcctctgtgtcaccttcctcctggccagcttcctygtcgtggtggtccccagcccttctaggtgttcatcatcctgaggactggcagtggcagcagaaagagggctcctctttcccagtagctctcccagaattcaaggattgactcaaactagcccagttaggtcgtgggcacatccctccacaaatagcactgtgggacgcgaaagtgatcagctccatccaaaggatgtggagggagggtgaagcgggagaggctctccaagggaaagtgaggatgctgctagggaagaggaggtggatgctgggcaggtacagacaacagatgtccactagatccacctagaagaccgttcattcaaacttgattatgtgcactgggtgg

SEQ ID NO: 126296 - DNA, 247 bp, Homo sapiens
gccaccagtgtccctgcatcttcagggcactttctgaacctcagcaccttcctctccaaaatgaggaaaaacagcacccgctccatagtgtygttgagaggattcaacaagctccttgctacaaagcccccagtaggacctggcatataattcctgttttgaaaatgtttgtgtatgtctcacatcttacctaattcatgcccctgcctgctcataccaagaacaggtatccagtaaaaagggagaa

SEQ ID NO: 126297 - DNA, 454 bp, Homo sapiens
ggtttgtgagggtgaaggagttggttagtctgttacctccaaaggstggactttctgactaagactgggttttgttggtggaaggaaccgggttttttgggtttttgtgttggttttttttttttttggttgtttttgtttttgttttttttagctaactgttctgaaaaaggagttggtagactgtgctcaaaaggaatctctttacaaagaattaatcccagagttaagaaaacacagcctgttgacagaaaacacacacacacacacacacacacacacaccacaattcttcactcactcccaaccctcttccctgatctccatcccccaatgtcataacagcttcctgaatggcccacttctccccactatcatttgtggcagttcaaacagtcctaaacatacaaaacaaaaagaagattctggtaagaaaacaattagcagagaattc

SEQ ID NO: 126298 - DNA, 570 bp, Homo sapiens
aaaaacctcaaaagtagggaagctgacagtgtagccttcagtgtggccaaaggcccgagagcccctggcaaatcactggtataaatccaagagtccaaaagctgaagaacttggagtctaatattcgagggcagaaagcacccggcacaggagaaagatggaggctggaagactcaacaagcgtagtccttccgcattcttctgcctgctttattctagccatgcagggcagctaattagatggtgcccacccagattgagggtgggtctgcctctcccagtccgctgactcaaatgataatcccctttggcaacactctcacagacatacccaggaacaatactttgccaatcaagttgacartcagtattaaccatcacactaactcattgttattttaaatttttatacaggtattttgagagcttttgttttgtattattctttgtcattcaggtatgaagaagagcatgaatgactgccctgccatagtcttcataataagatgatagaatatatatttataccggaacacacaaatgctttttctattggtttcaatttattta

SEQ ID NO: 126299 - DNA, 553 bp, Homo sapiens
aggctaaatggcctgtcactgagagtctcatttaatttttgttatgttgctagtatgatcttaacagccagctttaaagaaaaaataaccctgctgttggcaaaaatcagtacttcatttaaggaattgacaaagtgctagtgtaaagatctcggagttaattggcagcaaaacaaacgtgtggtgttatgtcaggttgtcaggtagttgtgttgtgtgaactctgaacaagcatcaggctagaaaggttgaccaaatttgtcgcactggctatgcaagttaacacagagaataacaagataaatttccccaaacactattgaagcatgaagtcttgcctcaattgttaaaactgacagacagacaatttagcggtaagcttgtcaaatgttgtacctgatgaagaatcctctcctttatacaatttagtattgattatttaayttctgtttccagtgactaggagctcagtgtatcacaaagttgaagagtgtaagaaataacatctctaatattaacatcactcttacttattttgaatttttttttattt

SEQ ID NO: 126300 - DNA, 567 bp, Homo sapiens
ctcattgacatttatttatttatttatttatttagcagaataggacaaatagaaacctgtcataaactactcaagcatttccttggaatctcaagagttccatgtttattttaacaatttatattcacctctcttcctcttccttcatatacctaaactaatatgccatgaagtctgtgttgttacatttaagtcatgtagtaaagcagtgaaccccaagttaaccttaatttggcaacggtgtactggcaagtgtcttttaaacaatggatagtttggctctagaccataggtaagatttmcacctaagcagcaatatagtaggatttcttttttaagcctggtaacattccccagtctcttgttctgcacgaggtgattatctaattgtaatttgtcataacataaagttttcctttgggaaaaaaaaataaactctcataacattcctgtcttatttgttcttaaagcatgtgtgactcataatagaggcccatggtacctctattatggggtttatctttgttacgggtttggaaacagagggtaaggaagcaaaatgtttga

SEQ ID NO: 126301 - DNA, 567 bp, Homo sapiens
ctcattgacatttatttatttatttatttatttagcagaataggacaaatagaaacctgtcataaactactcaagcatttccttggaatctcaagagttccatgtttattttaacaatttatattcacctctcttcctcttccttcatatacctaaactaatatgccatgaagtctgtgttgttacatttaagtcatgtagtaaagcagtgaaccccaagttaaccttaatttggcaacggtgtactggcaagtgtcttttaaacaatggatagtttggctctagaccataggtaagatttacacctaagcagcaatatagtaggatttcttttttaagcctggtaacattccccagtctcttgttctgcacgaggtgattatctaattgtaatttgtcataacataaagttttyctttgggaaaaaaaaataaactctcataacattcctgtcttatttgttcttaaagcatgtgtgactcataatagaggcccatggtacctctattatggggtttatctttgttacgggtttggaaacagagggtaaggaagcaaaatgtttga

SEQ ID NO: 126302 - DNA, 574 bp, Homo sapiens
ccataaatgggttagaatgctcggaagattgctccaagtatatcttttkgttcgggatgtactggagaaaattaaaggtgatgtggaaatacctttagcttaagggttacttaaacaatatgacaaaatcctaatgttgctagtagatgatgttgggaaacagacttcagtagatacaaatcatgcaatatagttagttggcttctgactctaggactaatgttatattgagtaacaagtatataaataatatttatgccgtacagataaaaatgtagccagcatgaatgcagatgtttcagttaatttaaaaattttgtaagatgttgttagagaaacttagcttgtggttgctgaggaaaactaaacttttccagaaatcaatttcaaggatttaaacagaaactttggtcaaactgtattttctaatagaagaaatcattgttgtaaatgattttattatatagctattgatttttgttgttgctgttcagcaccaagtgtgtctgtgaaattatacaacagtttttgtactctaagtaagaaatatacaggcacatttcacatcaaaaca

SEQ ID NO: 126303 - DNA, 568 bp, Homo sapiens
aatactttttttttttagtttattgcttacaaaaaaattgtgttactagaatttgttatgagcacttattattttccaagaaatcctatgttcacaaacataagtagaagaaatggatttaaagtcattggattggtaatataaaatcagaaatgatcattttttgtgtgtaaaaacaaatgtttgcatggattctttatatatatatcagacatatgtttttttctatttctctttttattttatgtgccctgtgatcatcctttatgtatttcgttagatattatgtatttttctatcattgtactgaaactgttgctatgctttcataataaatttattatccatattgcattgtcatttctactgaaatacttgaattataccaatatatacattgatttaaaaaaacacatacataaaatgtgagccagtagagttttacctcatgttaacaartaattaaataatgtcattttatttaaatgtctgaagccaggcactgtaggtcatacctgaaactccagcgttttgggtcgatgagatgggaggattgcttgagcctgta

SEQ ID NO: 126304 - DNA, 599 bp, Homo sapiens
tatagcaaatataaagacaaaggacttggataaagttgaaaagatttttatgaaggaaaatacaatgtgaagttaataggagtaggattgggtagctatgttggaaatttgataagagtagataatttgaaattagtttttgggaaaagaaatcttaaaataaaaatatatatttgaattatcacgtaatgttgagagcctattaatgtaaagagaactaagtcaaaattatttgtggttttttttgkttgtttgttcgctttacaaaatccaactgcttatgtgaaaaacagattaaaacagattagggatttttgaggtaagtatactggaaagaaggccaaggcagttgagtccatttaaaagaatgactataaatatattccactggaaaagattaataaaaagaaataaagtgagatcatcaatgtcctggcaaaaagtgaagaattgagcatgttggattgggaatctcaatgaagataaaaaattgattcacttgaagtaatagcataatggaatattgggctatgatggaattagaatgatggatatgatagaatattgaagatagagactggaaaagctgaaatcaataa

SEQ ID NO: 126305 - DNA, 601 bp, Homo sapiens
gtttagctgaacaacgtatatatttttatcataaaagatatcttttaaaagtactatatattgaaataggaatcattaaaatttattaaaagagattttagaagagttccatgaagatatttgacaagaatgtttgacagtatactttgggagagaccgaagtaaagaattcctctacataagtttcttgggaacctgaggttttctctcctgtgctatatttagatgtgtggcatgtctaattttctgcttccatgcctcactgttcttctagtgcttatcgtaatccagctaaagtgtcaggccgaagtgtggagaaaacattctgtcctgagtaagccaacttgcagctgtatgaggaccctctgtgccagtcaccgtcatcctaccattcacccatgcattcctgacattstaaacagaagtcgataaatgttttctcagtaaagtaattctgaaaacttaattctaaatgttgtattaacttagcaagacttgaagtgcctggaatgctggccatgtaacttggttgatcagagggtaccagctaccagttcaatttaaataaatgcagttcagttcaagtcaggccaatttggtt

SEQ ID NO: 126306 - DNA, 601 bp, Homo sapiens
gtttagctgaacaacgtatatatttttatcataaaagatatcttttaaaagtactatatattgaaataggaatcattaaaatttattaaaagagattttagaagagttccatgaagatatttgacaagaatgtttgacagtatactttgggagagaccgaagtaaagaattcctctacataagtttcttgggaacctgaggttttctctcctgtgctatatttagatgtgtggcatgtctaattttctgcttccatgcctcactgttcttctagtgcttatcgtaatccagctaaagtgtcaggccgaagtgtggagaaaacattctgtcctgagtaagccaacttgcagctgtatgaggaccctctgtgccagtcaccgtcatcctaccattcacccatgcattcctgacattctaaacagaagtcgataaatgttttctcagtaaagtaattctgaaaacttaattctaaatgttgtattaacttagcaagacttgaagtgcctggaatgctggccatgtaacttggttgatcagagggtaccagctaccagttmaatttaaataaatgcagttcagttcaagtcaggccaatttggtt

SEQ ID NO: 126307 - DNA, 557 bp, Homo sapiens
aataataaaaagaaaaaaatatgaatttctatccagatcactatttttttatccaagtgatgagaaaaattatgcaaacccatgcatttgccctgagttatgattgtattatattaacctcagctgacaatatcctatgctagctttggcttacttagaattctgcctcttgggtataaacacacatctgaaattgactcagctcatttctttcttgctggggtcactttactggttactcccaactactgaacttattttatgtgttttcttttttacaatattacattctaaaatttttatcacctaagaattcctctctgatgattttattactcaattcaagatctataattacgaccaaatctcacagataacaagatgctaagatgggctaataaggttttgcttcttttactttattcawggtaaagtactggttagagtgaacactgcccagtcatttgcaagcaatgttgggactatcaggagtggcttgtattttcccataaactatcctagtgcagtagaaatgcctgacagtacttgatggctgg

SEQ ID NO: 126308 - DNA, 545 bp, Homo sapiens
taaagtagctatttagttactgataaaagctggtttagaagttgattttgatgtgcttcccattcctttacttcagagtgcaacttccctgctcaggcacaggcatactggaatagctacaagttttacccactggaacaggtaatttatttcaaggcagagagcaaagagaataaatgttttctgcagggaagtggagaagctgtgaaggggtagagctacccatggctaattctgttttcaaactcacctatcaagtaaattgcttgacctcatrtggaagagaaactgcaaatgctaatttttgaaaacttctctgcatggaaaggaaatagaaggccaaaaaaatatatgtttctccaacagatacatacatattcctgtgaaaaaacctcaaatcagcctccttcctccaacttctcattcttttttttttaacttctattttaaattcagggttacatgtgcaggtttgttacatagggaaacttgtgttatggagattagttgtacagataatttcatcccccatgtataaggcctag

SEQ ID NO: 126309 - DNA, 545 bp, Homo sapiens
taaagtagctatttagttactgataaaagctggtttagaagttgattttgatgtgcttcccattcctttacttcagagtgcaacttccctgctcaggcacaggcatactggaatagctacaagttttacccactggaacaggtaatttatttcaaggcagagagcaaagagaataaatgttttctgcagggaagtggagaagctgtgaaggggtagagctacccatggctaattctgttttcaaactcacctatcaagtaaattgcttgacctcatgtggaagagaaactgcaaatgctaatttttgaaaacttctctgcatggaaaggaaatagaaggccaaaaaaatatatgtttctccaacagatacatacatattcctgtgaaaaaacctcaaatcagcctccttcctccaacttctcmttcttttttttttaacttctattttaaattcagggttacatgtgcaggtttgttacatagggaaacttgtgttatggagattagttgtacagataatttcatcccccatgtataaggcctag

SEQ ID NO: 126310 - DNA, 534 bp, Homo sapiens
gaagcagttattattcttatccctgttttaaagatacggaaacaaagactcagagaagctaaatactggcagagctgggactcaaacttagctctgtttaacttcaaatcccttgcctttaaccactgtaatatggcagagaccaggtcacagggtcatgttatccacagcccagagtcctttgaacatggctgccctcagaaggggcctgtaggcatggtagatgccccgaggcttttcaggaggggtgatttcagcaacagacgccttctagcacagataatttcctggcagcacaatgaggctagcatatctatcctrttacatacaatttcttggtggattgaagatgtgaagcaaaactatgctttaaacttcaaagcacttgtgtaatgacagaaatggtagtgggcttgtaatagtaggacctagtacttgtaccctaggcctggaatttattgacctttaaattttggatacatcactcaatgtcttactttactcatcttaataactgggtcaatcttaatttta

SEQ ID NO: 126311 - DNA, 511 bp, Homo sapiens
ctggtacctgatacccctaggaaccaaaaacagccattctagataactcagattctggcatcacagttatcagcccctccacgaggcatcacatccctaccctgccaagtggccttmtagaacagagcctggcatgctttcagaggagactcttggaggatggtgactggatggtttgctccaaaagtaatacagaggggatgaagagatggttcaggtacccaccaagaaccaacctgcttctgaccaagacacagccccagcctgcgaccccagtctgtggcctgctaaagtctggtgggagccacaaagctaaagggcaaggcggggctgccacttcggagctcactacagattatttgttgggcatctaccaggtgcacacagcagggctttcttgtttgcacccaccaagaagagggccagagcacccaagaacacacacatcgcttaggatcccggtgagagatctgctaagggggtggggcctgggaggatcggaggcacgcgg

SEQ ID NO: 126312 - DNA, 511 bp, Homo sapiens
ctggtacctgatacccctaggaaccaaaaacagccattctagataactcagattctggcatcacagttatcagcccctccacgaggcatcacatccctaccctgccaagtggccttctagaacagagcctggcatgctttcagaggagactcttggaggatggtgactggatggtttgctccaaaagtaatacagaggggatgaagagatggttcaggtacccaccaagaaccaacctgcttctgaccaagacacagccccagcctgcgaccccagtctgtggcctgctaaagtctggtgggagccacaaagctaaagggcaaggcggggctgccacttcggagctcactacagattatttgttgggcatctaccaggtgcacacagcagggctttcttgtttgcacccaccaagaagarggccagagcacccaagaacacacacatcgcttaggatcccggtgagagatctgctaagggggtggggcctgggaggatcggaggcacgcgg

SEQ ID NO: 126313 - DNA, 596 bp, Homo sapiens
gtgcagcctctacctgtgtctcagtttctggctctctagcccttactaagagtagctttttctttctactcatattgtgttgatgtgtttatattgaagcagtgacagtttgtaaaactttatcctggtttttttttttttttcacttaacaatgttagtgaattcttgagtattagtgttgaataaatacttttttaagaaattgggttgttcacatggtcttagactcctccgtgattttatttcatatttaggatttgaaagatgaaaagaaaaaggcaaaaatggcagcagctagggcagttcttgaaaagtgtacaatgatgcttctcacagcttcaaaggtaagacaattttggttttactgtgtaataaattaataattagaacacccgactaaatgcatttaacttacataatttacattttaaaaaagatcaaagtgattacttaraacataggcctgaatagttaaatctcagttattatttataagaatgctaactttcttccccaactccaaataataactaatttatgagtcagctttgattgaacagctcagcagaacatggtgtattaggtgctatgaatt

SEQ ID NO: 126314 - DNA, 583 bp, Homo sapiens
ggctatatttttaggaggaatctgtgcattctttgtttctatttcaacttttatataggaattgcctaggtttatccctatgcattcccttcctttactccacgacttttcctgaatcctccatttctctctctgcttttattactgcacccaagcttgcttccttccttccttccctccttccttccttccctccctccctttctccctttcttttcttttcttttttttctctttcgctctctctctttcctttcttttctctctcttttttttgtcttactctgtcgcccaggctggagtgcagtggtgtgatcttggctcactgcaacctctgcctcctgggttcaaacgattctcctgcctcagcctcctgagyggctgggactacagtcatgtgccaccatgcccggctaatttttgtattttcagtagagacagggtttcaccacgttcacaagactggtctcgaactcctgacctcaggtgatccatccaccttggcctcccaaagcgctgggattacaggcgtaagccactgtgctgggcctatttcttatctgacatatttcagttacttgcc

SEQ ID NO: 126315 - DNA, 603 bp, Homo sapiens
tttgttagaatgtaatatgttgtttttgagtgtttgtatttttacagactaagagaaacatgaaaacttttttttctccttgctgcaaatcaaaagccaagagaaaatattgtttaaaacatatcttaatttgttatgtgttgttggtgtgacttcctgcatmgtttcttagatggaataatgctttggcaatcaccttacccttcaaggtacaaaaaaattctaagtactaaaatatacgggaattacaagtaaggagacgaataaattcattaaagatgaggtaccttctgttagaggagaattttgaatcctaaaattataagtacattaattttaaaactactcacttgaatttgcacttctatttcataccaactgttcattagcaaaggtttctttaccatacatttgccaatacggggtagctcatgaagagagcactggctttgagtatctagtcaagttttgtataagaaaacttctaggctgagttattctttttcaaaataaagttgaactctgaacctacatagtatcttgaggaagtggttagtactttgtgtatgtggtgggaggggaggtcattctgaggacataaaa

SEQ ID NO: 126316 - DNA, 603 bp, Homo sapiens
tttgttagaatgtaatatgttgtttttgagtgtttgtatttttacagactaagagaaacatgaaaacttttttttctccttgctgcaaatcaaaagccaagagaaaatattgtttaaaacatatcttaatttgttatgtgttgttggtgtgacttcctgcatagtttcttagatggaataatgctttggcaatcaccttacccttcaaggtacaaaaaaattctaagtactaaaatatacgggaattacaagtaaggagacgaataaattcattaaagatgaggtaccttctgttagaggagaattttgaatcctaaaattataagtacattaattttaaaactactcacttgaatttgcacttctatttcataccaactgttcattagcaaaggtttctttaccatacatttgccaatacggggtagctcatgaagagagcactggctttgagtatctagtcaagttttgtataagaaaacttctaggctgagttrttctttttcaaaataaagttgaactctgaacctacatagtatcttgaggaagtggttagtactttgtgtatgtggtgggaggggaggtcattctgaggacataaaa

SEQ ID NO: 126317 - DNA, 581 bp, Homo sapiens
gtaaccaacccaagtgtccttcagtggatgactggataggcaaatgtggtaaatacatacaatggaatattgtttagcattaaaaaggaaggaaaaatctggcatttgtaacaacacagatgaactttgaggacattaggctaagtgaaataagccaatcagacaaaggcaaatatataattccatttttatgaggtaattagtcaaaattataaaggcagaaactggaatggtggatgccagagactgaatatctatattcattaaacactaactcctcatttccccttccttccagttttggaagatgraagcagttctagagtggatcgtagtgatggttgcacggtatgaatgcaattaatgccactcaactacacacacaaaatggttaagatagtaaattttatatttgtatttcaccagaatagaaaaattaaaaacagaacaaaacaaagcacagtagtcagaggctggccactcagaaagactacgacagagaaagacagctggctaatcccctgtgactattcaggtttccagcgaaaacattaaagtgagaaaggtcttatattttgaaa

SEQ ID NO: 126318 - DNA, 595 bp, Homo sapiens
  misc_feature (1)...(595): n = A,T,C or G
ttaactttgttactttgctaccattttcagaagaaagttggaaaaccaaaaatttcgtggttagcnccnnaaactttttttctgggagctatttggaattacagaatcattaaaagtcagttagcaacttagcatgacaattatggtattttggggattgtaatgtgactttaagtttcaatgcagtaacacaaaactagagactagaagaaggtttgcagaaaagatattacatttagtatgtgattctttacaaaatactcaagaaaattgaacccagtagtgttaatatatcaactgcttaatggcacaaaaatgatttcagtcctgagggtgtccaggtatagtgttacagaactatgtcttcaaytgatgtttggtgacacacacacacacacacacacacgcacacatacacacatgcacacacagagtagtgtgttagcaagacagcagaataggagttctccagcttcactctctcctacctaccacagaaatctaaccagcaactatccgcaggcaagaagataattctgaatatcccacaccttggaagtgagtcaaggacactcctttctttggaccaaagcac

SEQ ID NO: 126319 - DNA, 545 bp, Homo sapiens
gacttttgacatttggattataatatactttggagatgatcttttcaggttgaatctattcrggaatctttgcacttcctgtatctagatgtgtatatctctcgtaagacttgagaagttttcagctattattgtattaggtagtttttccatgtctttgctcatctcttctccttctggaactctaaaaatttgaaagtttggttgctctatgctgtctcataggtcacataagccattgtctcctcctcttcctcctcttcttcttcttttcttccttctcctcctcctcctcttcttcttttctcttccttctcttctccttctcttcttctcttcttcttcttttcttccttctcctcctcctcttcttcttcttttctcttccttctcttctccttctcttcttctcttcttccttcttccttcatctgatgaggttattattaaagatttgtcttcaagttgagaaactctttcttctccctaatacagtctactattgaagctctcaattgtatttttttgtttcattcattgaattc

SEQ ID NO: 126320 - DNA, 552 bp, Homo sapiens
gaattattttactagtagaacactcaaaagagataaacattgtgaatgtagtattttggcaagaatgttatttgcctatctctccctatttatgttccaaatgtggtttataaacatacagtaagttttgtcaattcatgcatttatattttaaatttgagatatatgtttttcaacatggattcatgaaacaattatacagacaagtattgaactcatattaataaatgaaaactatatgcgttttattatagacctaactaaatgataaatatacagtgtactgtgcagaataacatatctagagttaaaattttaagtgtcttaatgatatgaaatttcatgtgccagtttgaattagaaattagttttacttctattcctgactccttttttatttgtgcatcatgtaacatctttggattcttctcagtgtcccaaagtcttattttaccacatcctttttttattgtgatggcattttctttttcttggcccagttactatcactattcttaaatgtgcacttaygttccaccttaatacattgtc

SEQ ID NO: 126321 - DNA, 598 bp, Homo sapiens
gattccaatgtcccaagatggatattgaagctccaaatatcacatattctttaagtaaggaagaagaacaaagaagatgctaaccacattagtcatcttttatgaagagaacaaaagcattgtcatagtcctgaaacccactacagctggtttacttttttggtccacaattgattcacatagacattcttagctgaaaggaagatcagaaataatcaccagagttaggtatttgctgtctttccagaatatttttttttaactcacaaagaaagaacagatttggagtaggtagcacacaatgtcaaacatacccacatacatactttgtatgtaccacatacaaagataagaagaactgaaacataggaccccgtttctacatggcatcaattggctgtagttggaagcatatcctttccaccagatatcccattaattttattgcttgtgagtctcctttatgaatttctgattatgatccctgtatttctttttttttttttaacttttaactaaaaagtaaactttaatgtygaaaatgcaaacttggggaagacagaaaagatcacacacaaggctgtctcttcacacttag

SEQ ID NO: 126322 - DNA, 638 bp, Homo sapiens
attttcagacttcctattctgtgtttgatgttacattaaaagacatggctcaaataaggatattttttaaaattaaatataaaaactcaatttaaaaaattggtttatttggaagaaatttgtgtagtatatgaaaaggtaattgttctgttaaacacttaaaacattttgtgtttaatatttcaaatagtcttgtttcataattctcaaatatcagttactcttagggtatcactatcagargtcacaagatgatctgtagacacagtgggatgtcttgtaacaaatcaattgctaaaaacagataatttaaatcacagcatgttgaattatgatctctgtccttacaggttttgagttacaagtgcaaacaacaattgatatcttttaataactcttcatacaataatgccctatttttaaataactgtacctatgtgaggctaaatagcaggatgagttatacatagtaattatttcaatacatatctcatatttgaatttggctaatttttggctagttacccattggatatatatgcaacctaatttattgttatcaataattattcacaatcattatatcaattattagacaaaaaattaaggtactttaatttataggacttgccatttga

SEQ ID NO: 126323 - DNA, 553 bp, Homo sapiens
ctttctgttatacagatgatatctaatcttcataaattgcatctgaaaattatttgctctctttgtgtctcattaataataaaattctttggctgcaaatctatgcattggaatgcagtttctaactgctgatgcytttttctttttagatgattgacctttatgttcaatgctgtaaatacattaaaacctactggcactctccatacctctttgcatgtataacaagagcaaaaagcactgattgtgcattcacaggtcactttcatagaatgtttaatttttaaaaaatatttctaatccagtattgctttttcttaaggaagtgaaagaggtattgcttaaataatttttctgggaatagcagtttgctgattatatatatatgtaatatataatcaagaaatagaatgttacatattatgtaatatataatatagcatattatatattatataatatataatcaagaaatagagagaaatctgtctctctctctctctctatatatatatatacatatatacaatctatatatcgttatgtagtccct

SEQ ID NO: 126324 - DNA, 606 bp, Homo sapiens
atgcagtttctaactgctgatgcctttttctttttagatgattgacctttatgttcaatgctgtaaatayattaaaacctactggcactctccatacctctttgcatgtataacaagagcaaaaagcactgattgtgcattcacaggtcactttcatagaatgtttaatttttaaaaaatatttctaatccagtattgctttttcttaaggaagtgaaagaggtattgcttaaataatttttctgggaatagcagtttgctgattatatatatatgtaatatataatcaagaaatagaatgttacatattatgtaatatataatatagcatattatatattatataatatataatcaagaaatagagagaaatctgtctctctctctctctctatatatatatatacatatatacaatctatatatcgttatgtagtcccttctatgtctgtatatatatatggggagggactacataacgatatatagatttcaatgcatcactaacttttgttgttgctgccattgctgtttcttgcctatgttcagcttagcacattccctttgtgtacaatctgtgatttcaggcacgaaaataaaggaagg

SEQ ID NO: 126325 - DNA, 606 bp, Homo sapiens
atgcagtttctaactgctgatgcctttttctttttagatgattgacctttatgttcaatgctgtaaatacattaaaacctactggcactctccatacctcyttgcatgtataacaagagcaaaaagcactgattgtgcattcacaggtcactttcatagaatgtttaatttttaaaaaatatttctaatccagtattgctttttcttaaggaagtgaaagaggtattgcttaaataatttttctgggaatagcagtttgctgattatatatatatgtaatatataatcaagaaatagaatgttacatattatgtaatatataatatagcatattatatattatataatatataatcaagaaatagagagaaatctgtctctctctctctctctatatatatatatacatatatacaatctatatatcgttatgtagtcccttctatgtctgtatatatatatggggagggactacataacgatatatagatttcaatgcatcactaacttttgttgttgctgccattgctgtttcttgcctatgttcagcttagcacattccctttgtgtacaatctgtgatttcaggcacgaaaataaaggaagg

SEQ ID NO: 126326 - DNA, 553 bp, Homo sapiens
ctttctgttatacagatgatatctaatcttcataaattgcatctgaaaattatttgctctctttgtgtctcattaataataaaattctttggctgcaaatctatgcattggaatgcagtttctaactgctgatgcctttttctttttagatgattgacctttatgttcaatgctgtaaatacattaaaacctactggcactctccatacctctttgcatgtataacaagagcaaaaagcactgattgtgcattcacaggtcactttcatagaatgtttaatttttwaaaaatatttctaatccagtattgctttttcttaaggaagtgaaagaggtattgcttaaataatttttctgggaatagcagtttgctgattatatatatatgtaatatataatcaagaaatagaatgttacatattatgtaatatataatatagcatattatatattatataatatataatcaagaaatagagagaaatctgtctctctctctctctctatatatatatatacatatatacaatctatatatcgttatgtagtccct

SEQ ID NO: 126327 - DNA, 606 bp, Homo sapiens
atgcagtttctaactgctgatgcctttttctttttagatgattgacctttatgttcaatgctgtaaatacattaaaacctactggcactctccatacctctttgcatgtataacaagagcaaaaagcactgattgtgcattcacaggtcactttcatagaatgtttaatttttaaaaaatatttctaatccagtattgctttttcttaaggaagtgaaagaggtattgcttaaataatttttctgggaatagcagtttgctgattatatatatatgtaatatataatcaagaaatagaatgttacatattatgtaatatataatatagcatattatatattatataatatataatcaagaaatagagagaaatctgtctctctctctctctmtatatatatatatacatatatacaatctatatatcgttatgtagtcccttctatgtctgtatatatatatggggagggactacataacgatatatagatttcaatgcatcactaacttttgttgttgctgccattgctgtttcttgcctatgttcagcttagcacattccctttgtgtacaatctgtgatttcaggcacgaaaataaaggaagg

SEQ ID NO: 126328 - DNA, 606 bp, Homo sapiens
atgcagtttctaactgctgatgcctttttctttttagatgattgacctttatgttcaatgctgtaaatacattaaaacctactggcactctccatacctctttgcatgtataacaagagcaaaaagcactgattgtgcattcacaggtcactttcatagaatgtttaatttttaaaaaatatttctaatccagtattgctttttcttaaggaagtgaaagaggtattgcttaaataatttttctgggaatagcagtttgctgattatatatatatgtaatatataatcaagaaatagaatgttacatattatgtaatatataatatagcatattatatattatataatatataatcaagaaatagagagaaatctgtctctctctctctctctatatatatatatacatatatacaatctatatatcgttatgtagtcccttctatgtctgtatatatatatggggagggactacataacgatatatagatttcaatgcatcactaacttttgttgttgctgccattgctgtttcttrcctatgttcagcttagcacattccctttgtgtacaatctgtgatttcaggcacgaaaataaaggaagg

SEQ ID NO: 126329 - DNA, 602 bp, Homo sapiens
cacgccatgtgccaggtgctatgtgggatgttatttagcagtaagcatagagaaggagaaaagacagggattaaatgaagtattaggcaaaatcaataaattatatgcacgatatgtgtttaaaacaaaatacactggatgttacttacagtttcctttggattacattgttgatcaacaaaacaacaaagagaaagacaaaaagcttcaccctagccagcaaaagcctttgaaatctgatgttggattttataatgtcttatcttcttatctccaggtcatgtccttaatgtttatgaaaagcaatcactgaattgaaaatgttttgttttcaattcagtgattgctcagctataataaactgctaacactttttaatttgatacgttacctactcattacacatataacacagcaataggttttacttttccccaggatcaattttctccagaatatgaatatttcaacacagttccttaatttttaggatcgctttgccttggtgaaatggatttatttgttcaagaagaaaatccaaagaaaacttcacraaatttactagttgaaaataaatatatggcaacaactcacagcaggga

SEQ ID NO: 126330 - DNA, 646 bp, Homo sapiens
agccattctttcaaatcatacctattttgtatttatgttgtatttcctaacagccagattttggtrcaacatgaatccacaataatattaattctctttatttttcttatttgtacccctgctcatagactctctacttggcttcacaaatcatgcatgtaacaataaagcataaaattataaatgttctcaatatgttcctcctctgttactccttttcattgaataagttagagacatgtatgttagtcagcttggacagctatagcaaaataaggtggaatgaatggcttaaacaacaaaaaattattttctcacagttctggagaccggaagtccaagactggggtgtcagcctgcttgggttctggtgaaggttgttttcttggctttcagactgccaccttcttgctgtgtcctcacatggagaggctagagagagcaaacactctgatgtatcttcttataaggataataatcccactctaaaccgaatgatctcccaaacactatcacattgtggtttagagcttcaccatatgaattttggggaaacacaaacattcaatcaattacatagtgcatttctcttcacatttctctgctcaccaagtcatattaatacttatgctattaatatgctatt

SEQ ID NO: 126331 - DNA, 646 bp, Homo sapiens
agccattctttcaaatcatacctattttgtatttatgttgtatttcctaacagccagattttggtgcaacatgaatccacaataatattaattctctttatttttcttatttgtacccctgctcatagactctctacttggcttcacaaatcatgcatgtaacaataaagcataaaattataaatgttctcaatatgttcctcctctgttactccttttcattgaataagttagagacatgtatgttagtcagcttggacagctatagcaaaataagrtggaatgaatggcttaaacaacaaaaaattattttctcacagttctggagaccggaagtccaagactggggtgtcagcctgcttgggttctggtgaaggttgttttcttggctttcagactgccaccttcttgctgtgtcctcacatggagaggctagagagagcaaacactctgatgtatcttcttataaggataataatcccactctaaaccgaatgatctcccaaacactatcacattgtggtttagagcttcaccatatgaattttggggaaacacaaacattcaatcaattacatagtgcatttctcttcacatttctctgctcaccaagtcatattaatacttatgctattaatatgctatt

SEQ ID NO: 126332 - DNA, 437 bp, Homo sapiens
ctctgccttggtcagtcattggatacagaccacctggaaaagggatttgaccttgagtgagggagttgtctgcagccaactgaggcaatcccagaaaagcctaacaggggaagcctgtcagctgacagcatgcccaacaggtgggggaacaagtccttgaagtgggatctaggccgtgtatcacggtgtccacataggccatgtatcacagtgtccacaaaagaccagaggcaggtcctgctaaacaagtgatcccatgaatcttttctcatgatttagcagatcagatcccagtactgctcactggtaatrcaatatcccaaacaggcggctctcatgcaaggcctcttcttctctgctactgagaaacaacatgcaatcttggaaaatttcaaacacaacacatccaattcaggggagcaccagaaaaccagcaa

SEQ ID NO: 126333 - DNA, 618 bp, Homo sapiens
tttacttgtcctctagaacactacattttttttgttgtttttgttatacctcactggtcactgcttatcagtattatttgatggttctcctttttacctctgataattattgttcgaaaaacctgcaatctcaatcttcggtcatcagtatgtatattctttctttgaaatgtccattctgactcatggctttaaatgctacatctgtactgacaacctctgatgtcagtacaaaattatgtactgatgacaaaattatacatcaaaccttgagttttccttcacactcaagaacaaaaccatatttgagtgaatagtaaacatcactacttggatatataagatatgtacaacttaatattataaaactgaccactggtcttcacaaactattctacctgcattttttcaaatgtcacatgatggtgattacattcttcagataagacttttttttttctgaattggttaaaacatacgcatgtatcatgggatgttttagttttttgtgtgttttaacttaaaattagtagaataatcaacraatattcttgcattctttactcaaaattctgtgtggttcatcacattgtatgtatagctgtagttttttttcat

SEQ ID NO: 126334 - DNA, 573 bp, Homo sapiens
cccattcatttgtgtattgtctatgactgcctttgcctttatactaaaatagaactaaaaaggtgcaacagagactatttagcacacagagcctaaaatatttactatttgcccctttagaagtatagtgtgctaagccctgacataaacaaataatctcagagaatagtcattcaggagaatcttgctgctgtataatacgtgaaatgcaaacaatctygttgttcaaactgctccaaagtttcatttctacagggatcacaacacaatgctaacaactgatatttatcactttctaagacctttgggtttacttttcctcattatgtctttaaaaatgtgccatgcttatagttcatgttatagaatgtgttgccttatttccttgggtgacaggtacttaggtggaaatggtttggacattaaaatcagatatgtctcttaataaatgtgtgacttggataactcatcagtcctccaaattttacttcctaatttgtaaaaaaaaaatacatacacacacacacacacacacacacacacacacatatggttcccagtacatggtggggc

SEQ ID NO: 126335 - DNA, 397 bp, Homo sapiens
tctgatgtgatttgggacataattagccaatgaaatttgatgagagaaaaattgagagcagaagtaaagaaaacaggaaaatatctttatttgtaggaaattcatctctctgccttttttcttctatttctctcatttctactttgtttctttatattgcatttcttcccactagacctgaactccataaggaaagggatatttatttgtctgtgaccctaagtgttttgtgctcagacctacgaccatacctcataccacataaatgctaaataaaactctgttaaatgaatgaacaaatgtatgttatgattagattgttaatctaactggaaaattcaagtctccataacatacayaagaaaaaagaagagattcagaataagagaatttatat

SEQ ID NO: 126336 - DNA, 618 bp, Homo sapiens
aacgccacttacctggggaagggcccccagtggtgctcaagaccaggcagcagaaggccagcagagttccagccgctcgcatggctgcccgggtagggacagtgcggggcagttgggggtggccgtgcagtgccttcttaggcagcatggggcagttggaggcagtggttggtgcccgtgccgagccttcttgggtagatggcgcagggcaggtgggggcagtggtctgtgcccgtgccaatccttctcaggcagcacgggccagtgccgggcaatrgtttgtgcctgtgctgagccttcttgggcagcatggaacagtgggctgtcccagcccaggggcaggtgccagggccacagcatggaaccccaccctgcaaaccactgtgggacggggcaggggcggggctagggggctgtctgcgtggtgctggggaggggagtgttttgctgctgaatcattttggccagaagctcttcaccttcagatctatcagccacaaagcaaccgcttcctttataaaagtttccgagcagccgtcatttgctgggggaggaggaaaagacatgagacccatgagcaaatcctgatgcaatgttctacccctgagccacacacga

SEQ ID NO: 126337 - DNA, 618 bp, Homo sapiens
aacgccacttacctggggaagggcccccagtggtgctcaagaccaggcagcagaaggccagcagagttccagccgctcgcatggctgcccgggtagggacagtgcggggcagttgggggtggccgtgcagtgccttcttaggcagcatggggcagttggaggcagtggttggtgcccgtgccgagccttcttgggtagatggcgcagggcaggtgggggcagtggtctgtgcccgtgccaatccttctcaggcagcacgggccagtgccgggcaatagtttgtgcctgtgctgagccttcttgggcagcatggaacagtgggctgtcccagcccaggggcaggtgccagggccacagcatggaaccccaccctgcaaaccactgtgggayggggcaggggcggggctagggggctgtctgcgtggtgctggggaggggagtgttttgctgctgaatcattttggccagaagctcttcaccttcagatctatcagccacaaagcaaccgcttcctttataaaagtttccgagcagccgtcatttgctgggggaggaggaaaagacatgagacccatgagcaaatcctgatgcaatgttctacccctgagccacacacga

SEQ ID NO: 126338 - DNA, 618 bp, Homo sapiens
aacgccacttacctggggaagggcccccagtggtgctcaagaccaggcagcagaaggccagcagagttccagccgctcgcatggctgcccgggtagggacagtgcggggcagttgggggtggccgtgcagtgccttcttaggcagcatggggcagttggaggcagtggttggtgcccgtgccgagccttcttgggtagatggcgcagggcaggtgggggcagtggtctgtgcccgtgccaatccttctcaggcagcacgggccagtgccgggcaatagtttgtgcctgtgctgagccttcttgggcagcatggaacagtgggctgtcccagcccaggggcaggtgccagggccacagcatggaaccccaccctgcaaaccactgtgggacggggcaggggcggggctagggggctgyctgcgtggtgctggggaggggagtgttttgctgctgaatcattttggccagaagctcttcaccttcagatctatcagccacaaagcaaccgcttcctttataaaagtttccgagcagccgtcatttgctgggggaggaggaaaagacatgagacccatgagcaaatcctgatgcaatgttctacccctgagccacacacga

SEQ ID NO: 126339 - DNA, 592 bp, Homo sapiens
tttcaaaaagtccttggctaaaatgccagcccagagacaataccctgtgggtttgagatgatgtctttcagaatacagtgtgtgcattgaaccaggtaagggaatgtgtccccagcatttagaatttgtaggtttaggaatgaagaggcataagatttacccccattaacatcatcacacaagtgacattcttgaagaatatgtgcttccttcctccacaaacaggctctgctgcattaaagggctggattcccagtgagaaatgctttcagcttggggacagattaatgattctattaaatytaaggctatggcaccctgtcactctgggtgcctcatgccagttgatcagcaagcaaaaaagggataagaaaggagttactataatggcaaagttaataaaccttaattagcatgaaaagatagcactgctgctacacaattagggctggaaagatcacatctcaaactcagagtattcaattggatgtctcttgctgcttttatgatcagaaataaagacaaaaaagcaattgtagtattcaaagttcaaatagagaaaggcaattaaagattcatcttcccttgagat

SEQ ID NO: 126340 - DNA, 296 bp, Homo sapiens
attttggagacagaagtaacagaatgtaaggcaccacaatctacagaaatcatggaaccaaagctaattttatgtagatttcaaatggcagaataacctcagctaacatctaggctacaatagaaatgttcacatgaaaataaaggcatgctgaatacaattcaatctttatttgaggaattaaagggtgtttcaagaccttgcttggatattkccaatacagagattagccaaaaaagtgagaaggatcttgttaataaagaaataccaagttcatagaacactgcctttccaat

SEQ ID NO: 126341 - DNA, 546 bp, Homo sapiens
gggaactctgtattttgtatttaattttactataaacctaaaactgctataaaaaatagtctacttttaaaaatcaacttaaaaacaaacaaaacaaaaacttctgacrccactgcatcacccacaaggtaaactctcagctccataatgtagaaacctacttctttagcctttccttccaccactatctctatgtgtcttgcccctcagaaaccctgatgtgcagaccactcgaagcaccatgcttctcatgccacagtgccctctgttaatgctcccacttatctgtcattcaaaaggccctccttgtccattcacttgtctagttacttccctactcttgctgtgctgaatacagcctcaagcataacaagcatctcattgcataattatatatttatacatttgatttcctttctaggcttctttggaaccaggactgagtcttacttatatgtgcattttccatgtccaattttatgtgctttcaattaaaaaaatcaatgtgtaatgaataaaggaagcctaaggaaacaaagtttgatg

SEQ ID NO: 126342 - DNA, 588 bp, Homo sapiens
tttgggtaggctagcaaacagccacctcctccgaaagtgctggtcttcaggaaggttgtagacagcctgttcttagaggttgcacctcttttccaggtcagagttgctgccttctgtttgaataaggctgttgggaacggcaccacagattttcaaatgtctccargaagctcctcgcagctcgtagccctgctgttaggccatgttgacagcatgggccaggcctttgggattctggccagtgatgctggctagggaggaagggggataggcctgagtctgtttgcctcttgatccgtgtgggtcattgtcactaagggatacctaaaattgagcctgagcagccaagcatgaagagaagaatggaccccatgtttgacctgctcttggacgcttgataggtaagatactcacctggatcattatgctccctgtctgcactatcctgggctggcttaggtagcctagtcaatctagacagtcttacgtctgtgatgaggtcaggtttctttgctatgagtcatttcccccattcacataaatggaaaaaattcatcaaacacatgcttacttggtcaactctgcagc

SEQ ID NO: 126343 - DNA, 588 bp, Homo sapiens
tttgggtaggctagcaaacagccacctcctccgaaagtgctggtcttcaggaaggttgtagacagcctgttcttagaggttgcacctcttttccaggtcagagttgctgccttctgtttgaataaggctgttgggaacggcaccacagattttcaaatgtctccaggaakctcctcgcagctcgtagccctgctgttaggccatgttgacagcatgggccaggcctttgggattctggccagtgatgctggctagggaggaagggggataggcctgagtctgtttgcctcttgatccgtgtgggtcattgtcactaagggatacctaaaattgagcctgagcagccaagcatgaagagaagaatggaccccatgtttgacctgctcttggacgcttgataggtaagatactcacctggatcattatgctccctgtctgcactatcctgggctggcttaggtagcctagtcaatctagacagtcttacgtctgtgatgaggtcaggtttctttgctatgagtcatttcccccattcacataaatggaaaaaattcatcaaacacatgcttacttggtcaactctgcagc

SEQ ID NO: 126344 - DNA, 588 bp, Homo sapiens
tttgggtaggctagcaaacagccacctcctccgaaagtgctggtcttcaggaaggttgtagacagcctgttcttagaggttgcacctcttttccaggtcagagttgctgccttctgtttgaataaggctgttgggaacggcaccacagattttcaaatgtctccaggaagctcctcgcagctcgtagccctgctgttaggccrtgttgacagcatgggccaggcctttgggattctggccagtgatgctggctagggaggaagggggataggcctgagtctgtttgcctcttgatccgtgtgggtcattgtcactaagggatacctaaaattgagcctgagcagccaagcatgaagagaagaatggaccccatgtttgacctgctcttggacgcttgataggtaagatactcacctggatcattatgctccctgtctgcactatcctgggctggcttaggtagcctagtcaatctagacagtcttacgtctgtgatgaggtcaggtttctttgctatgagtcatttcccccattcacataaatggaaaaaattcatcaaacacatgcttacttggtcaactctgcagc

SEQ ID NO: 126345 - DNA, 531 bp, Homo sapiens
tctggtaattctggacagtgtgtggaaaatataactaaaagcaaaatcatctgcaatcctaaaaaagtctccacagtaacagaactgcaagaaaatgttttgttgtataattaaaccaaaatatgatgtgcatcacaagcaatctaagaaaatgcaaacacagaaagtcaccataattagttctcaagtagaagccttgaaagcaccatattggcatacacaattgattataattctatcatgtaattatgagaggtgatctgggattattttaattgtttcttatcattaaagaaaaaataaacatccacatcttcgtgacaggatgtagatttgcaatgtggagctaggtacctgctgaaggcagcctcctagtcccctacagaaactgtgaaatagggtgtatattcttgctatttacatttcaaagcaatagttcccaggtcccagawgaagacaattttgagccaaaaaagacaaatgacctatttaactgataaaaatgatttacatatatttcaaagaagcaga

SEQ ID NO: 126346 - DNA, 599 bp, Homo sapiens
tactgagggaactcagagaccagggccagcgcgggtcctctgtatgctgagtgctggtcccctgggcccactgttctttctctatactttgtctgtgtctcttatttattttctcagtctctcatcccacctgatgagaaacacccacaggtgtggaggggctggaccccttcacatccacaccaaaaccccatctgtacatcaccatcatcaaagaccaaaggtaggtaaaaaccacaaagatggggagaaaccagagcagaaaagctgaaaattctaaaaatcagagcatctcttctcctccaaaggaacacagctcctcaccagcaacagaacaaagctgaatggagaatgactttgacaagttgggagaagaaggcttcrgacgatcagtaataacaaccttctccgagctaatggaggatgtttgaacccatcacaaagaagctaaaaaccttgaaaaaagattagtcaaacagctaactagaataaacagtgtagagaagaccttaaatgacctaatggagctgaaaaccgcggcacgagaactacatgatgcatgcactagcttctttagccaattcaatcaagtggaagaa

SEQ ID NO: 126347 - DNA, 599 bp, Homo sapiens
tactgagggaactcagagaccagggccagcgcgggtcctctgtatgctgagtgctggtcccctgggcccactgttctttctctatactttgtctgtgtctcttatttattttctcagtctctcatcccacctgatgagaaacacccacaggtgtggaggggctggaccccttcacatccacaccaaaaccccatctgtacatcaccatcatcaaagaccaaaggtaggtaaaaaccacaaagatggggagaaaccagagcagaaaagctgaaaattctaaaaatcagagcatctcttctcctccaaaggaacacagctcctcaccagcaacagaacaaagctgaatggagaatgactttgacaagttgggagaagaaggcttcagacgatcagtaataacaaccttctccgagctaatggaggatgtttgaacccatcacaaagaagctaaaaaccttgaaaaaagattagtcaaayagctaactagaataaacagtgtagagaagaccttaaatgacctaatggagctgaaaaccgcggcacgagaactacatgatgcatgcactagcttctttagccaattcaatcaagtggaagaa

SEQ ID NO: 126348 - DNA, 628 bp, Homo sapiens
gtggggcatccgatggtgattgtccttagagttggtcggagcccagccttccacggtctgcgcactgctgtgtgtacaatcggtgccttctttaagttcacagcaatgccacaaggcaaatagcactgtcttcactttctgtgtgagagaactaaggctgggtgagagtatgcagagctggatcatggatttgtttggctccttctagtttcaaaacctgtaaatattttgctgtctctaatgctaatcttagcactatatttggaataagcatataaacatataaccacaatccactcaggtaataggcaaccaaattataaataaatgctcaacaagattatgaaatgattgaatgagttatatataagaataataactggtggaagtgttattcataggataaagtagaaatcatttaaatggctaacagtataaggagggttaaatcaagcatccaggtgtggaaatagttgatttacatatatagyttatgccatgtaagacgtttatgatccaatattggatgaaaaaacagaaacattttatgtacagtataatctaaaatttctacatttcattaaaagtgcaggaatataattatcaaaatttgagtgataaaattatg

SEQ ID NO: 126349 - DNA, 262 bp, Homo sapiens
aagtgtgactggggttggtgcagccagcacactatgctggggctgactgtcctgtgattctctcagtctcattgttacaaaagggcttctgcaccccctgacagacaaatatcacattcaagaatgaatgaagcagatgggaaatgggggaatgctagctaccttgtccctttttttgagaaatcaagagcttttccaagtcttcagtcacgggctctctctgctgacttccacytctaactctttgccccaaactgtgtca

SEQ ID NO: 126350 - DNA, 451 bp, Homo sapiens
gtactaaggggctggaaattgctgaactacatagatgtgtggcacagggcaggtgtctcctcacctctgcctcttttcacagttcactgatgtccttcccatgtccatgtgggctgggtcaggggcatgattagctggcaaatcagtcatggagttcagttgggtagttggtagtgtgtatagctggtggcaggtgatggagactccagttagcttgtttttcaggagcagggatatagagagctcctactcytggtcatttgaggccattctttcaggaatctgtgctttcatacactgaagatttgaagattggagacttctgtggaaccctgcagaagtagaatctggaagtgggtgtccataggaagaaagatacttagatagtacttagggaaatagaggtacaactatcatgactctgtttcttttctcgcagtctctctccttg

SEQ ID NO: 126351 - DNA, 596 bp, Homo sapiens
caaatcagtcatggagttcagttgggtagttggtagtgtgtatagctggtggcaggtgatggagactccagttagcttgtttttcaggagcagggatatagagagctcctactcttggtcatttgaggccattctttcaggaatctgtgctttyatacactgaagatttgaagattggagacttctgtggaaccctgcagaagtagaatctggaagtgggtgtccataggaagaaagatacttagatagtacttagggaaatagaggtacaactatcatgactctgtttcttttctcgcagtctctctccttgggtgtctgagtgcctatgaaaatttttaagggcttgctagtttatgtggacctgaataaggtaggacctatagagtgaaaataatgggattttataattgttaatattttaatctttctgggaaaagtattctcaataagaacatacacctttgctatttgacttctgtacatttagctttcatacatttcaaatattgtgggggctttcctgtaccaatttagggtaaaggaaagcaataggaccttcctaagttggatccatgctgaggaatcaagactac

SEQ ID NO: 126352 - DNA, 543 bp, Homo sapiens
tagttggtagtgtgtatagctggtggcaggtgatggagactccagttagcttgtttttcaggagcagggatatagagagctcctactcttggtcatttgaggccattctttcaggaatctgtgctttcatacactgaagatttgaagattggagacttctgtggaaccctgcagaagtagaatctggaagtgggtgtccataggaagaaakatacttagatagtacttagggaaatagaggtacaactatcatgactctgtttcttttctcgcagtctctctccttgggtgtctgagtgcctatgaaaatttttaagggcttgctagtttatgtggacctgaataaggtaggacctatagagtgaaaataatgggattttataattgttaatattttaatctttctgggaaaagtattctcaataagaacatacacctttgctatttgacttctgtacatttagctttcatacatttcaaatattgtgggggctttcctgtaccaatttagggtaaaggaaagcaataggaccttcctaagtt

SEQ ID NO: 126353 - DNA, 543 bp, Homo sapiens
tagttggtagtgtgtatagctggtggcaggtgatggagactccagttagcttgtttttcaggagcagggatatagagagctcctactcttggtcatttgaggccattctttcaggaatctgtgctttcatacactgaagatttgaagattggagacttctgtggaaccctgcagaagtagaatctggaagtgggtgtccataggaagaaagatacttagatagtacttagggaaatagaggtacaactatcatgactctgtttctttyctcgcagtctctctccttgggtgtctgagtgcctatgaaaatttttaagggcttgctagtttatgtggacctgaataaggtaggacctatagagtgaaaataatgggattttataattgttaatattttaatctttctgggaaaagtattctcaataagaacatacacctttgctatttgacttctgtacatttagctttcatacatttcaaatattgtgggggctttcctgtaccaatttagggtaaaggaaagcaataggaccttcctaagtt

SEQ ID NO: 126354 - DNA, 590 bp, Homo sapiens
gttttttaaatgatcattcattggaagcttctgcataccataagctactggggggcagataacatatttgtgtggatcctggagaacctagaatacagtcatccatgtaagaagcattttacttgttgttttttgagatggggttttactctgtcgcccagggtggggggcactggtgagaaacttggctcactcccgatctccatttcctaggctcaggtgatcctcacacctcagccatccaagtagttgaaacaatagagctatgtcaccatagaccwgtgtcaccatgctgggctgagttttgtagagatagggttttgccttgttgcccaggctcttctttaactgttgggctcaagtgttctgctcgcctcagcctctcaaagtgctggggttacagacatgagacattcagccttaatagttgtttaatctgaataaataaacaaatgaatttttatataatggaatgttataagtaatataataaacctaatgtatctaatcattaaatattgtatttaaaatattgcttacattgtattattttttaatatttaagggtgtataagttttgacatgttatg

SEQ ID NO: 126355 - DNA, 590 bp, Homo sapiens
gttttttaaatgatcattcattggaagcttctgcataccataagctactggggggcagataacatatttgtgtggatcctggagaacctagaatacagtcatccatgtaagaagcattttacttgttgttttttgagatggggttttactctgtcgcccagggtggggggcactggtgagaaacttggctcactcccgatctccatttcctaggctcaggtgatcctcacacctcagccatccaagtagttgaaacaatagagctatgtcaccatagacctgtgtcaccaygctgggctgagttttgtagagatagggttttgccttgttgcccaggctcttctttaactgttgggctcaagtgttctgctcgcctcagcctctcaaagtgctggggttacagacatgagacattcagccttaatagttgtttaatctgaataaataaacaaatgaatttttatataatggaatgttataagtaatataataaacctaatgtatctaatcattaaatattgtatttaaaatattgcttacattgtattattttttaatatttaagggtgtataagttttgacatgttatg

SEQ ID NO: 126356 - DNA, 590 bp, Homo sapiens
gttttttaaatgatcattcattggaagcttctgcataccataagctactggggggcagataacatatttgtgtggatcctggagaacctagaatacagtcatccatgtaagaagcattttacttgttgttttttgagatggggttttactctgtcgcccagggtggggggcactggtgagaaacttggctcactcccgatctccatttcctaggctcaggtgatcctcacacctcagccatccaagtagttgaaacaatagagctatgtcaccatagacctgtgtcaccatgctgggctgagttttgtagagatagggttttgccttgttrcccaggctcttctttaactgttgggctcaagtgttctgctcgcctcagcctctcaaagtgctggggttacagacatgagacattcagccttaatagttgtttaatctgaataaataaacaaatgaatttttatataatggaatgttataagtaatataataaacctaatgtatctaatcattaaatattgtatttaaaatattgcttacattgtattattttttaatatttaagggtgtataagttttgacatgttatg

SEQ ID NO: 126357 - DNA, 453 bp, Homo sapiens
aagtgagcttccagtaccaaaatgtgtcatataattacagtaacattttccttctcttgctgtcattctygctactggggaggcattaaggattgaggtactttaccatgcagacctgtgttttatctaccatagatgaacatcaccgtaaatggtcagccatgtatggctataatttgtttttatagaaaatgaaaagaatagtgttgggtgatttattgggaagaaattaattagagaagctttgcctgattaaaagttcattagaaacattatggcttataacgtagtattaaattcagggacataataggaaagaagttgaggctaggccaaaaaggccaattagggtaaaccaatatggaagcacaccagtgtagaacagggcattcaaattgtcatgaattcgttgaggagcttctggaaagtgcacattctgacttagcaggtatt

SEQ ID NO: 126358 - DNA, 453 bp, Homo sapiens
aagtgagcttccagtaccaaaatgtgtcatataattacagtaacattttccttctcttgctgtcattcttgctactggggaggcattaaggattgaggtactttaccatgcagacctgtgttttatctaccatagatgaacatcaccgtaaatggtcagccatgtatggctataatttgtttttatagaaaatgaaaagaatagtgttgggtgatttattgggaagaaattaattagagaagctttgcctgattaaaagttcattagaaacattatggyttataacgtagtattaaattcagggacataataggaaagaagttgaggctaggccaaaaaggccaattagggtaaaccaatatggaagcacaccagtgtagaacagggcattcaaattgtcatgaattcgttgaggagcttctggaaagtgcacattctgacttagcaggtatt

SEQ ID NO: 126359 - DNA, 453 bp, Homo sapiens
aagtgagcttccagtaccaaaatgtgtcatataattacagtaacattttccttctcttgctgtcattcttgctactggggaggcattaaggattgaggtactttaccatgcagacctgtgttttatctaccatagatgaacatcaccgtaaatggtcagccatgtatggctataatttgtttttatagaaaatgaaaagaatagtgttgggtgatttattgggaagaaattaattagagaagctttgcctgattaaaagttcattagaaacattatggcttataacgtagtattaaattcagggacataataggaaagaagttgaggctaggccaaaaaggccarttagggtaaaccaatatggaagcacaccagtgtagaacagggcattcaaattgtcatgaattcgttgaggagcttctggaaagtgcacattctgacttagcaggtatt

SEQ ID NO: 126360 - DNA, 453 bp, Homo sapiens
aagtgagcttccagtaccaaaatgtgtcatataattacagtaacattttccttctcttgctgtcattcttgctactggggaggcattaaggattgaggtactttaccatgcagacctgtgttttatctaccatagatgaacatcaccgtaaatggtcagccatgtatggctataatttgtttttatagaaaatgaaaagaatagtgttgggtgatttattgggaagaaattaattagagaagctttgcctgattaaaagttcattagaaacattatggcttataacgtagtattaaattcagggacataataggaaagaagttgaggctaggccaaaaaggccaattagggtaaaccaatatggaagcacaccagtgtrgaacagggcattcaaattgtcatgaattcgttgaggagcttctggaaagtgcacattctgacttagcaggtatt

SEQ ID NO: 126361 - DNA, 574 bp, Homo sapiens
atttaatatttcttcttccaacatcttttatcctcctcaaatttttcacattcctgttgtgcttttttcatagataactcctgtygaaaaacttgattctctttagccaaattgacacattttgaagatacagcttccttctccgccataagattatcaaactgcatgaataaaatagtatagcttgataatgaagtaggctgagaataatctaatacaaaaccaatagcaaattttgaaatgcatttacttgcaataaaatgttatctgtaatgcagcagattcttcaaatgtgaaccctgaaattactcagaattttaagaacaaagttaaagctaccatgagtcataaaaatatattctttactatcatcatctttgccacagaatttttgtacttcattttacttttatttttccataattcatttttgttcctccttaaatggcacaaagttatctcctagtaaaaagtgtctaacccccttccttcattatcattccccacagtatgtcaaaaaaagtttcagagatatcatattgagttatttaggccaaagtcaataaatgggcct

SEQ ID NO: 126362 - DNA, 574 bp, Homo sapiens
atttaatatttcttcttccaacatcttttatcctcctcaaatttttcacattcctgttgtgcttttttcatagataactcctgttgaaaaacttgattctctttagccaaattgacacattttgaagatacagcttccttctccgccataagatyatcaaactgcatgaataaaatagtatagcttgataatgaagtaggctgagaataatctaatacaaaaccaatagcaaattttgaaatgcatttacttgcaataaaatgttatctgtaatgcagcagattcttcaaatgtgaaccctgaaattactcagaattttaagaacaaagttaaagctaccatgagtcataaaaatatattctttactatcatcatctttgccacagaatttttgtacttcattttacttttatttttccataattcatttttgttcctccttaaatggcacaaagttatctcctagtaaaaagtgtctaacccccttccttcattatcattccccacagtatgtcaaaaaaagtttcagagatatcatattgagttatttaggccaaagtcaataaatgggcct

SEQ ID NO: 126363 - DNA, 546 bp, Homo sapiens
agtgacacctttgctttctgatggttccatgtacacaaactttgtttcattcacaaaattatttgaaatattatataaaattacctktaggctatgtgtataagatatatgaaacataagtgaatttcacgtttagacttgggtctcatccccaagatatctcacgtagatgcaaatattataaaatccaaaaaaaaattccgaaaccctaaacacttctggttccaaacatttcagataagggatactcaatctgcatatataaaatatttatgtatcacatacatagtatgtatataatatgaatttccattcctctacaggttactattctggtacattcccgttatattctgtttatcagactgcaactaaaactttcatgggttcagctttatgttgaacagaatttgcagaattatgagttgaagcaaaccctagtttgataatgctatgattctcctaaatcaccaaagtgcatgaaatgattttaaagctccagaaatactgaagcaactttgtgataaaaaattattagtggatgca

SEQ ID NO: 126364 - DNA, 546 bp, Homo sapiens
agtgacacctttgctttctgatggttccatgtacacaaactttgtttcattcacaaaattatttgaaatattatataaaattacctttaggctatgtgtataagatatatgaaacataagtgaatttcacrtttagacttgggtctcatccccaagatatctcacgtagatgcaaatattataaaatccaaaaaaaaattccgaaaccctaaacacttctggttccaaacatttcagataagggatactcaatctgcatatataaaatatttatgtatcacatacatagtatgtatataatatgaatttccattcctctacaggttactattctggtacattcccgttatattctgtttatcagactgcaactaaaactttcatgggttcagctttatgttgaacagaatttgcagaattatgagttgaagcaaaccctagtttgataatgctatgattctcctaaatcaccaaagtgcatgaaatgattttaaagctccagaaatactgaagcaactttgtgataaaaaattattagtggatgca

SEQ ID NO: 126365 - DNA, 546 bp, Homo sapiens
agtgacacctttgctttctgatggttccatgtacacaaactttgtttcattcacaaaattatttgaaatattatataaaattacctttaggctatgtgtataagatatatgaaacataagtgaatttcacgtttagacttgggtctcatcsccaagatatctcacgtagatgcaaatattataaaatccaaaaaaaaattccgaaaccctaaacacttctggttccaaacatttcagataagggatactcaatctgcatatataaaatatttatgtatcacatacatagtatgtatataatatgaatttccattcctctacaggttactattctggtacattcccgttatattctgtttatcagactgcaactaaaactttcatgggttcagctttatgttgaacagaatttgcagaattatgagttgaagcaaaccctagtttgataatgctatgattctcctaaatcaccaaagtgcatgaaatgattttaaagctccagaaatactgaagcaactttgtgataaaaaattattagtggatgca

SEQ ID NO: 126366 - DNA, 546 bp, Homo sapiens
agtgacacctttgctttctgatggttccatgtacacaaactttgtttcattcacaaaattatttgaaatattatataaaattacctttaggctatgtgtataagatatatgaaacataagtgaatttcacgtttagacttgggtctcatccccaagatatctcacgtagatgcaaatattataaaatccaaaaaaaaattccgaaaccctaaacacttctggttccaaacatttcagataagggatactcaatctgcatatataaaatatttatgtatcacatacatagtatgtatawaatatgaatttccattcctctacaggttactattctggtacattcccgttatattctgtttatcagactgcaactaaaactttcatgggttcagctttatgttgaacagaatttgcagaattatgagttgaagcaaaccctagtttgataatgctatgattctcctaaatcaccaaagtgcatgaaatgattttaaagctccagaaatactgaagcaactttgtgataaaaaattattagtggatgca

SEQ ID NO: 126367 - DNA, 574 bp, Homo sapiens
atttaatatttcttcttccaacatcttttatcctcctcaaatttttcacattcctgttgtgcttttttcatagataactcctgttgaaaaacttgattctctttagccaaattgacacattttgaagatacagcttccttctccgccataagattatcaaactgcatgaataaaatagtatagcttgataatgaagtaggctgagaataatctaatacaaaaccaatagcaaattttgaaatgcatttacttgcaataaaatgttatctgtaatgcagcagattcttcaaatgtgaaccctgaaattactcagaattttaagaacaaagttaaagctaccatgagtcataaaaatatattctttactatcatcatctttgccacagaatttttgtacttcattttacttttatttttcsataattcatttttgttcctccttaaatggcacaaagttatctcctagtaaaaagtgtctaacccccttccttcattatcattccccacagtatgtcaaaaaaagtttcagagatatcatattgagttatttaggccaaagtcaataaatgggcct

SEQ ID NO: 126368 - DNA, 542 bp, Homo sapiens
tagcaacctagaatcgtctaatgaaaatatgtgtcaagaataaggagaaataaagaatttttaaatggagattcattaccaggattaaatatgtataacacattttatattatatattacatattatattatatacagtatagtatatatatcatatattacattgtaaatatgtatatattaccagtattacatatatagataaatttaggggaacattgacagtattatataaaaattataaaatgtctagtatttttataagttataagagaattacaacagaaagcaacaatatatataattttggaggaatgtaaatggagckgaagtattgaaaattctttgtataattatataaaaagagagactttttaaaagttctaactagaatattaacatactaaaagtagcagtatataaaaccaaaataatatcacgaatccaggtcagtttatctgacaaatgcaaagttggtttaacataagcaaataatgtaatgtaattcaacacatttaacaacttgatttcccagcctgggc

SEQ ID NO: 126369 - DNA, 608 bp, Homo sapiens
agtaaatattccctgatctggccttagttgggtgagtcattattgcaaattcagactatgttgtatttcacctaaaatgcttatcaaactaatgtcattaattttcaattctgtactcaattaaaatgttagtttcatgagataagagtaatgaatgataaataagcaatgtttcagtgggtgttttatatacgtttcaaaatatatgcacaattattagaaataaagatgggaaaataagtcagaattcagttcttttatttaaaaaattaatttttgttggtatatatgtatatatatattgggtacatgaaatgttttgatgcaggcatgcaaggtgacgtaagtacattctagagtaaaagggctttttttttttttgctattttatactattctagcataaacgatttttgtatttttgtttttcgttttttgttttgttttgttttgttttcccttgagcactttaaatacatcatgcactctttgctggcctgtaaagtttccactctaaagtttgctgccagacagattgragctctattatatgttgtttgtttcttttctcttgctgcttttaggacccttcctttatccttggtctt

SEQ ID NO: 126370 - DNA, 631 bp, Homo sapiens
gtgactgagaaaatatcaggctaatagtagcaagcttaaatattaaaatttttacttttgctataaatatatcttgactctgtgtttctcagaatcactttaaagttgtgagtggaatttagagctgtgtagcttggcttgaaagctaatagtttagaagactgctagaaataactctcacctgcttcactaactgcagtgttggcagagatgaaaaggtatttgggacactgctctgctaacctcataacactccctgacttctgatggttgagacatatggtgccacactaacatacctaagttcattccgtttcaagcctttccttcacctggggagaacggggcaatatctgttatggtggctcatcctttctggttcagtaattgacagtggtggctacaggacttcaaacttaatttctctcaagtgatgccttctggagcyttccatgtgcctcagaggatgaagtcaatataattaatatttttttcccacagaaattccttgccattttctcatgtttgcattctttggctccaaagtgggagatgttaaactccaagttcattgagaagttgaatgttcgtttattcttgttggctactatgttgtaataagtgattaaga

SEQ ID NO: 126371 - DNA, 583 bp, Homo sapiens
cttttattatcattacttggtagatgaagagaatcagagcttgaagtagataaatacatgcttgggtttgtgttagtccattttcacactgctataaagaagtgcctgagactggataatttatgaaggaaagaggtttaattgactgacagtttcacgtggttggggaggcctccggaaacttayaatcatggtggaaggcaaaggagaaacaaggaccttcttcatacggttgtgccaaagagaagaatgaggtgcaaaggggaagaaccccttataaaaccatcagatctcatgagaactcacttcctatcacaagaatagcatgggggaaaccaaccccatcatccagttacctccacctggtcttttccttgacaggtgggattatgggtattatgaggagtataattcaagatgagatttgggtggtggcacaaagccttactgggtcagggtcatgcactttaaattagaatgctggaatttgaattcagacttactctaggtccttcttataaactattgctgcaagaaacagaagtaagcctagaaattcagcataatggttagaagaaaaaaa

SEQ ID NO: 126372 - DNA, 568 bp, Homo sapiens
  misc_feature (1)...(568): n = A,T,C or G
gtaattttagatcattattccttatattgtggtgagggctgcatatttgtnatttccatacctntgattctgctctctaatctagctcttcagaacaccaaaataataacaacaaaagtcttcaggagagatcttcaaatgctccgttaccctaaatggtctcttccaaaatatacatctgtagttccatcaactaatgttattttaagagaactcttaagctagtttttgctttgtttatgtatacatttgtttttttcatttttttcataatctgatttgtttagtacagagcaccattgacaaagatagttttaccttgaggtgaacaaactttttcaktacaggattatattgtaaacattttagctttttgccagtcatatgcagtttctgtaatatattctttgtttgtattctgtataatcttttaaaatgttttatatggcttaaaggctgtataaaaacaggctgcaaaccagatttggccctccagcctttagcttgccaacccctggtctctaccaaaggaggctttcttgattgagaaagttaatcaaagtaatat

SEQ ID NO: 126373 - DNA, 511 bp, Homo sapiens
catcaggcactccaagttggagaaacaagggatgttgaattgaaagtttaattttttaggcttgatagtcagattagggaagttttgggtacayctttcccactctagagccctctccctaactcagggccaatttgggacatgggctcaatggaaaagagtgcctagatcaattagaaatatccatcatgaacataggaggcaggcattctggccaagggggtgcatcttcccactttgtaatccagagagcgatttcttcttgctatctgtccctccataaataagcgttgggtgaaggacaagctagttaccattgaggatggaatgaaattctaccagaattgcaaaatgaactgagagccacgaaagtgttcctctgtgaaccagcagagagatctgtggaaggcaaaggaagaggagccaagaggccagataacattcctgcttcccctacattgtgagagtgaaattgtcagcaacctatatcagtaattaaccagaggctttt

SEQ ID NO: 126374 - DNA, 397 bp, Homo sapiens
attcagtgagactccagcacagacacatggtggaagatttatagacaataaagggaacatgatgtacaaaaatctgaagtgaggagtgaggtctagaagcaactgggtccattacagttctcagcagtgaggtccagaaacaactggactggttacagtgctcagcatttgccttatttgaacacagctgamcactcagcagtgtgtgagtggcagaagtttggctgttgggattggccaggactcagctactgttttaggcacatactcctaagttaggttttcagtctttctacctattaagttaggttgcagtttgtccacagggactcaaatctagaagtacagagtccttcccaggccatatttagttcactgtaacagttcctattatgac

SEQ ID NO: 126375 - DNA, 637 bp, Homo sapiens
cttcccttctgccacatgttgcctgttctccgtgactttggtaagagcttccttgtgtatgaggatgatgtccaggatgttggtctggtgtccctgagacagcactaacaggtccatggctgggtccaggtcattcctggactcattgkcaaagagcttacctgatgttcttaaaggcatctctggtgaagtggatggcctagtcaagttccaaggcctggctgaagctgaagaaaaactggccaccttctgatgctctttttaaaagcctgtcactgtcatctgcttgcttgtcaactcattggctgtgaggatgagctgagtggcctgtgtccatcttcttggggaagcatttgaagccatcagtcttgctctcccacccctaaaggttgagggtcaccacctggggttgtgctgagggtcagaaagaagccagcactcactatctcatccttctcagccttcctcttgcactctctccaggctgtctcttcagtgttggtgggatacgtcagaaagcgatggaagatgtggcactgtgcccagacccagaagctggccatgtggttggcttatccaccagaatggatgctctgggtgctctttaagccagctttgcctagcctggcatgcacag

SEQ ID NO: 126376 - DNA, 637 bp, Homo sapiens
cttcccttctgccacatgttgcctgttctccgtgactttggtaagagcttccttgtgtatgaggatgatgtccaggatgttggtctggtgtccctgagacagcactaacaggtccatggctgggtccaggtcattcctggactcattgtcaaagagcttacctgatgttcttaaaggcatctctggtgaagtggatggcctagtcaagttccaaggcctggctgaagctgaagaaaaactggccaccttctgatgctctttytaaaagcctgtcactgtcatctgcttgcttgtcaactcattggctgtgaggatgagctgagtggcctgtgtccatcttcttggggaagcatttgaagccatcagtcttgctctcccacccctaaaggttgagggtcaccacctggggttgtgctgagggtcagaaagaagccagcactcactatctcatccttctcagccttcctcttgcactctctccaggctgtctcttcagtgttggtgggatacgtcagaaagcgatggaagatgtggcactgtgcccagacccagaagctggccatgtggttggcttatccaccagaatggatgctctgggtgctctttaagccagctttgcctagcctggcatgcacag

SEQ ID NO: 126377 - DNA, 607 bp, Homo sapiens
aatgaaactactatgtatatgagaaaagatggtagattttttcatttagatactcatttcagagtctcaataggaaaaatagaacacacacaaactaagataatttaacatgggtttatttccaaagagactacttacgaaaatgtcaggggagaagggtgaaggaatcacagaaatcacacsccacaataactctgggttagcagtggcaggcagagttctggggagtaaactgccctgatcacagaaggaaacactaattttcttatgaaaaagattggtcaaggagacctagcagagagggagtttaggcaataacccccaatcccatttcctccttccctttaatctcatgaacatgcatagaaggcaatgagcaagggaaccgatggagatattcaatatggaccattccacttggacaaaagccagtaaataggggagtataacaggggacaagggccaaacagaaagtatctattacatttgccaatgcagatcaatcatgtcaacaatagaaatggcagttttggcatttggttattcaatgaaactatatttgtagctttttatttacaatgtttcaaggtatgggcgaagatatgaa

SEQ ID NO: 126378 - DNA, 607 bp, Homo sapiens
aatgaaactactatgtatatgagaaaagatggtagattttttcatttagatactcatttcagagtctcaataggaaaaatagaacacacacaaactaagataatttaacatgggtttatttccaaagagactacttacgaaaatgtcaggggagaagggtgaaggaatcacagaaatcacacgccacaataactctgggttagcagtggcaggcaragttctggggagtaaactgccctgatcacagaaggaaacactaattttcttatgaaaaagattggtcaaggagacctagcagagagggagtttaggcaataacccccaatcccatttcctccttccctttaatctcatgaacatgcatagaaggcaatgagcaagggaaccgatggagatattcaatatggaccattccacttggacaaaagccagtaaataggggagtataacaggggacaagggccaaacagaaagtatctattacatttgccaatgcagatcaatcatgtcaacaatagaaatggcagttttggcatttggttattcaatgaaactatatttgtagctttttatttacaatgtttcaaggtatgggcgaagatatgaa

SEQ ID NO: 126379 - DNA, 607 bp, Homo sapiens
aatgaaactactatgtatatgagaaaagatggtagattttttcatttagatactcatttcagagtctcaataggaaaaatagaacacacacaaactaagataatttaacatgggtttatttccaaagagactacttacgaaaatgtcaggggagaagggtgaaggaatcacagaaatcacacgccacaataactctgggttagcagtggcaggcagagttctggggagtaaactgccctgatcacasaaggaaacactaattttcttatgaaaaagattggtcaaggagacctagcagagagggagtttaggcaataacccccaatcccatttcctccttccctttaatctcatgaacatgcatagaaggcaatgagcaagggaaccgatggagatattcaatatggaccattccacttggacaaaagccagtaaataggggagtataacaggggacaagggccaaacagaaagtatctattacatttgccaatgcagatcaatcatgtcaacaatagaaatggcagttttggcatttggttattcaatgaaactatatttgtagctttttatttacaatgtttcaaggtatgggcgaagatatgaa

SEQ ID NO: 126380 - DNA, 607 bp, Homo sapiens
aatgaaactactatgtatatgagaaaagatggtagattttttcatttagatactcatttcagagtctcaataggaaaaatagaacacacacaaactaagataatttaacatgggtttatttccaaagagactacttacgaaaatgtcaggggagaagggtgaaggaatcacagaaatcacacgccacaataactctgggttagcagtggcaggcagagttctggggagtaaactgccctgatcacagaaggaaacactaattttcttatgaaaaagattggtcaaggagacctagcagagagggagtttaggcaataacccccaatcccatttcctccttccctttaatctcatgaacatgcatagaaggcaatgagcaagggaaccgatggagatattcaatatggaccattccacttggacaaaagccagtaaataggggagtataacaggggacaagggccaaacagaaagtatctattacatttrccaatgcagatcaatcatgtcaacaatagaaatggcagttttggcatttggttattcaatgaaactatatttgtagctttttatttacaatgtttcaaggtatgggcgaagatatgaa

SEQ ID NO: 126381 - DNA, 593 bp, Homo sapiens
tttgcttctggttttccggaaaagccagctaagcctgtggttcatttagatataaatgaaatatcctcaaaggatttctcaaagtgacttatgcaacttgaatatatatttgttctgtagggtgtttattccaaattacctggccatttgctgcaatttgcagttttttagaaaacaccaaatatttctcaatttagagatgttttaataaaaacagtcatattgaactggcagcagccaaataaaatagccctttatttcacagttcagaatttgaaattggaaggtaattaacatatgtaaggatgatrtatttgctgcctggcttataggaatgagccaagttgttttttgagggatgttgttgctgtgtatgtcccacctattttgcttccttaatgaacaatgcaagtttgagacagaaatatttgagaacatttttatcagttgcaacactttgatagtgaacattttatatcttctgtcaacttaaaatgtttgcatcttctgtcagcttaaaatgtttaatttgttatagccaaataatttggctataattgataatttaatttatcaaattaaattgctttttt

SEQ ID NO: 126382 - DNA, 593 bp, Homo sapiens
tttgcttctggttttccggaaaagccagctaagcctgtggttcatttagatataaatgaaatatcctcaaaggatttctcaaagtgacttatgcaacttgaatatatatttgttctgtagggtgtttattccaaattacctggccatttgctgcaatttgcagttttttagaaaacaccaaatatttctcaatttagagatgttttaataaaaacagtcatattgaactggcagcagccaaataaaatagccctttatttcacagttcagaatttgaaattggaaggtaattaacatatgtaaggatgatatatttgctgcctggcttataggaatgagccaagttgttttttgagggatgttgttgctgtgtatgtcccacctattttgcttccttaatgaacaatgcaagtttgakacagaaatatttgagaacatttttatcagttgcaacactttgatagtgaacattttatatcttctgtcaacttaaaatgtttgcatcttctgtcagcttaaaatgtttaatttgttatagccaaataatttggctataattgataatttaatttatcaaattaaattgctttttt

SEQ ID NO: 126383 - DNA, 593 bp, Homo sapiens
tttgcttctggttttccggaaaagccagctaagcctgtggttcatttagatataaatgaaatatcctcaaaggatttctcaaagtgacttatgcaacttgaatatatatttgttctgtagggtgtttattccaaattacctggccatttgctgcaatttgcagttttttagaaaacaccaaatatttctcaatttagagatgttttaataaaaacagtcatattgaactggcagcagccaaataaaatagccctttatttcacagttcagaatttgaaattggaaggtaattaacatatgtaaggatgatatatttgctgcctggcttataggaatgagccaagttgttttttgagggatgttgttgctgtgtatgtcccacctattttgcttccttaatgaacaatgcaagtttgagacagaaatatttgagaacatttttatcagttgcaacactttgatagtgaacattttatatcttctgtcaacttaaaatgtttgcatcttcygtcagcttaaaatgtttaatttgttatagccaaataatttggctataattgataatttaatttatcaaattaaattgctttttt

SEQ ID NO: 126384 - DNA, 577 bp, Homo sapiens
gaagggaatgaaggaattgtgctrtatcagaggtccccacctaacagcacagggactttttctgtgctcttgccaggccgttgtattaggctgatacaaaagtaattttggttttgtcattgaaagtaatgagaccatctgacttacaatgtctatgtcataaccaactcctaatagcctcctaggacagctttgccctgacatacactgtcctggaaccacgtctgctttgtaactcctgaggtagctgccaccatgaccaatgccttctcatctttactctacatgcaggtaacagttataattatatctctgtgtattcacagaacatctagtacatctgggacttctacaaaatttccctagctgattttggtgttctagtgtcctggcagctctagccatgaagggatgatgctttatcagcatttctgttgagttttttttcctttttctcacaaactgattccacttttcccacatacgtttgacaattcatttgaactcatttattctaaacccattattttttgtctattatttaatagggtggggggcgagggataaaagataacaa

SEQ ID NO: 126385 - DNA, 577 bp, Homo sapiens
gaagggaatgaaggaattgtgctgtatcagaggtccccacctaacagcacagggactttttctgtgctcttgccaggccgttgtattaggctgatacaaaagtaattttggttttgtcattgaaagtaatgagaccatctgacttacaatgtctatgtcataaccaactcctaatagcctcctaggacagctttgccctgacatacactgtcctggaaccacgtctgctttgtaactcctgaggtagctgccaccatgaccaatgccttctcatctttactctacatgcaggtaacagttataattatatctctgtgtattcacagaacatytagtacatctgggacttctacaaaatttccctagctgattttggtgttctagtgtcctggcagctctagccatgaagggatgatgctttatcagcatttctgttgagttttttttcctttttctcacaaactgattccacttttcccacatacgtttgacaattcatttgaactcatttattctaaacccattattttttgtctattatttaatagggtggggggcgagggataaaagataacaa

SEQ ID NO: 126386 - DNA, 577 bp, Homo sapiens
gaagggaatgaaggaattgtgctgtatcagaggtccccacctaacagcacagggactttttctgtgctcttgccaggccgttgtattaggctgatacaaaagtaattttggttttgtcattgaaagtaatgagaccatctgacttacaatgtctatgtcataaccaactcctaatagcctcctaggacagctttgccctgacatacactgtcctggaaccacgtctgctttgtaactcctgaggtagctgccaccatgaccaatgccttctcatctttactctacatgcaggtaacagttataattatatctctgtgtattcacagaacatctagtacatctgggacttctacaaaatttccctagctgattttggtgttctagtgtcctggcagctctagccatgaagggatgatgctttatcagcatttctgttgagttttttttcctttttctcacaaactgattccacttttcccacatamgtttgacaattcatttgaactcatttattctaaacccattattttttgtctattatttaatagggtggggggcgagggataaaagataacaa

SEQ ID NO: 126387 - DNA, 592 bp, Homo sapiens
actctttagtacagtaaagcagttttgcccatggtttccagaacaaaggactatgaagttggatgaatgggagagaattggaagagattttttaaaaggcatataaagatggagcagaaattctagtttctgtatggtcagtgtgggcactaataaaggcagcccttgagccatttcaaacagatgatgaggcagactcagatgaggaagaggaggatgagtgtaaaaaactaacttcaaattctgagtgtggggagcagctaccagaggagattaaagaaaagaaagaaaaactttwaaaagtatgttttactagcccgttggctccacctgctgaattaagtgaatggccacctcctctctctcctctaaatgggtgagaaaatcaattagctgaaaaacttactgctcctgtagttacaacattaaaacctggagcaattggtggtggtagacaaaattctattcaaaaagctaaagccaagggagaccttgaagcatggcaatttcccgttactataatccagcaagtaggacagaatatagctaattaggctgctttctcttttaagttactaaagaatttaagcaa

SEQ ID NO: 126388 - DNA, 592 bp, Homo sapiens
actctttagtacagtaaagcagttttgcccatggtttccagaacaaaggactatgaagttggatgaatgggagagaattggaagagattttttaaaaggcatataaagatggagcagaaattctagtttctgtatggtcagtgtgggcactaataaaggcagcccttgagccatttcaaacagatgatgaggcagactcagatgaggaagaggaggatgagtgtaaaaaactaacttcaaattctgagtgtggggagcagctaccagaggagattaaagaaaagaaagaaaaacttttaaaagtatgttttactagcccgttggctccacctgctgaattaagtgaatggccacctcctctctctcctctaaatgggtgagaaaatmaattagctgaaaaacttactgctcctgtagttacaacattaaaacctggagcaattggtggtggtagacaaaattctattcaaaaagctaaagccaagggagaccttgaagcatggcaatttcccgttactataatccagcaagtaggacagaatatagctaattaggctgctttctcttttaagttactaaagaatttaagcaa

SEQ ID NO: 126389 - DNA, 592 bp, Homo sapiens
actctttagtacagtaaagcagttttgcccatggtttccagaacaaaggactatgaagttggatgaatgggagagaattggaagagattttttaaaaggcatataaagatggagcagaaattctagtttctgtatggtcagtgtgggcactaataaaggcagcccttgagccatttcaaacagatgatgaggcagactcagatgaggaagaggaggatgagtgtaaaaaactaacttcaaattctgagtgtggggagcagctaccagaggagattaaagaaaagaaagaaaaacttttaaaagtatgttttactagcccgttggctccacctgctgaattaagtgaatggccacctcctctctctcctctaaatgggtgagaaaatcaattagctgaaaaacttactgctcctgtagttacaacattaaaacctggakcaattggtggtggtagacaaaattctattcaaaaagctaaagccaagggagaccttgaagcatggcaatttcccgttactataatccagcaagtaggacagaatatagctaattaggctgctttctcttttaagttactaaagaatttaagcaa

SEQ ID NO: 126390 - DNA, 551 bp, Homo sapiens
tagggtctctccaaccgacctggtctcagcaagtggtgcccattcatgggggctcaaatacaggtcaaaggatcgctggagcaacgattggagaatgtggaactagctggaggacacccgagtactcttaaagcaatccccgtggtgagtaagaaggggagctcggaagcatcagggtagcaataggacaagtgtgggctgtggttcgttctaccttggaactttttcacactgatgatgaggaggaaggagagtataacaaagtaacagtagaggttacagaccaggtttatttgtcacctaaagctaaagcagaaaaggagggagaggttcatccctatccttctgcacaccctcattactattttgaagaaaacgaccctccagatctttcttttctggaggacactgggtgaaaagtagttgccctgrtgactgttcgagcagcgccttgagcgactgctcttagttctattcaggcaggaatacagcaagctagacaaaagtgggatttagaggcttggcagttccctgtttgaatacacccccca

SEQ ID NO: 126391 - DNA, 604 bp, Homo sapiens
aggattcatcctctgcacccattttaaagacattacttacatctatggtaatccaaacctgaaaagttatctctggaagttttcatgacaaagacctattgctttgagtcacttatagaataaataaattggctatatttaaaagaaaactttttagagagcttttatcttaaacagctatctttttgtacctatgaaaagatataaaatgaatttatagacttacaaccttctttggcaagaataaaagaaaaaagcagaaatcagatttaaaacaaaagtaaatttttttttgcatacacaaacttcctactttggatctyttgcagaatctgcaaaaagacctatagtctagtggcttggaatttatgtctgtactactgtggcctgggttaaattcctgaccagggtaaaagtcccttggaaacattaataaaaaaatagtttgatatttgcatatctgtacccatttattttgtaatcctttgtacccccatagatagcttttgacttccacttgtcctgactatttttaaatttcctgtgtgtatggaacacaggttgtcaggtctttgcagacattcaactgagaaactgaaaccct

SEQ ID NO: 126392 - DNA, 523 bp, Homo sapiens
agtaatttattgcaaaggggaaagaacattttgaaagtgatccgggagtgctgggaagggaagagtgtggtctctttaaatgataaggaaggagggaagaaaagtgctggatagaggaagggcatggtccctggctagggctccacccccaccgacctaggtgaggaaagtcattcctgcctttgcgcccaaatgttgcatttcccaagaccaccctgrcccaccatgccctgatcctgtgcctataaaaaccccagggactctagcaggcagacacacatgtggctggatgttgagaggttgtccagggaatcacatcgcagaacagcaaatcagcaggcatttgcaagcaagcaggccactgattggtggaaggaggcggagttaatctgggacagtcagaggagagcccaggctgcccattctaccaactccaggggaaaatcatctcccttctggctccccccatctgctgagagctacctcctctcaataaaaccttgcactcattctccaaacccac

SEQ ID NO: 126393 - DNA, 588 bp, Homo sapiens
gtgcagcgggttgagtaaatgggttacccctgtcataagtttgacgaagggaataagaaaaatcctgaatcactatgataaaaaattttgcaacagagtataggttaatgaaagtctgtgtagggagcatgcttgaaagcaataatgaaagtgccatgacacaggtctcagtagaatctttcatgaaaatatcacttcaggatacaacaggcatagaaatggcaaaagatgtagaattgtgtctgtgtgtgtgtgcatgtgtgtattctctggtgtagaaaacatttgaaatgtcatacactgatagatatctcaggccttacaaaaatgaccctccaccacatttggtgatcaatagaatgggctgtctttgaacaacacaaaataaaacaactcaggtgatggctacattttgttcaatacattcttattatgatttgaaacaacctcaaagtttgttagaatatgtagatagcaattaacattttttaaaaaagcaaaaaagctgatcacaaaacattggattttgtggctrcaggtagacatggactgtgagtcactggtaacatttgtcacattcagcccttc

SEQ ID NO: 126394 - DNA, 423 bp, Homo sapiens
atggcataagcacttcttatcagcacacacctctcaccactgttgcattggaaattaagtttctggcacatgaactttggatgacattcacaccattgtaggtttcattcatctaagaatgcatttctctcttcttgaagaatattgtcacaggacggcaatcttggaggagcaargacacagcaagaaatgacagggttatgaagaaaattgaggatggtagtcaagatgatagaagaaaaaaaactaaaaaaaataggatcaattattcacagttcatgggaagtttccatttgaattcactaataatggagcaggatacaagtaggtctccatggaataagcaaagagatagtgaacaaaatctatgtgggaatgctagagaggcaatctgatggaagtatatagtgcagtttaaactgt

SEQ ID NO: 126395 - DNA, 522 bp, Homo sapiens
tctgacaaaggactaatatccagaatctacaacaaattcaaacaaatcaacaagaaaataaaaatcccatcagaaagtgggctaaggatgtgaatagataattctcaaaagaagatatacaaatggccaayagacatatgataaaaggctcaacaccactaatgatcagggaaatgcaaatcaaagccaaaatgcaatactaccttactactgcaagaatggccataattaaaaaaatcaaaaaacagtagatgttggcgtggatgtggtgatcaaagaacacttccacactgctggtgggaatgtaaagtagtacagccatagtatggaaagcagtgtggagattccctaaagaactaaaagtagaactatcatttgatccagcattcccactgctgggtatctacccagaagaaaataagtcattatacacaaaagataactgcacatgcatgtttatagtactacaattcgcaattgcaaaattatggatccaagctaaatgcccattaatcaataagt

SEQ ID NO: 126396 - DNA, 639 bp, Homo sapiens
  misc_feature (1)...(639): n = A,T,C or G
aacacacatcccacatgtaantttatgtctcttcaatgcatcctgtagagttaaaaagtaaaaaaacacaactttgngaggccgaagccgggcagatcacgaggtcaggagatcgagaccatcctggctaacatggtgaaacaccatctttttctaaaaatccaaaaaaaaaaaaagaaaattagctgggcatagtgatatgtgcctgcagttccatctactcgggaggctgaggcaggasaatctcttgaacccggcaggcagaggttgctgtgagccgagactgcactactgcactccagcctggcgacagagctagactctgtctgaaaaaaaaaaaaaaaaaagtcacctatagaggcttgaaaatacatgttcactgtaactttattagccttcagtattaatattattgctattcatcaaattccaaaagaaattgtatgaaagcacagtgagtctacttcagaaacaatttagcaagttccgtaagacataataggacatctgatgtctatcacatctgaataaatgcagtgatttcctagctccttcattgcttactggaaggatgcatgatattacattttacttagctatatgaagatactttctagaatattttggacatattaacat

SEQ ID NO: 126397 - DNA, 639 bp, Homo sapiens
  misc_feature (1)...(639): n = A,T,C or G
aacacacatcccacatgtaantttatgtctcttcaatgcatcctgtagagttaaaaagtaaaaaaacacaactttgngaggccgaagccgggcagatcacgaggtcaggagatcgagaccatcctggctaacatggtgaaacaccatctttttctaaaaatccaaaaaaaaaaaaagaaaattagctgggcatagtgatatgtgcctgcagttccatctactcgggaggctgaggcaggagaatctcttgaacccggcaggcagaggttgctgtgagccgagactgcactactrcactccagcctggcgacagagctagactctgtctgaaaaaaaaaaaaaaaaaagtcacctatagaggcttgaaaatacatgttcactgtaactttattagccttcagtattaatattattgctattcatcaaattccaaaagaaattgtatgaaagcacagtgagtctacttcagaaacaatttagcaagttccgtaagacataataggacatctgatgtctatcacatctgaataaatgcagtgatttcctagctccttcattgcttactggaaggatgcatgatattacattttacttagctatatgaagatactttctagaatattttggacatattaacat

SEQ ID NO: 126398 - DNA, 529 bp, Homo sapiens
agcaaatggagccatttgcccttggggccaagctcattttaccaatcacaaaatacaaaaatacaaaaaataaaaaagaacaaaagactttgtgttaaatatttttaaaatggttaactgtgtttaaaatgattaaaattatttgagtgaggagaggtgaatatttcagaaccctcaaagcacaagtcctttgaatttatttatttagctttgtrgagttttgtgctttcagcaatttataggtatagaatcacatacatggctgctcatgcaaacatgcacacacacatgcaaacaaggcatcacacacctagggtcacagaaccaatatattctatatattctctcactttcctggaactacaaccatgggaacaaattcttttacgtagggctccagcatcataggagaactgggggaacttggcatgggttattgtccctctgtggattccatactatggaacatcaagatggtgatataggtctcctttgcccttccttattatgggtattgtctgttggagtt

SEQ ID NO: 126399 - DNA, 629 bp, Homo sapiens
gtatagaatcacatacatggctgctcatgcaaacatgcacacacacatgcaaacaaggcatcacacacctagggtcacagaaccaatatattctatatattctctcactttcctggaactacaaccatgggaacaaattcttttacgtagggctccagcatcataggagaactgggggaacttggcatgggttattgtccctctgtggattccatactatggaacatcaagatggtgatataggtctccyttgcccttccttattatgggtattgtctgttggagtttatcactacttcatttgtaaatactaagcattcctgttttctatcccccttaaaccttgaaagctcagtttggatatcacttcttttgggtagcttttctgcttgttgcataacaaaactgtcgttctaagatttcaatagcttctctgatactatggcaaaattcaaagtccctttttatgctcacaagactcttcaagatcttttatcaacaattctgtctctctccactccccagcttgcatgctgtttcatccttgtgaaggcagtatggcttaatggtcaagactgcacaatctgaaactaaactgctcggctcacctcaggtatttagtagcccag

SEQ ID NO: 126400 - DNA, 544 bp, Homo sapiens
aacaatttggacaaaaaataccaaatggatcactggtttgtgggtgaagatgagtccatttttatgcatgctaagtgataaatcttcttggaatactatcgacattttgatatcaagactgaaggcaggggagaggcttgaattaaaaatatagatttargaattacagaatattttgaataaaattattgttatagaagaaatcatccagatgacacagaagcaattgtagattgaaaaaagcagtgacaataagacagaacactggcaaagatggttattcaggagttaataaaaaaggtataatactcatcattaaaataaatagatgagagtagaagaaagtttgagtattagtgcagcatatgtgctgtaagataaaggtccactgtgtttgttaattaacagtataccaactcagtgaaaggagttttctagtgaaagaagccagatgcctgtatgtcgatgagtgaatggaaggtgtggaaatggatatatgtgattactttaaatataattttgtgaaaattggataagaagatat

SEQ ID NO: 126401 - DNA, 660 bp, Homo sapiens
gtattatatgttctaattgtaatgcctaaaatttagaaaactgaaagatattttcacataatatattggtttctattgctgctgtaataatttgccacaaatttcgtggcttaaaacaatatctttttttctcatagttctataagtgataaatctggtatgccttattaggtttcctgctccaggtctcataagaccaacgtaaagcaaaatcaaggtatcattcactgggtatcactctatctggaggctttggagaagaatctacttccaaggttattcaggttgtttacaaaatccastttcttacaggagtgtcattgatggctgtcagcttgatgtctgctactgtaccccaaggctatatgtcattccctctcaagtgacctcttccaacttcaaagcaacaagggcacattgaatccttttcctgctttgaatcgctctgacttcttcagccatcagctggaaaaaaattctctgcttttaaaatctcaaatggttaggccaggcctctgggataatctagtattttaaagtcagctgtgccacataatatgtaataatggcagagatgtctctcatagtcacatgttccagggatcagaatatgtcatcttgctggtggggagggttaggattctgcctgtgatacacaga

SEQ ID NO: 126402 - DNA, 653 bp, Homo sapiens
tgaattaatttttttatggtaacatagtattccatggcatatatataccatatcttcttatccagtccactgctgatgggcttctaggttgattctatatctttgctattgtgaagagtgctgtgatgattatatgcatccatgtgtttttatggttgaactatttattmtcctatgaatatatatccagtaatggaattgttggtcagtagtagttctaagatctttgagaaatctataaactgttttccacagtggctgaactaatctacactcccaccaacagtgtataagtgttccctttcttcacaaacttgcctatatgtgttatttttcactttttaagagtagtcattttgagtggtgtgagataatgtttcattattgtttttgtttgcatttctctaataactagtgatgttgagtattttttcatgtttgttgccatgcatataccttcttttgaaaagtctctgttaatgtgctttgtttatttattaatggggttgtttgttacttgttaaattgaatgaattcctcatagatcccaggtattagacctctgttgaatgcatagtttgcaaatatttcctaccattctgtaaatgcttgtttactctgttgacagtttatttcattatgcagatttttag

SEQ ID NO: 126403 - DNA, 653 bp, Homo sapiens
tgaattaatttttttatggtaacatagtattccatggcatatatataccatatcttcttatccagtccactgctgatgggcttctaggttgattctatatctttgctattgtgaagagtgctgtgatgattatatgcatccatgtgtttttatggttgaactatttattatcctatgaatatatatccagtaatggaattgttggtcagtagtagttctaagatctttgagaaatctataaactgttttccacagtggctgaactaatctacactcccaccaacagtgtataagtgttccctttcttcacaaacttgcctatatgtgttatttttcactttttaagagtagtcattttgagtggtgtgagataatgtttcattattgtttttgtttgcatttctctaataactagtgatgttgagtattttttcatgtttgttgccatgcatataccttcttttgaaaagtctctgttaatgtgctttgtttatttattaatggggttgtttgttacttgttaaattgartgaattcctcatagatcccaggtattagacctctgttgaatgcatagtttgcaaatatttcctaccattctgtaaatgcttgtttactctgttgacagtttatttcattatgcagatttttag

SEQ ID NO: 126404 - DNA, 551 bp, Homo sapiens
taaagccatttcttgttacaatattgattagtaatgaatgctatgccacgtatcaaatttaaattttgatggaactggtctctagtggaagaayatgctgccaaacaacctacgattctaagaaagaagcttcagttttcaagttaaagatgcagaatatttaatgatagtggtcccagacattattgccaatggagatctaacagggctatttaaaataagattatttatggtcttggtagtgctctaattaaaattcacataagtttatgtggtttgcgaatgatcgatttttagttgtgttaaaataaaaactttaaacaaattaaattttacggagttaattcagcaaaaagcaattgactctccatgagtccatgcttaacattggatttatatgctcctaaataccaattttgttaccttaattcgagttcctaaaactgcttaacaaatgggttatcactggtaattcgacttgtgccatggagttcatccaaattacatattttaataattttagtgctggctgatttagcatgaaatcttgc

SEQ ID NO: 126405 - DNA, 551 bp, Homo sapiens
taaagccatttcttgttacaatattgattagtaatgaatgctatgccacgtatcaaatttaaattttgatggaactggtctctagtggaagaacatgcygccaaacaacctacgattctaagaaagaagcttcagttttcaagttaaagatgcagaatatttaatgatagtggtcccagacattattgccaatggagatctaacagggctatttaaaataagattatttatggtcttggtagtgctctaattaaaattcacataagtttatgtggtttgcgaatgatcgatttttagttgtgttaaaataaaaactttaaacaaattaaattttacggagttaattcagcaaaaagcaattgactctccatgagtccatgcttaacattggatttatatgctcctaaataccaattttgttaccttaattcgagttcctaaaactgcttaacaaatgggttatcactggtaattcgacttgtgccatggagttcatccaaattacatattttaataattttagtgctggctgatttagcatgaaatcttgc

SEQ ID NO: 126406 - DNA, 613 bp, Homo sapiens
cagtgttatttaaaatcaacatttctgagaggctgaggtgggaagatggcttgaggccaggagttcaaagacaagcctgggcaagatggtgagacctagcctctagaaaaaaaatttaaaaagaagattggacagcatgtggtacgtgtctgttgtcccagctactcaggaggctgaggcaagaggatctcttcatcccaggaatttgaggaggcaataaattacgaccatgccactgcacttcagcctgggcaacaaagtgagaccttgtttctaaaaataaataaataaataaataaataaataaataaatgcatattgcttgctaccttaaataagataaactttttccttttagtgaagacaaatagtagcttaatatcagtgataagaacaaaaccccatcttattgcagttattgaaattcttactttacttttatrattcttccatcatttttcatctgataaccaattttttttccataaacatataaactcattatcttaagcacatatcagtagctccttaaaatgttaggataattgtaatttttatttaaaataacatttaaaaattaatattaataacaataaatgattataaagtctat

SEQ ID NO: 126407 - DNA, 579 bp, Homo sapiens
aaagatatcaatttatgcaacagtttaaacactttacccaaaatttatgaaagtgaaattgccctaggggaatttgttcacataaagaactaaatatacctttattttgtttaagaaattmttccttattgatctatttcaaataaattcactagatatactggaactatgaattaattattccagaagaaatttttgtgtgtatgtgaacaggagagagaaagacaaagtaagggaaagttttttagtgaataaaactttgtattaataaaccttgagaaatttgaggttacaagtatcaatgtgtttgcctaaagcatcttgcctactatcacacttcataagatatatcagtttcatttttacataagatttttaaaaacatatttacttatatatcttggccagtactgtctttattttaacactgcaagtcccagagaccaggaaacctcccatcccttccaaaacaaagcctcatattcactctataatattcagcatacaaagaacaaatctaaaaggcatatatgtgttttttcggatatatcaatggaaatgatgaaactgtagagagct

SEQ ID NO: 126408 - DNA, 593 bp, Homo sapiens
gacaccagccaatgcagatctaaataccaatgccaggaaaaagcaagggatttctttaatccccattaatrtaagtctttaggcaacttccatttagaattggtgttgagacaaaaagataaaggagaaatttgagaaacaatcacacaagagaagcctgcaaaattaatatattggattcagtttactgaacagataagttttcaatttctctgccctgttaatttgtagtttcaggttttacaagagaaatctggtcagttatagaaacaaatttcaaaatatgctttttatttatacttcttcatatagtgtgagagaatctgtgaccccgctatacaataagcatgtttggataacacgtttcaataatctgaactaataacaattgtgaactacattcctcttaataagaaagagaacagctattttaaacagtcttatataagagagagagagagaaggatgaagtattgagtttgcagctggctaaagagtagaaacctttggctattaggcctcatttgtgaaaggatgtaatcaatttttctgtggtaggtcgtcctacatgcctgggtttgaattatattcat

SEQ ID NO: 126409 - DNA, 593 bp, Homo sapiens
gacaccagccaatgcagatctaaataccaatgccaggaaaaagcaagggatttctttaatccccattaatgtaagtctttaggcaacttccatttagaattggtgttgagacaaaaagataaaggagaaatttgagaaacaatcacacaagagaagcctgcaaaattaatatattggattcagtttactgaacagataagttttcaatttctctgccctgttaatttgtagtttcaggttttacaagagaaatctggtcagttatagaaacaaatttcaaaatatgctttttatttatacttcttcatatagtgtgagagaatctgtgaccccgctatacaataagcatgtttggataacacrtttcaataatctgaactaataacaattgtgaactacattcctcttaataagaaagagaacagctattttaaacagtcttatataagagagagagagagaaggatgaagtattgagtttgcagctggctaaagagtagaaacctttggctattaggcctcatttgtgaaaggatgtaatcaatttttctgtggtaggtcgtcctacatgcctgggtttgaattatattcat

SEQ ID NO: 126410 - DNA, 593 bp, Homo sapiens
gacaccagccaatgcagatctaaataccaatgccaggaaaaagcaagggatttctttaatccccattaatgtaagtctttaggcaacttccatttagaattggtgttgagacaaaaagataaaggagaaatttgagaaacaatcacacaagagaagcctgcaaaattaatatattggattcagtttactgaacagataagttttcaatttctctgccctgttaatttgtagtttcaggttttacaagagaaatctggtcagttatagaaacaaatttcaaaatatgctttttatttatacttcttcatatagtgtgagagaatctgtgaccccgctatacaataagcatgtttggataacacgtttcaataatctgaactaataacaattgtgaactacattcctcttaataagaaagagaacagctattttaaacagtcttatataagagagagagagagaaggatgaagtattgaktttgcagctggctaaagagtagaaacctttggctattaggcctcatttgtgaaaggatgtaatcaatttttctgtggtaggtcgtcctacatgcctgggtttgaattatattcat

SEQ ID NO: 126411 - DNA, 593 bp, Homo sapiens
gacaccagccaatgcagatctaaataccaatgccaggaaaaagcaagggatttctttaatccccattaatgtaagtctttaggcaacttccatttagaattggtgttgagacaaaaagataaaggagaaatttgagaaacaatcacacaagagaagcctgcaaaattaatatattggattcagtttactgaacagataagttttcaatttctctgccctgttaatttgtagtttcaggttttacaagagaaatctggtcagttatagaaacaaatttcaaaatatgctttttatttatacttcttcatatagtgtgagagaatctgtgaccccgctatacaataagcatgtttggataacacgtttcaataatctgaactaataacaattgtgaactacattcctcttaataagaaagagaacagctattttaaacagtcttatataagagagagagagagaaggatgaagtattgagtttgcagctggctaaagagtagaaacctttggctattaggcctcatttgtgaaaggatgtaatcaatttttctgtggtaggtcstcctacatgcctgggtttgaattatattcat

SEQ ID NO: 126412 - DNA, 558 bp, Homo sapiens
tgatctacagcttctgactacattcaaaatagcatgtagtgacttctcattggccagtctaagcatatattaaaaaattactactctctttataagcaagcttatttgtgccagagaaaccatacctatgtttatattagagcatcacggaaagcctggtttttgctgaagccttaaaacattgctggggtcataattcagcatagtagatgacagtttttaagatatctacttgtcttttcaataaataggaaatactggtttaaagggaaagaaacttctatacttttgctgctgaatttcttcaatattgattcaggctgaaaaccaagctgatttttttttgtgtgtgtagtatcaaaggacagcttacttgtgaaaattataggataggcataatatcttaaacattcaaaatagccagtgccagcttttatgagctgaattgcatcccttctctatcccaraaaggtatattggagttctaacacctagaatttcagaatatcaccttatttggatataggtttttacagaggtaatcagcttaaaatgagg

SEQ ID NO: 126413 - DNA, 643 bp, Homo sapiens
ttagattgttttatctgattgttttggatgggtgtaggaaataatctgattaaataattaatacatataaaaaaagtcatgacctaaaaagagcagaaatacttaattacctaatctaaattgtgtgcttcaggctggataatttgacaggaataaccatctttcaattatatcaacaatattaaactagggatgcaactttttatgaaatctgctgatcactwgtgaagacatatgttactaatgatgcactggcttgccaacttgtttgaaaatgattaaataaagtgttttcatgaatacattaaattaagaggatatagaaaatgtatttgaagaatctgaatcgagtggaaacatatttagttgatgactcatttggtggatatcatgtcaccatggattcatttctttactcttcttttgataaagcagggttcataatgtatatcttttggaagtacattatctatcaataaatctacacatacatttgaatgtcaaatttctcattaaaatcacgtgggtgatctttggatttctcttataaacatatgctcaaatacatagttttgatcttcccctaagtaattcagggtgctactaatctacacttccttcctgactgaaaaatacttgtaga

SEQ ID NO: 126414 - DNA, 643 bp, Homo sapiens
ttagattgttttatctgattgttttggatgggtgtaggaaataatctgattaaataattaatacatataaaaaaagtcatgacctaaaaagagcagaaatacttaattacctaatctaaattgtgtgcttcaggctggataatttgacaggaataaccatctttcaattatatcaacaatattaaactagggatgcaactttttatgaaatctgctgatcactagtgaagacatatgttactaatgatgcactggcttgccaacttgtttgaaaatgattaaataaagtgttttcatgaatacmttaaattaagaggatatagaaaatgtatttgaagaatctgaatcgagtggaaacatatttagttgatgactcatttggtggatatcatgtcaccatggattcatttctttactcttcttttgataaagcagggttcataatgtatatcttttggaagtacattatctatcaataaatctacacatacatttgaatgtcaaatttctcattaaaatcacgtgggtgatctttggatttctcttataaacatatgctcaaatacatagttttgatcttcccctaagtaattcagggtgctactaatctacacttccttcctgactgaaaaatacttgtaga

SEQ ID NO: 126415 - DNA, 643 bp, Homo sapiens
ttagattgttttatctgattgttttggatgggtgtaggaaataatctgattaaataattaatacatataaaaaaagtcatgacctaaaaagagcagaaatacttaattacctaatctaaattgtgtgcttcaggctggataatttgacaggaataaccatctttcaattatatcaacaatattaaactagggatgcaactttttatgaaatctgctgatcactagtgaagacatatgttactaatgatgcactggcttgccaacttgtttgaaaatgattaaataaagtgttttcatgaatacattaaattaagaggatatagaaaatgtatttgaagaatctgaatygagtggaaacatatttagttgatgactcatttggtggatatcatgtcaccatggattcatttctttactcttcttttgataaagcagggttcataatgtatatcttttggaagtacattatctatcaataaatctacacatacatttgaatgtcaaatttctcattaaaatcacgtgggtgatctttggatttctcttataaacatatgctcaaatacatagttttgatcttcccctaagtaattcagggtgctactaatctacacttccttcctgactgaaaaatacttgtaga

SEQ ID NO: 126416 - DNA, 640 bp, Homo sapiens
attcagaagtcaaggtgctctgacagttcagcagacatatgacctaacttcaaccagcagacaggatctgacctaggaaagatgaagacaaaaaccagatctcaaacagatgtattgtagttcaaggtagggcaatcagacctgtaggaagactgagcaggccactgaattgggcccccgaaagagaagcccagacatgaggactggacccacccaggaactgggagtaaagcaatttggggacagttgggtcctaggcctcrcctctaggaaacctggattgcccagtcggtgctgaaggtgtctcagatctgcttggatctataatattggacctggtaaatataacttgattcagactcctttggactctggagtgaaggctattgcatgtgctgcagtgttgttaaagtgaactaaatatggcctgagaaggactccgtacttctatagttgagttcttgtggaggaactgtaacctagcttaataggcaagattgaaaacctaacttaggagtatgcctctgtaacaatagctgagtgttggccaatcccagcagccatactttaaccactcataggctgctgagtgttcaaataaggcaaacagggagctgtaactaatcccactgtttctgta

SEQ ID NO: 126417 - DNA, 640 bp, Homo sapiens
attcagaagtcaaggtgctctgacagttcagcagacatatgacctaacttcaaccagcagacaggatctgacctaggaaagatgaagacaaaaaccagatctcaaacagatgtattgtagttcaaggtagggcaatcagacctgtaggaagactgagcaggccactgaattgggcccccgaaagagaagcccagacatgaggactggacccacccaggaactgggagtaaagcaatttggggacagttgggtcctaggcctcgcctctaggaaacctggattgcccagtcggtgctgaaggtgtctcagatctgcttggatctataatattggacctggtaaatataacttgattcagactcctttggactctggagtgaaggctattgcatgtgctgcagtgttgttaaagtgaactaaatatggcctgagaaggactccgtacttctatagttgagttcttktggaggaactgtaacctagcttaataggcaagattgaaaacctaacttaggagtatgcctctgtaacaatagctgagtgttggccaatcccagcagccatactttaaccactcataggctgctgagtgttcaaataaggcaaacagggagctgtaactaatcccactgtttctgta

SEQ ID NO: 126418 - DNA, 606 bp, Homo sapiens
atagaatcaagttatattggagaaaaacacagcttttatagacctctgagacaaaacactttagtatcaggccacaataacactcagaaccagaagagaaaatgtcacaggagctgatgaaaaggctaaaggasacagttatatgactctgagaagcaagaggcttttaaaagaaatagaatatgaaatcgaaaagcaaaattttgggtaatttagcaaattaatactgtaagaaaatttggtttgacatggagactatttttagaaagtctattatatacaattttcttttaattacagctagcttaatcacacataaaattcctttcataaattcccctttatgaaccttatcacaacttacatataccatctaccacatgcttggacattttgacttgtcctatactacctctttcttaaataaccattcattttcctctaggacaagagtttactgtagaatatctttttatacaaaattactctttctttatatccttccttgcaaaaaaaaatacattttttatctagagatttctttctatctcttttttttccactcatggttgcttcataatttgaacctcaccttcaatgacttct

SEQ ID NO: 126419 - DNA, 606 bp, Homo sapiens
atagaatcaagttatattggagaaaaacacagcttttatagacctctgagacaaaacactttagtatcaggccacaataacactcagaaccagaagagaaaatgtcacaggagctgatgaaaaggctaaaggacacagttatatgactctgagaagcaagargcttttaaaagaaatagaatatgaaatcgaaaagcaaaattttgggtaatttagcaaattaatactgtaagaaaatttggtttgacatggagactatttttagaaagtctattatatacaattttcttttaattacagctagcttaatcacacataaaattcctttcataaattcccctttatgaaccttatcacaacttacatataccatctaccacatgcttggacattttgacttgtcctatactacctctttcttaaataaccattcattttcctctaggacaagagtttactgtagaatatctttttatacaaaattactctttctttatatccttccttgcaaaaaaaaatacattttttatctagagatttctttctatctcttttttttccactcatggttgcttcataatttgaacctcaccttcaatgacttct

SEQ ID NO: 126420 - DNA, 606 bp, Homo sapiens
atagaatcaagttatattggagaaaaacacagcttttatagacctctgagacaaaacactttagtatcaggccacaataacactcagaaccagaagagaaaatgtcacaggagctgatgaaaaggctaaaggacacagttatatgactctgagaagcaagaggcttttaaaagaaatagaatatgaaatcgaaaagcaaaattttgggtaatttagcaaattaatactgtaagaaaatttggtttgacatggagactatttttagaaagtctattatatacaattttcttttaattacagctagcttaatcacacataaaattcctttcataaattcccctttatgaaccttatcacaacttacatataccatctaccacatgcttggacattttgacttgtcctatactamctctttcttaaataaccattcattttcctctaggacaagagtttactgtagaatatctttttatacaaaattactctttctttatatccttccttgcaaaaaaaaatacattttttatctagagatttctttctatctcttttttttccactcatggttgcttcataatttgaacctcaccttcaatgacttct

SEQ ID NO: 126421 - DNA, 614 bp, Homo sapiens
tgaagtgaatttactgaaagcatcattataaaaatagctaaggaagctattaataatttgggaattctgaaattttagatctacctactgaagaattacaccaaacttatatttaactcactgaccctaatattagtaaaatgcaaatcaggatacatatgatgtttcatgctcttgggytattttctgaatctcttcctgcaagtggcagacacaaaaaaatataaacagactttgaaggggtttctggtccctgtgtgatggccaagaattttacaactatttttagttggttcaggaatagttgttcatccaacgacttttgtaaaactcttcagtagactaggatcttggcctccaagaagtcacagttcagtgtaataaataaatatgccagcaaataaggttaatacaatatggtagagggctgcaaacaaggtatgtacacaaaactctagatgctcatggaagggagtgataggctctttctaggggagatggggaaacattctcacaaaagacagtctttagattcctaaatgaagaacaggagtgaccaagtataagagaggggcatggaaggccaagggaaaagcaaatgaaaaggcacaaag

SEQ ID NO: 126422 - DNA, 526 bp, Homo sapiens
aattccaaaaaaatgttcaagtgaaacacaggaggtcaggaaacagaaaacaaaaatgaaaaacagtgggagaatcagaaataaaataaagtggcaaatgtaatgcctaataagccaataataattttaaatgtaaatggtgtacatacaccaattaaaagacccagacattggcaaagtagatttaaaaatatcacccaagtatatyttgtccataagaaatttacttcaaatataacaaagtacgtaagttgaaagtaaaggatggaaaaaggtatcttatgcaaatatttatcaaagaaaatcagagtgaagaaaattaccagtgacagagagcaacattgtataacaatgaaaaagtcaatctactaaaaagacatagtaatcctaaatgcataggcagcaaacaatagagctgcaatatgtaaagtaaaagtttatagaactgaaaggagaactaggcaaatccacaattttcactggacattaacacctctctcaataatttataaaacaactaggcaga

SEQ ID NO: 126423 - DNA, 526 bp, Homo sapiens
aattccaaaaaaatgttcaagtgaaacacaggaggtcaggaaacagaaaacaaaaatgaaaaacagtgggagaatcagaaataaaataaagtggcaaatgtaatgcctaataagccaataataattttaaatgtaaatggtgtacatacaccaattaaaagacccagacattggcaaagtagatttaaaaatatcacccaagtatattttgtccataagaaatttacttcaaatataacaaagtacgtaagttgaaagtaaaggatggaaaaaggtatcttatgcaaatattwatcaaagaaaatcagagtgaagaaaattaccagtgacagagagcaacattgtataacaatgaaaaagtcaatctactaaaaagacatagtaatcctaaatgcataggcagcaaacaatagagctgcaatatgtaaagtaaaagtttatagaactgaaaggagaactaggcaaatccacaattttcactggacattaacacctctctcaataatttataaaacaactaggcaga

SEQ ID NO: 126424 - DNA, 572 bp, Homo sapiens
aacagtgggatggataggagtcctctgaccatccaggtaggaggtgatgtccccatcaggtggatacggcattattccatttcttcttccattcaacaaaggactctaagaatgacaagggtctcatttctgtggaaagaaatgacaagatccaaatagggaatcagggcccagtcaagcagtctggctcacggcaggctctagaccagtgctgagcaacacaaatacaatgtgagccacaagtgcaattaaataaagagaagcagatgaaattcattttaattatayattttatttaacccagtatttccaaaatgcaagtattttgtcattatggttaatatgaaaacatttttttcatgagctatcttacattcttttttcctaagtctttaaattcccgtatgtattttatacttttagcccatctcaacaactcagactagctatatttcaagtgttcaacagccatgcatggctagcagctcctgtatttgacaacacagctccagatataaaaagaagtaggggagagggatcctaagccctgggacaatctgcagcgggggtag

SEQ ID NO: 126425 - DNA, 601 bp, Homo sapiens
agcatggctgaatgaggtgggtaccgtttatgcccccacctttggttggatgcagctaaagtggctctgagcacccgttagctstggggtttggaggaggtctggagactccaggtagtagggatggggagaaaaactctgtggagggaagaatctggtggcaatgggagtgggagaggactggcttcctgctgctcccagaacgattctcacctgccaatcgatggctgcagactcacgcaagtgctaatcagctccattgacacacacaggctggggctacaatccattttcacatggaatggcagatcgattcctcgttctctgcagtccccaaccagcctcatcagaccatctgtccttgagggactgagaaactggttaactctctgcacctctggccacctgtgagttttgcccttctctatattctcctccagatacaatctcactccccaaaccattgccaggcagagcagtacagcggaactctgggctgggagtccaacaggcctgggttccactcttagatcagcagctaattgtgtgactttggaccagtcacttcacctcttctaacctcaattttctcagctgtgca

SEQ ID NO: 126426 - DNA, 601 bp, Homo sapiens
agcatggctgaatgaggtgggtaccgtttatgcccccacctttggttggatgcagctaaagtggctctgagcacccgttagctgtggggtttggaggaggtctggagactccaggtagtagggatggggagaaaamctctgtggagggaagaatctggtggcaatgggagtgggagaggactggcttcctgctgctcccagaacgattctcacctgccaatcgatggctgcagactcacgcaagtgctaatcagctccattgacacacacaggctggggctacaatccattttcacatggaatggcagatcgattcctcgttctctgcagtccccaaccagcctcatcagaccatctgtccttgagggactgagaaactggttaactctctgcacctctggccacctgtgagttttgcccttctctatattctcctccagatacaatctcactccccaaaccattgccaggcagagcagtacagcggaactctgggctgggagtccaacaggcctgggttccactcttagatcagcagctaattgtgtgactttggaccagtcacttcacctcttctaacctcaattttctcagctgtgca

SEQ ID NO: 126427 - DNA, 601 bp, Homo sapiens
agcatggctgaatgaggtgggtaccgtttatgcccccacctttggttggatgcagctaaagtggctctgagcacccgttagctgtggggtttggaggaggtctggagactccaggtagtagggatggggagaaaaactctgtggagggaagaatctggtggcaatgggagtgggagaggactggcttcctgctgctcccagaacgattctcacctgccaatcgatggctgcagactcacgcaagtgctaatcagctccattgacacacacaggctggggctacaatccattttcacatggaatggcagatcgattcctcgttctctgcagtccccaaccagcctcatcagaccatctgtccttgagggactgagaaactggttaactctctgcacctctggccacctgtgagttttgcccttctctatattctcctccagatacaatctcactccccaaaccattgccaggcagagcagtacagcggaactcygggctgggagtccaacaggcctgggttccactcttagatcagcagctaattgtgtgactttggaccagtcacttcacctcttctaacctcaattttctcagctgtgca

SEQ ID NO: 126428 - DNA, 576 bp, Homo sapiens
ttggtttgctactcttccatctggcttgacctccctctggcccagtttcttcagtgatggacttccttctgatacagacctgggacctcccatactgatagatggctctcatagacagttcttacctggcattgcttggccctttgaataactattggatggctctggggcttgaacatctttgaaggtggtgaataatactactaataacatttattgaataccaactgtatacctacaggaactaggcttagcactttggtttatctcatttcatccttacaaccactctgtaaggtaagaactaacatgatcatctcccattttayatcaaatgaaactgagactcaaaaatgttgactggccaggtttggtggctcacgcctgtaatcccagcactttgggaggctgaggcaggaggatggcttgagcccaggagttccagaccagccggagcaacatagtgagaccctgtctctacaaagaatacaaaaattagccatgtgtagtggcgcacacctgtggttccagctacttgggagactgaggtgggaggatcccttgggcccaggagct

SEQ ID NO: 126429 - DNA, 530 bp, Homo sapiens
accaagagatgttccagcggatcacctgagtgccagacagattcccttctgccctcattatgcagcagcagtcctatctcctcatgatgattagggttaattacccctgccaaattgctcatgcacttttacctctgccctctggatttgcttgagcttgatccaagatatatcacttccattttatgatggattacagctgggcccacttgacatttataacttggtgggtttgtcagaatccaactcaatatggaaagatgaagctacrcggccttttaatgtgctatggtcagacactcagtttctacaggatgatatgtctttgaagtttgaggtacaattcttccattgtaaactaacagaactttcattcggcattttcctctaccaaagatacttctagtaacatgtgatcagctgagtcaaatggcccaagcggcagggctatttatattgcagtctgctgctgctgcacagccctttcttgctctgggcacactcaaagctggcagtcttccacatgtcaa

SEQ ID NO: 126430 - DNA, 603 bp, Homo sapiens
ttagttcaagtgtcaatcaacatgtttttatcctgtttttgtctttgagtcatatactgaatcatctatcagggcagcaactgtgtagatgcagatgactctagaaaacggacatcaagcaactgtgagaaaatgactggaaatataagaagaatctgaaaggcactctggacacatggcgcaagatttttcaggcctaagaaaacatgtttaaacaactccttgagtctaccttagatagctaggctgtgttttcttttagcttatatgtaaattgttcccttttacctgggctgttaatctaggtacaatatgaaatcagagactagattttgtgcctctatgatgtaatctctgagcctcttygtgaatttgtttttctattctataagagattcttgcttaaggaatttagatatagcagcctgttagctgaggatctgctaaagcatttccttttgcttctagtatctcctttactctaggtctctacctttaccaacagtaatttctttgggtagcatcaagacattaaacatatcagctcccagttcatatatatactctctgatttttagcaatctgacatgcctagagagggac

SEQ ID NO: 126431 - DNA, 603 bp, Homo sapiens
ttagttcaagtgtcaatcaacatgtttttatcctgtttttgtctttgagtcatatactgaatcatctatcagggcagcaactgtgtagatgcagatgactctagaaaacggacatcaagcaactgtgagaaaatgactggaaatataagaagaatctgaaaggcactctggacacatggcgcaagatttttcaggcctaagaaaacatgtttaaacaactccttgagtctaccttagatagctaggctgtgttttcttttagcttatatgtaaattgttcccttttacctgggctgttaatctaggtacaatatgaaatcagagactagattttgtgcctctatgatgtaatctctgagcctcttcgtgaatttgtttttctattctataagagattcttgcttaaggaatttagatatagcagcctgttagctgaggatctgctaaagcatttccttttgcttctagtatctcctttactctaggtctctacctttaccaacagtaatttctttgggtagcatcaagacattaaacatatcagctcccagttcatatatwtactctctgatttttagcaatctgacatgcctagagagggac

SEQ ID NO: 126432 - DNA, 573 bp, Homo sapiens
taacttcacaagaagtttcttttatggattcttattagatttaaaacatcacattgagctaaaactcataaattcgtctgaataagaatgtattaatgctgccctcaaaagacttccagttaaacagtccagtaattagactggagggaagattgagagagaaagtcctggccatttaaaggtgaactctgcaagcatgaatcaaaatcctgtgtacatggaacaaccaggtaggaaattcgatggtgctaagctccattgrctgagttggatacaaaggtccaagcttctaaagagtgttgttttggtgtcagcatggtaccatgtagaggatctaggaccagcaaggcatgtacattttccatttgggcagatattacttaatttgaacatggcaaatctaggcttgggagtgtatgaaaacaaacagaaatatggaaagcttattaaaaccttcctccttactacccatctatttttggggggacctaatctggtaaataaaaataatattgtctgattacacctaggaatatctacgtgggaaactggtgtatgaaggaaataaaatta

SEQ ID NO: 126433 - DNA, 573 bp, Homo sapiens
taacttcacaagaagtttcttttatggattcttattagatttaaaacatcacattgagctaaaactcataaattcgtctgaataagaatgtattaatgctgccctcaaaagacttccagttaaacagtccagtaattagactggagggaagattgagagagaaagtcctggccatttaaaggtgaactctgcaagcatgaatcaaaatcctgtgtacatggaacaaccaggtaggaaattcgatggtgctaagctccattggctragttggatacaaaggtccaagcttctaaagagtgttgttttggtgtcagcatggtaccatgtagaggatctaggaccagcaaggcatgtacattttccatttgggcagatattacttaatttgaacatggcaaatctaggcttgggagtgtatgaaaacaaacagaaatatggaaagcttattaaaaccttcctccttactacccatctatttttggggggacctaatctggtaaataaaaataatattgtctgattacacctaggaatatctacgtgggaaactggtgtatgaaggaaataaaatta

SEQ ID NO: 126434 - DNA, 628 bp, Homo sapiens
aaatttagttaatataagataaatgggttggactggcaaaaatcatcaatatctcatggatgcatgctttgctattgaaaacaggataaacttggtcttagagaaggtcaggagctattttgcttctttcccactgactgattctagcccagacacccaaggtacaaagcaactagaaatcgggacacccagaacttcactacagggatgttctattttgagaccatttgcctcccacttctccagcctgcactccacgtctctctttcaccatataacaagcakaacctactgagatggaaaatgatcacaggtaaagtgctgcatgagatgatgaagtcaggaagggtctaggagtcatacagattgatgattgcagtttctcccttgctcaatggaaaatgtcaaagagctaagtatcagaagaaggagaaaattatagctctggcaacaaaatgactttataagagaatatgcatctcttaaggttaaagggaaaaacctacaaagaaccatggggtttgtgggaaaaatatgagagcacaaagtaagtgaaacaacatccaaaaatggtcacagaaatcatatgcccttgaacaacagaggtatcatttaatcagctggcatt

SEQ ID NO: 126435 - DNA, 589 bp, Homo sapiens
tagcgattgggtcatatcttaggaatattaacctttactctaatcttccttctgatcttccctgttttgtctcatctatgcaaaacaaacatcacagactctctcttgaacttttccagaaggctttctttctcaggccatcacaaccatactcttctgctgcaagcgtgctatcctatctgtggattttgcccaaaataggattttattcatctcatcacctcagtggcatcatctcattttgaagcaatttaaaatgttttctcyatctacactagttggattttctttgctctgttacccacttccagtaattgcattcctcaaagaaaagacaacctgacagcatagaaaaatgctaggaattaaaacttcatcatcactggagtccttctatctcttcatgttactgagtagagagagaagatatctcaaaataaatgcctgatactaaataactgcactggtagcttcactgccaccctggaagatatgaaagagatagaatgcctctatgagttttctatgccacacctggtggctgcctgcctcaccagtgggaagtggaaaatgaaatcttggcaaggga

SEQ ID NO: 126436 - DNA, 589 bp, Homo sapiens
tagcgattgggtcatatcttaggaatattaacctttactctaatcttccttctgatcttccctgttttgtctcatctatgcaaaacaaacatcacagactctctcttgaacttttccagaaggctttctttctcaggccatcacaaccatactcttctgctgcaagcgtgctatcctatctgtggattttgcccaaaataggattttattcatctcatcacctcagtggcatcatctcattttgaagcaatttaaaatgttttctccatctacactagttggattttctttgctctgttacccacttccagtaattgcattcctcaaagaaaagacaacctgacagcatagaaaaatgctaggaattaaaacttcatcatcactggagtccttctatctcttcmtgttactgagtagagagagaagatatctcaaaataaatgcctgatactaaataactgcactggtagcttcactgccaccctggaagatatgaaagagatagaatgcctctatgagttttctatgccacacctggtggctgcctgcctcaccagtgggaagtggaaaatgaaatcttggcaaggga

SEQ ID NO: 126437 - DNA, 621 bp, Homo sapiens
attgttttctgcttgctttaaagaagattcagttggaataaggtaagtgcacatacacacatacgttctacagtgagtacaggttttggagacaggttgcttagattcagctcccatttctgtccatacctactagctagaccaccttggataacttgtttttctgtctatagaagaaaataatagtaataatatctacttcatagtaatgctatgggtggaaaacaatgctaaatgtgaaatgcttatcattattactcattataattgccgtttactgacaaccgtttcatactgtctgaccttccaaagaggttatcatcctgattttcttgggatgttaaactcattctcatttgatgtgggagtaaatcaagtaaaatttgaccttcatcttcatttttcagaaagtaagtggaaaagataggtamatttatatgctgatacatttcacgtaaaaatgtaaatctataatatgggccagtatattggcagagattcaagaaagatttcaagagaatcttctaaaggtagcacaaattcattctcaaaattagaatttagagcagaattcatgaaatggtcttccattgtacaactcttaagatttattttctattt

SEQ ID NO: 126438 - DNA, 633 bp, Homo sapiens
tttaaataattatttacattattattttggttatcgaaatgggccccatcattgcttcatagtccggtagaattaatccctaaattgtaatctttcatttttcttctctcatctttaaacaaggaacaagccataatgtatgcatgataaatcagagacttttatatgatgcagtttgatttctgttttccactgtggcttgtaaaatgctttcatagagtgttagaggtcaaagggacaatagaaaaagttagttcagcaattcactccttctgccctccagacacacaagactccaattagatggtaatgggggtccgtgagctgttttcatatagtcctgagttcaaattctacctgaacccttatgagttgtgtgaccttggacaagaatattaacccctctgagtctaagtttccttatttgtaaaattagaattataatattatcctacagggttgtactgaagattagataytatataaataaaaggccaactacactggcaccaagtagacagtaaataaaggtaagatattattttgaaaagcctgagagaagctatatttattttcaataaagttgtaaagaataatcaaaatgggaaattttttcccaccttaggttggagg

SEQ ID NO: 126439 - DNA, 602 bp, Homo sapiens
tttgtttgaaatggggagtctaagtatatctgccaaaccaagacaggtaggaagtagcagtggatcattggtgatatctatgcaaagtttcccagtcctgcaagacaggactcagaacttccttctccagttctctgatccagggtaaaatgtcacagtctcattgggcctctgtccatgttacccaaagtaggaagagagagccttcaggtgaacaaaggcaaagggacaaaccaacaaggcagtgtaaagacacaaagggygcttgcctcactcagtgggcccccttcactgtgaaaggatagcactgaatttctgaatgacatctgcatcagatggaatcctgtcctgtggccttgctgtgctacggtaaactcaatgcagaggtacaagagttttcttaaaggtaaacgagtcaacccagcctgaaggagagtctgaatttcagtagatgggaaagttgtaggtcagtcttgagaagcagtagccaaaaaagggcttttcacaggaagtcatcaagaggttgaaagtgagcaaagtcaacatgaatgaggttgcagagtacaagtaatatagggcaagagatcgaggtatgtgggaag

SEQ ID NO: 126440 - DNA, 602 bp, Homo sapiens
tttgtttgaaatggggagtctaagtatatctgccaaaccaagacaggtaggaagtagcagtggatcattggtgatatctatgcaaagtttcccagtcctgcaagacaggactcagaacttccttctccagttctctgatccagggtaaaatgtcacagtctcattgggcctctgtccatgttacccaaagtaggaagagagagccttcaggtgaacaaaggcaaagggacaaaccaacaaggcagtgtaaagacacaaagggcgcttgcctcactcagtgggcccccttcactgtgaaaggatagcactgaatttctgaatgacatctgcatcagatggaatcctgtcctgtggccttgctgtgctacggtaaactcaatgcagaggtacaagagttttcttaaaggtaaacgagtcaacccagcctgaaggagagtctgaatttcagtagatgggaaagttgtaggtcagtcttgagaagcagtagccaaaaaagggcttttcacaggaagtcatcaagaggttgaaagtgagcaaagtcaacrtgaatgaggttgcagagtacaagtaatatagggcaagagatcgaggtatgtgggaag

SEQ ID NO: 126441 - DNA, 620 bp, Homo sapiens
taaaataaaataaaaattaacccaatatatcaaaaaaatctaatcaattatcataggcatctggaagcacatcttcctactaagggcattttctctcaagtatttcgccttggaaagaaatgctccttctaagacaaaatgtaaagagaatgccaatttgtaaacatttggagttggaaagaaaagaatacattatggattactgatatcatcrgtaaatattgactttttagaacactctgaagaaaatggtaatgattagaccattccatagagaagtaaatgtaaaactgtaaaatgtttataggtaacacaaagtaggtagaactattaatatttcaccaagaagaatcatcagtttgattattcttcttgagcaaaacagaatcactgctgggtgtagtggctcatgcctgtaatcccaacactttgagaggctgaggtgggtggatcacttgaggtcaggagttcgagactagcctggccagcatggtgaaaccccatctctacaaaaaaatacaaaaattaactgggcatggtggtgggtgcctgtaatcccagctacccaagagactgaggcaggagaattgcttgaacctgtgaggtggaggttgcagtga

SEQ ID NO: 126442 - DNA, 551 bp, Homo sapiens
aaaatgtccattgagaagctgaatttagacttcttattgttactaggtcactcaaccaaataagcctgggtcactcaacaaattaagcttagctgttttggggcaactgcaacaaaaaacattttcaaggttgttttgtaaactcattaatgttaatcatgtagcaatacatagctactatttattgaaggaagcatctactatatggggtagatgcttttcatgaattatgtaattaagttctcaagaatttgttcaactaagatttgttgatcatctactatatgctgggctatcaaataaaaaccagtatgttatacctatcaatatataaaactatataactatatctttgtctcacttatgactgtacagaaagaaatttcctaaaaagactgggtggctggtaagtagaaagcattggtctggtatctgatgcagtaagcacttaaaatgtaagtcattattattattgttgttacctgttwtgagagtatacacactgctattgactccacagaactttctggaaacattctgggtgaatgttt

SEQ ID NO: 126443 - DNA, 600 bp, Homo sapiens
ggctataaaggttgtgaatatcctcacaaaattctaggtattgcttttttttgtatgtaatgtaactttagaagataatatgtaaaatgtggattattactatgtgtgagaaggycatttttcatgttgactagattattgtagaaatagtttatttaaaatattttttaaaagggaatctttgaaaagaccaaagttattttttaaaaataacttcatattattgcttttgatcttcttaacagttctctgaggtagaaaaattggatttcttttgctctgtttttgtacacttgatcttagccaaaaagccgagcagtgattaccctgttttatagatgttattcaggtagagtgatgtgtccaaggtcacatcaaggttagttacaaaacagagattagaatggaccttctgactcagtttactgcctagattaccaaacagtcttctacaatattttatcatagtcagtgataccattttgtttcattgtctattactacctaaagaagataaattacaacctaactctctagtatttcttcagactaatgtgaccagaaaacttactttggggaagtgggaggtgagagtgagca

SEQ ID NO: 126444 - DNA, 600 bp, Homo sapiens
ggctataaaggttgtgaatatcctcacaaaattctaggtattgcttttttttgtatgtaatgtaactttagaagataatatgtaaaatgtggattattactatgtgtgagaaggtcatttttcatgttgactagattattgtagaaatagtttatttaaaatattttttaaaagggaatctttgaaaagaccaaagttattttttaaaaataacttcatatyattgcttttgatcttcttaacagttctctgaggtagaaaaattggatttcttttgctctgtttttgtacacttgatcttagccaaaaagccgagcagtgattaccctgttttatagatgttattcaggtagagtgatgtgtccaaggtcacatcaaggttagttacaaaacagagattagaatggaccttctgactcagtttactgcctagattaccaaacagtcttctacaatattttatcatagtcagtgataccattttgtttcattgtctattactacctaaagaagataaattacaacctaactctctagtatttcttcagactaatgtgaccagaaaacttactttggggaagtgggaggtgagagtgagca

SEQ ID NO: 126445 - DNA, 561 bp, Homo sapiens
catttcattgagagtaacagccaatgccctttaaatgggctacttaactgaaggctaagaaaatgatacttattacttaatgacatttactctgagcccaagatttccctataattacctcagtttgtattcccatgccactgatgacayagctgatattattaataatcgaaccatatattgagcacattctgtgtaccaggcaatgagttaagtactttactttctttatccaatctctctataaatggggggcatgcgggactcactgaagttcagggctttctgccattgtagacatggaagttgtttacttacataggctaaaaaagaactggtgtgatgtatagcagaaagaacataagccttatgttcaaatcctagctctaccaacttgggactggaatgacctcagacaagtcatttaagcttctcaagcctgggcctcctcacctctaacatgaagttgggctgctataaggattaaatgaaataaggcataaaaaatggccacaatgtctggcacagtttctggtactccataaatgttctcttcctttt

SEQ ID NO: 126446 - DNA, 593 bp, Homo sapiens
agagagtggaggctgaaggccctgggcagcagaaagaggagagagaagcagacctatggaaaggaactgagcacaaacaacacaccactgagccacatctgcccagggactagcgccaccacacatcctctttctgaggtttcatttcttctgggtatttattaacacatgcccttactgtctggtctgacctgagaatcctttagtccttgcagctcaaagagctattttccttagctgtggatttatgtcttaagcaaactgttattactaaaatggggtaagagaacaagaactgcctcttctgagcactgccaatgtctccatgactctatgtatgtgtttcatggggtcttccttatcctacatcaggtgctctgggccaaactgcctggagccgtaactccaccacttactggcactgtggccccaggggagttacttaaacctctgttttctcattgatraagtggagaaaatagtacctactccaaagacttgttattaattttaaatgagtcaatatatgtaaagggcttagaacagtgattacacttacaaatattctacaaaggtttacagaaaaaaggaat

SEQ ID NO: 126447 - DNA, 615 bp, Homo sapiens
cagtgcacaatatttgccttccagaaaaggagattgcataaatgcataacttacatgttagtacatgtgactgtttccctgtcttatcctgaatgcatggaaartcatgagacttatttttttcttcctactggattccattataaaacctctatttgtataggttataaattctaaccaataattgagcttactatgttgaggctgtaggcagaggataagatttacatgtcagactttatgttctgctctttggattagggtaattttcaaaagttattgactgtaaaataataatcatgcactgaggaaatacaatattaaaataaattttgaagaagatggaattatagcaggggacctgtggaaatagaatctaagaacatattgtacatatgctgaattaatagagttgcattgtgtcgttcacatagcaaattcagtacagattgtttgttaatgtcaacagattatgccgtaaaatttgtaatttgtttggcaaatcttgacaatgctgagacatttattctagttaatacaaatggctaaggtctgtaattatgagttatttaagctaagaaatttggcaagttcattattcatcagtctctacct

SEQ ID NO: 126448 - DNA, 615 bp, Homo sapiens
cagtgcacaatatttgccttccagaaaaggagattgcataaatgcataacttacatgttagtacatgtgactgtttccctgtcttatcctgaatgcatggaaaatcatgagacttatttttttcttcctactggattccattataaaacctctatttgtataggttataaattctaaccaataattgagcttactatgttgaggctgtaggcagaggataagatttacatgtcagactttatgttctgctctttggattaggstaattttcaaaagttattgactgtaaaataataatcatgcactgaggaaatacaatattaaaataaattttgaagaagatggaattatagcaggggacctgtggaaatagaatctaagaacatattgtacatatgctgaattaatagagttgcattgtgtcgttcacatagcaaattcagtacagattgtttgttaatgtcaacagattatgccgtaaaatttgtaatttgtttggcaaatcttgacaatgctgagacatttattctagttaatacaaatggctaaggtctgtaattatgagttatttaagctaagaaatttggcaagttcattattcatcagtctctacct

SEQ ID NO: 126449 - DNA, 615 bp, Homo sapiens
cagtgcacaatatttgccttccagaaaaggagattgcataaatgcataacttacatgttagtacatgtgactgtttccctgtcttatcctgaatgcatggaaaatcatgagacttatttttttcttcctactggattccattataaaacctctatttgtataggttataaattctaaccaataattgagcttactatgttgaggctgtaggcagaggataagatttacatgtcagactttatgttctgctctttggattagggtaattttcaaaagttattgactgtaaaataataatcatgcactgaggaaatacaatattaaaataaattttgaagaagatggaattatagcaggggacctgtggaaatagaatctaagaacatattgtacatatgctgaattaatagagttgcattgtgtcgttcacatagcaaattcagtacagattgtttgttaatgtcaacagattatgccgtaaaatttgtaatttgtttggcraatcttgacaatgctgagacatttattctagttaatacaaatggctaaggtctgtaattatgagttatttaagctaagaaatttggcaagttcattattcatcagtctctacct

SEQ ID NO: 126450 - DNA, 594 bp, Homo sapiens
ttgacaggaaaaatgatccctgagttgtaagtactgcagtcaagtctcaccacttagtatggccaaagagttgtgtcctctctcctcccattccatgaagctaaggagggtggttgagtagtggttccagcagagatggggcaaggctttcagagaggattaaaaagggcggtttcaaacgactttgggtttgctctgcagggaaatccaatacttggcttcagcagacctgctctttccttccatttgcactctcctgacctgctgctcccggccacgcctcctgtttctgatgcccccacgcaacttcattttytcccagtgcaccttcacctttgggtgttttctggggagtctcgttagggcttttgattgggaggtcattacacccagtcacaatcagccatacttgggtaatatgcaaggagagaaacaaaccaaaacaaaacagaataaagccagtgttcaaggtgagaaaacagaggcaggctcacagacagaaatcatgtggctcaaacggagagtgagagacaggcagagaaaggccgaatgacacttgcaatcaatgttccctttgagcagatggtctgttcc

SEQ ID NO: 126451 - DNA, 551 bp, Homo sapiens
atgatcacatttagaattatttcaagtttcccgatacattaataattagagcctaaagacttgggcataagttttgctatctggttcactcctcaactaacctgtgcttttcctacatcaagggaaacacacaaacctccaagccatgtaggtttgctcctcttcagtttaaagataatattccttaacacagaagagaagacaaatggaaagttaagagctttgctttctcttaattttcttgtaatascatagcttgccactaaaagtgagctgtttcttccccgtttctcttgcttgccctgaactaagcttacagtgggctctgtcctttctgacactgacaccttcttgagagcagggctcctctttggcagctctctttggtcatgagcccctcctgccaccttcagcacatgttcatgtcaaaaagaaattgtcttcagagacagtccatgcagaaaaattcttggcattcgagagaaaactccaggtaccaaattggagcccagattgttagggatactgactaatagctttgtagttaacta

SEQ ID NO: 126452 - DNA, 556 bp, Homo sapiens
ccctctgagaactggaacaagacaaagatgcccactctcaccacttctcttcaacatagtactggaagtcctagccagagcaatcagacaagagaaagaaatcaagggcatccaaattagcaaagatgaagtcaaactgtcactgtttgttgatgatatgattatatacctagaaaaccctaaagactcctccaaaaagctcctggaactgataaaagaattcagcaaagtttccagatacaaaattaatgtacacaaatyagtagctctcctatacaccaacagtgaccaagctgagaatcaaattaagaactcaaccccttttatagtagctgcaaaaattaaaaattaaaaatcaaaaaataaaaccttaggaatatacctaaccgtggaggtaaaagacttctacaaggaaaactacaaaacactgctgaaataaatcatagaacacacaaacaaatggaaacatgttccatgctcgtacataggtagaatcaacacagtgaaaataaacatactgtcaaaagcaatctataagttcaatgcaattcccatc

SEQ ID NO: 126453 - DNA, 623 bp, Homo sapiens
gaacatttaaaagttcatccaattttcttcacagtgtaaagcacataatgtcctttgatgtgtggaagtcagagaatacaacatctatgagattttttctaaataataaaacaataaaacaaacttttaattcaacaaggatgagaattcttaaaaaatctgagaagtaggaaaacatgataaaattctatctttttatataattttttttcatgataaaagttctagtttagatttctaattttcgagatggagtcttgctctkttgctcaggctggagtgcagatgtaagatctcagctcactgcaatctccacctccctggttgaagcgatttgcccagtagctgggattacaggcactgaccaccccacctggctagtttttgtgtttttagtagagacagggtttcgccatgttagccaggctgtctcgtactcttgaccttaggtgatctgccttcctcggcctctccaagtgctgggattacaggcgtgagccaccattcccagcctagaaatttttataatctaaatattttactaagaccaagcacactgatgagaatcaagtcatcaaaagataataagtttaacagttgtaaattttaaaatgatgacataa

SEQ ID NO: 126454 - DNA, 466 bp, Homo sapiens
tgaactcaattccattttcctctaaactctaagatacttttcttttattgtgcaataaatgctatgatctacaggtgctgtgtgcagtaaagcatggataaaactggtggaaaatattttcatgaaggtgctagaaatggtgctggagaacagagcatacaagaaagtgtatgacctttgaattcccaggctgaagtcaagaagcatgtataactatgtttcactctaacactcatttttwaaaaagcacaaatgttgggattatgggctgaatctttcctactttgacctgcttcgccattgtgagaatataggaattttggagagcagcaaggttttctgcagggttatactttattgatagatacctctttctatatatgtgttagatatatgtatgtaatacatatcacaataaatatttcaaattccagagtaataaaatggaaatcatgaggaaaatgtt

SEQ ID NO: 126455 - DNA, 586 bp, Homo sapiens
gacaaaaataggttctttaatttctttaaaatttatgcttatgctagaaattgaaggatgttttgaaacatgagaatcttgtaaggacggaaagttacggcagttttcctcatcataagggtcacaatagacactcctataacaagagaaaagcatagcaagtttgtttaatcaaagatttatgtgacacaggggacttcagaaaatgaagaccyaaagatccagagaaaacttgtctgttttatgattcggtttgatgaagattggacaattgtgtagaaatgtgactggacaaagggtaggactaatagtgatagactaagtggggaagcccaacaaagcctgtctgtcgagattttccaggcctctctgggtggcattccttactcttaggtatggggtaggaccctctggaatgaggatctttaagggagaagggaaggagtgaactttctaagttttatggcttagtttgcaggagaggggttctagtttctatgacaaattttaatgaagaattctggtttctatgactcacttccggagaagaaggaggggcaggaaacaggaggacaggagaaggtgc

SEQ ID NO: 126456 - DNA, 614 bp, Homo sapiens
aaattccatatttttggtcataaaattggtaaaaacaaagaatgaagaatagatatacattcttcaaggactgcaaccctgcctttttggctgacaaatgtgtcctcagggtctaatgcagtaactaatgcataaataaatgtgcatttaatgggtgrgtctgcttctgttggatttgttttcttattatacacatgcaattattcagacttataattgttatatattctaaaccactagacaatgaacactttgatagtataaatgtttccttaatcaacagaacatgtttacttctttcttcgcatttttgctcacaatgtataaatattttaaatgaatatccccatcacactcccttctgcctggttaacacttagtcccttgccgtagaacaaattcttagtcctctgcaaataatttcaaaattaatctttttcctacagttctcatgttagttttgcaattgtgtcctatcattacttcttttgtatttaaaattctatatttatattttccttgtgattatgtgatttcttggtatacaaataaattattgttattcaaataccatgacttctgaaaattagtgttgtttgaaagtttctttggtt

SEQ ID NO: 126457 - DNA, 614 bp, Homo sapiens
aaattccatatttttggtcataaaattggtaaaaacaaagaatgaagaatagatatacattcttcaaggactgcaaccctgcctttttggctgacaaatgtgtcctcagggtctaatgcagtaactaatgcataaataaatgtgcatttaatgggtgggtctgcttctgttggatttgttttcttattatacacatgcaattattcagacttataattgttatatattctaaaccactagacaatgaacactttgatagtataaatgtttccttaatcaacagaacatgtttacttctttcttcgcatttttgctcacaatgtataaatattttaaatgaatatccccatcacactcccttctgcctggttaacacttagtcccttgccgtagaacaaattcttagtcctctgcaaataatttcaaaattaatctttttcctacagttctcatgttagttttgcaattgtgtcctatcattacttcttttgtatttaaaattctatatttatattttccttgtgattatgtgatttcttggtatacaaataaatwattgttattcaaataccatgacttctgaaaattagtgttgtttgaaagtttctttggtt

SEQ ID NO: 126458 - DNA, 600 bp, Homo sapiens
cctcctggcctgtatggttaccattgagaggcctattctcagagttcttggagttattttatatgttatttgcttcttttgctgcttttaaatttttctctttgtccttgacctttgagagtttgattactataagctttggggtcatcttacttggatcaaattgtttggtgttctttgaccttcttgtccctggatattttatcctcttcaaattttggaaagttttctcttattatttccttggataaaatttctatcccctgctcctgctcagcccctgccttagggttctttaaagggacagaactaataggatatatgtatatatgcaaaggagtttattaggataattgacacacatgaatcaaggtgaagtcccaagataggctgtctgcaagctgaggagcaaggaagccagtccagtcctaaagtctcaaaagttgggaagccaacaaagcagccktcagtctgtggccaaaggcctgagagcccctggcaaatcactggtgtgagtccaaaagctcaagaacttggagtctgatgtttgagggaaggaagcatccagcaatggagaaagatggaggctggaagactcag

SEQ ID NO: 126459 - DNA, 495 bp, Homo sapiens
gttacaatggtaaattttatgatatgtatactttaccacagttaaaaattwaaaaaaaaaaaaaacctgtaggggtcaggcctatctccctaaccttgtggcaggaagtagactagcatgcatgcttccctttggacagtttcccaaacgggttcatagttatgcttagttccttctacactattcaacaagcagccatgtcactacttcccttagaaagggaggaacagtggagaagaaatgtgtacccctccaacattttcctccttctgggattgcagtgtgtgataaagatgctcacaaattatttgacatccttcccaacaagcagtggggtcttcaaaccctcctcttaaatttggggaagctaagactgcttggacaatagaatactggagatatgacactgggccagttaggagcccagaacttaaaaaaaaacagcacttttcatttttcttaaaatacttatttttgaaacccaccagtcacgtt

SEQ ID NO: 126460 - DNA, 495 bp, Homo sapiens
gttacaatggtaaattttatgatatgtatactttaccacagttaaaaatttaaaaaaaaaaaaaacctgtaggggtcargcctatctccctaaccttgtggcaggaagtagactagcatgcatgcttccctttggacagtttcccaaacgggttcatagttatgcttagttccttctacactattcaacaagcagccatgtcactacttcccttagaaagggaggaacagtggagaagaaatgtgtacccctccaacattttcctccttctgggattgcagtgtgtgataaagatgctcacaaattatttgacatccttcccaacaagcagtggggtcttcaaaccctcctcttaaatttggggaagctaagactgcttggacaatagaatactggagatatgacactgggccagttaggagcccagaacttaaaaaaaaacagcacttttcatttttcttaaaatacttatttttgaaacccaccagtcacgtt

SEQ ID NO: 126461 - DNA, 431 bp, Homo sapiens
atagcatcaaatctcaaagaaataacggccaagagagtttttatttttcattgtaactgagaaagattataaaatattaattttcacctagccttgaagataatggctttgtgcatcaaaatgacttagatatccccaagggaaccaaatatcagaattccatcatatgtaggacagttctttcttttggcagccaaattttgcaactaacatccagcaaagatcaaagagcatttttggactcctgacatccttgtgaagtatttgtccatttttctgtgcattacagtaatcttggagtgytatgtcttgttccaacgaactgcagggtaacgaatgtgccagagatgttctttggcagaatggagaagactgaattatccaagtaaatctgaccagcacaaggacctgttgtaacattgtttatgctc

SEQ ID NO: 126462 - DNA, 429 bp, Homo sapiens
  misc_feature (1)...(429): n = A,T,C or G
cactaaaattaagtcactcaaaccgaaaccaactatactnnnnnnnnnnnnnnnnnnnnnnnnnnnnnnnnnnnnnnnnnnnnnnnnnnnnnnnnnnnnnnnnnnnnnnnnnnnnnnnnnnnnnnnnnnnnnnnnnnnnctaattcccaaccttcrtgcaaggcctaattcaaagggcatctcttccataaagggttccttgacctcttcagctggttatagtctttccctcatcagaagacccaaaacagtctatgtgtacctctcatgacacttggtttatgttttttttttttcagacactggttttgtgggagcaggatttatatctgattcttccttgcatactctatggcaccttgaacactgctttgctcaaagtactaaaaaactgtttaagatttgttatctgaactttggacacagaag

SEQ ID NO: 126463 - DNA, 335 bp, Homo sapiens
  misc_feature (1)...(335): n = A,T,C or G
aaaataataganagctaatctctctaaaagagaaaagctagaagtattaacttccctcttctttccaattcatktactgcctttgtatacatgtctaaaatttggactcttccaagcctactggaaacaagaaaaaaataaaaataaatgaaacttggatcttactaagctttcaaactatccatgtatttaccaaacaaattgtcatctctggttttcaaatttacaaattcaagaaatattgtacagagactgtatttacttggagatattttttagcaaatactttataggtcttcatatccacaactcaaaggaaaacctctaagcattgg

SEQ ID NO: 126464 - DNA, 335 bp, Homo sapiens
  misc_feature (1)...(335): n = A,T,C or G
aaaataataganagctaatctctctaaaagagaaaagctagaagtattaacttccctcttctttccaattcatgyactgcctttgtatacatgtctaaaatttggactcttccaagcctactggaaacaagaaaaaaataaaaataaatgaaacttggatcttactaagctttcaaactatccatgtatttaccaaacaaattgtcatctctggttttcaaatttacaaattcaagaaatattgtacagagactgtatttacttggagatattttttagcaaatactttataggtcttcatatccacaactcaaaggaaaacctctaagcattgg

SEQ ID NO: 126465 - DNA, 335 bp, Homo sapiens
  misc_feature (1)...(335): n = A,T,C or G
aaaataataganagctaatctctctaaaagagaaaagctagaagtattaacttccctcttctttccaattcatgtactgcctttgtatacatgtctaaaatttggactcttccaagcctactggaaacaagaaaaaaataaaaataaatgaaacttggatcttactaagctttcaaactatccatgtatttaccaaacaaattgtcatctctggttttcaaatttacaaattcaagaaatattgtacagagactgtatttacttggagatattttttagcaaatactttmtaggtcttcatatccacaactcaaaggaaaacctctaagcattgg

SEQ ID NO: 126466 - DNA, 335 bp, Homo sapiens
  misc_feature (1)...(335): n = A,T,C or G
aaaataataganagctaatctctctaaaagagaaaagctagaagtattaacttccctcttctttccaattcatgtactgcctttgtatacatgtctaaaatttggactcttccaagcctactggaaacaagaaaaaaataaaaataaatgaaacttggatcttactaagctttcaaactatccatgtatttaccaaacaaattgtcatctctggttttcaaatttacaaattcaagaaatattgtacagagactgtatttacttggagatattttttagcaaatactttataggtcttcatatccacractcaaaggaaaacctctaagcattgg

SEQ ID NO: 126467 - DNA, 593 bp, Homo sapiens
gctgacatctctccagctggaggggaggttatgttcggggctgcatgtctctggtcaggaggggtttggtgtgtttctggtcacagatgttatttgtggtttatggtcatgctgacttagccattaagctgatgccctttggatttaggcagtttttgatcaaygtaaattttaaaatgacggtgcttgtccaagacggcaatgctcctgctctgtcagatgtattaagtcagtcctatatacgtaaaaattagccatctgtctataaaacagttattcagagttactagtttggattatttttcttgccttttgaaactattttccggctagcatatatattccaataaatgatattggttatttgctaccagcttatgttcttttaattttgggtgcttatggctaccttatatttattgcttatttattcatttattatctgtatcctacaattagaatgtaaactatataaaagcaggtatcttgtctttcttgttgactgctgcatgttcaggcacctagaacagtgcctgactcatagcaggcactcaataaatgtttattgaataaactaatacatggaaatttcc

SEQ ID NO: 126468 - DNA, 590 bp, Homo sapiens
catttttatttacttttcccatagcaaccctatgacctaacactgttatctccatttcatcaatggagaaactcagactttaagaagatgaccctattttgtgcaatatatgaattataattgattcatttgaagtctaataaatgtattgataactgacaacttgaagcgaggtatagaaaatgccaagatattattatagcataagatactaggttatttttgcatgaaataatacaactatgtttttataatccttgtagccaagtttatctctagaaataaaatttataatggagatatcattatcagyatgattttgcatacaatctcttaaaacagatttcagagcaactaatgatctagtcagaaggcctgaattttaattcagacaaaaccagttactaattctatgaccttgaataaactatctattctccttaggcctctgtacatggaggagattgaatttaatggattccccaaggtctttctaatctctgattttctgcttacaaactattttacaaactataaggccttctgattaaaatgtattagacaataaacatactttttgtgaaacacat

SEQ ID NO: 126469 - DNA, 570 bp, Homo sapiens
taaatgacattccatgaaaggcagagagagaaggttcacgcctacttaagaaaccaaaacatgtttcccggggaaggtgactattcagacaagtctagtggctattagaacaggaaaggacttcacaagaaaacccagtgcagtcttctgtcttcaaaacaattggcaaacctgactccattttgcagacaaagaacatgaaactcaagaaggccatggaacttggacaaggtcaccttgctagtgacgtaatttcttctaattttcccaggttctttctcctgctcctcttcagtcaggaaaggaagtatattccaaatgtaccaaaaaggttaaaaaaaaacaaaaaacacaaaacccaaagtagaaatcctccagtacctaagatttattgagatcataagtaacccttactcagtaaaagaatctaccgctccattcagctgcrttcccatcagcaacaagaaattgttgcaatctaatgcatttatatgttttggttttcttaatttatttcaggcacctcatcttcctggaacaagtgttgttatttatgacacagcagaaaac

SEQ ID NO: 126470 - DNA, 602 bp, Homo sapiens
cattcaaagcgggatttatagccataggcaaatggatggaggctgggagccaaggggggaaaaacaagtttggttagagtggagtttatattggggattaagaggagatgaggtagtatggaaccagatcaytgtggctctctgaagccaggtggaaatgcttagacttgatctgagtggcattacacagaggagagagagagctgtagaaagcctgagtgttgtgagcatcagatggccatgctcttcttgcctgagggtttttaggggcaggaggctggaccagatgacctctggaagtttcttccaaccacagggctttgtggtagtcaaaagacagatagagagaaacaaaaacctgggaccttggcctggatttcactccctcataaatcttctccactgcctggcatcatctctcagtcctcagattaatcttctctggcttcctgcaggaacagaaggaactattgacctcatcctgttctccaggctgcaagtgagaaatggggttcttagactggaagaagcctcagtgtgggtagaggcagctggggcctgaggcatgagcccccagaggaaaacacaggaagcaggtggcc

SEQ ID NO: 126471 - DNA, 602 bp, Homo sapiens
cattcaaagcgggatttatagccataggcaaatggatggaggctgggagccaaggggggaaaaacaagtttggttagagtggagtttatattggggattaagaggagatgaggtagtatggaaccagatcattgtggctctctgaagccaggtggaaatgcttagacttgatctgagtggcattacacagaggagagagagagctgtagaaagcctgagtgttgtgagcatcagatggccatgctcttcttgcctgagggtttttagrggcaggaggctggaccagatgacctctggaagtttcttccaaccacagggctttgtggtagtcaaaagacagatagagagaaacaaaaacctgggaccttggcctggatttcactccctcataaatcttctccactgcctggcatcatctctcagtcctcagattaatcttctctggcttcctgcaggaacagaaggaactattgacctcatcctgttctccaggctgcaagtgagaaatggggttcttagactggaagaagcctcagtgtgggtagaggcagctggggcctgaggcatgagcccccagaggaaaacacaggaagcaggtggcc

SEQ ID NO: 126472 - DNA, 571 bp, Homo sapiens
tgtccctggaagtcaaatgcttaagcaaaccaagcaaagtgtttgctcactttaaatggagtgattcaaggacatgcaggaagacaaaggatgagtcatagaattttccagttggaggggtccttagcaatcacctagtcagagaaacaaatcctgacccacataaaagagataaataaaaataaagtattgttaatgtgagaaagccagggatgtgtatagrcagtgcgttgtgctctggcaggtggggtgctgggcttgaaagcaggaaaccaggagacatccaagagcagccacttctgagccttgtcgccctgggcaggacatttccaggtgtggatctcggggtttggatttctaaatgaggcatgtgtgtttgggacgtggtggggatgttgattatggctctcaggtctcttccaacttttggctttcttggagtaagtaaaggcagcacaaaccaagacatcgagaggctgagagaatttggactttaaaaagcagagaacccagaaatctagattttaatctctgacaccacctctctcccatcagaagttttcaaaacaaa

SEQ ID NO: 126473 - DNA, 571 bp, Homo sapiens
tgtccctggaagtcaaatgcttaagcaaaccaagcaaagtgtttgctcactttaaatggagtgattcaaggacatgcaggaagacaaaggatgagtcatagaattttccagttggaggggtccttagcaatcacctagtcagagaaacaaatcctgacccacataaaagagataaataaaaataaagtattgttaatgtgagaaagccagggatgtgtataggcagtgcgttgtgctctggcaggtggggtgctgggcttgaaagcaggaaaccaggagacatccaagagcagccacttctgagccttgtcgccctgggcaggacatttccaggtgtggayctcggggtttggatttctaaatgaggcatgtgtgtttgggacgtggtggggatgttgattatggctctcaggtctcttccaacttttggctttcttggagtaagtaaaggcagcacaaaccaagacatcgagaggctgagagaatttggactttaaaaagcagagaacccagaaatctagattttaatctctgacaccacctctctcccatcagaagttttcaaaacaaa

SEQ ID NO: 126474 - DNA, 567 bp, Homo sapiens
cccctcagtgaggatggaaggcaggatggtgcaacagaatgagggcttaggagtcaggcagggatgaatttaaagctcagccctgcaaattttcttgctgtgtcttaagcaagtaccttcacctctctgtctcaattttcctatctgaaaaatgggggttttaaaagttgataaatttgtcatgaggattaagtgatgcaattgatctccctcagtatgaggtcagggatgtgtttatttttgtccaccactatattcctagkgcctattatagtccctggtgcataatacagtctcataaatatttcctgaataaatgaaagaaggaatgatgaatttaaaatacaaaacagaggacttaggcatggtagatggtctttggaggtcttctttcctcctttatgtctgttttccttatttttctatctctcccttcattattcattcctctttgctcatttccttcctttttagtttgtgtaaaactcttcctaccacctgcaggaaccctgaggagatagagcctctggctgaggaccccagagtacacattcaggctgacctgag

SEQ ID NO: 126475 - DNA, 575 bp, Homo sapiens
tatgtcaaattcagggctaaaacctaaataactgcataaaattatcattctattatactttacttaaacgtgttctttgtgctgtactgtaagtgcacttctgatattgcactcttataaataacaacaaatatcttcaaacaaataactttgttttctttgtgataagttcctaaacatcaatcaaactggtgggttttccaggttagattccaggttaacttggacaaagtagaaattgaatcgacatgagcattaaacatctcccraaaacctcatcactactctcccgtcccactgcaaaagatgcagagaaagcaagcaagggatgcacatcagcctatgaatagaccactcaaacatgtttaaacaaaaaagaagtatagaatatttaacaggagcaaagagcaaagattacagagatttggagcccttgaataaatatgaaagatacatgtccccactccactcctggctgcatcaagcatgaaaaataatcagacagacacagaattcaaaagtcagaaaacttcctctttgtagtagcatgatatgacaggtaaggaagaaacata

SEQ ID NO: 126476 - DNA, 388 bp, Homo sapiens
tatgggttctaacagcttttggtggagttgttaagagttttctatatataaaatcatgtaatctgcaaacagagacaatttgacttcttcttttmccatttatttatttatcctgcctagttgctctggctaagacttccagtactatgttgaatagaagtggtgaaagtgattgtccttgttttattccaggtctcaaaggaaaagctctcagctttttctcattcagtaggatgttatctgtgagtctgtcatatatggcctttattgcattgggatacatactttctatacctcatttgttgagagttttttttttttatcatgaacagatgttgaattttgtcaatttttttcaccatctatggaaatgatcatagggtttttg

SEQ ID NO: 126477 - DNA, 477 bp, Homo sapiens
tggagttgttaagagttttctatatataaaatcatgtaatctgcaaacagagacaatttgacttcttcttttaccatttatttatttatcctgcctagttgctctggctaagacttccagtactatgttgaatagaagtggtgaaagtgattgtccttgttttattccaggtctcaaaggaaaagctytcagctttttctcattcagtaggatgttatctgtgagtctgtcatatatggcctttattgcattgggatacatactttctatacctcatttgttgagagttttttttttttatcatgaacagatgttgaattttgtcaatttttttcaccatctatggaaatgatcatagggtttttggccttctttctgttaatgtgatgtatcacattattgaattgcatatgttgaacaagtgttgcatcccttggatgaatcccacttgatcatagtgaatgatctttttgatat

SEQ ID NO: 126478 - DNA, 648 bp, Homo sapiens
ttgcctttctcctttatccacaaaaatttgattgccctggggattttgccatgctttgtcactcgactgaagatttgagggtgtcatggggagggatcacaggttttgccaactttatagactgcccagtggatatctaccagctcctttctcactccaacctgtggcttttcttgcagggagaactaccagtctgctttcctcagtctcagaaaattccaaggaatacaacattctccattttttcccttccacattaatcttcccaagagggttcygggctctttgaattcccagatgagttcaccgagggcagtgaaccagattcagactcaggatagagaagccctttctaacactgagaattatccagattgcctagaggtgctgagctccctgtcaaaaaaggtgtgccagcagagtgaggttgcagaggagccccaggtgtgcaggtgaagattctcaggtacttgtgggttggaaagtgtatgaagccaagcaacaggagagctgggtttatggccccagctgtcttagtaacactcactatgggtctgactaaattcctacctttgtctgtgcctcaccatgtcctacctgtgtctatgtcatcgtttgtttgcacaacagtctcctgcacagcagggg

SEQ ID NO: 126479 - DNA, 465 bp, Homo sapiens
ttttttttttttttgtgatggagtctagctatgtcccccaggctgcagtgcagtggcacaatctcagctcactgcaacctccgcctcccgggttcacgccattctcctgcctcggcctcccgagtagctgggactacaggygcctgccacaagcccggctacttttttgtattttcagtagagacagggtttcaccgtgttagccaggatggtctcgatctcctgaccttgggatctgcctgcctcggcctcccaaagtgctgggattacaggcatgagccaccgcacccggtcttaatctactttttttagattaatgtcttaatctactttgtcttcatctgctttctctccacagatttgcctatgctgaacatttcatacaaatagaatcatacaatatgtgggaatttgtgactggcttcttttacttagcatgttttcaactttcatccatgttatagc

SEQ ID NO: 126480 - DNA, 465 bp, Homo sapiens
ttttttttttttttgtgatggagtctagctatgtcccccaggctgcagtgcagtggcacaatctcagctcactgcaacctccgcctcccgggttcacgccattctcctgcctcggcctcccgagtagctgggactacaggtgcctgccacaagcccggctacttttttgtattttcagtagagacagggtttcaccgtgttagccaggatggtctcgatctcctgaccttgggatctgcctgcctcggcctcccaaagtgctgggattacaggcatgagccaccgcacccggtcttaatctactttttttagattaatgtcttaatctactttgtcktcatctgctttctctccacagatttgcctatgctgaacatttcatacaaatagaatcatacaatatgtgggaatttgtgactggcttcttttacttagcatgttttcaactttcatccatgttatagc

SEQ ID NO: 126481 - DNA, 520 bp, Homo sapiens
cacatacaagagggacaatataaacttggtcaatataaacttctcaaatttctaccccgcagtcactctgaggattcctaaaactttcttttatccatgttgtttaccaatccccaagccctcaagcctaactgtaataataacctcagtccttccaccccaggtgttgaggactgaagactcccttctccatttaagaaatgcaacagaacacgaaggtttggagaaaagccacccaggagcagacatggtggtatgaagctctgctggggaggacagcaggtggttccctccattggattagagtcctctgtccaaaaccaagtagctaggaggaacactcagaaatgcccacatacccatccacatgctagagaaggcactgttcccaaatgggtctctgtggtgctcccaaagtcattttattctgtagggactcatgtggygtgaacgttgcaaaaatcatgtttctttttgcttctagcagctgggaatggcaagcgggtcttagtcttgaatt

SEQ ID NO: 126482 - DNA, 564 bp, Homo sapiens
ctatttcctggtggtattttgagcacggagtgagagtacttggaaagtacttggtatagtgcccaacccatagacatatcgcgccataagtgataatggtttattactatcattaaatttcaggagcacagtactactttcaactgaggccagcaaggtcaccgtaacaactttttgccattcacgtggctataccctgctttcttttctctcctctaaagaagtccttgaattagctctgctggtaaatccactggtaaatccaaatttactctgctggtaaatccactggtaaattcactggtaaatccaaatcccagctttgtggctgcatatgatttctagatcttttcccactatggattttaaaacaactactactgggaagaagatgcatgctctggtctttggtgaaacctatagcttgaagaacatttagagattgtttcatatttcctgycatagctataaattgactttaggctcgtcattcaggagtccttagatattcacagtagggtctgtgtgaaggaaaggggaggatatccgtgctgtagatcaaaa

SEQ ID NO: 126483 - DNA, 564 bp, Homo sapiens
ctatttcctggtggtattttgagcacggagtgagagtacttggaaagtacttggtatagtgcccaacccatagacatatcgcgccataagtgataatggtttattactatcattaaatttcaggagcacagtactactttcaactgaggccagcaaggtcaccgtaacaactttttgccattcacgtggctataccctgctttcttttctctcctctaaagaagtccttgaattagctctgctggtaaatccactggtaaatccaaatttactctgctggtaaatccactggtaaattcactggtaaatccaaatcccagctttgtggctgcatatgatttctagatcttttcccactatggattttaaaacaactactactgggaagaagatgcatgctctggtctttggtgaaacctatagcttgaagaacatttagagattgtttcatatttcctgccatagctataaattgactttaggytcgtcattcaggagtccttagatattcacagtagggtctgtgtgaaggaaaggggaggatatccgtgctgtagatcaaaa

SEQ ID NO: 126484 - DNA, 537 bp, Homo sapiens
cgcgggaagtccactccctgccaaaatccaatatggttctcttctattgtacagactctggagcttccagaccaccttaatgaacactggaggtgaccaggtcatctgagctctttccaacctaccagattaccaaggttaccacagttttcactttttcctattggattttagtaattactgtcttattgctggtaccagacaaatcccaatggactactaaatgtcattgttgggtggtgcaagatgggggcttgatatgacctgctgaaaaaaaatccccaaacaagtcagaatttgtcaactagtcaaaagaatgattaacagtcattagaaaaatagcmcatctgggcaaaaatgatcaacccaagttcactcctattttttttaatgcagtaaaaaatagtattcattcaaccatctgacacaactatttgggtggctcacgcctataatcccaaaaccttgggaggccaaagcaggtggattgcttgagcccaggatttctagaccaacctgggcaacacggcaaaatcc

SEQ ID NO: 126485 - DNA, 581 bp, Homo sapiens
tgacactattagcttaattccgtcctgtttaggaaggcatatgaggcttgagagccttgctatgaacagtgggtgctcaataaatggatagtaaatgtgtgattgatgctgcagttgataactgccttgggtagatgagaaagttgacctttttttagcttcttcctgaaatgtaaaaaagcctagcaatatgcattctaatgaatcttcatgaggccactgataccttcacagggtcctgttcttctttctttccatgaaccccaaatggtggaaataatcccaaccaaagaagtgtcaaattatctaaaaagctgctcaaaacccaatcaccaatcattttgtgcaatgtataagaatgaaacaaaggrgaatccaaatgttaaaagatttcattgccctgaagaaaagaaatgacttcccaagcttctaatgaagcacaacatagaacacgtggaagaatctttctccagaagtctcaatattacagaaacagttcctgagtcactggatagtggttcaagagaagagtaacacaaacggtgttttttgtaattacatttttgaaggggtaatacatt

SEQ ID NO: 126486 - DNA, 581 bp, Homo sapiens
tgacactattagcttaattccgtcctgtttaggaaggcatatgaggcttgagagccttgctatgaacagtgggtgctcaataaatggatagtaaatgtgtgattgatgctgcagttgataactgccttgggtagatgagaaagttgacctttttttagcttcttcctgaaatgtaaaaaagcctagcaatatgcattctaatgaatcttcatgaggccactgataccttcacagggtcctgttcttctttctttccatgaaccccaaatggtggaaataatcccaaccaaagaagtgtcaaattatctaaaaagctgctcaaaacccaatcaccaatcattttgtgcaatgtataagaatgaaacaaaggagaatccaaatgttaaaagatttcattgccctgaagaaaagaaatgacttcccaagcttctaatgaagcacaacatagaacacgtggaagaatctttctccagaagtctcaatattacagaaacagttcctgagtcwctggatagtggttcaagagaagagtaacacaaacggtgttttttgtaattacatttttgaaggggtaatacatt

SEQ ID NO: 126487 - DNA, 579 bp, Homo sapiens
tttacagaatattctactcaagcaacgcagaatatgcattcttcttgtcagcacaagaaacattatccaatatgggccatacagtaggccacaaaacaagtcttaataaatttttaaaaatcaaaattatatcaagttcttctcagaccactgtggaatacaagtagaaatcaactccaagaggaamctcaaaactatacaaatacatggtaattaggcaatctgctcctgaatgatgttgggattaaaaataaaatcaagatggaaatttaaaaatgatttgaaatgcataaaaattgtgacagaagttatcaaaacctctgggatactgcaaaagcagtgctaagaggaaagttcagagtgcgaaaagcctacatcaaaaagtctgaaagatcacgaattggcaacttaatgtcacacctcaacgaactagagaaacaagaacaaatcaaacccaaagctagcagtataaaagaaataatgaagatcagagcagagctaaatgaaattgaaacaaaaaaattacaaaagaccaatgaaacaaaaacttggctttatgaaaagataaaattgatagaa

SEQ ID NO: 126488 - DNA, 579 bp, Homo sapiens
tttacagaatattctactcaagcaacgcagaatatgcattcttcttgtcagcacaagaaacattatccaatatgggccatacagtaggccacaaaacaagtcttaataaatttttaaaaatcaaaattatatcaagttcttctcagaccactgtggaatacaagtagaaatcaactccaagaggaaactcaaaactatacaaatacatggtaattaggcaatctgctcctgaatgatgttgggattaaaaataaaatcaagatggaaatttaaaaatgatttgaaatgcataaaaattgtgacagaagttatcaaaacctctgggatactgcaaaagcagtgctaagagsaaagttcagagtgcgaaaagcctacatcaaaaagtctgaaagatcacgaattggcaacttaatgtcacacctcaacgaactagagaaacaagaacaaatcaaacccaaagctagcagtataaaagaaataatgaagatcagagcagagctaaatgaaattgaaacaaaaaaattacaaaagaccaatgaaacaaaaacttggctttatgaaaagataaaattgatagaa

SEQ ID NO: 126489 - DNA, 626 bp, Homo sapiens
gattagcaaaacttagtaattcaaatgcagtgcaaagtcccagagatatgtcaatcacaaacatctttaagttgtattcaaaccttgaatgaagatttatctcttactaattttaataaaataatgaatctaatataattcagatagaaacaaccctcagtagcaaagtactctgccaactttcatttattcatcaaatatttattgcccactcattctgtggtaggcactgttctgggtacttrgaatatattcttggcaaaagaaagagtccagatcttatggaacaaactgcaaatgttttccagtgaataatgcattataatgtccctggaagaatgtggattccactggccttacatttttttgcaagaatgccatgcacggggtatacacatgtaatggcatgtctagggaacattacattagtgtgggccaacttgattccaaccagcaacactcctggtaacctgcatgttgtctttaggaagataaatcacctctaaggcacaaaatatattttccttctggggagtggaagtatcaaaggtctgtgccttccttggagataatcagaaagttaaactcttcagaaagttgggtaaaacgtgggtaaaaatgagaac

SEQ ID NO: 126490 - DNA, 626 bp, Homo sapiens
gattagcaaaacttagtaattcaaatgcagtgcaaagtcccagagatatgtcaatcacaaacatctttaagttgtattcaaaccttgaatgaagatttatctcttactaattttaataaaataatgaatctaatataattcagatagaaacaaccctcagtagcaaagtactctgccaactttcatttattcatcaaatatttattgcccactcattctgtggtaggcactgttctgggtacttagaatatattcttggcaaaagaaagagtccagatcttatggaacaaactgcaaatgttttccagtgaataatgcattataatgtccctggaagaatgtggattccactggccttacatttttttgcaagaatgccatgcacggggtatacacatgtaatggcatgtctagggaacattacattagtgtgggccaacttgrttccaaccagcaacactcctggtaacctgcatgttgtctttaggaagataaatcacctctaaggcacaaaatatattttccttctggggagtggaagtatcaaaggtctgtgccttccttggagataatcagaaagttaaactcttcagaaagttgggtaaaacgtgggtaaaaatgagaac

SEQ ID NO: 126491 - DNA, 481 bp, Homo sapiens
tttatggtgtaatttagtgagaaagacaagtacatttaaatagaacatagatataataatatagttactttttattctaatatttccagatgcttaaaatgtgctctgtaaaacaaaccgtcctaaataatcattaatagacatattggtgatatgttaaaagaactgcattccaaagttgtttccatcatgtttaagttgattgatgtttacatcaagcaagttgtagatgaccagaggtggttctaggttagaagaactctgtatttccttccaaacttgtacacagacatgttcacacattgatagccattcttcaagagttctagtctggctggyggtggtgaacactgcacagtcctccctgtgtagtggtagggtcctctcaggggatgtttaaatccttagaggagcaagaagcatacacatgggtgaacacagacagaagattaaataaaagactatggaatgaaatgcagaa

SEQ ID NO: 126492 - DNA, 464 bp, Homo sapiens
cttgtgaaattattatattttgagaaaggcagaagatgacattatacagtgctggcccaggaacgctgaatgactagagtagtaaggtagtctgataaatgataccaagatgtggttctgagctccgtgctgtatcaagcattcagtatataaacagagaagaaattcatgaggtttaattgagtttgattctagagtttgagagaaagccagcatttttgcactttagaaaatcttttattttcccggcctttatattrccttttaaggctaccaagggcaggaattttacacaggtctgaataattggccccctcatggatttcatctagcaaacacttgtagtgtggctttgatgccaactactgggccatatggtgaggtttatacaaaataaatacaagctatggtccctgctctccatatagcaggagttcccatttgcagcatacatctaagaattc

SEQ ID NO: 126493 - DNA, 529 bp, Homo sapiens
gttagctataaatacatgaaagttcacagatcatgtatttcttctgcttagggcaaaagtgtgatttctaaattgtactccatgcacgaagcctctgctattccagtgctctaagaggcttggcatatactttatgggccttctcataaaggtgaaaagtaagggtaaccttctttgccttctgtgtctaacttagctcacagtttgtctyctgaggcttcatcagcactaacctggtcattccagggcaacccactctcattctactgtgaaaatgacattgcttccactccacaatgactgggagtcagagctttcagatgaaaccacggcaaccaaaaggattaatttctgctgtgtctcaataacacaatcatgttatctctcaacagtctaaaagataactcacacacacctctactgtataataacataaagataaaataacaacctagaaaccaaatgtaaccttccaaaatacatagaaatgaagtgttttgatactgaacaattttaataatatatcgtg

SEQ ID NO: 126494 - DNA, 587 bp, Homo sapiens
accagaaataaaagtctaaaatccaaagacataagctcacaaacagttaagcaagtatsaaaaatattgcagaaacaacaggttatgaccttgaaacatctatgagagatagtacaaattgatctgaccagtagacccaggaaaaaatgtctaaagtaaattctgaagatgtttctattttactttcttagcaattttaaaactggttttatttataaatggttgataaagtcacatgaacttgaaaaacatttaggcttatttgtttatcagcactcatttatttataaaccaatttgatatcatgtagacaatatataaacagacatgtagacaagtaccataaaaaatggaaaggagcataaagactttatagctttaatttaaatttttaaatcttaagtcactagtttaaaagaacggttagatttagttgtgtccctgtaaatggaacaagataaatttatctgtcccacatgccaaaaccctcaccaagttttagagaaaacagtgtagcaaatttacatttcaaagcacagaaagagaatttaagctttttaaaggagtttgagcgtgttcgttagagg

SEQ ID NO: 126495 - DNA, 524 bp, Homo sapiens
gtatctctactcttctaaacrtcgcaactttctgccaggtttccacaaagcccctgccatagctggacagcctttaccacacccagtaggtccttcactgtgcactcatcacacctccaaccgtgcgtccatctgtccacttgactacgaactctttcttactcaccactatatcgctggtcttatgcagtggttggcaaagagaagacacccaaggaatgtttaatgaaggtgagaatgactgactttaataccagcacatgcaatttagtcataaatctacaatgttgttaaaaatgctgccagccctaaaagccgaacatttttcaaaacccagaaaaaactaggtttaaaacataagttgaagtatgacaaattaaactcattttgtattttaaactaaatagactcttttgccacccccatgtgccagcatatcagtgtaatttctttcaaactgatctctgtttttgaatagttcttcaaattattctttattaatatgctcattcaacttaaatctc

SEQ ID NO: 126496 - DNA, 580 bp, Homo sapiens
ggctcagaggttaataatgccccacaggtcrtgtagtaaattgtagaggcaggatccaaactgatatctttttgcctccaatgctcgtgttcttttctagtaactcatgccaccttcccatagacaaggttattttgttcccaagcttacttaacttcctctgcatgtcgtaaaatcctaaattcctaaattctccctgaccccaagtgaaagatccatttggatcaacatttttgttacagtgttgtttctactctgtgtgctctcttaagtcctggagcaatatgagattaattgttctaggtataataaactcatgcagtcaaatactatcacttcagctcacatatgtgaggcaacttgaccttgagttcgaattgaccaaggccactcaaacctatttgaactaaatgggtctggccaggtacccttcatactgacattagttttagatagtctaagggtaacacatgcttgaacaaacgtgattttattttaaattggaaataaaataacatctagtcagatgactgctgtttcaggctggaatgatgtctgacatcaatttctagcagctgga

SEQ ID NO: 126497 - DNA, 491 bp, Homo sapiens
agccagtagtgccacagtagatttatgctgcacaaaagctgtgagccttctgcatggggaacccccacaaaaagtgccaacaggagtctgtggacccttgccagcagggacggtaggattacttctaggtagttctagtttaaatttaaaagkagtgcaagtacatacaggagtcattaattcaggttacaatggggaaatacaaattgttatatctacttctgttctctggaaagcagagccaggagagcatatagcacagctcctggttgtgctgtatgtggaagtggggaaaagtgaaactaaatgtacaggaggattttgaagcacaaataaataaaccaaagcaggcttattgggtgaatcaaattactggtaaacatcctacctgtgaaataactattcagggcaaaaaatttaaaggattgttagatacacgatcagacatttcaatcatttctctacagcactggccgtctacatggccaatt

SEQ ID NO: 126498 - DNA, 426 bp, Homo sapiens
gaattcttcttattcccgagttggactttctctcaactactaatttcgtccattgctcctagagaatattgaaatgtctttgaaagcatctttatctatcacgatgctcaaaggaatgccagttcactggaaggagaagtaaaggaggagcccaacaggggattagtgtgcatttgttaacaaacaacctgttcttctatggagaagaggcccgtgatagatcaggtctttaagggtgagcctggcccaggccatgtcttctgtcagtaaatcctatggtgagtcataggatcatgggatwtgattatttctttttattaacacatatgatagagggttcagagaagaggaagaaaggattaaaaaaaaaactaactcctgaatagtaacctagaaactgtttgtctatttttggaatatgaccta

SEQ ID NO: 126499 - DNA, 627 bp, Homo sapiens
ttgggaaaaaaatgtaatccttcctgttgtttcagacaattattttcattgtctctggaatctgcctttatttactgatggtatataggaacagagattagtacctyttttcctcaggctttgatacatatcaattataatgcaaaaatgaggactaagttctttttttttttttttctcaaataactcaattctctgtcccaggctcatgattttgcatacttcttggttttaatcctgtcacagaagcttaacgtttctggttaggagatgtttctattgtcactgtcagcagatggggagtgtactggggataagtggggctccagctttttttcacctaaggaaagagttgcatcttcttagggtttctgaaagataagacactgatcaagtaaaatatcaatgaaagtctctgatttgagtaaacagagactgattagattatgagcaaacttcctagtgaggtttacatcttggtcaaatggagatgagcttaagatgtcttatagccccttttaatctgctcaagtattagaaatgaatgttgtttgccactttaagcaattgctaaatgtctagaatttccaaaatttaatgttcagggattttcagaggtaaaggaat

SEQ ID NO: 126500 - DNA, 459 bp, Homo sapiens
gaggaaaggctatagacttggagtcaagagtgtttatggaatatgtrtgtgtggagaggacttaggagggggatttctggtgaatgatacagaagtaaagatgaataggtaaagctatacgaaatttcaagtaaccctaaatgccttacccagaacaaacataagattgcatgtattcattccctgatgcatgccatctgaactttccaaggtggtctacattcagccttttatcaggtcttcacaataatcttctgatgtagggcttggcatcctcattttacagaagaggaaactgaagttcagggagaaccaatgatacttccaaagtcatgcaagttaaaactgacttgggctgggattagcactcagacctgtctgactttaaggtgactgctctgtatcactacaaaatggtttaaacctggggtttcccatatgagttccaaaaacgaattc

SEQ ID NO: 126501 - DNA, 563 bp, Homo sapiens
ctagttcttgtaattataacatacataatgcatgcatcgtggagcctggggtgcagctatagcaatacacatgttaaacattaatattagaagtggtgctagtactatagcccttcatttaattgaaggcagctaacttctactcccttagagtcttgtagttcctcatgataccattacaatcttccatgtcagactagcttctcatatctggacctactctgctctgttaataatatgcttaatgtaacactcatctstcaacacactcctaggtatggtctgagcaatgaagagtaaagctgtgctcttcttggttctagactttagtggtcaccttactgttaactcatattgatctctctgatgcccagataattgaatgaaaagttaggagagaaggaaaaatgtccagttgaatgtgtttataaaatctacattattggtgtggactgcaaaaaagtctgcttggaaacctacctctaattcaggtccaatgtctggagctttaaatccataggtgacagataaaggataaggaagaggaggaggatactcagaga

SEQ ID NO: 126502 - DNA, 259 bp, Homo sapiens
cccaaggaagagttgatattgcggctcaagtccaaaggtagcatattcctctaactcagagaggttagtctttcttccatcaaggtgttcacttgagtggatgaggctcatgcacagtatggagaatgttctgctttactccaaatttattgattcaatgtttatgtcatctaaaaaatatagataaaaaatcttcacagatatgtctagaataatgtttggccaaatacctggrtatcatggtttagtaaattggcgc

SEQ ID NO: 126503 - DNA, 582 bp, Homo sapiens
tcaaaacttcctttgtcaaaaggggcggtaaacctaaatcccacccaaaaatccttggtaggaagggaaggctgctaagaaggacaaagtgtagggaagcaaagatggggaccaaagaaacaaaggaagatcaatcctgggactacctgttcaatatttaagcagagcaacgacccattaaggcaactaatttaaagtcgctaatgtttctattttcttccaactaattgaataattcatgaccagttactaatgaaaattatatatatatatatatatatatatatatayacacacacacacacacacacacacacacacacacacacacacgcctgtgttccagggacagtgtcccacagtaaaagcacattgaaacattgaagcttatctatcaagaaggataaaggagccagaatttgcttctcctcccaactgtgggatgctgctgggaaatgtgtgagcaagatccaaagatccagggtctgattttgatggaggattttgtggcttcccatcttcccactggcacctgcctggatcacattttcccccagatattcccgttaccccctgcacagc

SEQ ID NO: 126504 - DNA, 582 bp, Homo sapiens
tcaaaacttcctttgtcaaaaggggcggtaaacctaaatcccacccaaaaatccttggtaggaagggaaggctgctaagaaggacaaagtgtagggaagcaaagatggggaccaaagaaacaaaggaagatcaatcctgggactacctgttcaatatttaagcagagcaacgacccattaaggcaactaatttaaagtcgctaatgtttctattttcttccaactaattgaataattcatgaccagttactaatgaaaattatatatatatatatatatatatatatatacacacacacacacacacacacacacacacacacacacacacaygcctgtgttccagggacagtgtcccacagtaaaagcacattgaaacattgaagcttatctatcaagaaggataaaggagccagaatttgcttctcctcccaactgtgggatgctgctgggaaatgtgtgagcaagatccaaagatccagggtctgattttgatggaggattttgtggcttcccatcttcccactggcacctgcctggatcacattttcccccagatattcccgttaccccctgcacagc

SEQ ID NO: 126505 - DNA, 724 bp, Homo sapiens
tgaggggctcttcttggagacatttgttaccaggcagcagccttgaccactcagacattcattattcatttgatagactgatcaatttgttcatttctccataataaagccctgtactaggtgttggcttttgaggagtaatgaagccacacaaagtctttaccttcaaggagtagccagtccagggtggaagacagactgcaaacttagccaagaagtggggtgcascagcccaaactcacatagctagtcccgaatgccctgctcacaaatgagacagatgcaaagtagacgttccaccaatgctgtgttgaagcgaggtgggctgagcggatggggcaggggccaccattgtgtctctggccaaaagggctgcatgtgaagtggcctagacgtctggtcatgagagagatcaaaacttcaaggacgggagaagagtcagggtggttggagcagaaagtccacgagaaagcgagtggaaagaggtggtcgacaggggcccaagggacggggctttgagggccaaagtgaggagggggactttaccccaaaggtgatggagagcctgtgaagggttttaatccaggggcagcacgttggatccatgtctgcaaaagatgctcttgctcacggagcaaggaaagacaatgggtgagagaggaagcaggaatcttggttagaaagcacctgccatcatccaggcccaagaggcaatttgggccct

SEQ ID NO: 126506 - DNA, 724 bp, Homo sapiens
tgaggggctcttcttggagacatttgttaccaggcagcagccttgaccactcagacattcattattcatttgatagactgatcaatttgttcatttctccataataaagccctgtactaggtgttggcttttgaggagtaatgaagccacacaaagtctttaccttcaaggagtagccagtccagggtggaagacagactgcaaacttagccaagaagtggggtgcagcagcccaaactcacatagctagtcccgaatgccctgctcacaaatgagacagatgcaaagtagacgttccaccaatgctgtgttgaagcgaggtgggctgagcggatggggcaggggccaccattgtgtctctggccaaaagggctgcatgtgaagtggcctagacgtctggtcatgagagagatcaaaacttcaaggacgggagaagagtcagggtggttggagcagaaagtccacgagaaagcgagtggaaagaggtggtcgacaggggcccaagggacggggctttgagggccaaagtgaggagggggactttaccccaaaggtgatggagagcctgtgaagggttttaatccaggggcagcacgttggatccatgtctgcaaaagatgctcttgctcacggrgcaaggaaagacaatgggtgagagaggaagcaggaatcttggttagaaagcacctgccatcatccaggcccaagaggcaatttgggccct

SEQ ID NO: 126507 - DNA, 496 bp, Homo sapiens
actcctccaaattcttccagcctctgcccattgcccagttccaaagctgcttcwatattttcaacaacccaactcattgcacaaattttctatcttaatctgttttctggtgcttataacagaatacttaaaacttaatatttatatgcttaaattcatttttaaaaatgtatcagttttttatagttttggaggttgagaagtcaaggggacacatctggtgagagacttcttgctgattggaactctctgtagagtcctgaggttgtttagggtatcatatggtaagggggctgagtatactagctcaggtctttcttttcctttctacaaagccaccagtcccactctattggtaacccattaatctattttccattaacctatgaatgtattaaatccattcatgagggcagaaccctcatgacccaatcacctcttaaaggccctacctctaaattttaccacattttaattaagtttcaacatgaatttc

SEQ ID NO: 126508 - DNA, 539 bp, Homo sapiens
gttagaacttcgctcctttcaattggcttctgagtctacaggaatttcttcccygtctattttactttagttatgttgttttcatctctcccatattctacagctaaacctgaagcctctctccctcactgttatctcatttctaatgcttctcccaggcatatcatcaatctggatttttcaatttctttacactaatggacattccacactaatttttcacttaggaataagtgctcaagtacacttaaacttgttggcagtccagtcttctcttggatagaagaaatagctgacaatttcataccccatactcctctcttgttccattatttccagaagagaagcaaaaagagcacattcaataacaattattttcttactttgaaaactttttccaagatgtatttaggaaaacttctgaagattaaagtgtgccatgttatcatagttaaatgtttgttaacctttgagatggaaagcatgtaattattggtataatccttactttttatttgagtttcttcttctctgccatg

SEQ ID NO: 126509 - DNA, 619 bp, Homo sapiens
atggcctttcattaattttatcacttaagctataaaaatggatatatatttatatataacctttacatattctttcaacttatcgttctcagcttcccttttatgaatttggatctgtagtcgttcatgtactacttttactgattgggaaaaacggtttgctttcaaagtatttgcctgtaacaaagagaaagagaaaaccaaaaaaatccatattatttgctgtatccccagcccaatatctttaattttaccctgatttaggcacaatctaaacagctgataaaaagcaaagcactactttacataaactgccgcccctattacaaatgtatttcatrcccaaccagggctaagttttatcccccaacattttttatttaatggctttcttttttaaaattcccatctatctttctaaataaaggtatgggtatacctaaaatgctcctacaaacactaaaattccttaatttgttccccaactgaaacacaatacaaatttaaaacagttcctatatgaagtgatttatgccaagtatcctgacaaacaccataaaaaccctaaaaaaacttaataaaattaagatgttatatttgataggtaaaacctgtaaaa

SEQ ID NO: 126510 - DNA, 591 bp, Homo sapiens
tcccttgtttagctttaatgatacttctttttagtccagtacatgatagagtttagtatgacatctatgtttgttcaaaatagaagttacattcttccaattttgcctgaaaagttttgtaagtagattgagcttactaataatttgtcaatatattgttaataattctgctacaacaagaaatgtaggaatatctatttcttttttctataattgcagaatgaccttctgtatatccatttttatttcatatattttaaaattgtattattagttaatatcagttatcaatttataccttctaaagtttggtcatttgaaaattttgaattattttactttcttgcttttgatgtacatgtgctcttacaatttattttgattagtatgtatttcccttctctttagctttagttggttggtttcctttgttgacatttcagattttkgtcaaaaaaatgctgactttcattttcaggaatatgttgcgttatattagattaatttgaagtacatgtattttaacgtgtgtagtgttaaggaaattgtgaaaggacagagaaaaatagcaactctgtattatgtaaggca

SEQ ID NO: 126511 - DNA, 497 bp, Homo sapiens
gagctaaccaaccccatgatttgattacctcccactggatccctcccatgacgtggggattatggcaactacaattcaagatgagatttgggtggagactcagctaaaccataccatccacytacattgaatgtgaaaggaagagaatttcctctctagggaaaacacaggcaaaaacttgttacttttgattgttgacctgagatattggggaaagggcagatcatatgtgtaaaaaagcaaaacaaaacaaaacaaaaccagaaaacagcagggccattttatggctccaagtcttctatggtccaaccttccaaatttggatctatggagatgacaatgaaagttattggagtgatgttttgtttttgtttttgtttttaaggtgtacttggtcctatgaagtgaggtctggcctttgcaaagacagttttcagtgacagaaaaacccttgtgtcaaaccatagataaagcaatgagtctagactaccatttta

SEQ ID NO: 126512 - DNA, 611 bp, Homo sapiens
gaatacatgaaatgtatgcattgatttggtccagaaaggtgggacaactcaaagtgggggcttagaggtcacaggtagatttaaagatttttgataggcaatttattgaaaaaatttaaattaagtattatctggaatcaagagataggagtatctgggtatctgggttgaaataagggattgtggagaccaagattctgatcttgtagaatagatggtaagtgtctcttactagtctttaaaaggtgccagcctcttagttaaatctctcctggatcaggcaaatacctggaaaagggagagcactctctacagaatgattttccccacaagagacagttttgcagggccatttaaaaatatgtcaagggaatatatttcragagaaactaatctctttcaggacctgccatctgtcatgtgatggtaaactagagtcaggttgaaattcgtcatcttactgctacagagtctgttttgtcagtcttaagatctctgttttaatgttaatgctgatcaattatgcctgaattttaaagggatgtgggtataatgaggcatgttcaaccccatcttcccactgtggtctgaactagtttttcagatttact

SEQ ID NO: 126513 - DNA, 587 bp, Homo sapiens
ccattatctgtacctctaattcttctgttgtacatattttattatgtttcacatttttccagtttatcacaatatatcactagtttttttgtttgtttgttttcaattctttctttacagattgtccaaggtaagtttctttctcttacttcttgctaataactatttagaaattagttttggattctcaaatctctcctctaattgccacgtgttctagctaaaatatagttcaatgtatcaaatttgttcaaaatgctacatgcaagtttcccctgaaaaawttaaaaataataaactagataatttgtcacttgaaaaatggggtgggaggaatttgaagtgagagctcttctcatgtactgatattgctagatggcacggttgtcattttttgggaggatagtgggagactctgtaaaattacttaaatagacacactttatttttaaatcaatttccaagaatttatcttgggtagaaaatcacagacatacacacaaagtttcaatgaaaatgttcagacattttaaatttcactgatttgggaattttaacacctcaatgtacatcaacaggggatttat

SEQ ID NO: 126514 - DNA, 610 bp, Homo sapiens
tcaacacctggactttgttccctgcctttatccaagtaagatgaacactagagatgatttatgcatctgcaatatattgggggatacagaggtgtaagatgtagtgtttattaaagatactcaataaatgttctttaactatatgattgcaccaaaatataaatgcagaaaagaataatgctagaattaatgaggcagcatctcctaagagcctagaggcattgaaggattgaagaacaaattgaattaatttacaggaaattaagtgacatttctttatacctgtgtgcctggagacatagtgatactgctaatagtaatatatggtcccatagaaatttatcactattgtaataaagtttgccacattttatgcctactgtttaattgtgcatgttttcccctagaatggggacagtttgggattgtccacaagtctattttgctttayaatttattctcaaatgcctaacaataaatgacaattaatgatcttatgtttaaagaataagataagagatgaatgaaaagtttgatcgcctgggatgaattctggttcaaataacagtattgttactggatattttagaaactataaaattcccagttt

SEQ ID NO: 126515 - DNA, 624 bp, Homo sapiens
ttatttgtggttattttcatagcacttttatgagtagttctaaataactctgcagacatttctttaaagttcaaaaaattaagtatacttaataaggataaaaatatactaaaaaattctttttttcatttttgattttttaatcatttttttagagacagggtctcactctatgacccaggcggtgatgctatcacaactcactgcagcctcaacctcctgggctcaagcattcctcctgcctcagcctcctgagtagataggactacaggtgcatgccaccacacatggctttttttttttttttttcatgagacaaggtctcactatgttgcccagccttgtctcaaaatcctggcctccagcgatccttccacctcaccctcccaaagtgmtaggatttaaggtataaacaactgtgctggaccatgaaaacttcttaattttttatttttcctttatttagatatcacatagactacagtatagcgatcccagtaggttataacactattgagaagattataactcatgcaatttgggtcaccttttgtgaggcctgaactttgaagatactatttgtcttagaaaaatgtaggctgatgtaaatttaagaaacacaag

SEQ ID NO: 126516 - DNA, 554 bp, Homo sapiens
tttgtccatctttttaattagagcctttaaggtatttattatagtgatttaaaattccctctcagacaagtccaatacctgtgtcatatcagagtctggttcagattttattttgtgtattctttacaaggttttttcttgcttttacatttacatcatatttcattttcttggtgacatcatatgtaggtaaagcacagtttgagctaaataatatgtgtacttggaattggggacacctttcccctaagtatttaatggaaaagtctgcatcaacatatttaagagtggtactrattttgtagggttattgctatggttgctattagtataccacaggcttcaaatttttgtataaataccttgtatttagagcaaggttgattttccagagcaatgcctctccaatgctgagtctcaggccttgcccctgtgctgagcctcagaaagtctcttggcatgctctgctgtgacttacaagttgaagctgcttcacttaacggtgtacattctctaattcatagaaatgagatgcattctctgaattagtagtt

SEQ ID NO: 126517 - DNA, 583 bp, Homo sapiens
  misc_feature (1)...(583): n = A,T,C or G
catggctagtgctcagcacagcacttgatatgtaatgaattgcaagatgtgaaaaaatgaacaagataattggccaagaagtaacagtgcttctacatgcccagagaaggcttgtctagcttaaattgtttttttcttttctttaggtatgaaaagatagggtctcaaagcaggccgcagttttatttatgtggcagaatgtaccagtctgaggtgtcatacttaataagcmctctccggaaattatttgtgtaataattttttttaacccgacgaatcattagtgctgagggacataagacataatgatnnnnnnnnnnnnnnnnnnnnnnnnnnnnnnnnnnnnnnnnnnnnnnnnnnnnnnnnnnnnnnnnnnnnnnnnnnnnnnnnnnnnnnnnnnnnnnnnnnnngaagganctaaaacagcctttctcaaggcgagctcggaactccatacaaattctgcttgccatttatgaatgaaattaactatgcataactaacattggaattaacttaatgagaaagatatataatagatcaaattgtgaatgtcatggatcacattaacttttaagatggt

SEQ ID NO: 126518 - DNA, 580 bp, Homo sapiens
agttttggaaaagctctcaaactgtgttttccttgtgatctcacaccagcacaacaacatagaagacttctgtgacctcaaaatatgtggcaatatcttcccaccagcaagcaagcaatcagttttgcagtggacagcaactgggttttctccattcaattccaacactgtctacctggagataatgtcagatcctacaggctggggtctcagtcccccaaactgacccttcttcagacaccagtaacaagtttaagcctctgcaacttctgaccaactggcttcaagttggrtttcctacaaccctctttatgtttaatttactggagcagttcacagaactcagagaagcactgacatttaccagtttattctagaggatattctaaaagataaaggtgcagagatacacagggcaaagtatggggaacagggcagcatttatatgtcacctctgggtgcacccccctccaggaacctccatgggtttggttatcaggaggcactctgaacccagtcctcttgggttttcatggaagcttcatgatgtcagcattctttctccaagggtatggggcag

SEQ ID NO: 126519 - DNA, 580 bp, Homo sapiens
agttttggaaaagctctcaaactgtgttttccttgtgatctcacaccagcacaacaacatagaagacttctgtgacctcaaaatatgtggcaatatcttcccaccagcaagcaagcaatcagttttgcagtggacagcaactgggttttctccattcaattccaacactgtctacctggagataatgtcagatcctacaggctggggtctcagtcccccaaactgacccttcttcagacaccagtaacaagtttaagcctctgcaacttctgaccaactggcttcaagttgggkttcctacaaccctctttatgtttaatttactggagcagttcacagaactcagagaagcactgacatttaccagtttattctagaggatattctaaaagataaaggtgcagagatacacagggcaaagtatggggaacagggcagcatttatatgtcacctctgggtgcacccccctccaggaacctccatgggtttggttatcaggaggcactctgaacccagtcctcttgggttttcatggaagcttcatgatgtcagcattctttctccaagggtatggggcag

SEQ ID NO: 126520 - DNA, 564 bp, Homo sapiens
cgattggaatagcactgaattgatagatttctttgtgcattatggccatttaaaaaatattgattcttccaatcaatagtggaatgtatttccatttatttgtgtaatttctgatttctttcagcaatgtgttgcagttcttgttgcagagatctttcacctctttggttatatatatttctaggtatttctattttttgtggttattataagtgggattgtgttcttggtttcactcagtctggacattgttggtgcacagatattctactgatttttatacattcattttatatcctagaactttattaaagtcgtttatcaattctaggagtcttttggcacagtctttagcatttcctaattatagaattatatcatcagtgaagaaagatagttttacttctttttttcctattttggtgccttttatttatttctcttgcctgattgctctggctaggacttccagtactacgttgaataggagktgtgagcatgggcaaccttgtcttgttccagttctcaagggggatagttcgagctttcactctgtcagtatga

SEQ ID NO: 126521 - DNA, 580 bp, Homo sapiens
agttttggaaaagctctcaaactgtgttttccttgtgatctcacaccagcacaacaacatagaagacttctgtgacctcaaaatatgtggcaatatcttcccaccagcaagcaagcaatcagttttgcagtggacagcaactgggttttctccattcaattccaacactgtctacctggagataatgtcagatcctacaggctggggtctcagtcccccaaactgacccttcttcagacaccagtaacaagtttaagcctctgcaacttctgaccaactggcttcaagttgggtttcctacaaccctctttatgtttaatttactggagcagttcacagaactcagagaagcactgacatttaccagtttattctagaggatattctaaaagataaaggtgcagagatacacagggcaaagtatggggaacagggcagcatttatatgtcacctctgggtgcrcccccctccaggaacctccatgggtttggttatcaggaggcactctgaacccagtcctcttgggttttcatggaagcttcatgatgtcagcattctttctccaagggtatggggcag

SEQ ID NO: 126522 - DNA, 580 bp, Homo sapiens
agttttggaaaagctctcaaactgtgttttccttgtgatctcacaccagcacaacaacatagaagacttctgtgacctcaaaatatgtggcaatatcttcccaccagcaagcaagcaatcagttttgcagtggacagcaactgggttttctccattcaattccaacactgtctacctggagataatgtcagatcctacaggctggggtctcagtcccccaaactgacccttcttcagacaccagtaacaagtttaagcctctgcaacttctgaccaactggcttcaagttgggtttcctacaaccctctttatgtttaatttactggagcagttcacagaactcagagaagcactgacatttaccagtttattctagaggatattctaaaagataaaggtgcagagatacacagggcaaagtatggggaacagggcagcatttatatgtcacctctgggtgcaccsccctccaggaacctccatgggtttggttatcaggaggcactctgaacccagtcctcttgggttttcatggaagcttcatgatgtcagcattctttctccaagggtatggggcag

SEQ ID NO: 126523 - DNA, 596 bp, Homo sapiens
taacacaaagagattaagcaggaggaaatcacgttccaaataacaagacccatgaaaacctgctttaattaacaaatcactttttgcagaaatataaaaaaaaggccaacacaatataatataggatcaataacaagcccagacaaacagagtcttgattttttacaaaggatattgaacagtcatgggaataaacaagccttcagkgaatagagccaggtcgataggaccatgagtgaaaattaatcttatttccatcaacctcagatgcaatactatctagatgtaaaatataaaacattaaagtttctataggaaaacatagaatattgtcaggacactggcatcataaaacacttaaatggggtacaaatgaacctatcctaaaaaacagattgataatgtgggttataataaaattaagaacatttgatattcatcaaaagacactcccaagtgtacctgtgacatcttggtatattaataatatggaataaaatatagcagtgaaaatttgtgcagtagcagtttatttttactgttatattttattcttcattactaatatattatacctaactacatgtatttattca

SEQ ID NO: 126524 - DNA, 642 bp, Homo sapiens
tgggctagttgtagaattgacctgtggaagtctagaatcccactaattattaagattaagacagaggcactttggaatacgtctccatctgttgagaattcattatgcaggatatgatattaattcctgtacaagtaatttattcaactattcatatctccttacacaaagttttaaacataatacaaaatatacttattccttcagtctaatttacatattcttctcatgtgtaacctaatcttccctatatcaaattgattattttatacttgtctattactcccactatattgaaagctatatagtacagaaaaaaatgttctctactaggccaggcatccttgcctacaccagtaatcccagcactttgggaggccaaggcgacgggattgtttgagcccaggagtttgagaccagtctgggcaacatggcaaaactcagtttctatacaaattagctgggcatggtgacakgcacctgtggtcccaactatacaggaagctgaggtgggaggatggcatgaatttggcaggttgaggctgcagtgagctgtaattacaccactgcactccagcctggtcaacacagctagattccatcttaaaaaaaaattctctattatggttttattttttaacc

SEQ ID NO: 126525 - DNA, 620 bp, Homo sapiens
agaggatggcttccttatttagaaatattgtttatattgatgtgagtttaaatcatgtgaaaagtatccatagagacattgattatcttaatatttgtcttactgtggctagctaaattataaaaagatacatttatatatgtgttaactagatgaaataacttattgttgattactgggttccttaagaagctgactctgagatgaagtttggtgtgcaagatgttttagkgaggactcttgggatcaataactgtggaagcaaggaagaaaacactggacagagagagaagtcacactccagcccagccatggatgagccaattaatgacaaatgacaaggggatgacaaaaagtgggttgccaatggacacaggaatgacttttcctttgaaccagggagacatgttcccaaagtagggtggctctagaacttgaatgggatttcagagttgtccttgattttgctgagcaaagcaaacctctgtatccccactgagatttgtcattgtgattaggctgctctgggatggggcttgtccttaggccaggagactctatgaaattgaaaccatacttaaaaggactgacagctgaaatatgtctactcacaatgcacc

SEQ ID NO: 126526 - DNA, 620 bp, Homo sapiens
agaggatggcttccttatttagaaatattgtttatattgatgtgagtttaaatcatgtgaaaagtatccatagagacattgattatcttaatatttgtcttactgtggctagctaaattataaaaagatacatttatatatgtgttaactagatgaaataacttattgttgattactgggttccttaagaagctgactctgagatgaagtttggtgtgcaagatgttttagtgaggactcttgggatcaataactgtggaagcaaggaagaaaacaytggacagagagagaagtcacactccagcccagccatggatgagccaattaatgacaaatgacaaggggatgacaaaaagtgggttgccaatggacacaggaatgacttttcctttgaaccagggagacatgttcccaaagtagggtggctctagaacttgaatgggatttcagagttgtccttgattttgctgagcaaagcaaacctctgtatccccactgagatttgtcattgtgattaggctgctctgggatggggcttgtccttaggccaggagactctatgaaattgaaaccatacttaaaaggactgacagctgaaatatgtctactcacaatgcacc

SEQ ID NO: 126527 - DNA, 584 bp, Homo sapiens
tcgtatttataggttctataacacccaaggagaagggattatacagggtatgcagaacagaggcaggaaacttgggtacattttagaattcagcctacctatcgcaatatgccagggtcacttgatttgaactgtagaggatggtgacaaatgtgtcttattcacagaaggctatgagaataggctagatttggaaggggaatgaagaagaaacaagtgacatgttctccatgaagtagacactctaagcctgctatcactgaaatgtactactttgactttgtaaaattagccagtcctgacaatcagaatatgaaaggcatgctgaattaccaaattatattgaatatgtcctgtattggtgttactccctgatatcacaagacaagacaaattgcaatccagggatttgactaatgaatgtatcaaaatagttatgatgacattggaaaagaaatargatctcaatattttgagattttaagccagagacacatgtacattgataatggcacaaaattgtctgtattcatgactcagtccttgaaagtttgtattacaaaatgaacaatacaatcaatcaa

SEQ ID NO: 126528 - DNA, 584 bp, Homo sapiens
tcgtatttataggttctataacacccaaggagaagggattatacagggtatgcagaacagaggcaggaaacttgggtacattttagaattcagcctacctatcgcaatatgccagggtcacttgatttgaactgtagaggatggtgacaaatgtgtcttattcacagaaggctatgagaataggctagatttggaaggggaatgaagaagaaacaagtgacatgttctccatgaagtagacactctaagcctgctatcactgaaatgtactactttgactttgtaaaattagccagtcctgacaatcagaatatgaaaggcatgctgaattaccaaattatattgaatatgtcctgtattggtgttactccctgatatcacaagacaagacaaattgcaatccagggatttgactaatgaatgtatcaaaatagttatgatgacattggaaaagaaataagatctcaatattttgagatwttaagccagagacacatgtacattgataatggcacaaaattgtctgtattcatgactcagtccttgaaagtttgtattacaaaatgaacaatacaatcaatcaa

SEQ ID NO: 126529 - DNA, 612 bp, Homo sapiens
tggtctctccccttcaaccttttaggatttaattttctcttcagtggcccattatgacatttacatacgttgaatttgaaagattcccatactcccagtctcttctgttaccggtgtgcctggagcagtttgttgaatttgtgaaattttgagatagaatgaattttgtaggacctgaatttatttataatsttatatttatattataaatatgatgtatatttagatgtatatttatgttataaatataatgtatatttagatgtatatttgtatgtcatgtatttgtattaacatgaagtctttctgatgatgataaaacactatttttaaacatttagcagttgatgactacattttagaggtcatcaaaatgttttattttttcctctcttgaagttatttggtataattaaaaaaattcatactaaggaaatttatcagggttaaagattcctgtaattaggcatgttttgatgttattgatatcctcttttctggttttggagtggatactttccctgctgtgacctctgtgctctgtagtggttctcctagggaattatattccagtaattctgggtatttctttaaggtgctttgtatttcttg

SEQ ID NO: 126530 - DNA, 256 bp, Homo sapiens
gcacacccaccgcccgccggccgccgcgtcccaacccgmtgggacgccgggcccggcccggcgggatcctcccccgactcggaagggggaggcgcgggccacagtaggcgacgagccgcactcggccaccaccgcggtggccggcggaaccctcgcttctcccccccaaccccgtcgagggggaagcggaggagggtcctctgcgagcgggtcgctacggcagcgctaccataacggaggcagagacagaggcggc

SEQ ID NO: 126531 - DNA, 425 bp, Homo sapiens
ctccgggagaccggcgcgcccccaccgtgggacgctttcccagggccaggcgggcccgaccccgtgccacgcaaacgcggtcgtcggcaccggtcacgactcggcacgggagcgggcggagagccgactcgcggcggagggggtcacgcgccggacagagcgccgggcgcgcacacccaccgcccgccggccgccgcgtcccaacccgctgggacgccgggcccggcccggcgggatcctcccccgactcrgaagggggaggcgcgggccacagtaggcgacgagccgcactcggccaccaccgcggtggccggcggaaccctcgcttctcccccccaaccccgtcgagggggaagcggaggagggtcctctgcgagcgggtcgctacggcagcgctaccataacggaggcagagacagaggcgg

SEQ ID NO: 126532 - DNA, 166 bp, Homo sapiens
gcgccaccgcaccgcagcctgggtgacagagcgagagagactcagtccaaaaaaaaagaaagaaaagaagaagaaraaaaaagaacgggcccaaatactgcattgtcgctgaacgttctcccaaaaggccagaaaccccctgactcaggtcaaggaggtggtgttt

SEQ ID NO: 126533 - DNA, 451 bp, Homo sapiens
gcatcataaaaaaaatcaataaaaytgaaagattgaaataataaaatgaatgttttctaatcacaaaagagaaaattagagaccaaaaaagcaagaaatttgggaaatgcaaacatgtgtgcattaaatgacacaatcttaaataattaatgaataaaaaatgtacaaatagtgtcagagaatattttaacataaatagacatttagacaaaacataataaaatttatgagacttagtgaaagttgagctctgagggaaacagcagaattactttataaaaaacaaagaaatcttaaattaatagcttaacgcttatggaagcatttaaataaaaatgaactacccagttcacctggagcaaacactatcagtggggtaaaaaggtagtcacgctgacaatcgtaggaggaaatacttggaaacaagacactgagaattaggatagtgata

SEQ ID NO: 126534 - DNA, 453 bp, Homo sapiens
gcatcataaaaaaaatcaataaaattgaaagattgaaataataaaatgaatgttttctaatcacaaaagagaaaattagagaccaaaaaagcaagaaatttgggaaatgcaaacatgtgtgcattaaatgacacaatcttaaataattaatgaataaaaaatgtacaaatagtgtcagagaatattttaacataaatagacayttagacaaaacataataaaatttatgagacttagtgaaagttgagctctgagggaaacagcagaattactttataaaaaacaaagaaatcttaaattaatagcttaacgcttatggaagcatttaaataaaaatgaactacccagttcacctggagcaaacactatcagtggggtaaaaaggtagtcacgctgacaatcgtaggaggaaatacttggaaacaagacactgagaattaggatagtgatagt

SEQ ID NO: 126535 - DNA, 634 bp, Homo sapiens
gggaatgttttcagtaaacaaactcagggaactttcaaactattaaggttggaggaaatcgatatactctgtaccttttcctaacatatttcattaattagaaaatataattaaaaactcttcaattacctgcattaaaaaatgagttagggaaggggcgaagaygatatgagaagaaggcagatcagaattactgccatctttcctgattggcatcctggcctctgaacgatattaattaacattttctattttagcataaatgcattcttttcttcattagacaacattctgactctagtaccaaactgaatgatatgactttgaaatattggtgtccctgggttcaaataacaaaaatacagcaaatattcagactttgaaaataactcaataagagaaagaggatctgtctgggaatagagtgtttgactataaacttaaaactgtagaaactggcaagcaaaagactctcccctgaaccttgatgaaaagtattgtcttgcattctatttgtgggaaagactcctgctttataacatgtcctaagtaaaataattaaacaggaatccctaataaatttaaaagaaaaagtaatatgcattattttgcaggaaattgggttgtatatggt

SEQ ID NO: 126536 - DNA, 614 bp, Homo sapiens
gttttacagttttgagttttacatttaaatcttttaatccattttgggttgatttttgcatatgctgtgagatgtgtccaattttattcttctgcatgtggacatccagttttaccaacaccatttattgaagagactgccttttttccattgtatattcttggcatcattgtcaataatcagttggccatactgtgtgagttyatttatgagctctctattctgttccattgcttgatgtatctatttttataccagtgccatgctgttttatgcatattaggatttgaagaagggttaattaagtactctctggctggaaaaataatattaaagtatatttcacttattgcctttgataatggttataacagtatcatagacaatttgcatacaatcctttgttgattaaatccattaataatgaataaactttgttaacacagtagcaaggaagactgatatatagttgaggttgaatggattttagggaaaactaatactgagcacctattataatccaggcaccaaagaatttgtgtagtttatccaattaaatcctcatgacagccctggatgttaggaatcaacctcatttgtatacatgaagaaac

SEQ ID NO: 126537 - DNA, 593 bp, Homo sapiens
tcctgtggggggcatcccttcacacatctctctcttggatcaggggcgaaggcagacttgccagaagcacaggcagagagtttgagatgcgatgatgaaaaggagtgacagctctcttctgagtccttcagtgtcctctgtaatgtgtgaggcaaagttgttcactgagtgtgaggcaggaagaggggatgtgggtggtatgaagagagaagtgatatcaggggaacccacccccagtatttcaacrtaggttctattttccataagtgttggccagctgagaaataaagagagacagtataaagagaggaatttttacagctgggtggctgggggtgacatcacatattggtaggaccatgatgcccacctgagcctcaaaccagcaagctttttattaagggtttcaaaaggggagggggtgtaataatagacaaagatcacatgcttcaaagggcaaaaagcagaacaaagatcacatgctttctgaaggtactttacaaagggcaaaaacagaactaccgataagggtcgaacaaagatcacaaggcaaagggcaaaagcagaactactgataagggtctaccttcagt

SEQ ID NO: 126538 - DNA, 434 bp, Homo sapiens
ctctggcaatcagcctgccccagctccccaacaagctggggatgagatgggcatgagccaccacacccagccctgcttgtttttgcctctagtgctctctctctgcctggaatgcaattccccagctcccctgccacctcaggctgagttgggtacccccacctgtgtggtctccttgggcatcyccccctcatagcctgttatcatgctgcactctaattgttggtttacatgtccctcccacacttgattcagagtcttttcatctttataccctcaaagcatatcagagtgccttgctcataccagaggcataataaatatttgttaaatgagtcaacgaaagactatgtggctgtggacgaggctggctttgagtgtaggctgggatgggggagttggaacagtagtgtctgtagcagtaagaggcggaa

SEQ ID NO: 126539 - DNA, 472 bp, Homo sapiens
agaactctatatagaaaatgcatagaaagggaagttcaaggaagtggaattaaaaatagcatatttaaggaagtgatttcattgactctactgcatagaaaagtcactagaagggtctatggccatactacctgaatgtgcccagtcttgcctgatcttggaaaagtcacaaaaaggaaattcacccatgggatcatcgaggctccagatctttggaaaaattaaaagtccatggaataatccagggagcaacatgactgggtgagttcatagaggaaagaagacaattttgtgggtaagagtggagaggagaaacagcattagagtaacatccactttagaaagcagtgagtgttgggaataatttccttcttacaaaacagtctgtccatcttttggaggggagctaaccragggaatgcctgaagagcagggtttaattggtagaagacaaataacttttacagaattc

SEQ ID NO: 126540 - DNA, 591 bp, Homo sapiens
gttctggccccagagctcacaggacttcacggggcatcagagcaagttctccagggaaggctgccctgtggccactcccattcttggtgccgggacatgctggcctggtttcctgctcatcactttacttcagcacttaccaaaaggtctcataaatggtggcttacatctaaaactagtgtgtaagccagcrgttaaaattttcttttcatatgaagacaatgtaaggatgcaggaaaaacagtttatgggttctctctatctctcggcagaatgtcatttttatcttatatatatattacctgcaaccatgtataagcattcttttattaattccatgttaacagagagattttccttctggctacagtattcccagccttgatgcagaaggccagcggtgggccatgtcatgaagctgggaggaacccccagggcccatcagctcctccagtaccagccaggccctgggtttaggtgataaataagtcacatgaggtccctgcccggaagtttatatttccagaaggagaaacagacaataaataagtgaataaattgaccatttcaggtcctgataaataatatgaa

SEQ ID NO: 126541 - DNA, 467 bp, Homo sapiens
agtctttttgctatatgaccttcaactgactgggcgaggccccccacrtgataaagcatgattgactttactctgagtatactgatttaaatgctcatatcatctaaaaatgccatcacagtgacagctaggctggtgtttgaccaaatatctgctatggcctacccaaggtgacacataaaatattccatcacaggccctctcttttagaatccagcgaccatgctatgagccgcctaaccaggcaaaaaggtgaggaggaggaactgtggtcagcactccaacaggacccagcctcccagctgtcaagcccaggcattgagtgacagcacctgcagaaggccctgctcagccccagccctcagcatcacgcctgaccactcaagtctttccagctgaggccttagagactgaggaggggaggccaccccctttcatcctgttcagactcatgacccactgaattc

SEQ ID NO: 126542 - DNA, 622 bp, Homo sapiens
cttccttggttttacatttagccccctgctggctatagaattcagataattctgggaagtagactctactgcgctcagagtcctgccccccatctgaattccaaggcttcttactgggctgacctcactgattgcctttcttctcacacattgaatctcctccatgttaaacccaccagtttttagacatgcatagatgtgtttgaaacttagtcttggaaattgcttgagctcaagctgggaatcttcctacttcatgaacagaaactgaaaataccatcagatgtcaatttagcctcttcactcaaaacagctagttttgaggaggccaggagccctcctaaggaccttcaactcggtatggtactgttcagactccccactccacaacctctctactgaggtaggtcagaagtctaacatgagtctcacttggctaaagatttgtcagtgactgcattcctttttggaaggtctagaagaaaataggtccccttcccttttccagcttctagagcctgtccacattccttggcttgtggccatctttctccatcttcaaaactgggaatrtgaaacacctttctcatttttcttacatggtcacatctccctctgaccc

SEQ ID NO: 126543 - DNA, 435 bp, Homo sapiens
gaattcaatgttccttttagataattttggccatgttccattgcgaactttctagtctgcatttcatctctttcctgggaaaagacccacatattcmaaatcctctgccttttctctacttgttagtgaagaacaatatagcaaaactgctatgtacagaattaataatcatgtgcattcagcaaggctctctgctgggaatttcatcactagaataaggcaaaacgcatgagaataagagttcaaatgtagtcagtacaaactagtatcaaaaactctgttgtattatcgttaattgctcctctgattttgctaaaattaaaagaaaaattatgtggggggagaattagaaaatattcaaagctcctaatatattccagtaaaccctgagatgacaaatctcattttccaaggaaaagcagtgctaattttttt

SEQ ID NO: 126544 - DNA, 552 bp, Homo sapiens
ttgtcagctgagttcagttccttgtgactgtaggactgagatctctgttttcttgctggctgtcagccaggggcctctcgctgctcgtagaggcctcccatgttcccactgcatgcttcctccagccagcagaggaggatcgccctgcatggaaaccctcctgcacttcacatctctccaggaagtcctcagtccctccaaggaactcaccttcactaggtcaagctcatcagataatctgtctatcttaaatttgaccgatttgggatctcgattacatctgttaacttgtttttgccataaattgtarcacaatcacaggagtgacatctcctcagtagctttgtctacactcaggaggaagtgattatataagagcaaagatcactgggggtcatcttaggattctgtctaccataatattataaagacacagtaattaaaagagtataacagatttctgcttctgtctgttagaataaatcatatcagactaaccctgcctccataaacaaacgtaaaattgttttcagcagtgtacaacaggcagtc

SEQ ID NO: 126545 - DNA, 471 bp, Homo sapiens
ggaattcagcccaggaaagcaaggatggtccaacattagaaacccaatgtattatatgacattaataggataaaggtgtgtgggggcgaggagaaattcaggatcatctcaactgcagaaaatgcattcaacaaaatctgccacactttcatgataaaaatcctcaagccgggcatggtggctcacatctgtaatcccagcactttgggagcctgaggtgggtggatcatgaggtcaggagtttgagaccaggctggtcaacatggtgaaacctcgtctgtactaaaaaaaaaaaaaaaaaaaaaaaatgagctgggcttggtggcaggtgcctgtagtcccagctactcaggaggctgaggcagaaraatcacttgaacccgagatgcggaggttgcagtaagccaagatcgagccactgtactccaacctgggcgacaaagctagacttcgtctcaaaagaaaaaaaaa

SEQ ID NO: 126546 - DNA, 426 bp, Homo sapiens
cctgacccaagacagaggttgttgcaagggcagaggccacaggcatccacgccagcctctgtgtgttcagtctgtgagcggyccaacgctccccatgcactcctccttaaagcctactcaaccctggggtctgcaggcaagttcctcgcgggtgccttcccttgtcctggctgctgctctgcttcctttgcaagctccttctcgcacccttgcgctggctccctccagagggctccatcccctgcccactgtgccttcgtgggtggtgcccagatctctgtctcctctgccctggacccctctgcccctgactggcagatctatagagttcaatgcccctggagggctccacgtccatcccacagggacccggactctcatcttcctcctgagtgtgctctccccggagacctggcattggaattc

SEQ ID NO: 126547 - DNA, 434 bp, Homo sapiens
gaattccatctcagctctgcttccaggaaacctgacccaagacagaggttgttgcaagggcagaggccacaggcatccacgccagcctctgtgtgttcagtctgtgagcggcccaacgctccccatgcactcctccttaaagcctactcaaccctggggtctgcaggcaagttcctcgcgggtgccttcccttgtcctggctgctgctctgcttcctttgcaagctccttctcgcacccttgcgctggctccctccagagggctccatcccctgcccactgtgccttcgtgggtggtgcccagatctctgtctcctctgccctggacccctctgcccctgactggcagatctatagagttcaatgcccctrgagggctccacgtccatcccacagggacccggactctcatcttcctcctgagtgtgctctccc

SEQ ID NO: 126548 - DNA, 445 bp, Homo sapiens
atacccgaatccctcagagcccacaagaatagggaatcccatgactatgttgtgtcatatggcacagttgactgtagagtagggacactatctggtgggcytaatgtcatcacacagtttcgaagcagagtgttttttttgactggtagaagaagtcagagagattcagagtatgagaatgacgcagtgtgtactgctgttcagaaacggagggagccaagagagcaggaatgagggtggcctgaagggtgcaagacaggtcctggctggcagccaacaaggaaaccaggaccccagtcctccaatgccaggaatttaatcctgccaatagcaggagtaagcttggaagaggagcctggggtctagggaagaaaacattaacttacatctttatttcagccttgtgagactgagcaggcggtccagccgctgcatcctggaattc

SEQ ID NO: 126549 - DNA, 573 bp, Homo sapiens
aaggaacaggggacacttgtaatggagaacactaagctatggactgctatggactgctagtgctctccgttacaagtatcccctgttaccttggctagtaattgacttggtggcttggggcaggcccaacttcaggggtgactgtgcacattgtcctagttgtgtgtctgcctctgagtaagtgtgattagatgacctgatctctctaargtcctttccagctttattagttgaatatgagccagattcgtattcatttgtgggacatggggtgatgggtgattttagacataatgggcagagatcatggactttggaaacagaaaaaagacacaaataaatcagaagaatttgaagtataaggaaggctggggaaaatgattatttgtctagtatgtctataaagaaaacatctcgcctcagtataggtcttatagtttaaaaagatgaacattttaaagaaccttttctagaatcaaattctactcaggttttatataaaaatgtcagtagtattaagatgggttaggaagcttagattattaattgatatggtcctttttggtaggattt

SEQ ID NO: 126550 - DNA, 573 bp, Homo sapiens
aaggaacaggggacacttgtaatggagaacactaagctatggactgctatggactgctagtgctctccgttacaagtatcccctgttaccttggctagtaattgacttggtggcttggggcaggcccaacttcaggggtgactgtgcacattgtcctagttgtgtgtctgcctctgagtaagtgtgattagatgacctgatctctctaaggtcctttccagctttattagttgaatatgagccagattcgtattcatttgtgggacatggggtgatgggtgattttagacataatgggcagagatcatggactttggaaacagaaaaaagacacaaataaatcagaagaatttgaagtataaggaargctggggaaaatgattatttgtctagtatgtctataaagaaaacatctcgcctcagtataggtcttatagtttaaaaagatgaacattttaaagaaccttttctagaatcaaattctactcaggttttatataaaaatgtcagtagtattaagatgggttaggaagcttagattattaattgatatggtcctttttggtaggattt

SEQ ID NO: 126551 - DNA, 573 bp, Homo sapiens
aaggaacaggggacacttgtaatggagaacactaagctatggactgctatggactgctagtgctctccgttacaagtatcccctgttaccttggctagtaattgacttggtggcttggggcaggcccaacttcaggggtgactgtgcacattgtcctagttgtgtgtctgcctctgagtaagtgtgattagatgacctgatctctctaaggtcctttccagctttattagttgaatatgagccagattcgtattcatttgtgggacatggggtgatgggtgattttagacataatgggcagagatcatggactttggaaacagaaaaaagacacaaataaatcagaagaatttgaagtataaggaaggctggggaaaatgattatttgtctagtatgtctataaagaaaacatctcgcctcagtataggtcttatagtttaaaaagatgaacattttaaagaaccttttctagaatcaaattctactcargttttatataaaaatgtcagtagtattaagatgggttaggaagcttagattattaattgatatggtcctttttggtaggattt

SEQ ID NO: 126552 - DNA, 601 bp, Homo sapiens
ttgtcctcataggtggatttggcatgcagagccaggattgagggaagagctgtgaaacatccaggagcctctagcttcttacacatcctcacttaaaataaaactgactctcttgggtctagattgcaccttattatactatatcatcaggattatttttctgtttccagagtttttcccatgtgcttttgcaagagaatttatgtttcacagagctgagctgcaatatcaacctttcccagaagatgccaccaaataacaaatggtgtcytccagtttggagactcctttctgaatttcctagttacattttgtaaattcatgttataacctctctaagttattcaaaatgtaggctgtgctttctttgaattaggagacaagataatgcaatggtaggagtagacagagggttgttttcttttggtgtctatgtaattatttaaccaagtttgagaaattgttctcagagggttacaatttatgactgtaaactttgcaagcagtgtcaaggtccacaaggaaaaatcacccctaagcagcttccttaggtcaccaaaggtgattgtgcagtgatatattcccagataaagtcaaagat

SEQ ID NO: 126553 - DNA, 524 bp, Homo sapiens
ataaggtgcccataacccagaggtttctttgtttgggaaaataaaaccaaggaactttatagaccttcaaaggagacttctatatcttgccaagtaaaatgttagatggaaattacctatcacaccacatatgtggaaattacctgtcacaacgyatatgtgggaactgctgtcctcactctactatttgcaataggattatacacagtagcaccttctaactgaaatattaaacagaaagtttctatcactgtcatattttgcttaattattatccttatagcagggataatagttactaacaaaaaggaagcttgaaagttttactatcactgagtctgctaagactttttattgggtctagtgatgcacttttaaatgaaacatgctgcttttggattaacacctctggtatagtaaaggaaaatctacaggtacttaaagatcaaatcaaaattattggcaggctcagggaaaatgccagcttcagccccaggtggctacaatccctctttaatgaattc

SEQ ID NO: 126554 - DNA, 524 bp, Homo sapiens
ataaggtgcccataacccagaggtttctttgtttgggaaaataaaaccaaggaactttatagaccttcaaaggagacttctatatcttgccaagtaaaatgttagatggaaattacctatcacaccacatatgtggaaattacctgtcacaacgcatatgtgggaactgctgtcctcactctactatttgcaataggattatacacagtagcaccttctaactgaaatattaaacagaaagtttctatcactgtcatattttgyttaattattatccttatagcagggataatagttactaacaaaaaggaagcttgaaagttttactatcactgagtctgctaagactttttattgggtctagtgatgcacttttaaatgaaacatgctgcttttggattaacacctctggtatagtaaaggaaaatctacaggtacttaaagatcaaatcaaaattattggcaggctcagggaaaatgccagcttcagccccaggtggctacaatccctctttaatgaattc

SEQ ID NO: 126555 - DNA, 557 bp, Homo sapiens
ttgggcaatgattggagatgaagaaatcatatgttcatattacatgaaagaatgtttatattgtctatcacattcaaaaaatcttaaagttgtagcatcggtcaaatgttagaatcattttatctaacgaagctgtagactgtaaaaaaaatagaatttcttaacttttattctaacrtccagtcataatttttaaaaataagcatatagaatgcacttgtaaatgaacagcacattctataaataaaccagttgtcaaaaacaagagcaataacagagattttctaaaaatctaactaggatttggactttaaaatgataactttaacatttcctttctaagccatttagcttgttcataagtttaggagtgtgacaatagtcatgcaactaattaataaacattgttttcttaactctcaggaagaaagtgtcttttaaacaaaaattaggaataaaaaatgcatacttctctatttacggtcggaaatatttagtaaattttatgaaatgttatttttctgagcccgataaaaaatgttgaaaagcttctaata

SEQ ID NO: 126556 - DNA, 601 bp, Homo sapiens
gtcttccaacatcaggctaaaaatgcattcaattaaatttctcctcatttgaaacaaatgtttcttaaataaacacgagatctcattgtccttttatttactttgtgtagtggctatgactataacctcaaagtctcctagtacartttaaaatatccttaaattacttaagatgtccttgtcctagactcagaaataaaagttattatcagacattaatagccaaggagtctgtatttctgtttgtttgtttgtttgtttgttttaacaagtacctccagatgagtttgcatcccatgaagacaggtggaaatactggaaatacagaatgacaggattgcaattcaatagtgcaagtcttgggattaaccagttttgagacaagatgtaatcattaaaagccagacattctactctcatacctcaatcaccaagggccttccagaatgcagaactcttaggtcttttgggtgaatcacttacctagtttttcaaagaagagttatcctttatttatgtgtttgcatttatctccaaagaccaaataaaatatcagggaataattttcagggcaatcttgttgataaatatatatataaat

SEQ ID NO: 126557 - DNA, 601 bp, Homo sapiens
gtcttccaacatcaggctaaaaatgcattcaattaaatttctcctcatttgaaacaaatgtttcttaaataaacacgagatctcattgtccttttatttactttgtgtagtggctatgactataacctcaaagtctcctagtacagtttaaaatatccttaaattacttaagwtgtccttgtcctagactcagaaataaaagttattatcagacattaatagccaaggagtctgtatttctgtttgtttgtttgtttgtttgttttaacaagtacctccagatgagtttgcatcccatgaagacaggtggaaatactggaaatacagaatgacaggattgcaattcaatagtgcaagtcttgggattaaccagttttgagacaagatgtaatcattaaaagccagacattctactctcatacctcaatcaccaagggccttccagaatgcagaactcttaggtcttttgggtgaatcacttacctagtttttcaaagaagagttatcctttatttatgtgtttgcatttatctccaaagaccaaataaaatatcagggaataattttcagggcaatcttgttgataaatatatatataaat

SEQ ID NO: 126558 - DNA, 560 bp, Homo sapiens
tggccctctgtgatgaagcttgatgaagcttccagaggaaggagcaggcagcaatctttgctgttctgcagcctctgctggtgatacccaggcaaacaaggcatggagtggacccccagctaactccagcagacctgcayaagagaggcctgactgttagaaggaaaactaacaaacagaaagcaatagcatcaatatcaacaaaaaggatgatgaggcaaacctccatccgaaggtcaccaacagcaaagaccaaaagtagataaatccatgaagatgaggaaaaaccagcacaaaaagctgaaaattccaaaaaccagaatacctcctctcctccaaaggatcacaactcctcaccagcaagggagtaaaactggatggagaatgagtttgactaattgacagaagtaggcttctgaaggtgggtaattacaaactcctctgagctaaaggagcatgtgctaacccaatgcaaggaagctaagaaccttgataaaagattagaggaattgctaaccagaataaccagtatagacaagaacataaatgacctgatggtg

SEQ ID NO: 126559 - DNA, 564 bp, Homo sapiens
gatggggtgaaatgaacctggataagaagcagtgtaagcacttgatccggaaaagcaagagctagatcacaggtatgggggtggagcttctggcttttagtatgggccacagattttacccagttgctttaagtatatgtttttcattagatgctttttatgttttkaaatcatagattttctcaaagagctttaattgtatggaatgtaacttttagtctaataagggaattatcagatcatgatttggcttctatgatgcttactgtagttaaagctgtgtaatatggatttggaaggtgtttttttttttctccccctcaccccgcaagactgggatggtgttttgaagggttccttgatacctgagcttagtaaacacttgtccaccttggggatctttttacctgaggcaaaggagaagcgggttattattttgaaattagcagtctatttctgaaagtaaggaaatactagctaccctgaaaaaccagttgtttggtaattgaaactggtttaaaagcactgtgtttgggcatcgaaactagtttaaagggattgtgt

SEQ ID NO: 126560 - DNA, 564 bp, Homo sapiens
gatggggtgaaatgaacctggataagaagcagtgtaagcacttgatccggaaaagcaagagctagatcacaggtatgggggtggagcttctggcttttagtatgggccacagattttacccagttgctttaagtatatgtttttcattagatgctttttatgttttgaaatcatagattttctcaaagagctttaattgtatggaatgtaacttttagtctaataagggaattatcagatcatgatttggcttctatgatgcttactgtagttaaagctgtgtaatatggatttggaaggtgtttttttttttctccccctcaccccscaagactgggatggtgttttgaagggttccttgatacctgagcttagtaaacacttgtccaccttggggatctttttacctgaggcaaaggagaagcgggttattattttgaaattagcagtctatttctgaaagtaaggaaatactagctaccctgaaaaaccagttgtttggtaattgaaactggtttaaaagcactgtgtttgggcatcgaaactagtttaaagggattgtgt

SEQ ID NO: 126561 - DNA, 601 bp, Homo sapiens
tacttcccagtcacatagtgaatgtgagctgccttcagatacattgctgatcctttcacttacctgtgctttccttttgcttgcctattaagttctagagtttctgtcttaygatgcacttgaaattgcattttccaacctttccacactgatcttcctttcatggaagcctgaccttatctcagaactcaagttacaataatatattcagtggtttgaatatttgatcaatttctatgctttccaattgcttttaagctccataggaaggaggccctatctccttttgccaaccactattaccctaagaccttacgcaacacagagcccacagtatgctctcaataagtatttgtggaaggtatgaatcctcacactattactctaagcaaatgatttcccttagtgcatttctgagtccatctcatcttccacatctcaaaattattcattcatttatctgtctttcttctatctatctgtctgcctctctgtctatttatatttttctcagaagaagaaatgcctatcatttccttcatggctaaccccttctctcgtctccttactatcattcttaccactctccctaaatcctttg

SEQ ID NO: 126562 - DNA, 651 bp, Homo sapiens
ttctgtcagttcatccatctgatcctccgcccagttctgcacccttaatggagacattgtgatcatttagaggagaagaggcactctggccttttgggttttcagcatttttttcattggttctttctcaccttcgtgagtttgtctagttgtggtctttgaggctgctgacccttgtatgggttttttgtgggggcccttgttgttgttgttgatgatgatgctgttgttgtcactttctgcttrtttgtttttctttcaatagtcacttccctcttctgtagggctgctgcagtttgctggggttcactttaggccttattcatctgatttgctcccacgcctggatatgtaactcaaggaggctggagagcagcaaaaatgggtgtctgctccttcttctgggacctctgacttcaaggggcaccaacctgatgccagtaggatcgctcctgtatagggtgtcctgacaatccctgttggagggtctcacccagttgggtggcaccaggaggaggacccatttaacgaagcactttgtcccctggtggagagggtgtgttttgctgtgggaaagcccacttgtctgggcttcccagattcctcagaactaccaggaggagaggctaagtctgttggtccgcagagact

SEQ ID NO: 126563 - DNA, 599 bp, Homo sapiens
tccaacagaatttcatctgcattcagaagagtcctagtgagggcaggcacctcggagcccatgagtttgaatgcaagtgacaaatcttgcccccacatttccacactatacttaaggtctgacctggcccaaaggggtcatgggcctgctccttgggaagccagtattctttgaatcccgctgatggccctgggcaatgtatgtttcttagaacatgtttattgtaaaatctctttaataggacttcttttcactattgagtttgtcaggcaagtgcttccctgtagttcttaacctgtgcaggaatttctgtgtcactggctacaaccgctctcagtagcttccaaattatttttcgtaagagactctccttcattattttcatttgcttatgtagatttccaaatggcttcggcagagaatgtttatggctgagacaggttaacctctgtgagcttcaattttgtctgaaatcaactaggggtggtagacactgaaatacagtatctrcaaagctcccacttataaccagcacacagttggcgctgaataaaggacatatcctgttacgagcatttcagtgggatgaattctgcaag

SEQ ID NO: 126564 - DNA, 596 bp, Homo sapiens
aactatactttatgtaacaaaaacaaacaaaaacacacagaaacatgtattttcctgtgtttgattatcatttcttttgttatttcccaaacttcaatggtgtatgaagaattgtctagcagttccagggtaacaaagagcagaacttctgatctagaagtgacaaactacaaataggaaatgatgtatgtatagttagatgctcctaraaatgctgaggatttactctttccaggctctcttgaacttgtgaattcagcattgttacctttgatttggatatccatctactatcctctttgcctgattgaactctttttattttttaaatatatttttaagtaaaatatacgtatataacttacaatctttatcatttttaagtgtacagttcactagtaataaatgcatttatactcttttttttcctcctttctcctcctccatcctccccttcctggcctctggtaacaaccaatctactctttatcttcctgagatcaacatttttagctctcacgtgagtatttgtttttctgtgctcatgtcacttaatgtaacataatgacctttagtttcatctatgttgctgcaaa

SEQ ID NO: 126565 - DNA, 653 bp, Homo sapiens
tgtagttaacaatactatattgtatacttaaaatttggcagaagagttgttcttaaatgttctcaccgtatgcacacaaaaatcataactatgtgaggtaacagatatgtttattagcttaattgtggtaataatttcacagtgtacacataaatccaaacgtcacactgtattccttaagtatatgcaatttttacttctcaattatacctcagtaaaactggcaaaaaaaagcagcaaagttaattcagacaaaatctcacagtaaaaaakaaaattatttaaatgagtatatataaaaatggaaactgctttccagatacagtttgaatatctaaaataagtacaagttatgattctttgcttgaaaatttaaaattctgaataaacccatcatacagttgaataattttactctgaattgatttaccagttttcacctactgttccactcctaattcttttcatattttcttctcatcttctgattcccattgcaggttttctataaatttaattctggttatctggatttttattcttgccatatatatgtatgtaccatgcaggcggagctgaaaccttgcaattggaatatgtatatccatctatcttcagctctgcctgtgtaccatgctctatttggttagtat

SEQ ID NO: 126566 - DNA, 653 bp, Homo sapiens
tgtagttaacaatactatattgtatacttaaaatttggcagaagagttgttcttaaatgttctcaccgtatgcacacaaaaatcataactatgtgaggtaacagatatgtttattagcttaattgtggtaataatttcacagtgtacacataaatccaaacgtcacactgtattccttaagtatatgcaatttttacttctcaattatacctcagtaaaactggcaaaaaaaagcagcaaagttaattcagacaaaatctcacagtaaaaaataaaattatttaaatgagtatatataaaaatggaaactgctttccagatacagtttgaatatctaaaataagtacaagttatgattctttgcttgaaaattwaaaattctgaataaacccatcatacagttgaataattttactctgaattgatttaccagttttcacctactgttccactcctaattcttttcatattttcttctcatcttctgattcccattgcaggttttctataaatttaattctggttatctggatttttattcttgccatatatatgtatgtaccatgcaggcggagctgaaaccttgcaattggaatatgtatatccatctatcttcagctctgcctgtgtaccatgctctatttggttagtat

SEQ ID NO: 126567 - DNA, 591 bp, Homo sapiens
ccaagcacaatggatgaaattgtgccaaagatgaatacaatctctgcctcgaggtgctttctgcttaggcttgggtcaagagtgcggccaagggaaggaagtgagctgaagaatctagaattccrctgggtgctgagtgccaagccacctgcgggtttggaacaatggctttggctgggaagtattggagaaattcttctgaaaggttggaaagctgatggtaagacttgaaggacaacagttgtgatgtgtgtgcacttatgatcagtacacaaggatgaagttgttgttaatgttgtacaagtgctgattaaataggtaagatgttcttcagacattgagaaagagattctgtggataaccatgaagatcttcagcagaaacctcaccatggctggcttcgatgaaccaggctgcagctcccaatctggtgggtggtgcaggacatcagtgaatatgataagagtcaacatttctctacaaatgggaactctgagaaatcaccttcttcccaaattataaccttgaggattttataggaaataggctatatctggctgaataaaatttgccttttcttctctctgcatt

SEQ ID NO: 126568 - DNA, 554 bp, Homo sapiens
cagcaataggtagctaaggactgcaagggaaatggggatgtcctgcccctccagagacgataatcctctgaggaactgggtgaggagcaaacctcgtgttcttggctgcacttctctgggttgggttttccatctccttgaactaggaggggagagggagggggtgggtcttggcacaaatattatagattgccactgttcttactgaggtttagtaagttttcttgaataaatatttcttcatttgctgtatgaccttaggatcatttccagggcttttaatttttatttttataaaaaataatttttaccagttttgctaagaaatggatcttcagaactactcatgctactgtgcttggaagtggaatctcatttctaaagtgcatctgcctccagatgggctattagtcccattgtccaaagycagagatgtcctacatatgaaatacattatccagaggaatggaatcgcagatttcctgtgcaacctgcacgacactgttgctttacatgattccttctagttatgtattattgaatctgggaagtca

SEQ ID NO: 126569 - DNA, 571 bp, Homo sapiens
ttttctctcattagctactaactttgtgtttccagtattctctayagagttagtagtgtcaccatctgtgatgatcagtttcatgtgtcaatttggatagtctgtaatacccagttattcacataaacactaatcaaagttttgctgtgaaagtattttatagatgtggttaacatctacaatcagttgactttaagtaattatctttgataatctaaatgggcttcatccaatcagttgcaaagccataagagcaaaacagtcttccttgaagaagaagaaattcagtttcaagacagcagcatcagctccttcctgagagttccagcctgcgggcctatcctgcattcttccaacttgccaggacccacagtcctacaagttctgtttctgtggaaaaccctgactgatatctcattaatgtagacctccatgctaaaaatctaagagactacctaaacacttcctcctgccgctggcttttatacagttgtagacctttcaaattattcttcaaaataaatatcagatctaatcttgtaattctagcattcaagtctgatgtctatta

SEQ ID NO: 126570 - DNA, 594 bp, Homo sapiens
gagtttgaacaccacagatccagagttcactatcagctccattcagagccagaaatagagcttttgatactggataatgatttcttcagaagcaatatctttgattgttgtatgaaagtgtatatatgggatcagagatgttaaagaaagaaggcacaaagcaattctgtagtttatggctataaggtcaacagtgaagcagagatcaactagggattacaggcaactttcagtgaaatccctagaaccagaataagctacagcgactcagaattaacaragaaaaaatctccaggtgcttaagaatccaggaaaaatgttcactacctaaggagtgagattagtttagtcatcaaaaatgcaacagcatttttgtctttgcattcttaaatttgagctttacatttgtaattccactatatggtgaatcataatatataaaaacattttagaaataatgcttaagtcttttaaatatatgaatatatggggattattcctaaagttcttggaactttagttgctgagatctagaaagaaaatcctgtttatcagctgtctgttatgtaactgttttttgtttaaagtaccaca

SEQ ID NO: 126571 - DNA, 494 bp, Homo sapiens
cttatgtgttaggtgagtttcttaaaaacagcagatacttggttggtgaacttttattcattcttccattctgtaccttttaagtagtgcatttatgccatttacattaaatattaatattgagatgtgaggtactattctgttcaacattctagttgttgcctgaatacctttctttttttttcattgtgttactattttataacccctgtgggatttatgctttttggaggttctattttattgtacttcaaggctttgttttaagatttagaactccttttagcagttcttatagtgccagcttggttgtagtaaataatctcargatttgtttgtttgaaaaagactgtatctttccttcatctataaagctcagtttcatgggatacgagatttttggctgataattgtttaagaaggctaaatataggaccccactcccttctagcttgtagggtttctgctgagaaatctgctgttaatctgatagg

SEQ ID NO: 126572 - DNA, 446 bp, Homo sapiens
aatgggtccataaatttgttgtgccatggctcagtttggcagtcagatgaagcctagagatctgttttaataatgttttaaaatgtctaaaataaaatatatggaattgcagaaccaactatattaaaataacattatcggaatattttaaaatgtgatgatatagtaatatacaaatcacaagatctagaagcagatctattaactactgtcatttcaaagcagtgattagcataagagatatttggagagatgtgcagcgattgtaatgcgaagtaaaaatatacactgtgtatgatttatgttggtggaaaaggctraagtgcttctaataccactgaagctcaatgcctacatttgcaattgaagaattgctaaatgtcagttagaggtcagtgaaaataaggtccaggtttctcatccaggctcacagaccccacgaattc

SEQ ID NO: 126573 - DNA, 552 bp, Homo sapiens
tgaagaaaaaatagactattgaaataggcctatagctattgaatagataatttccaaaacagaaagccgtaagtccagatgtgtttgctagtgaattctgccaaacttttaaggaagaaagtataccattcctctataatttctttcaaaagatagaggaagagggactaatttctaacccattctgtgaagccagtattacccaatgccaaaaccaaagacactgcagaaaagaaagctaaagaccaatatctctcatgaatataaatgcaaaagacacatttataaaggactgtcattcaaaatgtacaacaaactcttcaaactcaacaataaaaaatgaacaatgcaatattaaaatgggctcaatacctgaatagacacctcaccaaagaagayatactgatggcaaataaacatatgaaaatatgctccacctcatatatcaccagggaaatgcaaattaaaacaatcatataggactacacatctatcagaatttggaaaatctggaacactgacaatatctaatgttggcaaggatgtagagca

SEQ ID NO: 126574 - DNA, 594 bp, Homo sapiens
aaattctactcaaggaaacttttctgatacagatgtccaagctgccgagaacaagctgaaagttggatacctaatgtcagtagagtcttctgagggtttcctggatgaaggtggggcccaggctttggtgctggttcttacatgccatcctccacagcctttcagcagattgactcgrtggctaatgctgatgtcataaatgctgtgaagaagtttgcttctggccagaagtcaatggcagtaagtggacatttggggcatgtatcttttgttgatgactggtaatattgaagcatatgttacaggagagagctgaacattttgtcagcccagagcagcaaacacatgaaagtcagaagtccctaatataacatttgtcttctattttttcaatgaggtaaaataccttaaagcataaatgcagataattattcccagctgacctaaagtcaataaaacattttgcttaaaaaattctgcttcatgtagatgttctgccttttgtgctctgggctggacctgtgcatgtgttcttcatctcttacaaagaaaaaccattcaaaacagtccggggagaaaaggccagaaaagtga

SEQ ID NO: 126575 - DNA, 558 bp, Homo sapiens
ttatgtagagatcagagctctttagcccacggtggcaaagttggcatgaaatcaagtcagacagctgagatccatgattcccctctagctaagaatgatttaaatgcttcctccatgggcaggagtcagctgagttttgtccagttttcctttctgctttaacaggatagccctaagtttactgcctcacaattgctgtactctctttccactagtgcccagagatgctctccataccacaccactaccaccagggaaaaggcgtggggtggtrgtggtgattcaggagtgtttttttgaactgttcagtgcttctttcagcaaaatgaagataaaaccagtttctatgagagcttgccttatttttggttcttatgaaggcgttttttctgtgtagacagttgttaaattagtgttcctgttgggggataaattgtggaggttttgattccgccatcttcccctgccttcccacctgcagcacactattactaacccatgtttctggtcaattagacaagagaattaaagatagaaggaaagtgacttcaaagaaag

SEQ ID NO: 126576 - DNA, 560 bp, Homo sapiens
aaaccccatctctactaaaaatacaaaaaattagctgggcgtagtgtcaggcacctgtaatcccagctactcaggaggctgaggcaggagaatcacttgaacccaggaggcggaggttgcagtgagccaagattgcgccactgcactccagcccaggtgacagagtgagactcmgtctcaaaaaaaaaaaaaaaaaagacttagctcatggaagacttgttaacaagatactaagattaatactaacagtgtagcatgcaaagtagtgagatgtagtttttcacctatcacattgacaatgatgaagaattataataattaatgtttctaagagtagagagaaacaagtctcacactctgctggtagcaatgcaattagtacgtccttccagaggccagtttctgaaggcttaaaactatgtatatgatcgggtgcagcagctcacacctgtaatcccagcactttggaaggccaaggcaggtggattgcttaaggccaggagttctagaccagccctagcaacatggcaaaaccccatctctacaaaaactacagaaat

SEQ ID NO: 126577 - DNA, 606 bp, Homo sapiens
gggtgacgaaataatctatagaacaaacctccatgacacagtttacctatgtaacaaacctgcatgtgtacccctgaacttaaaagttaaaaaaaaaataaaatatatgtatcctcaaaataatttttaaaaagtaaaattgctgtgaagggccaggcacggtggctcacacctgtaatcccagcactttgggagcctgaggtgggtggattatctgaggtcaggagtttgaaaccagcctggccaacatggcaaaaccccatcactaataaaaataaataaattagccgggcatggtggcaggtgcttgtagtcccagctacttgggagactgaagctagagaattgcttaaacccataaggcaaagcttgcagtgagctgagattgtgccactgcactccagtctgaacgacagagcragactgtgtctccaaaaaaaaaaaaaaaaaaattgttgtgagaaaaacaagctcttcaaacgtacattggatgctgaagtttctatttctcacttgactatgatattcttttcaattacatctgtgctgcggtcttctaggggtttgtcattagagaaaggtcagactgataagatagtaaagtgc

SEQ ID NO: 126578 - DNA, 546 bp, Homo sapiens
tgtcctcaactaaaggagtagaaccttccttttcatagagaagttttgaaacgctctttttgtgkaatctgcaagtggatatttggctagttttgaggatttcgttggaagcgggaattcatacaaattgcagactgcagcgttctgagaaacatctttgtgatgtttgtattcaggacacagagttgaacattccctatcatagagcaggtttgaatcactccttttgtagtatctggaagtggacatttggagcgctttcaggcctatgttggaaaaggaaatatcttcccataacaactagacagaagcattctcagaaacttatttgagatgtgtgtactcaactaagagaattgaaccaccgttttgaaggagcagttttgaaacactctttttctggaatctgcaagtggatatttggctagctttggggatttcgctggaagcgggaatacatataaaaagcacacagcagcgttctgagaaactgctttctgatgtttgcattcaagtcaaaagttgaacactccctttcatagagca

SEQ ID NO: 126579 - DNA, 430 bp, Homo sapiens
gaattcatacaaattgcagactgcagcgttctgagaaacatctttgtgatgtttgtattcaggacacagagttgaacattccctatcatagagcaggttkgaatcactccttttgtagtatctggaagtggacatttggagcgctttcaggcctatgttggaaaaggaaatatcttcccataacaactagacagaagcattctcagaaacttatttgagatgtgtgtactcaactaagagaattgaaccaccgttttgaaggagcagttttgaaacactctttttctggaatctgcaagtggatatttggctagctttggggatttcgctggaagcgggaatacatataaaaagcacacagcagcgttctgagaaactgctttctgatgtttgcattcaagtcaaaagttgaacactccctttcatagag

SEQ ID NO: 126580 - DNA, 546 bp, Homo sapiens
tgtcctcaactaaaggagtagaaccttccttttcatagagaagttttgaaacgctctttttgtggaatctgcaagtggatatttggctagttttgaggatttcgttggaagcgggaattcatacaaattgcagactgcagcgttctgagaaacatctttgtgatgtttgtattcaggacacagagttgaacattccctatcatagagcaggtttgaatcactccttttgtagtatctggaagtggacatttggagygctttcaggcctatgttggaaaaggaaatatcttcccataacaactagacagaagcattctcagaaacttatttgagatgtgtgtactcaactaagagaattgaaccaccgttttgaaggagcagttttgaaacactctttttctggaatctgcaagtggatatttggctagctttggggatttcgctggaagcgggaatacatataaaaagcacacagcagcgttctgagaaactgctttctgatgtttgcattcaagtcaaaagttgaacactccctttcatagagca

SEQ ID NO: 126581 - DNA, 587 bp, Homo sapiens
aggtttgaatcactccttttgtagtatctggaagtggacatttggagcgctttcaggcctatgttggaaaaggaaatatcttcccataacaactagacagaagcattctcagaaacttatttgagatgtgtgtactcaactaagagaattgaaccaccgttttgaaggagcagttttgaaacactctttttctggaatctgcaagtggatatttggctagctttggggatttcgctggargcgggaatacatataaaaagcacacagcagcgttctgagaaactgctttctgatgtttgcattcaagtcaaaagttgaacactccctttcatagagcagtcctgaaacactccttttttagtatctggacctggacttttggagcgctttcagggctaaggtgaaaaaggaaatatcttcccataaaaactggacagaagcattctcagaaacttgtttatgctgtatctactcaactaacaaagttgaacctttcttttgatagagcagttttgaaatgctctttttgtggaatctgcaagtggatatttggctagttttgaggatttcgttggaagcgggaattc

SEQ ID NO: 126582 - DNA, 430 bp, Homo sapiens
gaattcatacaaattgcagactgcagcgttctgagaaacatctttgtgatgtttgtattcaggacacagagttgaacattccctatcatagagcaggtttgaatcactccttttgtagtatctggaagtggacatttggagcgctttcaggcctatgttggaaaaggaaatatcttcccataacaactagacagaagcattctcagaaacttatttgagatgtgtgtactcaactaagagaattgaaccaccgttttgaaggagcagttttgaaacactctttttctggaatctgcaagtggatatttggctagctttggggatttcgctggaagcgggaatacatmtaaaaagcacacagcagcgttctgagaaactgctttctgatgtttgcattcaagtcaaaagttgaacactccctttcatagag

SEQ ID NO: 126583 - DNA, 563 bp, Homo sapiens
ttctgatgtgtgtcctcaactaacacagttgaacatttctttagacagaacagttttgaaacactctttttgtggaatctgcaagtggmtatttggctagatttgaggatttcgttggaaacgggattacatataaaaagcagtcagcagcattctcagaaagttctttgtgatgattgcattcaagtcacagaattgaacattccctttcacagagcaggtttgaaacactctttttgtagtgtgtgtaagtggacatttggagcactttccggcctaaggtgaaaaaggaaatatcttcccataaaaactagacagaagcattctcagaaacttactcgtgatgtgtgtcctcaactaaaggagtagaacctttcttttcatagagaagttttgaaacgctctttttgtggaatctgcaagtggatatttggctagtttggaggatttcgttggaagcgggaattcatacaaattgcagactgcagcgttctgagaaacatctttgtgatgtttgtattcaggacacagagttgaacattccctatcatagagcaggtttg

SEQ ID NO: 126584 - DNA, 631 bp, Homo sapiens
ctacgttggaaaaggaaatatcttcccataacaactagacagaagcattctcagaaactagtttctgatgtgtgtcctcaactaacacagttgaacatttctttagacagaacagttttgaaacactctttttgtggaatctgcaagtggatatttggctagatttgaggatttcgttggaaacgggattacatataaaaagcagwcagcagcattctcagaaagttctttgtgatgattgcattcaagtcacagaattgaacattccctttcacagagcaggtttgaaacactctttttgtagtgtgtgtaagtggacatttggagcactttccggcctaaggtgaaaaaggaaatatcttcccataaaaactagacagaagcattctcagaaacttactcgtgatgtgtgtcctcaactaaaggagtagaacctttcttttcatagagaagttttgaaacgctctttttgtggaatctgcaagtggatatttggctagtttggaggatttcgttggaagcgggaattcatacaaattgcagactgcagcgttctgagaaacatctttgtgatgtttgtattcaggacacagagttgaacattccctatcatagagcaggtttgaatcac

SEQ ID NO: 126585 - DNA, 628 bp, Homo sapiens
gaaacactctttttttagtatatggaagtggacatttggagcgctttcaggcctacgttggaaaaggaaatatcttcccataacaactagacagaagcattctcagaaactagtttctgatgtgtgtcctcaactaacacagttgaacatttctttagacagaacagttttgaaacactctttttgtggaatctgcaagtggatatttggctagatttgaggatttcgttggaaacgggattacatataaaaagcagtcagcagcattctcagaaasttctttgtgatgattgcattcaagtcacagaattgaacattccctttcacagagcaggtttgaaacactctttttgtagtgtgtgtaagtggacatttggagcactttccggcctaaggtgaaaaaggaaatatcttcccataaaaactagacagaagcattctcagaaacttactcgtgatgtgtgtcctcaactaaaggagtagaacctttcttttcatagagaagttttgaaacgctctttttgtggaatctgcaagtggatatttggctagtttggaggatttcgttggaagcgggaattcatacaaattgcagactgcagcgttctgagaaacatctttgtgatgt

SEQ ID NO: 126586 - DNA, 628 bp, Homo sapiens
gaaacactctttttttagtatatggaagtggacatttggagcgctttcaggcctacgttggaaaaggaaatatcttcccataacaactagacagaagcattctcagaaactagtttctgatgtgtgtcctcaactaacacagttgaacatttctttagacagaacagttttgaaacactctttttgtggaatctgcaagtggatatttggctagatttgaggatttcgttggaaacgggattacatataaaaagcagtcagcagcattctcagaaagttctttgtgatgattgcattcaagtcacagaattgaacattccctttcacagagcaggtttgaaacactctttttgtagtgtgtgtaagtggacatttggagcactttccggcctaaggtgaamaaggaaatatcttcccataaaaactagacagaagcattctcagaaacttactcgtgatgtgtgtcctcaactaaaggagtagaacctttcttttcatagagaagttttgaaacgctctttttgtggaatctgcaagtggatatttggctagtttggaggatttcgttggaagcgggaattcatacaaattgcagactgcagcgttctgagaaacatctttgtgatgt

SEQ ID NO: 126587 - DNA, 628 bp, Homo sapiens
gaaacactctttttttagtatatggaagtggacatttggagcgctttcaggcctacgttggaaaaggaaatatcttcccataacaactagacagaagcattctcagaaactagtttctgatgtgtgtcctcaactaacacagttgaacatttctttagacagaacagttttgaaacactctttttgtggaatctgcaagtggatatttggctagatttgaggatttcgttggaaacgggattacatataaaaagcagtcagcagcattctcagaaagttctttgtgatgattgcattcaagtcacagaattgaacattccctttcacagagcaggtttgaaacactctttttgtagtgtgtgtaagtggacatttggagcactttccggcctaaggtgaaaaaggaratatcttcccataaaaactagacagaagcattctcagaaacttactcgtgatgtgtgtcctcaactaaaggagtagaacctttcttttcatagagaagttttgaaacgctctttttgtggaatctgcaagtggatatttggctagtttggaggatttcgttggaagcgggaattcatacaaattgcagactgcagcgttctgagaaacatctttgtgatgt

SEQ ID NO: 126588 - DNA, 563 bp, Homo sapiens
ttctgatgtgtgtcctcaactaacacagttgaacatttctttagacagaacagttttgaaacactctttttgtggaatctgcaagtggatatttggctagatttgaggatttcgttggaaacgggattacatataaaaagcagtcagcagcattctcagaaagttctttgtgatgattgcattcaagtcacagaattgaacattccctttcacagagcaggtttgaaacactctttttgtagtgtgtgtaagtggacatttggagcactttccggcctaaggtgaaaaaggaaatatcttcccataaaaactagacagaagcattctcagaaacttactcgtgatgtgtgtcctcaactaaaggagtagaaccttycttttcatagagaagttttgaaacgctctttttgtggaatctgcaagtggatatttggctagtttggaggatttcgttggaagcgggaattcatacaaattgcagactgcagcgttctgagaaacatctttgtgatgtttgtattcaggacacagagttgaacattccctatcatagagcaggtttg

SEQ ID NO: 126589 - DNA, 519 bp, Homo sapiens
agaacctttcttttcatagagaagttttgaaacgctctttttstggaatctgcaagtggatatttggctagtttggaggatttcgttggaagcgggaattcatacaaattgcagactgcagcgttctgagaaacatctttgtgatgtttgtattcaggacacagagttgaacattccctatcatagagcaggtttgaatcactccttttgtagtatctggaagtggacatttggagcgctttcaggcctatgttggaaaaggaaatatcttcccataacaactagacagaagcattctcagaaacttatttgagatgtgtgtactcaactaagagaattgaaccaccgttttgaaggagcagttttgaaacactctttttctggaatctgcaagtggatatttggctagctttggggatttcgctggaagcgggaatacatataaaaagcacacagcagcgttctgagaaactgctttctgatgtttgcattcaagtcaaaagttgaacactccctttc

SEQ ID NO: 126590 - DNA, 631 bp, Homo sapiens
ctacgttggaaaaggaaatatcttcccataacaactagacagaagcattctcagaaactagtttctgatgtgtgtcctcaactaacacagttgaacatttctttagacagaacagttttgaaacactctttttgtggaatctgcaagtggatatttggctagatttgaggatttcgttggaaacgggattacatataaaaagcagtcagcagcattctcagaaagttctttgtgatgattgcattcaagtcacagaattgaacattccctttcacagagcaggtttgaaacactctttttgtagtgtgtgtaagtggacatttggagcactttccggcctaaggtgaaaaaggaaatatcttcccataaaaactagacagaagcattctcagaaacttactcgtgatgtgtgtcctcaactaaaggagtagaacctttcttttcatagagaagttttgaaacgctctttttgtggaatctgcaagtggatatttggctagtttkgaggatttcgttggaagcgggaattcatacaaattgcagactgcagcgttctgagaaacatctttgtgatgtttgtattcaggacacagagttgaacattccctatcatagagcaggtttgaatcac

SEQ ID NO: 126591 - DNA, 643 bp, Homo sapiens
aattgaacattccctttcacagagcaggtttgaaacactctttttgtagtgtgtgtaagtggacatttggagcactttccggcctaaggtgaaaaaggaaatatcttcccataaaaactagacagaagcattctcagaaacttactcgtgatgtgtgtcctcaactaaaggagtagaacctttcttttcatagagaagttttgaaacgctctttttgtggaatctgcaagtggatatttggctagtttggaggatttcgttggaagcgggaattcatacaaattgcagactgcagcgttctgagaaacatctttgtgatgtttgtattcaggacacagagttgaacattccctatcatagagcaggttkgaatcactccttttgtagtatctggaagtggacatttggagcgctttcaggcctatgttggaaaaggaaatatcttcccataacaactagacagaagcattctcagaaacttatttgagatgtgtgtactcaactaagagaattgaaccaccgttttgaaggagcagttttgaaacactctttttctggaatctgcaagtggatatttggctagctttggggatttcgctggaagcgggaatacatataaaaagcacacagcagcgttctgaga

SEQ ID NO: 126592 - DNA, 519 bp, Homo sapiens
agaacctttcttttcatagagaagttttgaaacgctctttttgtggaatctgcaagtggatatttggctagtttggaggatttcgttggaagcgggaattcatacaaattgcagactgcagcgttctgagaaacatctttgtgatgtttgtattcaggacacagagttgaacattccctatcatagagcaggtttgaatcactccttttgtagtatctggaagtggacatttggagcgctttcaggcctatgttggaaaaggaaatatcttcccataacaactagacagaagcattctcagaaacttatttgagatgtgtgtactcaactaagagaattgaaccaccgttttgaaggagcagttttgaaacwctctttttctggaatctgcaagtggatatttggctagctttggggatttcgctggaagcgggaatacatataaaaagcacacagcagcgttctgagaaactgctttctgatgtttgcattcaagtcaaaagttgaacactccctttc

SEQ ID NO: 126593 - DNA, 520 bp, Homo sapiens
tataggtattaatttatgagttattcaataaaagaatgaatctctagctagggcaatgccccagtttgaaacaaacaaaaatccaagcaaataaaatgaaatcaaaaaccaaaacaggaaaagaaaaaaggcaggctgaggctagttcagtaagactgtgttcctggcagcaagattggagcagagacagagttgctgtacactcactcccatgagaggaaaaggaaacaggaggaaaagaaaagcctgatcttggcctgmcttttttttttttttttttttaactagggcattgccctggttggagatttattcttttaatgattaatttgagaccaaaatatctacaaaatgaatattttataaaccttcactctctacaggtttaattatatattttaatgtcatgggatggatgttagccatattttatcactgttagttaaaccatatttaagttccagtaagagaatggcagaaataagcaggatattttaaactccaattgtctctcagacat

SEQ ID NO: 126594 - DNA, 587 bp, Homo sapiens
ttatatatatatatatacacatatctatctctctatatatttgagaaactgctttgctcataaacatgattttttttctaggtttctttattttgtttgttcctactggtgtgtttctgtgtgtgtgtkcgtgtgagtgtgtgtatgtcaatgtgcttctcaactacatggtgttatttattagttcattcatttttaagactgaaaagtgaaaaagttatttagaaactccccatataggaatggttgcaaactggatggcctcaggcataggcctgactaccagcattctaggtactgaacagaagcaatgtgtgcctttctgctgtttaatacaaatatttctggtaaacctcttgtttctagtatgtccccacttaccactctcatctgtgtctggtgtttctcaagtgaaaggcttctctgattcagtttttccaaagagtaactttatttgagtcttttcttaaggtacaggaggggtagtgggatacaactgtatgaaatgaatcaaaggaccaagaagtttgaaatgcaaagttgcacgtgatcctcctgttttcatcacctacctacatctgatgctt

SEQ ID NO: 126595 - DNA, 587 bp, Homo sapiens
ttatatatatatatatacacatatctatctctctatatatttgagaaactgctttgctcataaacatgattttttttctaggtttctttattttgtttgttcctactggtgtgtttctgtgtgtgtgttcgtgtgwgtgtgtgtatgtcaatgtgcttctcaactacatggtgttatttattagttcattcatttttaagactgaaaagtgaaaaagttatttagaaactccccatataggaatggttgcaaactggatggcctcaggcataggcctgactaccagcattctaggtactgaacagaagcaatgtgtgcctttctgctgtttaatacaaatatttctggtaaacctcttgtttctagtatgtccccacttaccactctcatctgtgtctggtgtttctcaagtgaaaggcttctctgattcagtttttccaaagagtaactttatttgagtcttttcttaaggtacaggaggggtagtgggatacaactgtatgaaatgaatcaaaggaccaagaagtttgaaatgcaaagttgcacgtgatcctcctgttttcatcacctacctacatctgatgctt

SEQ ID NO: 126596 - DNA, 587 bp, Homo sapiens
ttatatatatatatatacacatatctatctctctatatatttgagaaactgctttgctcataaacatgattttttttctaggtttctttattttgtttgttcctactggtgtgtttctgtgtgtgtgttcgtgtgagtgtgtgtatgtcaatgtgcttctcaactacatggtgttatttattagttcattcatttttaagactgaaaagtgaaaaagttatttagaaactccccatataggaatggttgcaaactggatggcctcaggcataggcctgactaccagcattctaggtactgaacagaagcaatgtgtgcctttctgctgtttaatacaaatatttctggtaaacctcttgtttctagtatgtccccacttaccactctcatctgtgtctggtgtttctcaagtgaaaggcttctctgattcrgtttttccaaagagtaactttatttgagtcttttcttaaggtacaggaggggtagtgggatacaactgtatgaaatgaatcaaaggaccaagaagtttgaaatgcaaagttgcacgtgatcctcctgttttcatcacctacctacatctgatgctt

SEQ ID NO: 126597 - DNA, 578 bp, Homo sapiens
tcatggtaagttactgaagccccagcttacatatatatatatatatataatatatatataatatatatatatataatcaaattaagaaaacatctayttctattttattaagtttgtgaaaaccagaaataaacattgcctttttggtaattaaaaaaaaaaggaacacatgactgcatattacttttcttctaattctcatcgctgaattaatggatttactaatattgaggtttgcatgcaatcctagaataagtatccatcatcatttcttaaaaatctgccagtatattgttctttttaacatattgcttcagatttttgcatttatattgctctgcagttctcttttctttccacttttcgcagggttaggtacctattagtttcctgtgctgctaacaaatgactacaaacttggtaatttaatagttacttactagttctcacagatttttggggccagaatgccaaaactcagccatcagcagagccacatgccctttagttgctctacagataatccattccttgcctcttccacctgctgggggctgtcagcattccttgacatgtgg

SEQ ID NO: 126598 - DNA, 578 bp, Homo sapiens
tcatggtaagttactgaagccccagcttacatatatatatatatatataatatatatataatatatatatatataatcaaattaagaaaacatctatttctattttattaagtttgtgaaaaccagaaataaacattgcctttttggtaattaaaaaaaaaaggaacacatgactgcatattacttttcttctaattctcatcgctgaattaatggatttactaatattgaggtttgcatgcaatcctagaataartatccatcatcatttcttaaaaatctgccagtatattgttctttttaacatattgcttcagatttttgcatttatattgctctgcagttctcttttctttccacttttcgcagggttaggtacctattagtttcctgtgctgctaacaaatgactacaaacttggtaatttaatagttacttactagttctcacagatttttggggccagaatgccaaaactcagccatcagcagagccacatgccctttagttgctctacagataatccattccttgcctcttccacctgctgggggctgtcagcattccttgacatgtgg

SEQ ID NO: 126599 - DNA, 578 bp, Homo sapiens
tcatggtaagttactgaagccccagcttacatatatatatatatatataatatatatataatatatatatatataatcaaattaagaaaacatctatttctattttattaagtttgtgaaaaccagaaataaacattgcctttttggtaattaaaaaaaaaaggaacacatgactgcatattacttttcttctaattctcatcgctgaattaatggatttactaatattgaggtttgcatgcaatcctagaataagtatccatcatcatttcttaaaaatctgccagtatattgttctttttaacatattgcttcagatttttgyatttatattgctctgcagttctcttttctttccacttttcgcagggttaggtacctattagtttcctgtgctgctaacaaatgactacaaacttggtaatttaatagttacttactagttctcacagatttttggggccagaatgccaaaactcagccatcagcagagccacatgccctttagttgctctacagataatccattccttgcctcttccacctgctgggggctgtcagcattccttgacatgtgg

SEQ ID NO: 126600 - DNA, 566 bp, Homo sapiens
cttaccagctccagcaggtttgtatcaacaggtctaatatagtggttctcaaactgtggttccttaaatttgcattatcaacatctcatgatgtaaacctatgaacatcattgcagatctactgaattggtaacccaaggggtagggaccacaacctgtgttttagtaaaccctccaggctactgtgatgcattctccaggtttgagaaccactggtcaaggataatcatggcaactccattctcctagtagatggttggtttaagatgggtcaatggtayaattccagccaataaaatccaaagcgaatatgggagggctttcctgaaagtttcttcacccttaaaaggggaacccatggaaggaatgagccctgctatcccctttctgaaatttgaaattgttgtttgaccatgtgagtttctgcagcagtttgtctgacaatgaggaggcaagcctgcgggtgaagatgagcacactgaggatgaaagagcagggggacagaaagaactttgttcttgtttgacattgctcagctcccaacctaaccaatttctggaacctcc

SEQ ID NO: 126601 - DNA, 566 bp, Homo sapiens
cttaccagctccagcaggtttgtatcaacaggtctaatatagtggttctcaaactgtggttccttaaatttgcattatcaacatctcatgatgtaaacctatgaacatcattgcagatctactgaattggtaacccaaggggtagggaccacaacctgtgttttagtaaaccctccaggctactgtgatgcattctccaggtttgagaaccactggtcaaggataatcatggcaactccattctcctagtagatggttggtttaagatgggtcaatggtataattccagccaataaaatccaaagcgaatatgggagggctttcctgaaagtttcttcacycttaaaaggggaacccatggaaggaatgagccctgctatcccctttctgaaatttgaaattgttgtttgaccatgtgagtttctgcagcagtttgtctgacaatgaggaggcaagcctgcgggtgaagatgagcacactgaggatgaaagagcagggggacagaaagaactttgttcttgtttgacattgctcagctcccaacctaaccaatttctggaacctcc

SEQ ID NO: 126602 - DNA, 653 bp, Homo sapiens
aagaaaataatatgttctgggtcaaaaaaattgtataccttgtgcttactatttaccatttttagattcatattcttctttgagtgttatttaaattactgtacaagattctagttatattctggagtttttttgagggcagagtaatataaagcctcaactgtaggcattatttttaaaacaaattatcttttctgaatttccccctgataaagtgatacaaatggaaaaatcatataaattctttagcttttgaagcagttcaaaagtacctgttaatgtgtaagaggggtaagttttagaaagtgaaaagcaaagtactatgatgttttttgagttatatgtagcaatgctgagaagatgagcagtcatgtctatcataagttattgcagtggatgggctgactatgcaacttaccatccaaactggtgggacactttcgaaagtgaaagggaacactattaataattttgccaggaaagcaggtgggaaaccatggcacatggtcacctagcaatgggagattaagaaaataagatttttttctgttttctaggaatttatrttccatagggtagatgttgacaaagatacatgcaaagattgtagattacattatactctgaattaatttccaaaagactggaagtag

SEQ ID NO: 126603 - DNA, 522 bp, Homo sapiens
tgatggttttataaggggaaacccctttcgcttgactctcattktcttctcttttctgctgccatgtgagacatgcctttcaccttctgtcatgattgtgaggcctccccaaccacgtggaactgtgagtccattaaatctctttcttttataaattgcccagtcttgggtatgtctttatcagcagcgtgaaaacagactaatacaactacacaaaaaagtcagtgcttcaaaacagaaagaagccccaccagtacatttgaaattacagtttatttaaacaggtaaaattgtatatatccttttaaaatgaaaatacaaagtaagtgaatcaataatacaaacatgtttatagcagtaattaaaatacaggtaacatttaccagtgtgaaaatatcagaattccactcacacttggatcttcaatgattgaagtgtgcattcaacacagcaggtgctggtagattgaagataaattcctcctttggatgtgccatcctcagtcaagttcttcctcatcac

SEQ ID NO: 126604 - DNA, 588 bp, Homo sapiens
ctcagggcacatggctggcactatgacctccagaaggtacataaagggagcctgggtgggttccattgggtgtgtttataccctcagttcctaccaagtttgttgtcaatcacaatccccacgattccttcatttactgctatcaaaccacatctcctccattctgcacctgagcagtgcatcttttcaccttccagactggcgagggtgagaaagtcttacattaacaatatgcggtgttggtgtggttcagaagactggtactctcccatcgttggtgagagtagaaatgagtgactgcckttctgcaaagtggctgagcactagagatatgaattttaaatatgtatgctctttgcctcagtaattctactcctagaaatctgtcttaaggtctaataactgaacaaatgtgcaaagatccatatataaggattcatgtttcaatggatacattgcacaaacactagcaatggcaggaattcctaccagctggtcttagtatcttaagctggcccctctgctcttcctcttgctctcttattttccattttctatccagcagccagactgagcatctaaaacaca

SEQ ID NO: 126605 - DNA, 600 bp, Homo sapiens
atgtggtgtgtttgatgctatatgagtctactactattctaagactgtatggcattattctttttatgagagatctcaaattagaggttgaggatgcaaagataactattgccttggccctgaggaattcttaaagcatatccattttccttgcctctacaagtgcattgttggcaaaagcaactttatttatattttcttgctcattccctccttccttgtccccctccttttttctccctccctatttctaacccatatagagtggttacttgagggaatggttttatgaataaagattgtatcctttgctcaggagccttggtgtgygattatagattaaagctttcattttgaaagtcagagcaatatacagccataaaaatagcaatagcagaattattttaattatcacatgtggaagttccagaaagattcaagacaaatacagcactgtagcttgtaggcttcaagagctaattattgagagtagggtattagaatatctgattatactgtggatgtctaatttcttcttgtactctaattatactgatgttcatgctggggctgaacaaccacctcgtggagaaagccata

SEQ ID NO: 126606 - DNA, 584 bp, Homo sapiens
ggaaaatcatttctagtcagcagaggaacattcactgttgaaatatacatgaggaaagggtttgcagaatttctgtgctccttcctagcttctacamtacgtgcttcccaacccccatcccacttttctggcttcatattcaccctcttgattacctttttttttttttttttttttaagatggagtcttgttttgttgcccaggctggagtgcagtggcacaatctcggctcactgcaacctccgcctcctgggttcaagtgattctcccacctcagcctccggagcagctgggattacaggtgtgtgccaccacacctagctaatttttgtatttttagtagagacgggattttgccatgttggccagtctggtctcaaactcctgacttcagatgatcctcctgctttggcctcccaaagtgctgggattacaggcataagcaaccacacccggccttcgattacttttgtcacaagtttctcaatacctcaaggctcagaacttcaaaggcatttttcagaaaatgtatataataatgtgtgtaaggggaagagaagaagagaaaggaagacataatgat

SEQ ID NO: 126607 - DNA, 340 bp, Homo sapiens
gcttttaaataaacttccactcctgctctgaaacgtgcattggtctctccttctgccttatgcccgtcagttgaattctttctttcggaggaggcaagaattgaggttgctacagacctgtatggattccctgccaggtgactcagatacctttgacccataacagtgggaacctgagggctccaccaattccacagttccacaaaactctgaaatcakgtggcacaggttcaagccctggtgccaacactaaccatccaggtgagttgatccaagttactttacctttaagtgcctcagtttccttctctgtaaaattaaaagaataatgatatccact

SEQ ID NO: 126608 - DNA, 612 bp, Homo sapiens
cccacagcctgtgcatctgtatgctcccctacaggtttgagcagtggggtactgaagaacaagccacacccccatcacatgccctgggagggggacaaaggaacctttcaactgggcctmgcccgagatctgggaacgtgagtgtgaatgaatgcaaaactgtcgggtctgcctctcttccaaatccctgccatctctctctttcctgtgagtaagagtctctgtttcacttcacagagttttaaacctccataactgggcctgtcaaaacccccagactttgtctcttctctcacagggtttgaaatggctcttatctctttctttataatgttaacagttttgctacagactacaggaatgttactaagtaaaatgaacatttgcctcagtcaccaatttttgtcattctggtagagctgatacaagaatgctggtaaaggaagagcatggtccctttaaatgatatggaatgggggaaggaaagtgtgggaccaatcagaccaatttttcctagaggtggcatgtatgcctccatctcaacaactgcaggcatgcatggctcagggcacatttccttaccctttcccctcccagctcaggcacttaggc

SEQ ID NO: 126609 - DNA, 612 bp, Homo sapiens
cccacagcctgtgcatctgtatgctcccctacaggtttgagcagtggggtactgaagaacaagccacacccccatcacatgccctgggagggggacaaaggaacctttcaactgggcctagcccgagatctgggaacgtgagtgtgaatgaatgcaaaactgtcgggtctgcctctcttccaaatccctgccatctctctctttcctrtgagtaagagtctctgtttcacttcacagagttttaaacctccataactgggcctgtcaaaacccccagactttgtctcttctctcacagggtttgaaatggctcttatctctttctttataatgttaacagttttgctacagactacaggaatgttactaagtaaaatgaacatttgcctcagtcaccaatttttgtcattctggtagagctgatacaagaatgctggtaaaggaagagcatggtccctttaaatgatatggaatgggggaaggaaagtgtgggaccaatcagaccaatttttcctagaggtggcatgtatgcctccatctcaacaactgcaggcatgcatggctcagggcacatttccttaccctttcccctcccagctcaggcacttaggc

SEQ ID NO: 126610 - DNA, 566 bp, Homo sapiens
gctgaggctcacctaacgtcagcaagtctcagagtttcactgaagagccacagtatactacctgggtattatacgtaagtgctctttagtcagcaggtgatgggtcctgccaggactgggttcttccttttaggaaattgggttcccttcaatgcaaggtgtgtctggaaatatcatctgggaactagggcttggaaaggcagtctcattactctgactgttgctctatcctgttgtggtggagctggtatccaagatgcaagaaaaaatcctcctcgtgcttccctctcctctcaagtgaaaggaaggggtctcttttgaatccatgagctgygcagtctgtggttgggggaggggtggtgcaagcagtcccttagacacccagctagtaactcagcaggctgaatgcccccgaagtctactgactcttagcccagtttagcagtaggactcacctaggagttgcagtccttgtggcctagactgcctttcaagtttatttaaggccccagagcacgttggcccatggtggtgaggcttgccaaaactcaagttctgaccactgg

SEQ ID NO: 126611 - DNA, 467 bp, Homo sapiens
aaacaatgtaaaggagggaatccaaaggcttagggaattaggaaggttgaactgaatactcgatgtgtgacctgcacagccacctgccaactacattccacaagatgacccagaggtatttccttcacgacagcaatgagaaatatattaatgaaggaagtactgcatccttgaacatctctgtggtttctcctctttctagaaaagttatgactctagtacaggaygatgccatcgaaaaggggtcaaacggcagcacttaactgccaaagggaaggtaagtacctctaccgtaaaggtcgggaggggcatactagtaatcagaatgtttcgattggcagagatctttgacagtggatagttgatcatgatgtctcttgaaagtaaatatgtgggcaacctgtgggtgtagtgcctgatctatgtaacagcaaaaactctggtagctgaaaacctgacttgaattc

SEQ ID NO: 126612 - DNA, 577 bp, Homo sapiens
gtgatttttttgtgagtgaaagtgaaagacattattgtacatcattgtagactttataaacattgtctgcttaggctacactagatttaaaaaataataataaatatgctcttagctactgagacttttactttataaacttttcaatttacctttttgacttttatgtaataacatttagcttaaaacacacatttcctttctttataactttatataagtttaattaattttttttaacttagtaaactttttttgttaaaactaaggcacacacacatacattagcctagrcctacacagggtcaggataatcaatattattgtcttccacctccacatcctgtccctctggaagatcttcaaggacaaaaacatgcctagagctgtcatctcctgagacaattatgccttctggaatatctcctgaaggacctgcctgaggctgttttacaattaacttttttttttaataaataggggtacactgtaaaataactattaaaaagtcagcacaggaagtttatttacaccagcatcaccataaacgtgtgagtgatgcattgtactatgatat

SEQ ID NO: 126613 - DNA, 510 bp, Homo sapiens
gacttttcctttcttcctttctctttctttctttctgtgttttccttcttccttccttccctttttaaaaaataatttgaagactttgagcmaaaggtgaaattgagagagtcctctgaaatagctcgtgccaagccaacaataactgaccataaatcttggatagggatgtgatgggagtgaggagtagagagaccacagtgtccatctaaggcagaattgtcatagctcagaatgaaacctttattcaaggtgcctagctttaacttctagcttccactacctactagctatagagtctggggaaacctgcctgtcttccgtacacagttttgtcatctgtaaaatggagatagcaatagcacttacctcataaggctgatgggaaggtttactcatgtgtataacacacttagcacagtgcctggcacatagcagacacatgtagatgtattatttattaaaagagtgctataatatgtgatgactgcttattgtatattggaattc

SEQ ID NO: 126614 - DNA, 558 bp, Homo sapiens
aataacaaactgacaagttgttcatcataatttaaacttcatcataatttaaaacttacattatttgaaagayattgttaggtaaatgaaaagacaagacatagactgggagaaaatatttgcaaatcatgtcgtatgtcagataaatgacttgtatctagaatatataaagaactcttaaaattaaaaacaacaacacaatttttaaaaaatcagtaaaatagttcaacaggcatttcaccaaatatgatacacaattattaaataagcacatgaaaagatgctcaacatcattagggaaatacatactaaaaccacaatgagatatcccttcccaccatcggaatggctaaaattaaaaagagtcaccataccaagaaaagctgagtatgtgaaggaactggaactcccatacactgctggtggggttacgaaattgtataaccacttcggaaaacagtctgacaatttcttaaaatgtcaacatacatttaccatatgatccagcatttctactaggtatttctccaagagaaatggaagcacatgtatgtataa

SEQ ID NO: 126615 - DNA, 558 bp, Homo sapiens
aataacaaactgacaagttgttcatcataatttaaacttcatcataatttaaaacttacattatttgaaagatattgttaggtaaatgaaaagacaagacatagactgggagaaaatatttgcaaatcatgtcrtatgtcagataaatgacttgtatctagaatatataaagaactcttaaaattaaaaacaacaacacaatttttaaaaaatcagtaaaatagttcaacaggcatttcaccaaatatgatacacaattattaaataagcacatgaaaagatgctcaacatcattagggaaatacatactaaaaccacaatgagatatcccttcccaccatcggaatggctaaaattaaaaagagtcaccataccaagaaaagctgagtatgtgaaggaactggaactcccatacactgctggtggggttacgaaattgtataaccacttcggaaaacagtctgacaatttcttaaaatgtcaacatacatttaccatatgatccagcatttctactaggtatttctccaagagaaatggaagcacatgtatgtataa

SEQ ID NO: 126616 - DNA, 604 bp, Homo sapiens
gcttgtctctctctctcaaggcaatagagtcacatatgtgaaaacattgttcatggtctgccttctttacatgacagatgtgtttatgtggccatgtgtgtgcatgtccgtgcgtgtgtatgcgcccgtgtgtgcacacacacaactttctcatccactgaacttctggtcagggaatgttccaaacattctgctgtcacagtctttgtaaatgtaaagccctgatagataaatacttgaccttggtgtaaacgttccatgggattatagtcttaaggtggaaaaaaaccaaaccaaacaaataactcaggaagcttaaggtgatttggaatggacattygggtcttggattgacactgtttattctgctataattaaaattaatgaaactgggctgtaactagatagactatgtgttaatactgtgccaagtacacatgagattaatatcatcaaggttaataactattttagcaaaatcaacaaagaccagtcatatttcttaatttggatagtgtcatattaaaacaaatttgaaaaaccctcctctttgaacatctgtttatgtaataacatacatgaaggcatttcttggacttgccaa

SEQ ID NO: 126617 - DNA, 503 bp, Homo sapiens
tttcatttctccgaagactattgtgtccattatttgttgctacataacaaattaccacaatactttgtgaaaataatcatttgaaatgttgttagcaggatggtagaccaggaagttccaggctttcattttcccatgaaaattaaataatcaactaattattgactaaaataactttataggagctctgggaaccagcaaaagatttacagcaaccawatggttacacagttgaggaaaaagaatgttcaaatgggagaaaattttgaggcatttttattctacttagcatagttaggaggaagtggtccaattgcccaagatgcaaagagcacagtggaatttgtttccaatattcaggactccgtggtgttcctgagggactgctttctgtcttgcctgacttgcaaatcagacagaaatgccagcagagcttggatgtcaggttggaccctgtggaaggcagtggcaactgctgtggtggacgcaaacatctggaggat

SEQ ID NO: 126618 - DNA, 587 bp, Homo sapiens
tagaatagtagagcagtaaagaatgaactgcatgatgtaatgaacacagatgcatctcaacaggaaaatattgcagaaaagagacaatcacagaggaatacgtacagaatattctatttccacacagttccaaaccatgcaaaactaagttatctatggcagagggacatgaatggatggtgaaaatataaagaaataaaaggaataattaatattaatgccaggagagttgtcacctaaagaggagagagggtgtgataaagtttggctgtgtccccacccaaatctcatcttgaattgtagttcccataatccccacaggtcgtgggagggaacaggtggagataattgaatcatgggggcrgttttcctcatcctgttttcatgatagtgagttagttctcctaagatctgatggctttataaggggctttaccctctatatgcacctaacaatagaaccccaatttaattatctgagaagagaaataggcaatttaataatcatagttggaggcttccatactatacttttaataatggatagaacaactagacagaatagaaaaaaagatgacttgaacaac

SEQ ID NO: 126619 - DNA, 571 bp, Homo sapiens
tcttacaaaattgttcttccaaatcatttaggtaatgtacactctcacgagcagcttatgggcagcttaagtaatcccatggagttactgaagtattaccaaggtatctcactttgccagtctagtagttatgaaatagtacattattattttaagtaccttttatctgaaatttagtgaagttaaccatcttttcttatgtttcttggctgttcaggttcctggtttgtgaattgcctgttcatattctttgcctatttttctcttgggttagtttctgtttctaacttctttatagaaaccttttaaattctggacactaatttatacacacacacatacacacacacaaaagcatacctcaatttactgtgcttcactttattcaactttgcagatattacttttcttacaaattgaaagtttgtggcaaccctgctttatgcaagtctattarcaccattttccaacagcatgtgcttacctcatgtctctgtcattttggtaatactctcaatattttaaacttttttattatttttatatatattatggtgatctatgatcagtg

SEQ ID NO: 126620 - DNA, 550 bp, Homo sapiens
ccaccattttttctaccatcttaattcttgtctacagctccacagatgtaccttgaagtagttttctttttcttcttcatttttttttttcactgctagaaaggctatagatgtttctgtgtcttcatttgttgcttctaattcttaactaaacattcctcttctcttgcaatttacaaaggacaatcttagggcaaatcttaaacatttatctacttctggtatactttaaatagcaawctcttactatttaagtttgtcatttgctaccacatactgtgtaagatacaaaagcaatgcttttctatgttgacttctaattttcttagtaataaatattaaatattgctatttatcgattctggctcatcatatatgaagtccttataacagtttggattaatttctgccaaatttaaattgtatcagtgttcaatttttctgatgtttaatgtaagaatatatataaaatttaaaataacagtttctatgaaacataccttaaaagtcaaataggccttattcagcattactactaaaagtgtgttga

SEQ ID NO: 126621 - DNA, 559 bp, Homo sapiens
tcttgggcaacatttggagtcatttgtgcaccagacttaatgcccaagtctttgttttctgttctttcttgtttcttttatttgtctttcttgtccccagattgcaaacttcagaaggactgtgcctcttctgggaaaaatgcaatacactcagaatgaacaatacttgtttggaaccaaatgtaggtttatatattcctcctgcatatcaacagcatcatcatgaccatcatcatcatcatcatcatctccaccatcgtcaccatcactgtygtaaacatcatcatcatgatgattataatcatacacccatttcttgagtacttaacatgtgtcaggccctgggtaagtgcctctaaacattgtctcattttatcttaatgataaaacattatctcattttattttcacaatggggcaggtttctttatcttttttctttctttctttttttttttttttttacaaatgaaaaacctgaggctgaggttattgtatgcagagccaagatttgagttggatttgtctgactcccaaagcactttaacactaataattt

SEQ ID NO: 126622 - DNA, 698 bp, Homo sapiens
tataaactgtcttttgaaaaggaccaaagcaagacaaaatgtctgtggaagacaaaagtctatagccactattaaagctacaattgactagtaattttggttaattttgtggcatacaacaattttacataacaattataattattamtaatgtacactaaagtatattagaattatatgagttacccataagttttagaacacatactaataacatatttatacaaatatagtttaaagaaaaccaaacaccattcacttttttatttgaaagttttctaatatcataatctccagagttattaatcagaaacttgcatttaagagtacgtattaaattttatagctgattataaaaccattttttaagaggaccaaaatgagacaacaattgtctttggatgacaaaatcactttagggcagccaccgttaaggacaggattgacaaggaaattagttacctctgtggcacacaaccatttaacataattataattattactgacaacatatattaagtcatattagaattataggagttttacaaaattttgcagcatatgccaataatacatttatacaaatatagtccaaagaacgctaaacaccatttaatatttgacaatgtttcctgtatgatttttatacggaataagccaaatgttatttctggactttagaggacctaatatttaaa

SEQ ID NO: 126623 - DNA, 536 bp, Homo sapiens
gtcatattagaattataggagttttacaaaattttgcagcatatgccaataatacatttatacaaatatagtccaaagaacgctaaacaccatttaatatttgacaatgtttcctgtatgatttttatacrgaataagccaaatgttatttctggactttagaggacctaatatttaaaagattaagctagaaagagacataatttacaatttgattttggaaagtttgtcaaatatcaaaagtttagaatactggatatcacgaaatagaatctcaggtcaccataagtcattcatttggccaaaatgataatttcaaaatcttaaaaagaaaaacctttactctgatagaggagacttagctttccaaacaagacccaataaaaataacatgaggctaactgaaattgtctcttttttctccttcctttttcccctgccatttacccaaaggagaaaacaaaaatctttcattattttttaatattacataccaattgtcttcaaaagagaaaaccaaatttcatgctggcatt

SEQ ID NO: 126624 - DNA, 595 bp, Homo sapiens
tttagtgaaaaacctgataagtaagcgattttaattatatactggggtagagctagggcatgagacagaagtgaagataaagtctggcttttttcagcatagctaggggcatggctttccacatgtccccaggccttatctttagtttaatgattcaaagtaggtaaactgaacaattttcaaaagttaaggaaacagtctgaccttaaagcatttagcaaatctgatatctgacsttaatttagaccaaatatctttattttcaagacattttagtaataatctttacaactgtctttatttccaaaagattactaaactgatgtgaacaaaaggcattagtttctattttttgacaaaatattcgatttaagcacttttaaagcctattaatcagagctttttaatacataaacattatacacacacaacacatatacagacagaagatttagcacctgtaattttttcatttgccagtttctttttttttctattgataactctttttatttttattttttatttatttatttttttaacctttctttttttattattatactttaagttttagggtacatgggcacaatgt

SEQ ID NO: 126625 - DNA, 552 bp, Homo sapiens
gagcggggcatgcaggagactagagtttttttttactcaaatcagtctcctggagcattcgtggagccaaatttttaagaacaacttggtagggatggggtggcggggagccagtaagccaggagtgctaatcggtcaggggtgaaatcatagtcttctttcactgagtcagttcctggatggggaccacaagatcagatgagccagtttatccatgtaggtggtgccccgatccatcaagtgcagggtctgcaaaatacctcaagygctgatcttaggagcagtttagggtgggtcagaatcttgtaacctccagcttcatgactcctaaaccataatttctaatcctatagctaatgttagtctagtccccaggcaagaagtaaggtctactttgggaaagggctgttcccgtctttgtttaaactataaactacaaagtaagtttctcccaaagttagttcagcctacgcccaggaatgaacaaagacagcttggaggttagaagcaaaatagtgtcggttaaattagatctctttcactgtctcagtc

SEQ ID NO: 126626 - DNA, 638 bp, Homo sapiens
tattcactaccactagaacagtatggggaaaactgcccccatgatccacttacctctcacgaggtccctcccacaacatgtgaattatgggagctatagtgcaagatgagatttgggtggggacacagccaagccatatcagacagtaataactttcaattaaatatagctaggctttctgtcagtgggtcacagcagtctagagaatacatcaaaaaactctgggaacagcagatatagaggttasatctagagattttgaacaaagtttagtgctacaatgcattggtgaccacagacaaaaggtgcctgttgttgttatagtttgttttctgtcttgtttttcatcatgggaggacaaaaagaaaaaatgggggcaatggtgaaggggaaatgaaaaagacctgcttttctatgggtggaagcgactaaacgagagaataaatttggattacacaacaaatgcaaatcaagttagaagcatgaaaggcatgattaaggccatggttctaatagagatcagccagcggaaccaggagcatgccacacccagagaggctgcagagccattgccttctctcctgtcaatgctaaattaacgaaatggaactcacagaagcctacgtaatcaaatattg

SEQ ID NO: 126627 - DNA, 638 bp, Homo sapiens
tattcactaccactagaacagtatggggaaaactgcccccatgatccacttacctctcacgaggtccctcccacaacatgtgaattatgggagctatagtgcaagatgagatttgggtggggacacagccaagccatatcagacagtaataactttcaattaaatatagctaggctttctgtcagtgggtcacagcagtctagagaatacatcaaaaaactctgggaacagcagatatagaggttacatctagagattttgaacaaagtttagtgctacaatgcattggtgaccacagacaaaaggtgcctgttgttgttatagtttgttttctgtcttgtttttcatcatgggaggacaaaaagaaaaaatgggggcaatggtgaaggggaaatgaaaaagacctgcttttctatkggtggaagcgactaaacgagagaataaatttggattacacaacaaatgcaaatcaagttagaagcatgaaaggcatgattaaggccatggttctaatagagatcagccagcggaaccaggagcatgccacacccagagaggctgcagagccattgccttctctcctgtcaatgctaaattaacgaaatggaactcacagaagcctacgtaatcaaatattg

SEQ ID NO: 126628 - DNA, 629 bp, Homo sapiens
tgttctagttcttaacctcctcacagtcacatttacatgagggaattcacgtggtgccatttctttcctgtgttttgccaccagagttcagtttctgtattttaatgcgtggtatatgtactttgttaagatgatcatgaattatcattctttgacctttacattgccctacagctttgctcatcagcaactgcctttatcggttatttatagcatcatggcctgtgatggaaaggccaatctaaattctgaatatataaaagatgcagataatgctggaagtatttcagaaggtaaacaaatatcaccacagtgttttgtggcctatcactgtttttataataacatgagtacaaaatgtcacaactggaatttattctaaggcaatgctagcagtgagatggaaattttacaagctttaacagtttaaatactgttgaaaggaaactttgatttgaacatgaatagtgaamgggtctaatccaaatgagtcaaattcaggataatttaagagcatattttcccacttcataaaattatatcattgcatttcatttctaccctgagctttgaaacagtgttgattatattgacagacatatagattgttcataatttacatattttag

SEQ ID NO: 126629 - DNA, 660 bp, Homo sapiens
ccctaattaccctgttctgatcattacacaccatataaaatcaaaacaattgaacacacagacatgcagaatagaaggatggtgttaccagaggctggaaaaggtagtgggagtctagacgaaatgtagggatagttaatgagtataaaaaaaatagaaagaaacaataatacctactacttgacagcacactggggtgactacagccgataataacttaattgtacattttaaaataactaaaagaatgtaattggactgtttttaacacaaaggataaattcttgaaggaatggataccccattctctatgacgtgatttctcatttcatgcctgtatcaaaacatcatatgtaactcataaatatatacacctactatggacccacaaaatttttaaaaaagataaaagcattacyatgtaccccataaatatctgcaattattatttgtcaattaaaaattaaatttaattaaatattcaagaaagaaacaactttagcgtaaggtcagcagtaggttggtaggtagcaaaattctaattcaatttttttcattccaaacccaattctctatccaatatttttcctccccactataaaactatggaggataactatgtctctggcattagcttcagcatgttgttttcactaccaa

SEQ ID NO: 126630 - DNA, 660 bp, Homo sapiens
ccctaattaccctgttctgatcattacacaccatataaaatcaaaacaattgaacacacagacatgcagaatagaaggatggtgttaccagaggctggaaaaggtagtgggagtctagacgaaatgtagggatagttaatgagtataaaaaaaatagaaagaaacaataatacctactacttgacagcacactggggtgactacagccgataataacttaattgtacattttaaaataactaaaagaatgtaattggactgtttttaacacaaaggataaattcttgaaggaatggataccccattctctatgacgtgatttctcatttcatgcctgtatcaaaacatcatatgtaactcataaatatatacacctactatggacccacaaaatttttaaaaaagataaaagcattactatgtaccccataaatatstgcaattattatttgtcaattaaaaattaaatttaattaaatattcaagaaagaaacaactttagcgtaaggtcagcagtaggttggtaggtagcaaaattctaattcaatttttttcattccaaacccaattctctatccaatatttttcctccccactataaaactatggaggataactatgtctctggcattagcttcagcatgttgttttcactaccaa

SEQ ID NO: 126631 - DNA, 495 bp, Homo sapiens
ttttaatgtgaataaaatgaggccctaaagcactgattgcctttagaagaaacataaaaggaaggggaaaacatgaataagtaggagatgaaaaacaggaaaccggtctgggcttcaacttatcagtctcaaagggtttccattcaaatttactctctctatattgatttagctcagtttcacttcaacacattttagtaaccttgtatataattttaaagaatatcctttctttcctaggcttaaattaaaaaggaaaaataatgatggaaacaattaaatacgatttttttttgccataaaagaaagaatttatgaccctacttggacaattaattcaaaaaagagaataaaacattaaagtcattctaggttatatacagctttttgaagcataaagaagtgatccgcacagtytgggtattctggcactctgttttggattaacttgatttcttgccactttctaaattaaatatagatgctagaaactac

SEQ ID NO: 126632 - DNA, 609 bp, Homo sapiens
gtgttgcactttccccctttccccttcattctcttcctcctactccagccatgtaggaaatgctggcttccctttgccttctgccatgattgtaagtttcctgaggcctcccaagccatgcttactgtacaggctgtggaactgtgagtcaatgaaacctcttttctttatagattacccagtctcacatagttctttacagcaatgtgaaaacgaactaataaagtaggtgaagtttaaaataatgaatggcagctgacaaccttggtgtgggtgyataatagggaggactagtgtctgcggcagctgaggagcaatgtcttcttgtgagatatcctacttttgaaatattggcaaccaatctgactcaagagcactcatggagttaaacgaaactgttatggactgggtccagcccaagggccaccatttagtcttctctatcgtaaatggtgagatagtcaaggatggggatgaatttatttcttcctgttaactgtggaatcacttggcgcaatgcctaagtagacactcatttttctttttttaatcaaaagttctcagcaagctataagccagacattagctaagaagaaatacaatataatg

SEQ ID NO: 126633 - DNA, 535 bp, Homo sapiens
aatagagttgaccaacacagtcagtgatctgcacctaagggcatatgtaacacagtttcacagcttcagatatgtatcattttcaagcacacacagaacatttagcaargaacaaaaaagggttataattttaagtagtaatttttgatgggttaaagtcacctagggtataccttctgaattaggcttgagatcaatgacaagacaatgtctaggaaactcctgttgtttaggaaaaagacacttttaatagcccatgcccccctcctaaatcacattaaattaaaaatattttgaaacagaaataacaagaatattgcataacataaactgtgggcatttgctaagccagtagatagagaaaaatgttttgccttaaaaaattatattagaaaccaattaggtaatagcacaaattaatgaaatagaacacaaatctaagatggaggacttcagaagaccaataaaattttcaaaaccctgccaagaataaagaaaaataaagacaaaactatttaattaatatatatttatt

SEQ ID NO: 126634 - DNA, 519 bp, Homo sapiens
aggactgggaagaaggacatatgaactttatttggagattgttttctttacaccaactttccattaaaacaaaagatttaaaaatgagataaattgctaaaatgaaaaactaaaataaagcaaatatagtgaaagagaaaaaggataaaatagattaaaaataataagagattatgtcaagcaatatccttaagctgatttaaataacttaaagtgaccgagcgcagtggctcacacctttaatcccagcactttgggaggccgaagtgggcggatcacctgaggtcaggagttcaagaccagcctggccaacatggtgaaacccagastgttctaaaaatacacaaattagctgggtgtgatggtacacacctgtagtcccagttacttgggaggctgaggcaggaggattgcttgagtcagggagatggaggttgtagtgaaccaagagcatgccactgcactccagaccaggcgatgagagtgaaaccctgtatctcataaataaatagcttaaag

SEQ ID NO: 126635 - DNA, 593 bp, Homo sapiens
attcccatcttcaaacccccatgtacttctttctcatacaagtatccttcttagatatctgctccacacccacggttctggtgaactgctagaaggactttccaagtgtatcctatagtggctgcttattctaaatgactatctttctttacttaggggtgacggagtgtgttttttttttgttctgttttgttttgttttttgagtcggartctcactctgtcacttaggctggagtgcaatggcacaatcttggctccctgcaacctccacctcctgggttcaaacagttcgcctgcctcagcctcccgagtagctgggattacaggtgcccgccaccatgaccagctaatttttgtatttttagtagagacggggtttcaccatattggtcaggctggtcttgaactcctgacctcatgatccgcctgccttagcctcccaaagtgttgggattacaggtgtgagccaccatgcccagccgagtgttttcttattgctgttatggcctatgacaggtttgttgccatctcaaaacccttgtgttacccattcattatcaatagcaatgtttgcatctggatggtggcagg

SEQ ID NO: 126636 - DNA, 631 bp, Homo sapiens
agctaaggtggtgctaagaggaaagttaatagcattaaatgcatatatcaaaaagtctgaaagagcacaaataaacatctagggtcacacctcaaggaactagagaaacaagaacaaaccaaactcaaacccagcagaagaaaagaaataaccaaggtaagagcagaactaaatggaattgaacaaaaaaatacaaaagataaatgaaacaaaatgctgcttctaagaaaagttaaataaaattgttagactattagcaagatttaccaagaaaagagagcagatcaaaataagctcaattagaaatgaaatgggagctgttacaactgaaaccacagaaatacaaaattttattcaagattactatgaacacctttacacacacaaactagaaaacccagaggagaaggataaattcctggaaatatacaaccctcctagcttaaatcaggaagaattagaaaccctgaacagatcaataacaagcagtgagattgaaatggtaattttaaaattaccaacaaamataagtccaggaccagacggattcacagttgaattctatcagaactcaaagaagaattggtaccaatcctattggcactattccacaagaaagagaaagagggaa

SEQ ID NO: 126637 - DNA, 495 bp, Homo sapiens
tatgaaagactaaactcaaatgataagtaagggctaytgagaaaagtaaagcatgtgctaaggatgaaaaagaaagaaccattgagacagaagaaattttaaaaatcataagagactactcacattcactccatgtaaatacatttgaaaatataattgaagcagataatttcctgtggaaatacagattttcaaaattaatcctattgaaaagcataaacagactgattttcttagatgagacagagaaagtaattaagtaacttcaccctctttcaccaggaaaatgctgacccagatatttccaaagtaaaattctaccaaacctacaaaaaccagatacagttaatacttcataaatggttcaagataattgttaatgaatcagactgtctatttttatcaagtgagttaacattgataacaaaatttgatatagaaacatatttgtgaatattaatacaaaatactagttaaaatattaaaaggctgagt

SEQ ID NO: 126638 - DNA, 495 bp, Homo sapiens
tatgaaagactaaactcaaatgataagtaagggctactgagaaaagtaaagcatgtgctaaggatgaaaaagaaagaaccattgagacagaagaaattttaaaaatcataagagactactcacattcactccatgtaaatacatttgaaaatataattgaagcagataatttcctgtggaaatacagattttcaaaattaatccyattgaaaagcataaacagactgattttcttagatgagacagagaaagtaattaagtaacttcaccctctttcaccaggaaaatgctgacccagatatttccaaagtaaaattctaccaaacctacaaaaaccagatacagttaatacttcataaatggttcaagataattgttaatgaatcagactgtctatttttatcaagtgagttaacattgataacaaaatttgatatagaaacatatttgtgaatattaatacaaaatactagttaaaatattaaaaggctgagt

SEQ ID NO: 126639 - DNA, 497 bp, Homo sapiens
agacttgttcctcctctgagggctctgtatcaaccctaagtgtactggctggtttttttttacatctactattcctgtattcttcagcattctctttgtctcttactagcaatctccaattacttcaaaccacggttatacttaatattctttataataaaatttccctgatcagattattaatgtattttctgtttyctggttggaccctgactgatacactacactaaacaagtaatcaaagttcatatcatcagcaataagacatattgacctcatgtgcctcctgatatgtggcctctccctcttcagagcatcatgccacattttagaattcttgcaaaaaatgaataacctgaattcaagcaggaggaaacatcaaatagacccaaatcaggacactattaaaaaataattagccaatatttctcaaaagtgaaagacaaatatttaaatgaaaaatagtattttaagcctgctaatgatctattatcaca

SEQ ID NO: 126640 - DNA, 589 bp, Homo sapiens
atacatcaattgattaataaaatttcacttataaagtatggctgtggataccacttttggcaactatttgtagttgagaagtcatgggaccattatggctcctgccccatgttagtctaagaaattattgacttggcacggtgactcgcacctgtaatcccagcactttgggaggctgaagagggcagatcacttgagcctaaaagtttgggaccagcctgggaaagatggtgagaccccatctctacagaaagctgaaaaattagctaagtgtggtggtgcatacctgtggccccagctacttgggaggctgaggtgggagaattgcttgaaccsaggagactaaagctgcagtgagctgtgttcatgccactgtgctccagtctgggtgacagagtgagaccctatttcaaaaaaagaaagaaatttcatcatttaattcaaacgttgaagtttgttgttgttgttgttgtttttgagagcgtctgctattggtgccatgtggcaaagatattgtgaagttatctttaatttctggctatgttaaactttttttgaatgaaaagaacatggtgaataatgccttgta

SEQ ID NO: 126641 - DNA, 597 bp, Homo sapiens
aggtgacctacttctctgtcacatacagttatttacttatttatttagagacagggtctcttctgtggcccaggctggagtgcagtagtgggatcacagctcactgcagccttgaactcctgggctctagtgatcctcctgcctcagcctcccaaatagctgggaccacaggtccgtacccccttgccaggctaattttatttattcttttatagagatgaggtcttgctatgttgctcaggctggccttgaactcctggtctcaagtgatcctcctgctttagcctcccaaagtgctgagatgatagttgtgagtcactgtgcctggtcacatatttctttttaaattaaattaaattttttttttttgagacggagtctcactctgttgcccaggctggagtgcagtggcrccatctcagctcactgcaagctccgcctcctgggttcacgccattctcctgcctcagcctcccgagtagctgggactacaggcgcccgccaccatgcctggctaattttttgtaattaaatttaattttttacaaccctttatacatgtaaaaaccattcttagttcacagccagatttggccc

SEQ ID NO: 126642 - DNA, 603 bp, Homo sapiens
agtgaaatccctgtgaaatgtgatcaagaacacaaaatgctgaggcagctccagctaacatcagcgctcagtctccccgcccaggtgggatcctccaagcgcctcaacgcaccgcccatcccggtgccaggtgtaaatgcgccccagcaacacgtggctctaggagccgcagggatggcatccccttgctgcagaagactcagccacgtgaggtcaatgttcatttccgcagaggtgcctctctctgggggggcctatatgtgaatccacctaggaggagctcgctgaagaattggtattattaaagatagcttagctcgagcagattttctcacgtttctaagcgactcggagaggacttacacyaaaggcatttcgcttttgcattgatttcttaattaaaaaatatctttctttttcctttggcccaggctgaaagaccttggaatttcttgtgaaagtcctgggggaggtggggggtggcgagggggttttcagagcattgaaatcacttttctcagataactggaaagagacccccaacttcttgatgactacatggacagatggattccttatttgcaaaatcttgagtgtttctaa

SEQ ID NO: 126643 - DNA, 547 bp, Homo sapiens
ggtaaataagagttgatctggatttagagctaaggtccttttgagaattttctccctgaggcygcagttgaagattcattttggggttgccctgttcagcaaggaggctctgaggagtgcaagggtgtggggacttctaagaatgtgttttttgagtcaaaatagaaacttttccttacattctgactcacaggggattagaaggtagtgcatggattagacgaaaatgcctcagttaagaatttaatcctgttaggcaacagtaagtcactatttttaaagggttttgtgccaaaaagtagaaaggaaaaaaaaaagtggcatccacagtttgcaggagataattgtttctaaagagctgcttgcttgaggcctcttgaatgctacattttcttccaggttcttctaaagagaataatgggtttaaattgggggtgtgagcgctaccttggctaggggttaccagtggggctgttttggcttcaggtgatgcccagggctggagctggaagagatgagaggagccaggagtgagggattctggctt

SEQ ID NO: 126644 - DNA, 583 bp, Homo sapiens
taaaataattgaactcatagatatagagagtagaatgatggttaccaggggttgggatgtgtgtgtgtgtgtgtgtaattactgrgtacaagaaaaatataattagaatgaataagacctagtatttgatagcacaacagggtgactacagtaaacaatgatttattgtacattaaaaaataactaaaagagatcattggaatgtttggaacacaaagaaatgataaatgcttgaggtgatggattttaaaaaaaaagttgatctcatgaagatagtagaatgatggttatcagaggctggaaagggtgggtggggagatgcacagaggttcgctaatgggtgcaaacatagagttagatagaagaaataagttctaatgtttgatagcacagtagggtgacaatagttaagaataattttttgtgtatttcaaaatatctagaagagaagatttgaaatgttcccaatacaaggaaatgataaatgttttaggtgatagacattctaattatcctaatttggtcattacacattgtatgcttttatcaaaatatcacatgtgctttaatatgtacaattaca

SEQ ID NO: 126645 - DNA, 644 bp, Homo sapiens
ttatttattttttaggggttacagcttattgtctttctcacttcttagggtactagtactctaggtatgttgatacagaaaatgagcctatcrctgggatacaaacttcagaaaggcagatatttttgtctattttgctctcttctgtattctaagcacctagaacagtgcttggtacatagtaggtactctataagtatttgtatttgaatgaagacttattctatttattcatgatgtctcttaaaatatctctccttgcctgtgtttctcttatccctgattaatgtctctccattttctggcacttaatctgagctttgagcatgcaaaggacttagccttcacctatgctgacaggccatggtatccctgtgccattttgtgctttattcattctggccttcacatatagcttggacgaagagttctaaatagctaaaaatgacagaatatgaagtttgtcatgctctttctgtttaaaatcaaccaaaagatctccctttctttcttcagcaggcagaagaagtggatttgactaagcaaattggtaggagtaattggcatccttcatcaaagagagacctccccacccaccaatgtagccgttaaagacatgattctgtctattaattctgtagatt

SEQ ID NO: 126646 - DNA, 551 bp, Homo sapiens
gtgggaaaccagtattggggagcatctactccagccttgggggtcatagaagtctgcctgctttccagaagaggtgatatctaatctgaccacttcttactgccaccactgctaccatctggatcctgtgagtcctgtctggttttctctcttctaccttcatcacccagtaagttaattctcaatgcagcaggcagaagaatcttattaaactgtgagatcatgttagttctctgctttaaacccagaaatggtttatcaccttatacagagtaaaagccccaatccttagaatctcacagccctgcttgatcttagctgcctgtttcaagttcatcaactaccaatcttctacattagatcctaactgttcctccaactcatacgttgcattaagacttttgcagttggctgttccctctacctgaaatgatccttactcatatagctttaagaagtttttacyttgatttcctcatttgctactaaaatggcattttatcaagtaaggcctttccttattcctccactaaagtcacaactttacccca

SEQ ID NO: 126647 - DNA, 554 bp, Homo sapiens
cagctccatattctgtgtttgcttgcaataaatgtcatcacatttccactcagttgccaagatagaaacctgacattcatcatggactcctcattcttccatatcccccacataaaatcacactaacatctgatatttctaccctatatttgttggatctgttcattttgcttgtttaaagttttgagctattgcttggtaaagctgccacgaacattcttatacattttggtgaagaaataaatgcatttctgagagtatgtaaataagagtggaatttctggataataaatagccaactatttggatttagtagatactgacagatttccaaagyaattgtaccaaattacactctttccaacagtatatgggaactccagtgctctacatattgtccaacatttggtatcatcagtccttctaatttttgcctcaccaataggtatggaataatatcacttgaggttttatttgtattttccccaaatgactacttaattattattaagtgggtcatctcccactccccgatccactgttgcagacacagc

SEQ ID NO: 126648 - DNA, 524 bp, Homo sapiens
tccacccactggttttagcatccattgatgattgttccctgaatcaattactattataaggattaacaaattgagatctaactccataattttctcttcatttattagtactaaatactattttaaacaaaatggaggctgaatccccgaagaatggctaattccagggcaagggatagaaaaggcaaaataagtctgaactatcttgtatagcaagaaagcatggagtttctataaaaatgatgggaatatgtcaaaatgataccagagctggcctgaaggggctctactcaatacatcttggataattagagcaccaaaatgaatacaataatatgaatgatgggctataatccattgactaaaataagaataataatgtaagcatctatgaggccattgmatggatggagatggaagccattatcctcagcaaactaatgcaggaacagaaaaccaaataccacgtgttctcacttataagtgggagctgaatgatgagaacacatggacacactgtggag

SEQ ID NO: 126649 - DNA, 574 bp, Homo sapiens
tagataatacctgtctttttctttttttactgttggttgtttgaagtctgttttatctgatataagaatagcaactactgctcttttttgttttccatttgcatgatatatattttccacccatttactttgaacttagggygtctacatgttatatgagtctcttgtagacagcagatatttgttttttttaatctaatttgtgaatctatatcttttaagtggagtatttatgctatttgtgtttaaggttaatattgatagtgaagtttggttcctctcatagtttcattatctggttactttttagtctcaactatgtaattgctttacaggaactgtgaaatttttacttatgtatgtttttatggtagcaagtatcatccttttgcttccatgtttagaactcctttgaacatttcttgcagggctgatctagaggtgatgaattcccttagtgtttgcttgtctgtgaaagactttatttcttctttatttatgaagcttaggtgggcaggatataaaattcttgactgactttttttttttttttttattctgtaaggaggctaaa

SEQ ID NO: 126650 - DNA, 574 bp, Homo sapiens
tagataatacctgtctttttctttttttactgttggttgtttgaagtctgttttatctgatataagaatagcaactactgctcttttttgttttccatttgcatgatatatattttccacccatttactttgaacttagggtktctacatgttatatgagtctcttgtagacagcagatatttgttttttttaatctaatttgtgaatctatatcttttaagtggagtatttatgctatttgtgtttaaggttaatattgatagtgaagtttggttcctctcatagtttcattatctggttactttttagtctcaactatgtaattgctttacaggaactgtgaaatttttacttatgtatgtttttatggtagcaagtatcatccttttgcttccatgtttagaactcctttgaacatttcttgcagggctgatctagaggtgatgaattcccttagtgtttgcttgtctgtgaaagactttatttcttctttatttatgaagcttaggtgggcaggatataaaattcttgactgactttttttttttttttttattctgtaaggaggctaaa

SEQ ID NO: 126651 - DNA, 528 bp, Homo sapiens
tttttggatctcaatttcgttcagttctgccctggtttagttcttttcttctctagatttgaggttagtttgtccttgattttctagytcctataggtgtgatgtcagattgttaatttgagatttttctaactttgtgaggtaggtgttcagagctatcaattttcctcttaacaccacttttgctgcatcccagagattttgatattgtgtctctgttttcactgatttcaaagatttttttcatttctgcttcaatttctttgtttacccaaaagtcattcaagagcaagttgtttaattttcctgtaattgtgtggttttgagaggtcttcttggtattgatttctatttttattccactgtggttcaagagtatggttggtatgattttgatatttttgcatttatggagacttgctgtatgactgagcatgtggttgaccttagagtatgttctgtgtgcagacgagaaaaatgtatactctgtggttggtgtatagaatattaagtgtctattatgtccaa

SEQ ID NO: 126652 - DNA, 539 bp, Homo sapiens
ctttctccaaagacctgttttttttttccctccccaaaactgattaggcagcggagcaggcattggctgaaattttgtaatattgattaaagttaagatgtaggcaacaatgaagaattactagttttccttaaagttttttaacattttaagaacagtatttggatgcagaatacaataaatgattgctattaatatttagagtcttgatttaaattaccattaaagcctttctttctgcacattagaaaagcagccacggcatgtacgcaataatgtatttctcactcagcttattcaatggtgyaactattatgtaaaaggctatgagttaatcttgaagaagatgcaaagtataaaggacatgattttggcttcaaagatcatatggcataggggaggatcacacaatagaacaaataaaatgaaaggtaaaatataaatgccataagggtgatggtgcaaagtgctatgaaaatatattatccaaggcactcaggatagatttcatgaaatggtatttgcttcatcataagttg

SEQ ID NO: 126653 - DNA, 595 bp, Homo sapiens
tatttagagtcttgatttaaattaccattaaagcctttctttctgcacattagaaaagcagccacggcatgtacgcaataatgtatttctcactcagcttattcaatggtgtaactattatgtaaaaggctatgagttaatcttgaagaagatgcaaagtataaaggacatgattttggcttcaaagatcatatggcataggggaggatcacacaatagaacaaataaaatgaaaggtaaaatataaatgccataagggtgatggtgcaaagtgctatgaaaatatattatccaaggcactcaggatagatttcatgaaatggtatttgcttcatcataagttgtgacatatttacaggatctggcaaaacaaaaaacaagaagatggaggcagtaataggcagaggcctgaggagacagatatagatggytgattaatgagattccctagcgttcccattgcccatatgctagactgagtcatcatgatcagtggagcttcgcagagaaaacttcagatcactgtaatctgagtcattagtcagtttccaaaaataagatcattttacataggtaaagattatatggtagatta

SEQ ID NO: 126654 - DNA, 567 bp, Homo sapiens
tgggaagaaatgatgcatgagctatggcaatggatattctgttcattattctccaggtccttccttttcttgctctagcaaaccctgaagcctcatctggcaatgttgaaaattctgtcagcctggatccctgagtgaccatgtggaggagagtgccatccccaacccctatcctgcacctctataacttggattagaatgcatgaacaaaagataaactttgggtgtactgtgagatctgctaactaacacctaaggtgtggtcacagatctactaccaagtcttttcccccaaccaaacagcttgaatatatggagtgaggattactggagagactagcaagggaastttattctgccttgagatgcccagttccaaggagcaactttctttgcatttcatatgcaccaaatacaaggagagatattaaaatgtatatagaagaaaagaatcctcagaacaacagtttagatttataataacaaacttcagaaaactcataaaagcccatctgttctgtgaagcattccaacaaaaatgaccacttggcgctcactgttctgtgc

SEQ ID NO: 126655 - DNA, 617 bp, Homo sapiens
tcaaatatattctacatttataagtaaaagagrattatacttctgacttatcattttccacatcttaagctttaattgaaatatcaatatcaaaagtatcaatatccacacactatgacttgaaattggactagaaaaactaagaagctatagagtgaaagcattttaaatgacagagcatgatgcaagccaaataattatagtttcttaataagtaaattagtgtacgataattttcctatatatttcaagttggaaaaaattaaattattcactttctatcaaacgaaaaaagtagctctaatatgcaagaatttttcatgggtcacttggaagtttatcctttaggcctgaagtagattgggtttctgaacataactagtcattgcctatcacacgatttaacatcacttataaataaaaaacccaaacatctttataattttgttccatgtctcttaggtattattttaccatatcaatagaataaatagcaaaacatagtattgtttttcaataataattaataaatacataccatatactgaatcatctcactagattttcttttttctttttgaagaaaagggccattcttgtgttttccatagagctta

SEQ ID NO: 126656 - DNA, 617 bp, Homo sapiens
tcaaatatattctacatttataagtaaaagaggattatacttctgacttatcattttccacatcttaagctttaattgaaatatcaatatcaaaagtatcaatatccacacactatgacttgaaattggactagaaaaactaagaagctatagagtgaaagcattttaaatgacagagcatgatgcaagccaaataattatagtttcttaakaagtaaattagtgtacgataattttcctatatatttcaagttggaaaaaattaaattattcactttctatcaaacgaaaaaagtagctctaatatgcaagaatttttcatgggtcacttggaagtttatcctttaggcctgaagtagattgggtttctgaacataactagtcattgcctatcacacgatttaacatcacttataaataaaaaacccaaacatctttataattttgttccatgtctcttaggtattattttaccatatcaatagaataaatagcaaaacatagtattgtttttcaataataattaataaatacataccatatactgaatcatctcactagattttcttttttctttttgaagaaaagggccattcttgtgttttccatagagctta

SEQ ID NO: 126657 - DNA, 617 bp, Homo sapiens
tcaaatatattctacatttataagtaaaagaggattatacttctgacttatcattttccacatcttaagctttaattgaaatatcaatatcaaaagtatcaatatccacacactatgacttgaaattggactagaaaaactaagaagctatagagtgaaagcattttaaatgacagagcatgatgcaagccaaataattatagtttcttaataagtaaattagtgtacgataattttcctatatatttcaagttggaaaaaattaaattattcactttctatcaaaygaaaaaagtagctctaatatgcaagaatttttcatgggtcacttggaagtttatcctttaggcctgaagtagattgggtttctgaacataactagtcattgcctatcacacgatttaacatcacttataaataaaaaacccaaacatctttataattttgttccatgtctcttaggtattattttaccatatcaatagaataaatagcaaaacatagtattgtttttcaataataattaataaatacataccatatactgaatcatctcactagattttcttttttctttttgaagaaaagggccattcttgtgttttccatagagctta

SEQ ID NO: 126658 - DNA, 662 bp, Homo sapiens
agcaaacatgaagttcttttgttttcttgcccttttcagccaatgaaaccactccattctcccatttctaggtttcatctttcaaacaggaaataacctgtagtactgtttaataactcatagcaatagtaataatggtaacagtaatgttgaaatgaggtctttattgccaacatcttgcaaaagaaaaaatccacaaataaaaaataagtacatttattttgtgtatatgatgactttttgatgatacaggaccagaaagcatctggatttttccatgtcatttgtgttcatacatagtaattatttttcctcatatctattactttatgtatgtgttgattattttccttctatttctactttccttgctctttaaaaccttggtgtttgaaaatatggtgaactgacaaaggcacattaaaccttcattccccatggcctgtcaccactctgggaggagggtaagcagagtcagaggtgtcccaggagcagggaagagaaccacacataacagcagttcaggacggcggtagcagcatcgcatcggctccatctttacttgcacactcaggccctgcaaatatttcaggcacacacgtkgtgtagtctacatcagagtgacacttgaaatggtttgtggagggctactgaacagaaat

SEQ ID NO: 126659 - DNA, 608 bp, Homo sapiens
tgtgatgggccttccccatttcatgggctttactctatttgggaatttactgctgggtgtttgctttctattatattcttccatggaatcatgtcattttctatttcctctgtaagatctatgagaaaacagcctcctagatgagcatgctattaatgtattagggagaaaatggcatccaaaagactatgaaataccagggccaaattacactggctctttgtgaagcaggcatacctcatccatttcatctctagctagttatttctgtagctgcctcttaaaaatcatttaaatcaaaccacacttccacttacagacagaygaaatcacttgcagctaatccatctcctactttattgcccatagaaatgaagaacaggttgcacaagcacagcgtacaacaggaggctcagagacagcagccatccatttcctcatagtatacaagtttgatcatgtttgcctaattatcccattaacctgtacctaaagatccaattactccagctgtgggtgattgaataaagggcaattgcaacagataccaggcaggggacacgtgtattcctcatttgtaaagtttgtaattgctagttcagtctttc

SEQ ID NO: 126660 - DNA, 608 bp, Homo sapiens
tgtgatgggccttccccatttcatgggctttactctatttgggaatttactgctgggtgtttgctttctattatattcttccatggaatcatgtcattttctatttcctctgtaagatctatgagaaaacagcctcctagatgagcatgctattaatgtattagggagaaaatggcatccaaaagactatgaaataccagggccaaattacactggctctttgtgaagcaggcatacctcatccatttcatctctagctagttatttctgtagctgcctcttaaaaatcatttaaatcaaaccacacttccacttacagacagacgaaatcacttgcagctaatccatctcctactttattgcccatagaaatgaagaacaggttgcacaagcacagcstacaacaggaggctcagagacagcagccatccatttcctcatagtatacaagtttgatcatgtttgcctaattatcccattaacctgtacctaaagatccaattactccagctgtgggtgattgaataaagggcaattgcaacagataccaggcaggggacacgtgtattcctcatttgtaaagtttgtaattgctagttcagtctttc

SEQ ID NO: 126661 - DNA, 608 bp, Homo sapiens
tgtgatgggccttccccatttcatgggctttactctatttgggaatttactgctgggtgtttgctttctattatattcttccatggaatcatgtcattttctatttcctctgtaagatctatgagaaaacagcctcctagatgagcatgctattaatgtattagggagaaaatggcatccaaaagactatgaaataccagggccaaattacactggctctttgtgaagcaggcatacctcatccatttcatctctagctagttatttctgtagctgcctcttaaaaatcatttaaatcaaaccacacttccacttacagacagacgaaatcacttgcagctaatccatctcctactttattgcccatagaaatgaagaacaggttgcacaagcacagcgtacaacaggaggctcagagacagcagccatccatttcctcatagtatacaagtttgatcatgtttgcctaattatcccattaacctgtacctaaagatccaattactccagctgtgggtgattgaataaagggcaattgcaacagataccaggcaggggacaygtgtattcctcatttgtaaagtttgtaattgctagttcagtctttc

SEQ ID NO: 126662 - DNA, 613 bp, Homo sapiens
aggcttcccagcaccaggcctccttgagtcagtatcatctcactcccacagattcaaatgcaccgccttctcccggtggctacagcatcctccttaactccgggccttatcscctttcaggctagcgattctgacagtctccagtatgtctctgcaggtcacctcaccctccctgagaaaccctcaagggctccccactgcctataagatgaagtccagccttctcagcattcaaggccttccacaatctggcccccatctacctctgtgtccccagaagcagccctaaatccccttgagagttaactccacggggacagaggattttgtcagctttatttattccaggttgcccagtgccttgaagagtaactagaacattgtaggtgctcaattaatatttgctgaacaaatgaatgactgacaagtgaacaaacgatgccatgatctgcagtttccccactgtcacgtctttgctctgacagccacttgcagccaggccagccctcccgtctttattgtgcaccatcgttctgtgctttaaggcttggcccacttccccctggctggcccagcccctggcgatccctcctgctaactccagcactgttgt

SEQ ID NO: 126663 - DNA, 613 bp, Homo sapiens
aggcttcccagcaccaggcctccttgagtcagtatcatctcactcccacagattcaaatgcaccgccttctcccggtggctacagcatcctccttaactccgggccttatcccctttcakgctagcgattctgacagtctccagtatgtctctgcaggtcacctcaccctccctgagaaaccctcaagggctccccactgcctataagatgaagtccagccttctcagcattcaaggccttccacaatctggcccccatctacctctgtgtccccagaagcagccctaaatccccttgagagttaactccacggggacagaggattttgtcagctttatttattccaggttgcccagtgccttgaagagtaactagaacattgtaggtgctcaattaatatttgctgaacaaatgaatgactgacaagtgaacaaacgatgccatgatctgcagtttccccactgtcacgtctttgctctgacagccacttgcagccaggccagccctcccgtctttattgtgcaccatcgttctgtgctttaaggcttggcccacttccccctggctggcccagcccctggcgatccctcctgctaactccagcactgttgt

SEQ ID NO: 126664 - DNA, 605 bp, Homo sapiens
attagcgatacaaactagtgctgacaaagttagcggctgcataatcttgccaccttaattaacccctcaggatttcatcttctgtaaaacagaagggtgacatctaccttgcagggctgttgtgaagacgataagtattacatttaaaacatctgcttctaattattattactatcgttatcctccctaagccaaccattctcacacaggtgaataagtggaaagttgctaactgcccgcactgtgatcaacagacagaaataagtcccttccactgtaagaggcagaaatgtattgctttgactaaaatccttcagcccatcgyggtccttccctctgctctgtgcttggcgggtctcctgcggggggtcggggaggggtcgggctgttggaggaggtctgttcgcaaccttcgctcgactagaattggtacatgcctggcctggctacaggcccgacggtaacagttagctaagaccgagtttgaatttgttttgtttggagcggatcagcatctccaaggcaagagaacagacgtgggagggagggaggaagagatgggacccggggattctcacctccgccggcgcggaaggagggcagtt

SEQ ID NO: 126665 - DNA, 576 bp, Homo sapiens
  misc_feature (1)...(576): n = A,T,C or G
nnnnnnnnnnnnnnnnnnnnnnnnnnnnnnnngtgtatgggtttattcagttggaattggccagcacaaagtttgagagacaggattatactgaggttttgtagaaagagacagcatctatgaatattaagtggttctcctacatcctggggcagattagatcagtcttgactagcacagtggttctcatagcaacacttctcttttgattatactagcttcattatttattttattttattttattttattgagacrgagtctcactctgtcaccaggctggagtacaatggcgtgatctcagctcactgcaacctctgcctcctgggtttaagcgatcctcctgtctaagcctcccgagtagctaggactacgggcacacaccaccacaccttgctaatttttgtattttagtagagatggggtttcaccatgttggctaggatggtcttgatctcttgacctcatgatccacctgcctgggcctcccaaagtgctgtattacaggtgtgagccacagcaccaggccccaagcttcatttattaagagagttctcactggctaagcatttcaca

SEQ ID NO: 126666 - DNA, 571 bp, Homo sapiens
ataagttgtaatcagcaacaaaaacattacaatagaatatgagagacattaaaaggcaatttcgtcattgttgactacttattaatttacaacttagttgattaaaattaaaacaatcttagccgggtatggtgctgtgtgcctgtagtcccagctactcgggaggctgaggcatgagaatcccttgaacccaggatgtggaggttgcagtgagccaagattgcaccactgcattccagcctgggcgacaaacygggactctgtatcagaaaaaaaaaaaaaaattaaattaaaacaattggtatgctttctggtgactggtagtaaaatgattgttttacaaatttcaaataaatgtattcaaatacaaataaatgaaatgtaaaatggtaaagctgttttggaaaacagtctggtagttcttcaaaaagttaaacatagtcatgagtcagcaattccactcctaggtatatatacaagagaagtgaaaacatatgcccacacaaaaacttgtacatggatgtttataggagcatgactcatgataataaaaaaatggtaacagcccata

SEQ ID NO: 126667 - DNA, 602 bp, Homo sapiens
tctctaagtccactctggccacaagatgattgaagcttagagccaaacccaacacagtatctctttctcctgaattcaaatagctgctggtgctaccatgaaaaagcaccggtattttgacaggctcagcactcccaacccccttgctggcccttcttctccagcgacagcctgarttgagccagctctggcatggagtcagatagtgaagttcctcttgtcctccgtggaagggaaactcggggactcatgcacatggggtacacctcatttgaatcattgcactcaatgcattatatacagaattgataaagtctggttcaaattaattttacagggcctgaacccacaaactagatacattttcaggctttagtataccaaaagaactcaaataagatgcctcttggtaaagtgtgatttttataggcctttgctactggttagaattcctagatgaaaaaaaaaatgaggcagtaccaagtgccaggaactctgacttcagactgagggtacacaggaatggaagacacacacaggtatatacaattcttacacatacgaggggtgataagattgagggacttactagaaagaaatgg

SEQ ID NO: 126668 - DNA, 611 bp, Homo sapiens
tactggactccacgcagacttgaaagagtggcacagacagagaaatggcaacacatatcatctatctgtcatcttgacactaaatgaaggccttagaaattctgttattccacaaacctgtacttactattcttgatgctgggaagaatggaaagcttctgagggctggcatttatatagtgcttacaatatggcaggcattgatctagtctcttgtatatattaactcacttcctcttcatagcaatctttctgtaagtgctgaggtctggagagattaagtgacttagccatggtgacactactgttaagtagaagaaacaagattcaactcctggcagtctggctctgtagtccatagtcttagtgtcatgtggtcwgtccttgccctcaatttatggagcagcaggcaggtcagtgtatacatgagaaaatgtgctaataacttttagtagacaaagtattatagggatttggggaaaagtggaatcacattccattcagggacacgggcaggatgagaaagagatgccttgaggttttccacatgtgaagatgacaggcaccgcagcatcactacattctcactcaaactctaaagggcacaggct

SEQ ID NO: 126669 - DNA, 611 bp, Homo sapiens
tactggactccacgcagacttgaaagagtggcacagacagagaaatggcaacacatatcatctatctgtcatcttgacactaaatgaaggccttagaaattctgttattccacaaacctgtacttactattcttgatgctgggaagaatggaaagcttctgagggctggcatttatatagtgcttacaatatggcaggcattgatctagtctcttgtatatattaactcacttcctcttcatagcaatctttctgtaagtgctgaggtctggagagattaagtgacttagccatggtgacactactgttaagtagaagaaacaagattcaactcctggcagtctggctctgtagtccatagtcttagtgtcatgtggtcagtccttgccctmaatttatggagcagcaggcaggtcagtgtatacatgagaaaatgtgctaataacttttagtagacaaagtattatagggatttggggaaaagtggaatcacattccattcagggacacgggcaggatgagaaagagatgccttgaggttttccacatgtgaagatgacaggcaccgcagcatcactacattctcactcaaactctaaagggcacaggct

SEQ ID NO: 126670 - DNA, 562 bp, Homo sapiens
ccatgaattatgtggtgaaacatttcattgaaaatactgaataaaataatcggaatactgtgctttttgacatgtctaataggaacattgagtttctagtggacgtttgaacttttgaaagttaaaattacatgcctgttggttttggcttagttatttagcagtgaattataatattgattcagatatgtaacttgttttttattacataagtggagtcctctgagtaaatttaaatttgcagttacttgcgcagtgattaatcatagaattggattttttctgaagagatgagaaatttagatgtttaatatgttacatatgtgcttctgtggtggyagttgaaggagaaagtaaactacttttaatttcttctgggaagaaattcagtttttgagaacttgccagaaatcttccctatcaggttgaagatttttaggagggatatggagggtaggtgggagaatgggatgtatactcaaacataaacactactggacggcaaaattatattgtttctctttcttcctgcaatggaacaaatggttttcataagacctgt

SEQ ID NO: 126671 - DNA, 667 bp, Homo sapiens
tagaattcatttccttgcagctgtagaacatacagtgctgtgcttcttcaaggccagcaggagggttgaccccagggaaatcttcagccctcttctttttttttttgagacagagtctcactcttgttgcccaggcttgagtgcaatagtgcaatcttggctcactgtaacctctgcctcccaggttcaagcaattctcctgcctcagcctcccaagtagctgggattacaggcgtgtgccaccatgcctggttaatttttgtatttttagtagagacagggtttcaccatgttggccaggctggactcgaactcctgacctctggtgatcccccygcctcagcctcccaaagtgctgggactacaggcttgagccaccgtgcccagttctcctcttccaaaggacttccaatgattaagtcaggcctgctcaggatattcttttggttaatttaaagtcacctggaaccttatccacagtgaagaatgaatgacttgcaaggtttacctattactttcttcactagctttatttgcatctgggccttatgccaaagggatgaaatgcaaagggcagaattgcattcatcagtgattctgatggaacatctgcaaaagtccttcatccttgctatataacctgaggataatactaggggacagagat

SEQ ID NO: 126672 - DNA, 634 bp, Homo sapiens
cgtatcttctatcactttttttatttttattttttcaagtgaacacttaattttccatccatttcttttcttctttctctctctctcttttttaaaattaattaattaattaattttttttgaggcagtctcactctgtcacccaggatggagtacagtggtgcaatctcagctcactgcaacctccacctcctgggttcaagcgattctcatgccttagcatcctgaagagctgggatcacagaaacatgccactgcacccggctaacttttgtattattattatcattattattattattattttggtagaggcagggtttcatcaygttagccaggctggtctcgaactcctgacctcaagtgatccacccaccttggcctcccaaagtgctgagattacaagcatgagccaccgtgcacggcctccatccacttctgagagtgacattgcagtgtttgagccaagattccagtctttgggcctacatatactatcttccccttcctgctcccagtcctcagagtttcctgtttgctttttatttcttttcttttctttttttttgtctcaagatctgtttgtggactccagagcttccttgtttcattgggaggccgtgtggtaagacgt

SEQ ID NO: 126673 - DNA, 641 bp, Homo sapiens
ttaaacaagctctgtagtaattgcagggacctaagcaaaggcatcaccttaaggaaagatgcctatagtttcaggagaagggctagatatctctaggcttggtagtgatttggacctaagaaagaatccataaagggccacttagggcatttcaatgctctgcaagacagaccttgtggggcttaacagccagtagaacccagcygaggactgataaataaaggctggcagctgggggcttagcaaacaaaaatcatggaaattgaaactactctctgaaaacgtgaaattacttgtgaccctgcaggctaacatctgtaactttagttggtacaggttgcttccacatgcatgctttctctgcttatttcacaagattatgttaaaccctctacatcttcaatgtattttcctaaagttccttttcatcttcttatgctgggtatgcctcaaatatattgttccctttagtatgtctctcagctgaaggcttttagacagccacaaaaacagtgagtgtagacttctccattcattactgcattttcaaaacttttatcctttttttttctacaaaagattccatttcactggagcacacgatattagactataccaccttctatcttacatgctatccc

SEQ ID NO: 126674 - DNA, 629 bp, Homo sapiens
tatgttgcccagactgcttttaaactcctggcctcaagcaatcctcctgcatcagcctcccaaagtgttgagattataggcataaactactgcacctgctccggtgcagccactttgggaaacagtctagcaattcttcaaaagtttacacatagagttaccatatgatccagaaatttctctcctaggtatatacccaagaaaacataccaatgaaaacctatatccacataaaaacttgaacatgaatattcatagcagaattattcttattttccaaaacaacccaaatgaccatcaactgatgaaaagataaatgcaataggatatatccataaaatggaacaccctctacaataaaaaggaatgaagtgataatacatgctacaaaayggatgaaccttgaaaatattgtgctaagtaaagaagctattcatgaaaaccacatattatatgatttcatttctatttaatatctagaataagcacatggacagattagtggttgccttggactggagagtggccttgaaatggggaatgactgctagtcataccaatggggtatgggatttctttttgggtgatgtaaatgttctaaaatttatcgtgatagttgtacaactatg

SEQ ID NO: 126675 - DNA, 552 bp, Homo sapiens
agatcatctttactcaattagggatccttcgcatctcgtagcacagtgactgacagacgaagaaagccccccgaaggcacttgctgaataaatgaatagtgaatgaagtaatgaacgagtgaattcatgaagaaagaaataagggactgaggaactgaaatttatataagagaaatctgaataagatgtaatcagtttggarccttctggaaggttctatataaagtaatcatgggcagaactaaaagtataaaactcttcagaactaaaagtataaaactcaagttgcatccttggcttgcgtaccaggttggctccttcagttaagagacactctcagtataggaacacgttcaccaatgactttccttttgggtgtctagattactcaacacatctgaggtccaaataatagaaaacaggggtagagacttaataagtttccatgtagtaaataacttacaatttttaacagtgcagagacttctacatttatgtcacttacataagctatgcccacacatttctctgttgaaaagaagttacttacca

SEQ ID NO: 126676 - DNA, 394 bp, Homo sapiens
tcttttctttgtattttttctgtcaatgaaactctttacttgcttatctcagaggttagacatattaaagttcactttacttcatrcatttatttctcattttccatatctaatcacctgctaaatttattaattctcttaccactacatcttgaaaattatctgccattcccttctaaagtttcctcttcttaatatcctggttcaggttttcatagtctactttatttgttgcaatatctatccaactatccaactccaggtgtttggattctaatctttttaatccattcttcacactgccatccaagttttcttcataaaaacagaaaattccataatttttctttacaaaaaccatctgaggagcctcactatctacaaaatactgttc

SEQ ID NO: 126677 - DNA, 511 bp, Homo sapiens
tagaggaattaccatttattgtatgccaactacttgcctggagatagattttcatagaaattttatccctgggtgacaggctgaagtctaaagtgtccccaggattcctgcatgtgatatgcatgctctgcaccatcctgggtttgtgaatatcatagattttactcccatgcttaagttatgttatrtggtacagctgaccttaacgtagggagagggtccaggtgggcctgacctaaacacaggagccatttaaaagcagacttttttctagctgtagcagaagtcagagagaggtgtgttcgctcttctggaaaaatgcaaatgttcatcttgtgaactgtccttggggggcaaagaactgcaggcagcctctaggagatgagggcagctccttgccaaaagctagcaggaaaactaggaacttagctccaactcgaaggaaatgaattctgcccacaccctgtgagcctgaaagaaggtctcgagcatcagatgagaaccacagccc

SEQ ID NO: 126678 - DNA, 511 bp, Homo sapiens
tagaggaattaccatttattgtatgccaactacttgcctggagatagattttcatagaaattttatccctgggtgacaggctgaagtctaaagtgtccccaggattcctgcatgtgatatgcatgctctgcaccatcctgggtttgtgaatatcatagattttactcccatgcttaagttatgttatgtggtacagctgaccttaacgtagggagagggtccaggtgggcctgacctaaacacaggagccatttaaaagcagacttttttctagctgtagcagaagtcagagagaggtgtgttygctcttctggaaaaatgcaaatgttcatcttgtgaactgtccttggggggcaaagaactgcaggcagcctctaggagatgagggcagctccttgccaaaagctagcaggaaaactaggaacttagctccaactcgaaggaaatgaattctgcccacaccctgtgagcctgaaagaaggtctcgagcatcagatgagaaccacagccc

SEQ ID NO: 126679 - DNA, 445 bp, Homo sapiens
ttgctatacgtgctggaaatctggccactgggccaaggaatgcccgcagcccaggattcctcctaagccgcgtcccatctgtgtggcaccccactgaaaattggactgttcaactcacctggcagccactcccagagcccctggaactctggcccaagcctctctgactgactccttcccaggtcttctcggcttagcggctgaagactgacactgcccaatcgcctcggaagccccctaggccatcacggatgccgagcttcrggtaactctcacagtggaaggtaagcccgtccccttcttaatcaatacggaggctacccactacacattaccttcttttcaagggcctgtttcccttgcctccataactgttgtgggtattgacggctaggcttctaaacctcttaaaactccccaactctggtgccaacttagacaatac

SEQ ID NO: 126680 - DNA, 445 bp, Homo sapiens
ttgctatacgtgctggaaatctggccactgggccaaggaatgcccgcagcccaggattcctcctaagccgcgtcccatctgtgtggcaccccactgaaaattggactgttcaactcacctggcagccactcccagagcccctggaactctggcccaagcctctctgactgactccttcccaggtcttctcggcttagcggctgaagactgacactgcccaatcgcctcggaagccccctaggccatcacggatgccgagcttcgggtaactctcacagtggaaggtaagcccgtccccttcttaatcaatacggaggctacccactmcacattaccttcttttcaagggcctgtttcccttgcctccataactgttgtgggtattgacggctaggcttctaaacctcttaaaactccccaactctggtgccaacttagacaatac

SEQ ID NO: 126681 - DNA, 628 bp, Homo sapiens
tggaggggtgggaaacttgggggtgagaggatgggagtgggtagtaagaaagtgagaaatgactggagcctgtgtgaggtcaatgcaggaaatacatgcctgtgtgactgacttctaataaaacactgaacacccagtcttgggtaaccttttgtggttggcaacactttgcacatattttcacataytgttggtaagagaatggaatgtgccccagggtgactttgctggggaacaccactgaaagcttgcacctgatttcttctaacctttccctatgtgccttttccctttgctgatttgaaacagttccctttcattgtatacaccataatcataagtacaacaatttttctgagtctgtacatacctctagcaaatcatccagcctgaggatggtcttggggagacctaacaaaattgtatattcccaaaaatcaaagtaaaacatttcaaagttaaattgcatttattagggtgaaatgaattggtaaataaaaagagttgattaaactctcttactataatcaaattctgtgctacatgtgagaaattctgagatacgaattttgtgggctaatgaaattcaagaagtttgtgggctaatgaaaaaaatgaaacaaactac

SEQ ID NO: 126682 - DNA, 649 bp, Homo sapiens
gaaagatacactaaaactagattttaaaatatttggcatttatattgtgaattacacttgacaaaaatacctgaacagtggtaaagagaaagtaaagctaaaataaagaagactgagaaatggagatctttgcaaaactgaaaaattgtcctgggacaatctgagaagggcctaaacaaaaacagtagtggggacagatatgttttccaggcaagccttggttgaatagctaccctaagtctagtgaaccaaaatctggcaccagtgaggttgtgtggagtgctcaacaagtgatacatttgcaataaaaaaattggcaagaggaaacaaagtttatttattttgaacagtatttttggcaaataacggtttatattttttcatatttagttttataataaatgtctcttgtacgttatttaatatgtataaatttgcaaatgcttggcttatagctttacaatgaagcaataattaatacacaaaaatacacctattcattgactgtggctgaacatttttcaaattacataaagtcatggtaaacattaaatgaggtaatatctagtacagtaaaaaaatggcaaaaatgttactaaataaatgmaatttttatattttctttcccttgttgtccatactcagtatt

SEQ ID NO: 126683 - DNA, 515 bp, Homo sapiens
acaacctagccaaatttctcaatcttgactagaaaaaactaagaaatatcttgcaggactccaataaactatctcaactagtctattagtcatgtgaaatgttctgttggtttgatatgtgctcataacaaaccaatggagattccttttttgctaagagtttaaaatcttctgtgcaaaactttctcagaattgtgccttgaattaccaccaggttcacaagcctacaactttccaggatcaacctccttccatactttgggaaaaaatctcctctcttcatttgcctggcacctctccttcctgtttcttcatattacaaatgaaatccataattgcttctccaagtgctttcrgtattgtgtcacataatttaagccttgagagtgaattaatttggaggattgtgaggctctcgtactatcttgctacctaccagctttgtcttaaacatcattgttacgttcttcctagtttgacatttgttccctctgataaagaaaacagaataaagg

SEQ ID NO: 126684 - DNA, 579 bp, Homo sapiens
catgtgcagttcaagtggtcaggcagaaggagtttccttttactccttttgttctatttgggtcttcaattgattagatgaggtttacccacattagggagggcagtctgctttactcagtctactaggtcaaatgttaggtgtatttttgtttgttttgtgacagagcctcactctgtcacccaggctggagtgcagtggtgtgatctcagctcactgcaacctccacctcccaggtccaagcgattcttgtgcctcagcctcttgagtatctgggattacaggtgcctgccagcatgcccacccggctaatttttgtattttttgtagtgatrgggtttccccatgttggccaggctggtttcaaatgcttgggctcaagtgatctgcctgcctcagcctcccaaagtgctgagattacccggtgtgagtcactgtgcccggcaaatgttagtcttacccagaaacaccctcacagacatactcagaataatgtttgaccaaatgtctggacgccctgtggctcaatcaagttgacacaaaaattaaccatcacacagatgattactgatacatact

SEQ ID NO: 126685 - DNA, 608 bp, Homo sapiens
caactcgagggcatgattctatctgattttgcctacacagggctcacctaaaataaatgctcaaaaactgtggaatccatgaagaaaccaatgaacatcctggggggtccagctctgaggggcacccagggctgtgtgttcccccaccccatggctaagctccttcactgctctragctcccacatttcctggctgcagaagtcccaagaagagtatgtgtgctctgaagaggccaacagaggctgtagcagtccagctgctgctccccacaaccctttggccagtccatttacacttaagaccacagatttcgcctgagaggctgacagactaagggctcaaaagcacctgggcattatgatgtaaggaaaagccccctccttcctggcccccatctgaaagtccaccatctttttctaggcaccctctggggcacactaaaccattagctaagagactttctgcagctcagggtaggaaaaggtgatctgagccctaaggaactaggatggggaggagggaaagaggccagcttctggggccttgggaagaggaatttttgtctctcttctccaggaccctggcagttagggtctggctcacagaa

SEQ ID NO: 126686 - DNA, 577 bp, Homo sapiens
aactgtctgttatcaactcacttttgcagtcttccccttggaggtccatgtttgtcagtctttagtttgtttttggcttggtgacatgataacactattcctgcatgagatactaagctcctggggctgttctaagatgtgttgaatacaaaatgtcctgctctctctgcctgaagatgatgctcttgcatttagatgccctataggactaacacatgccaatgagcctcctaagagattgatggtaaatcagaattgtcatgagaaatagaacccaaacaggctggactggatggtcctgaggcagaatgtggggcacaggaggttggtttatgcttttgatggtcaatatattatgccatgggagctaggtacctatgtcttcactccagaaaaagtcctgccaagaagtccaggtacccatgaggactaggcagggctccctctccttctgaaaaagctgsagacactgaaattctctttctctctctggtcctggtgtcctgtttgcctgaacaccatgaaaacccagctatttctattaacccattcttcacgtataaaggtcacagaacac

SEQ ID NO: 126687 - DNA, 577 bp, Homo sapiens
aactgtctgttatcaactcacttttgcagtcttccccttggaggtccatgtttgtcagtctttagtttgtttttggcttggtgacatgataacactattcctgcatgagatactaagctcctggggctgttctaagatgtgttgaatacaaaatgtcctgctctctctgcctgaagatgatgctcttgcatttagatgccctataggactaacacatgccaatgagcctcctaagagattgatggtaaatcagaattgtcatgagaaatagaacccaaacaggctggactggatggtcctgaggcagaatgtggggcacaggaggttggtttatgcttttgatggtcaatatattatgccatgggagctaggtacctatgtcttcactccagaaaaagtcctgccaagaagtccaggtacccatgaggactaggcagggctccctctccttctgaaaaagctgcagasactgaaattctctttctctctctggtcctggtgtcctgtttgcctgaacaccatgaaaacccagctatttctattaacccattcttcacgtataaaggtcacagaacac

SEQ ID NO: 126688 - DNA, 568 bp, Homo sapiens
ctcaaatgtttcttaataagcctaaaaatcttgcaattagatttactccctagaacagaacagggtctgaggcaagttggggatcatgttctctgggcatgggcactctgaaaagatgaaagggtaagtcgtaaacagaggcagggagatgctgaggacagcctgcaaagtctccactgtttctagaagcttcctggaatttaggatgagtaactatagctacaaggttgagaagccttctaaaaaaagacaataggatgtaaatctatagcataaagcccttattctatagctgcaagtccccaaaatttgacttagcacataatagcaattcacatatattcagaagagatccaggcacagaaggctttcacataagcaaagttayacaaaacaaaaattcttacttgctactgctggcacaagagatattaaaactcagcatcctggtaatattcagaatgcatcagataatcttttcaggaaaaacaaaacttaactatacaaaacttacatgtgttaacaatggtgtaggagaaataactatttaatgtgactaaagccactt

SEQ ID NO: 126689 - DNA, 627 bp, Homo sapiens
tcttccactcttcccatttcctgcttctgatgtctcctctggcatccaacgctgtgccttgttggtggcactgatgactaattggtggcactgattgttaggtctttgaaattaaaggagttttcagacttcttcaatatccccaaatagatccacttataagtataataaaaagagctaccacttattaaatccctgttatgagctaggtactctaaatacttaatcctaatcttaaaaatarcactagcattttatagattaaaaaaaaaaggaggctctgagagttgggtaccttgtctgaagtcacattggtcagatggagaagtagtagtaattaaattagcacccatttctgattccttagtccattatatgtccaaatttacattcattcattgaacaagtacttattgaacatctatatgccatgatagttctaggtgctgggaaaaggacagtcactgatctcataaagtgatggatattgccttcatctgttgacttgaaaaaatcattatcttcacaaaacggcttttggattaattttgttctctaaaaaagatgtctactatggtactagcataattaaaagcaaaatatatttgggttagtaagatttttcct

SEQ ID NO: 126690 - DNA, 606 bp, Homo sapiens
gatcatacttcaaattgaacgtgccatgacttccatccgggttaggtttaaaccgtttagaaaactcttgagataacatttttagttttctggccattgaaagttgaatgggttttagagtagagcagtctcctttatccttttcactttcagcttaattgatttccacccccacacttgcaattcagatcgtcagtggctattacctgttataccctgaagagtggccacaggacagacatcactctacagagaaattgawttttattcttttggaaaatggactgcaatcctgtctcatagcttgagatagtcacactattttttaaaggaaatgtgtggaaaagataaaaatgaaattgagaaagatagttaaaatatgaggaaagttgaaaaaggatagatgtggaatccaaggcatctttggaaaacttctttgtgtgggataaaggatgccttctgcgaagaaaatcagcaaaatgaccaactgccataaaagggcacttacagtacatttttccttgcctaaatgctaagtggagctgcagaagggaggggaaggttttacttcctgtctctctggcagaggggagtgtagttggctgc

SEQ ID NO: 126691 - DNA, 606 bp, Homo sapiens
gatcatacttcaaattgaacgtgccatgacttccatccgggttaggtttaaaccgtttagaaaactcttgagataacatttttagttttctggccattgaaagttgaatgggttttagagtagagcagtctcctttatccttttcactttcagcttaattgatttccacccccacacttgcaattcagatcgtcagtggctattacctgttataccctgaagagtggccacaggacagacatcactctacagagaaattgatttttattcttttggaaaatggactgcaatcctgtctcatagcttgagatagtcacactattttttaaaggaaatgtgtggaaaagataaaaatgaaattgagaaagatagttaaaatatgaggaaagttgaaaaaggatagatgtggaatccarggcatctttggaaaacttctttgtgtgggataaaggatgccttctgcgaagaaaatcagcaaaatgaccaactgccataaaagggcacttacagtacatttttccttgcctaaatgctaagtggagctgcagaagggaggggaaggttttacttcctgtctctctggcagaggggagtgtagttggctgc

SEQ ID NO: 126692 - DNA, 330 bp, Homo sapiens
ctcatgtgtacagatccaggaatttggtgttgcacacagcgctgtggtatactgcaactagtttggtaattacatctttctccttggttcctctagyaggtttcagccaaggagatcaaattcctttactttcacagcaaacatgcattgtacagttatgcgtcaccttttgatgaataagtgaagttggcagcttcctcatgaatagagtgactttgttaagcatcactttttccgggagggcttggagaggacatttgtccccctcttttgtctgctagtcacaacatagactaagttggataggcaagcctgcttataactgaattc

SEQ ID NO: 126693 - DNA, 546 bp, Homo sapiens
tcacaattatacccattttcaaaagatccttaaaattttgaaaaaaattttgtattttctgaccatttttcctttccatttgtattaattcaccttaaagaaatagctttttaagaaagataaaaaattataaaatatttattaccgtaacagtgcagatttcatttcagtacaatttcattccttcttatatttccaatatttagctttgatacatttttgggctgtctttttaattgccatgttgtttgagatatcaaatcaaagtcatwatatttttattcaatatatatttctcattacatgctattttacttatacttctaagaccacatttctatgccatctgctaacctttcatcaattttttttatttcttctagggattgtattgtcagattattaacttcaatcagaaaatcttttcgtagggaaaatacaacccttttacttctctcatcttgtcgatttctcatcagtaagctatgatctcttttcatttgcatagtttctgttagtaaacttgaaactttatttccttagaaa

SEQ ID NO: 126694 - DNA, 546 bp, Homo sapiens
tcacaattatacccattttcaaaagatccttaaaattttgaaaaaaattttgtattttctgaccatttttcctttccatttgtattaattcaccttaaagaaatagctttttaagaaagataaaaaattataaaatatttattaccgtaacagtgcagatttcatttcagtacaatttcattccttcttatatttccaatatttagctttgatacatttttgggctgtctttttaattgccatgttgtttgagatatcaaatcaaagtcattatatttttattcaatatatatttctcattacatgctattttacttatacttctaagaccacatttctatgccatctgctaacctttcatcaattttttttatttcttctagggattgtattgtcagattattaacttcaatcagaaaatmttttcgtagggaaaatacaacccttttacttctctcatcttgtcgatttctcatcagtaagctatgatctcttttcatttgcatagtttctgttagtaaacttgaaactttatttccttagaaa

SEQ ID NO: 126695 - DNA, 611 bp, Homo sapiens
attatacacagtatctactctaatccttacagtaacttaatgatgtaagtgctattattattattgccattttaaagatgaggggtttgaggcttagagaatattaagtaccaaggtcatgtagctactaggcaacagagtaaatccaggtgcgtttaacttcaaagcctttctattagtgtgtgaacagtttgagtgtgtctaagccagtggtccttgtaaaactgtatattccctgctgctctttttaaaactaaattcttcaataaatgtttattagatggatagataggatggttgaaaggatagataaatggatgggtggggatgtttgatgaatkaggacaaccaatggacaatacatttctgctaagaaccaggctcccaaacaaaagcatttgtagagccttcctgtttgtgtaccaggtactcagctgaagtgcctcttctagcaacaagcataaaggcaggagataagtgtgtttctcacctgtgtcaagtggtctgtcaaccacttccctgatggctattaactcatcatctccagcagatgttgtgtttaacccagatagggccctggctccccatctctcactttcaggtgttaacct

SEQ ID NO: 126696 - DNA, 660 bp, Homo sapiens
ctctctctctacttgtaaacagttgtctttcaaggcaaggtcatggttttgatgtcttatattccaccaagaaaacaaaaagtggtggcttcaataattgcctttagtcacaggagcctgagtcctggactcagacttcctggaattgaatctctctctccaggtactcggtgtctccatacctcagttttcttayaggtaaaaatctggtgtattagtcaggtttctctagggcaacaggactaagaggatagatgtagatatgaaagggagtttattaaggaatactgactcatatgatcacaaggtgaagtcccacaaaaggctgtctgtaagctgaggagcaaggaagccagaccgtgtcccaaaacctccaaagtagggaagccaacagtgcaatcttcagtctgtggccaaaggcccctgacaaagcactggagtaagtccaagagtccaaaacctgaagaacttggagtctgatgtccaagggcaggaggtatccagcacgagagaaaggtggaggccagaaatctcaggcagtctaatctttccatgttcctctgcctatttttatcctagctgcactggaagctgagtaggtgttgcccacccagattaagggtggatctgcctctcctagcccattgactcaaacattaa

SEQ ID NO: 126697 - DNA, 565 bp, Homo sapiens
catctgcctgtagcaaatatcatactatattgaggtctaagtacatataagatctgaagaatgtgaccaaacaatgcaaataattatttattaaatgtccattaggattcttatgttttcactgaccatttcagttctgccatttcagactcataaggtatttggcttttgaccaaaacaattgctcccttttttgtatatgaactaagtaactaaatttctraaaatgcctatattcattactcaagcgggtcatttagattgaatgttaaatgtcatattaatactgaagttgaaaatgtgtaattgcataactccttatcagtcacaatttataaaacaattttaaattaaattttatttgaaatcataaatttcatgctgtttaattggaaaaatagatccttattttttatgtgacttcataaagatttctcactattatgtgattaagattttgtttataagttctacattgcaaagtacttttgatcctttctactctaattatcagtgttcccaacttttgttctctttgttttgcgggataataataagtaaaaac

SEQ ID NO: 126698 - DNA, 572 bp, Homo sapiens
gccagagacaccggccaccaatacccacagctccctgccccctcccgtgggtctgcctggcatctcagaagggacccgtggaaccttctggctagaaagcaaaccagctcctttcttctagcttccaaacattcgtttaaagaagttggacatactcatgaatttatttcagaaaatttagataagcacaaaaaggaatacatagaacttacctataataccaccactcagaggtaaggatagtgcatatcacggcaactataccagttacttccacatactatacaatactagaaataaaaattacctcctggaatgcacacacacacacacacacacacacacacacactcatttatatgacaaagttgggatcatacaattcatgttattgtttagcttgcttctttcatgtaacagtccagcggaggataatttacatccatggtcctctgtggcatttctaatgccgctttattgtgcccctkaacaccttgggtatccatcaaagcccttctcacagtgcagcagagtttttcacaagtgcatatttgcccccaggctgtgagtac

SEQ ID NO: 126699 - DNA, 402 bp, Homo sapiens
gaattcaaagaggaaagatgagatacttacatgattcaataccgtgtaaactagaccgcatcaggttccagcacagatcatgccactgacagcttacaataccacaatttaatttcaagacaaacactccagatttcaaatttgagatgaatatatgtgatctgagaattacttccagagctttcaaagtggaatcgtatctctgcttaaacaccaaaacatggctaaaaactgatgcgaagrtgagaaaatctctcacactgtggggagatcagagtaagggcaacatactgctaatcattcgattcaggtcataccaatcagcatcttatccttgagatcaggtattccgtctcaaagcaaaattaatgaataaaccagaaatcttttatcgccttctgt

SEQ ID NO: 126700 - DNA, 593 bp, Homo sapiens
ttcttcaatgccccatgatctgctccttcttcacatcttatcttcctctctggtggaaccccrgagacttctttgttaaacccaaggcttcacataacacagtggaaaacttattgctataaattagacataactaacctcggttaatagagaataagcaattgaagtagattgtgccagtcctggacaatcagtagtggtagaattgaagtaaatttaaaacttcataccattccctcaaggattaaaattcaatgaaaaaaaagtaggccaaagaaaacacttctataaattatattttgtccttgaggggtatttttgtattgtattctaggctacatgctgttacatcattaaaggaaactttgtttattctttctaactagaacatttatcccagaagccagcaagcacctcaatattaggtcttataatatgataaagtttcacctccttttatcaatgtagagaagtagtttcttatcttccctggtgacattctggcttttggcatccttcttgaatatagggtataaagtctccttttgatttgaagaacttgtgccttctgatatatccctgcaagtttggga

SEQ ID NO: 126701 - DNA, 574 bp, Homo sapiens
ccaaaccacaacaacaaaattaacacttctaatgaatcttctatttatattaaacatccaactctggctggctttagtggctcatgcctgtaatcccagcactttgggaggccgagatgggcagatcacctgaggtcgggagtttgagaccaggctgaccaatatggagaaaccctgtctctactaaaaatacaaaattagccaggcgcggtggcacatgcctgtaatcccagctactcgggaggctgaagcaggagaattgcttgaacctggtaggcgsaggttgcggtgagccaagattgtgccattgcactccagcctgggcaacaagagtgaaactccgtctcaaaaaataaaaatataaataaataaaaatccagctccagcgtgtattttatgccatcagccatctccttttggcgagtcacatttcaggtgcttgacagtcatatgtggccaggggtcatcctattggcctgagcaagtcaagagatttattgtggtatgaaaggaatggaatggcatagaatagaactgacaagagcagaacacagttgcaatttggaacaagtag

SEQ ID NO: 126702 - DNA, 552 bp, Homo sapiens
ccagccttgatcgcagagcaagattctgtctttaaaaaaaggggggaatttcttgacagagattttggggagccactcatacatagtccaaagttaaaagagagaaaaattgagaatctgtctcaattttgcattgwtttataattttttccactcacagaggctgaaatataaaaagtattccttctgcatttgtaaacagggacaactgggtctcttctggaggtctgtcatgaggatgacagattcttgccgcaagagcattttaatttaaattcttggatccacagatcgtgaacactccttgctgcctatgcaagccaacctgtattagcaaaaaggggtgaacgaaaactcactctatgttgcaaatgcttttcctgctcctgtgacagcagttgctgttgccgttagtggctcatgatctctattcatttctttagaattgaccaaagaaaaggagatgtgtttgtgtgcatgtgtgtgcacatcatggcatgcatctttccaaatttattatgcatcttactctgaaaagaattgagatagttc

SEQ ID NO: 126703 - DNA, 542 bp, Homo sapiens
gtaggatgatgtgtggcagggactgctgttctgtactttccatctttctgagaatagaatccttcatttaaatcttggaccatcactaaccatgacaaaaaaaaaatcggtatttcccagcctcccctaaagctaagtgtaaccctgtgactaaattctggtcaaggtgatgcaagctgaaatgtgatgagacaatttctgaaaacttccttayaagacaactgatagtcacgtggtcatatcaatagatacagaaaaagcatttggcaaaatccaactcctattcataattaaaaaataaagaactctcagtaaactaggaatagaggggaacttcctcaacttgataaagaattctacaaaaagtttataatgaacatcatacctaatggtgataaattgaaagctttcccactgagatcaagaacaagacaagaatgtccctttcaccactgcttttcagcattgtactgggagtcctagctaatgcaataagacgagaaaaagaaaaaaaccaacagattttgaaccataaataaaat

SEQ ID NO: 126704 - DNA, 618 bp, Homo sapiens
ccatgcccttgatagctgctgagaatcaaaggcaatcacagtttgggtctgtgtgaaactaaagaaacaggctctacttttccttattttttttctcytctaaaataaatcttgaaattggaaatgaaacggagtttgcccctgaaaacttacacccagtgttcaccacacacacacagacaaacacaccctccatgttttaaaatttaattaagttttgtatcagttatcttactattttaacacaaaaagatatagttttcttttatacagaaaattatagaaagttttatgaaaaagcatttactatttaattatgtctttataaatacaaactataatttttaagataatagtcagttaaaatggtatcacaaaatgtttcacaagtccaaaattatttttttaaatgaatgaaaacaaaaaaatcaattgatataaaagtctctaatcaaattgttgatgttaaattgctgatgttaaaaagaatctttagaacaggaagtcttgtgtccagtcatggaattcccctgcccatgtgcccaggtgagatttagcctttacttcctgatgggcataaaactaataattaccctaccaaatagaatatcatatttt

SEQ ID NO: 126705 - DNA, 563 bp, Homo sapiens
tctcctgaagcccacttatataacatcaaagtgggctgagttgtggttgatcttctcaaagacagccttgtcacagaagcccaagcagccagggaaatttgttccaaactcttcaaaagataacaaggtgaggtggagaagatggggaggagctaagacgttaactgcttaagatatagcacatctgagagtgtccagttgctccttttcgattcctcatggatttcattataattaaaaaggtggtgggtgctccaacttctgtgagcaaggcyagtaatatccttcaatatagaccataagtaaatacactgactaagtccccagaaacaggggtcaaatttttcatgctcacctgtggacattatgtcagaaacactcttgtaggggccaagaggttaacatttattgagcaactacaaggaatgaagcactcttttcaactacgctgtgaattatgaatagatgttattaccttcatttacagacataggctaagaggagtcaaggatataacccaagggaaatagggcagttaagtgtcaatgccaggatttaaatcc

SEQ ID NO: 126706 - DNA, 379 bp, Homo sapiens
ggacagcctgtaatgcagtcagttattgagactcatgctttaatgaaaaacaatgcagagtcctgatgatcattttgcccagcaactaagagatgtgggtagtgtgccttcacaataaagcaataatcttgtttaacttagggagtgaaaggggcatattgtggagcttatcactacagaatgcctccttaagagaatcttgacagtgcccatattgcctaaggaagtggaggaaagggggacgaatgatgtaaacatctgaaaccctctccttcctcagttgggaactatttttggctctgacaggattgcccmcccatgacatgttccctgctactggaaaacatgtttgggccatcatctgcagaggctacaatgg

SEQ ID NO: 126707 - DNA, 555 bp, Homo sapiens
ctgacacttctatgtttcagccagtgcttctgtctgctctgtgtgaaacttgtggatttttattaatgcaaagccaggcccgagtggaatgtcaaatgttctgcctaataaaatgcagggaatgcaggttcttggaaagatctaaagggaaataacttaggagaatgaaaatctgagattttttttttttttttttttttttatggkggagagtttggggaaggactcaactatcacagtaagtaggagtctggaacctacaaaaaatgtgacaagtgaggaattttcatagtaaatgaaggacttgcaatgagagaggtgtatacttttcaattttgagttgtttgtgttgctatcattttaaacccttgaatcacttcgaacactgtatgaatggttttcgggagaccaaggaataaaaactttttccttttgagagttaatacaaagcagaaaatggagaaaagggttgtctgtcatcttggctccatgtgacattttcatgaagacaggtgatatactttatcggaatcagggcattggaacgagaatgtg

SEQ ID NO: 126708 - DNA, 650 bp, Homo sapiens
ctgtctttataaaaggtcatattcatcaagcttgttattcatacatctcttgtttattttgtagacaaaatatacaagatagaagaatactctgtcttcaaccatataactatatgaaatgtgatattatatgtagtatgaaactaattttcagattattaaacattgtatggataaagggaaaaattacccaagctagcctcatttcctgaaacaagatttttaaaaatgagttatccttaaagcatgaaatattcagggatctggaaaatataagtctaatgtagatcctcctttatagaaatatggtttctttatgataatttcttttctgcactattttctttattatgctaagagaagcaccttaatatatcacaccatcatctaaagagattatttatggctagctgaacaagttagaacaactttatttttcaactcacagtgataaaaccatcttttcttttgtgaatacaattgcaattattaatatcctacaactatgctattctaagtcccwtagtgcagttgttcaaaatgctgtactgttttgtattaaaatgtgactctcagcttctaagtccagtgtggagactctctgttattctctgtgataatgacctaatcctaatttattcccttactat

SEQ ID NO: 126709 - DNA, 606 bp, Homo sapiens
ggtgtcctgttctcaatttggccatattacaatgaggcctataaatctccaaaaagatcacaatataatgaggattaaattagcaaaggcatgtaatattcttaaaactgttcaataatcattctgagttcctatctttgatcataggttaaaaaataaacatgaactgtttgttttgaattcaaatatgatttatctcaccctccttcattttaaagacaaagcttcccctttcaaattacagacattctatttaaatkgtatgctagcttcttttgtgataaacattagttttgtgtttctcaggctaatattttgtaaaagaaactgctaaactttaggttaagctatttcattgtagaacagtgtgtcagactttgtgaagaaatatgtagagaacaaataaggtcatttgcagagcaagctgtgacatagagaatggccaatcattatgatctttaacttctaatcacattatatcaaataaaatattatctacaataaataatctttaaggaaaactatgcagtctatttttcctatatattcaaaaatctactcaggattaagctatgcaatcagagagctatataaataggaagtatt

SEQ ID NO: 126710 - DNA, 508 bp, Homo sapiens
tgtctggcaagcactctcattttttttttccagtagccaaagggagctctagaaatctgcaagccagcaacagcttaatcttatggtggactcttgatgctataaatccataactaagcaggggcggctgaaaatgaatgcagcttttcttgaataatgcttgttctggaaaaagaaagtgtctgatatgttgtttttccaactgcttctttaccaaatagattcaaactatattgacacctgtaacaactaataatataaaggcaaaacaataatagtagctaaaattgatttagcacctacaatgtgctagaaagygtattatgtattttacatgaattatctcaactaatcctcttacaaaagtaggttttaatattttaaacatattttagatgaggaaacaaagatatttatttcaataaataacattttaaatctactaagaggcagaaataggattgaaatcataaggaatgtttgcacatacctatgtttttaatcactg

SEQ ID NO: 126711 - DNA, 472 bp, Homo sapiens
agtgctgggactacagttgtgcgccactgcgccaggcctgcctatctatctatctatctatctatctatctatctatctatctatctattttttaatgtgaatcatgtcacattacttgctgcttgatatccagcggctgctttccatttataatctaaattcctaggaagtttgctaggctttacattacctggctcctgctgtttccaacatcatcttacaccaactcctctcatcattcyctttgtgatacactttccctagccttattttactttttcaaactcattcctactctgtagtttttgccttagcccctttgtaaagtctgacaaactcagaatccttcactctctatttttgttttgcttttaaaatattttaaattacccccattatctattttaaagtttcgttctcttttccatgtaactagagtgtaaaattcataagagcaaggattcacacatc

SEQ ID NO: 126712 - DNA, 574 bp, Homo sapiens
cctcttctgtattcaatctattgcagtaatatatgttatgtagttcttggggaattttgctctatagtgaaagagtgatagtaaaaacaaaaaataatattttagtataattatgaaaatggcactaatttcattgaccccttgatagggttccaagtcacactttgaagacaactgggctgtagtatcatcaaacagaacttataatctactaatataaaacattcacaagttttgtttataatgttgaaaagctagtactaaaataaagaaaaataacagaaagtttaaatattgtgttcattattaacttcattttagcctactagaaaaccctctgaattaaagccccaacaccaatcctggacaaagactgaaagatctctttgctgagcaaaaattcaagaagaygatctagatagagtatttttttgacattggctaaagaagaaattgtaaaatcaaatatggttgtgcgcatggcttaacaaaggcacattctgagaaattcatcattaggtgatttaattattgtgccgtatcacagtgtgtacttacacaaacctagatggca

SEQ ID NO: 126713 - DNA, 561 bp, Homo sapiens
atcaaaactaaagttccatgtttggctacatctttctgatgtttttctcctaaacatccaaatacttctattatttaactaaaaatttgatcttagattaaagatgcaaaggcaggtgtaatagcaaatactcaagatttatttaggtacatttgtgggtggagattaatcatgagttaatgacacaaatgaagaattttatccaaagataccatcataaacaacctaaytaaaggtgtcatatgtttgctctgatgaactgctagttgtgtactggagagtccttaaggaaaattatgagacaaattgtgagtgcaatagcaaagggtccagaactgacagagatgtcttccatagatgggtttgggctagtgctagcatggataccaatttgccactttggatgcaatgggtatctattaactttgatcgtcaatattaaagaaatcttcccccagtaaacagcatagaaattcttctctggtcaccacataatcctctaattttaaatcataaatttcatgtacagttaattctgcttccaaactccaggaaaagaca

SEQ ID NO: 126714 - DNA, 595 bp, Homo sapiens
aagactccatctcaaaaaaaaagaaatttatatatatgtataatagtcctatatatataaaatggactgttactattcaggtttaaagaaggaaatactgctatttgcagcaacatggatgaaccgggagaatatcatgctaggtgagataagccagaaacaaagaaaagtactatatgatgttgcctatatgtgaaatttttaaaaagtggaacacataaaaacagaaaatagagcagtgtttactagggtcagagagggagaggaaatggacagaaataggtcaaagggmataaatttgccatcagggagaataaataaatatagaggtttgatgtacaacatgagaagtatagttgataatgtgcattatatactgaaaatttgctaaaagggttagttctaggtgttcgtaacacacatacacacaaaaggtaactatgaaaggtgattgacatgtaaacgttttgactataattattttactatgtatatttatcaaaaatttatatcaaaacatcatgctgtataccacaaatatcaaataaaataaatccaataaaaagaaaataatatttgaattatatacactgat

SEQ ID NO: 126715 - DNA, 521 bp, Homo sapiens
atgacaccaaataatggcaaagatgtggagcaacaggagctgtcattcattggtggggggaatgcaaaatgggactgctactttggaagaacttttggccatttctcacaaaactaaacataatcttgccatgcaatttaccttgctatttacacaattttccttgtgatttacataaaagaactgataatttatgtccacacaaaaacctgcacatgtatgcttacagcagctttattcataattgccaaaacttggtagcaaccaagatatcctttagtaggtgaatggataaacaaactatggagcatgtggaccatggaatattattcagtgcaaaaaaatgagctattaagccatgaaaacacacagaggaamcttaaatgcatattactaaaagaagccaatctgacaagatgatatactatatgattccaactacatgacattctggaaaatgcaaaactatgaagatagtaaaaagatgaagagttatcagagatgcagttgtagaggaggga

SEQ ID NO: 126716 - DNA, 260 bp, Homo sapiens
cagctcatctgaaatatgtagcaatgtgtatcaagagctttttaaaagctgggttattttactttttgaaatctaaagaaaaaaatattaggtgtgaacagagatttacctgcaagaatattcattagagtgtggcttataataaagaaataatgatttaagtaaatggtwtgtgctatcaaagatcatgttgtttacaaagatagaatgttatgagaatgctcagaaagccatattatgagaaaagcattacataaatg

SEQ ID NO: 126717 - DNA, 558 bp, Homo sapiens
actctgccgtccaggctgcagtgcagtggcgtgttctcggctcactgcagccttgaccttctgggctcaagtgatcctcccacctcagcattccaagtagctgggatgacaggtgtagacaaccacattcagttaattttgtgtattttttgtagagatggggtattgccatgttgcccaagctggtcttaaactcctgggctcaagcaatccatctgcatcagccttacagaatgctgggattacaggaccaaggcactatgcctgacctacacacatcctttacttcagttaaatatttaacaattcaccactaaatgtatcatagtgaagccattaaaatattacttaggaagactgaataaaaatatggagacatttttgcaaggtatacaattgatttttttaatgatattgtaaaataaacacatggagatgktatggttatgtgaaaatgaaagaagttttgtgaggagggtagataatgtacaattgatatacagtacaaagggaaaaactatagaaaatataagtgtttaacaaaagactgttatgatg

SEQ ID NO: 126718 - DNA, 631 bp, Homo sapiens
atcagctggccactgcccaagtgtggccctctggaagaggacacaaccttgaatgaggcagtgctctaaggctgagggagattcccagtgagcagcatgctagggcagtcaatagaycctaatccccacaggtgggagataggtgcatcatcctcaagaaaaattggggtgtcattgctgatatccatcacagtgtttatagctccaggccccgtgtcatctgcatgtttattcttactctttttccattgaagatagtacaagaggccccaataaatcaaacagtttttaatgcttgccagaaaaggagacagctgcttgcaaaattcatgtatgcttcccttttaggcttagatatactgtatatacaaccagtccaaccaccaaagatcagcttcctttgtctttgaactggggccaaagaagttaagaagtttcccaatataggccctttgtagtcagccgctttccctagagctttggctgcaggcaactattggactcctttattcaatgtaatgtcatttgcttattccagaatttcaaataaatggaatctttcaataattctttattttgcttgttatcactcagcttaatattttaaagattcatgcatgctgttgggtat

SEQ ID NO: 126719 - DNA, 547 bp, Homo sapiens
tttaaccaagtcctcatgtttcgttcaagtggcatctctacaggtcttttattatatactcaagcttcaactgactctgctagtagtcactctcaagatgaatttcatatagcctatgttgccaatagtttcaatgggactatttcaaatataaccttcaaatttggtgaaaatctaccacttttacatgatgcaatggctgaaacaatacaaaaaaatgggcaaataaaaccaaagtgcattttactaatayaggcaatgggctgaggtatattcctgcagcctatgttcaagggcacaaaaatttattccttattttattttacaaaaatatgaccagttatattgttaaatacagctcagctgagactacattgatagaaaatgacagaagaaaaatgctacaataataaattgtcaacagtacagatggcccaaatatgaatataaaaacattcaaattaggaaatctccagaataacttaaagtccaaaaactatatctcattgtccttttaaattaaagttcatggaaatttacaacagtg

SEQ ID NO: 126720 - DNA, 547 bp, Homo sapiens
tttaaccaagtcctcatgtttcgttcaagtggcatctctacaggtcttttattatatactcaagcttcaactgactctgctagtagtcactctcaagatgaatttcatatagcctatgttgccaatagtttcaatgggactatttcaaatataaccttcaaatttggtgaaaatctaccacttttacatgatgcaatggctgaaacaatacaaaaaaatgggcaaataaaaccaaagtgcattttactaatacaggcaatgrgctgaggtatattcctgcagcctatgttcaagggcacaaaaatttattccttattttattttacaaaaatatgaccagttatattgttaaatacagctcagctgagactacattgatagaaaatgacagaagaaaaatgctacaataataaattgtcaacagtacagatggcccaaatatgaatataaaaacattcaaattaggaaatctccagaataacttaaagtccaaaaactatatctcattgtccttttaaattaaagttcatggaaatttacaacagtg

SEQ ID NO: 126721 - DNA, 547 bp, Homo sapiens
tttaaccaagtcctcatgtttcgttcaagtggcatctctacaggtcttttattatatactcaagcttcaactgactctgctagtagtcactctcaagatgaatttcatatagcctatgttgccaatagtttcaatgggactatttcaaatataaccttcaaatttggtgaaaatctaccacttttacatgatgcaatggctgaaacaatacaaaaaaatgggcaaataaaaccaaagtgcattttactaatacaggcaatgggctgaggtatattcctgcagcctatgttcaagggcacaaaaatttattccttattttattttacaaaaatatgaccagttatatygttaaatacagctcagctgagactacattgatagaaaatgacagaagaaaaatgctacaataataaattgtcaacagtacagatggcccaaatatgaatataaaaacattcaaattaggaaatctccagaataacttaaagtccaaaaactatatctcattgtccttttaaattaaagttcatggaaatttacaacagtg

SEQ ID NO: 126722 - DNA, 547 bp, Homo sapiens
tttaaccaagtcctcatgtttcgttcaagtggcatctctacaggtcttttattatatactcaagcttcaactgactctgctagtagtcactctcaagatgaatttcatatagcctatgttgccaatagtttcaatgggactatttcaaatataaccttcaaatttggtgaaaatctaccacttttacatgatgcaatggctgaaacaatacaaaaaaatgggcaaataaaaccaaagtgcattttactaatacaggcaatgggctgaggtatattcctgcagcctatgttcaagggcacaaaaatttattccttattttattttacaaaaatatgaccagttatattrttaaatacagctcagctgagactacattgatagaaaatgacagaagaaaaatgctacaataataaattgtcaacagtacagatggcccaaatatgaatataaaaacattcaaattaggaaatctccagaataacttaaagtccaaaaactatatctcattgtccttttaaattaaagttcatggaaatttacaacagtg

SEQ ID NO: 126723 - DNA, 642 bp, Homo sapiens
tttaaccacaccactagcattgccaatatactctacctgtgtttttttattagtattcatcaacttaatatgaaacacatagtttttacttccatgagagcagaaacgtacctacattttttttccactgatttctcttaagtgtgaaaacagtrtcaatagataagcagtagacacttggtatatccacaaatatttatgaaaagaatgtatgaagaaaatatccagtattaaaggcaagaagaatataaaccctggtaagcattttgggagttcctaggagaaatgtactgtattaactgaggatcaagataacattttataaaacttgcttcatcaataaagtgagtctagataaagtgtaagttatttttgtgattattgaatgcaaataattccatgctatttatgtgaaacatgacacatcattaatggggaggaaacgagagaaaaagggaactggaaaatattttacccagaggactttttatggaaatcttcttccaaagaaaagagctgaaatatgtgtccctgaagagaagcaagattcaagattgaaagtaagaagtatgagtccagttggagagctgtgctaactctatattatattaagatctttcacataatcaatattaaaggagt

SEQ ID NO: 126724 - DNA, 642 bp, Homo sapiens
tttaaccacaccactagcattgccaatatactctacctgtgtttttttattagtattcatcaacttaatatgaaacacatagtttttacttccatgagagcagaaacgtacctacattttttttccactgatttctcttaagtgtgaaaacagtatcartagataagcagtagacacttggtatatccacaaatatttatgaaaagaatgtatgaagaaaatatccagtattaaaggcaagaagaatataaaccctggtaagcattttgggagttcctaggagaaatgtactgtattaactgaggatcaagataacattttataaaacttgcttcatcaataaagtgagtctagataaagtgtaagttatttttgtgattattgaatgcaaataattccatgctatttatgtgaaacatgacacatcattaatggggaggaaacgagagaaaaagggaactggaaaatattttacccagaggactttttatggaaatcttcttccaaagaaaagagctgaaatatgtgtccctgaagagaagcaagattcaagattgaaagtaagaagtatgagtccagttggagagctgtgctaactctatattatattaagatctttcacataatcaatattaaaggagt

SEQ ID NO: 126725 - DNA, 451 bp, Homo sapiens
ggggggcctgttcccaacagatatgaatcagttttttcctgcagctgtttagtaaacaattgttccatagcattagcaatatacttaatccctattggcaagtactaagacaagattgaggtcataaaatatatacaaatatctcacctcttctgcwattccatctttgattctttatattgttatttaaatccttgtgcctagtttccttaatttcctttttagcaaaggcatcactacaatcacctgcagttgctgacttcaccttgatttccctctaaagactgtaagctttgtgccccactgtttatccacctccttcactgtgttcttctgtctgtgcctcttcaaaagttcagggatctggaggactacaatgatggagaagacactctctttctgccttccagctacctagaacccgatattccctgtcagaactgcactgaac

SEQ ID NO: 126726 - DNA, 542 bp, Homo sapiens
tcccaactcaggctctctctagatgtccttatctttactttttttatggccyctaaggtgaggtttaggtctactacagtttctaaacaaaacttgtctgggtaatgatgctgcagccttgattccatgaatggtaaggttgtgataacagtcctaagtttaagtgctgacatcggcaaatcatagacattccacatccattgtccaagaatggcctagcctgtaagactacacttcttgatttgtggaacaaatatctattttatacccactatgtgccattgttatgctgatgccaggaatccaggagaaaacaacatgtggagtttataccttagaacaagggtcagcaattgatggcccatgaatcaaattcagtccaccacctgtttttatagttttctataatacaggcatgtgttataaaaaaaaattcattcatttattttcaatgctgcttctatggtaaaggggtagagtggagtaataacaacacacactgcatggcccacaaagcctatgatatgtattatccagccata

SEQ ID NO: 126727 - DNA, 542 bp, Homo sapiens
tcccaactcaggctctctctagatgtccttatctttactttttttatggcccctaaggtgaggtttaggtctactacagtttctaaacaaaacttgtctgggtaatgatgctgcagccttgattccatgaatggtaaggttgtgataacagtcctaagtttaagtgctgacatcggcaaatcatagacattccacatccattgtccaagaatggcctagcctgtaagactacacttcttgatttgtggaacaaatatctattttatacccactatgtgccattgttatgctgatgccaggaatccaggagaaaacaacaygtggagtttataccttagaacaagggtcagcaattgatggcccatgaatcaaattcagtccaccacctgtttttatagttttctataatacaggcatgtgttataaaaaaaaattcattcatttattttcaatgctgcttctatggtaaaggggtagagtggagtaataacaacacacactgcatggcccacaaagcctatgatatgtattatccagccata

SEQ ID NO: 126728 - DNA, 542 bp, Homo sapiens
tcccaactcaggctctctctagatgtccttatctttactttttttatggcccctaaggtgaggtttaggtctactacagtttctaaacaaaacttgtctgggtaatgatgctgcagccttgattccatgaatggtaaggttgtgataacagtcctaagtttaagtgctgacatcggcaaatcatagacattccacatccattgtccaagaatggcctagcctgtaagactacacttcttgatttgtggaacaaatatctattttatacccactatgtgccattgttatgctgatgccaggaatccaggagaaaacaacatgtggagtttataccttagaacaagggtcagcaattgatggcccatgaatcaaattcagtccaccacctgtttttatagttttctataatacaggcatgtgttataaaaaaaaattcattcrtttattttcaatgctgcttctatggtaaaggggtagagtggagtaataacaacacacactgcatggcccacaaagcctatgatatgtattatccagccata

SEQ ID NO: 126729 - DNA, 564 bp, Homo sapiens
tttcaggttcatcttcaattataaattctgtccatcccatcttcttctgacacactcattgtttgcctagaccatcagaaataccaccacttcctaaaatcacctgcattccttctgtgcattcagtttcctttgcaaaaaagagtttctcttatctttgttgaaaaaataaagtgctagatatcatttaagacctggttttaaaattacctggatcccagaaaaaaaaaarggacaaattattccctgcactttgcacacataacatttaattaatttgttatttattatttctgtctttttatattaataaagagatacataatatcttgaagacagaaagcttcattgagtcaatgaccacatcccttttatggttgttttctcccaccaccccattctcaccctacacagggctgtactccagtagaaaatttaggcctgatacctagaacagtacaggtctgacaacagttgctaaactgactagggacaagagacttgaaactccatcttgaggtccatgtttagaaatcactaggatcttttctgatgactgcatag

SEQ ID NO: 126730 - DNA, 564 bp, Homo sapiens
tacaacctagatcccttgcatgtgcatttcataatagagcttgcacttctatgagaatctaatgccaccactgatctgacaagagttggcattaggtaccagtcctagcccctggactaattgactgatttatgtattctgatagaaacatgtaatcaaaataatctagggaagacttgcctaattgatcccttacagacttcatagctctattttataaacrattttatggccctgaaactggttatactgaccattgtgattatctttaaaaagtgaaatggcagcttgaccattgaattgattgctcggcttttctttggctttttgatgattaaaaaataacaataataacgctttttaccaggaacttcctagaggcagtaagagctgtctcagtttctatattttaaaaatatctaaagtaataccttatgtgaaatccctgagtggtagcaaaaaattttaatttggttctagatatttcagccatagtcccagctctgtcagtggtttgccagggttgggggtttggtgtggcaggtttagattagccatgccagt

SEQ ID NO: 126731 - DNA, 636 bp, Homo sapiens
gagaaattcaatcttaagcttggaagtatattgatgttcaatagtcagtgagatgaagaggagttagcaaaggaggctgagaaggaatcgtcagtgaatgtggaagaaaccaggagagtatgatgttccacaagagaagtgaagagaatggatcaaggagggaggagtgctcacctgtataaaaccttgcagatatttcaagcatggcagagtaaccagttytgctcaagtttcaatcatttgacttatcaatgtgaagatcagagtgacattaaaagaccagttaaaagggagtggtaaaaattaaagtcaattattctttatggacttctgttctttgaatagattttcacagacttcagagttgcatccaagcattgcttactgtgacttaaagtatgtgagtaaatgagtaataatattcagtggctcaaaggtcacagtctcagctcagtgattaaggactcacattaggagttatgagtgactgacccttccaagaatacaatgagcccaatctccataatgtgacaacctcatccaatcttcaagggtctgttgtccgcaaggtacactgagaaatactttttaaaattgtatgtctgtctcttttgatctaaatttcctaagattaat

SEQ ID NO: 126732 - DNA, 537 bp, Homo sapiens
ggaacagggtggtgtgcgagcacaaagaagagaagttattccctcatcctcagggagaagatagcaagaaagtcatgagttttgcatttaacagtgatggcccctgatggccatgtggaaccccaggaggcagatgagacttgctcagaaagttgcagagatactgcttgtggcaccatgggatctgtcaatggcctgcagaggtgctcaggtgaaggcaaacctactgtttcaaactcttacaaaaattgctgttggatgtccaggaaaatagtgttcacaggcaaaaagcacaggtttaaagaggaaaatctacatgcaaacatggcctaaaagtatttaactcctgggtctctgccaccacctttcaattatctgaaaaggaatcccttgctctttaattacagtgctttggagtccacagggctttccaatatagttacttcatgtggttggaatcagggcccttccttggaataaaartgtaatttaaaacactaggaacaagaaagggagctaggaaagccatggggcccc

SEQ ID NO: 126733 - DNA, 619 bp, Homo sapiens
aataaaactaatcaaaaaaagtaggatattttgacacagtccctgaaactagtagaacatgcagacaaaaataaaatcagtaaaaatgtagaggctctaaacaacacaattaacatgaccagatgggcacatacagaatactatgtccagcaatggcagaatacaatgaaatgaaaactccagaaaattcatcagtgaagtcttccagactaattaggaagaagtaatgccaatcaaatacaaactctttaatattgcatatatttatggaaaaagattaacctgggccactacctcacaccatacacaaaatcaggcccagggagaattttttaaaatctgagtaaatctaaatctgagaggtaacacaaatatagcttcttaaaaataaaataaggmgatatcttcatgactcttgagtagacaaagacattaaataagacatttttaaaaatcatccctaaaggaaaagattaatgaattggaaaagtgaagaatttgtgtacattgtgaaaaagcatgtcatcaaaaggcagaaaaatatttacaatgatgtatctgattaaaaaatttttatctagaaaaaataattattagtaagaaaatgacagataagcca

SEQ ID NO: 126734 - DNA, 607 bp, Homo sapiens
cactaaccaactggtgacaagttgaactattgccactttggaagagatagaaatttattttkcctggattgacacatatgccaggtgtggatttgcttctattcacagtgccttggccatcaccactatataaaagtgtataaagtgtttgatctgttaacatagtatactgcaaaatgttccattagtccaaatgacgaattttacagcagagtgggaacataaccatgggatgcactaaccctatcatatattgcacaaaccaaaactgctgacctggtatagttacagtgtggccttttgaatgcacaaatgacctgtcaacttagagatgacaatctgtgatgatggggtagcattatcagcatgcactttaaatcagtaactattatatagttctgggtttccagatagaacacaacattttagggagccaaggagtggaagtaggattgacccttttaccatctttcccagactcccacttggggaatatgtgctttttgtcccttcaaatgtcagctttgtggctctagagattttggttatcacagataaactgttgccatcatggacacagtcagagtctcaagaaaaatttaagcta

SEQ ID NO: 126735 - DNA, 607 bp, Homo sapiens
cactaaccaactggtgacaagttgaactattgccactttggaagagatagaaatttattttgcctggattgacacatatgccaggtgtggatttgcttctattcacagtgccttggccatcaccactatataaaagtgtataaagtgtttgatctgttaacatagtatactgcaaaatgttccattagtccaaatgacgaattttacagcagagtgggaacataaccatgggatgcactaaccctatcatatattgcacaaaccaaaactgctgacctggtatagttacagtgtggccttttgaatgcacaaatgacctgtcaacttagagatgacaatcwgtgatgatggggtagcattatcagcatgcactttaaatcagtaactattatatagttctgggtttccagatagaacacaacattttagggagccaaggagtggaagtaggattgacccttttaccatctttcccagactcccacttggggaatatgtgctttttgtcccttcaaatgtcagctttgtggctctagagattttggttatcacagataaactgttgccatcatggacacagtcagagtctcaagaaaaatttaagcta

SEQ ID NO: 126736 - DNA, 607 bp, Homo sapiens
cactaaccaactggtgacaagttgaactattgccactttggaagagatagaaatttattttgcctggattgacacatatgccaggtgtggatttgcttctattcacagtgccttggccatcaccactatataaaagtgtataaagtgtttgatctgttaacatagtatactgcaaaatgttccattagtccaaatgacgaattttacagcagagtgggaacataaccatgggatgcactaaccctatcatatattgcacaaaccaaaactgctgacctggtatagttacagtgtggccttttgaatgcacaaatgacctgtcaacttagagatgacaatctgtgatgatggggtagcrttatcagcatgcactttaaatcagtaactattatatagttctgggtttccagatagaacacaacattttagggagccaaggagtggaagtaggattgacccttttaccatctttcccagactcccacttggggaatatgtgctttttgtcccttcaaatgtcagctttgtggctctagagattttggttatcacagataaactgttgccatcatggacacagtcagagtctcaagaaaaatttaagcta

SEQ ID NO: 126737 - DNA, 641 bp, Homo sapiens
taaaaatggatacatcagaaatattgtaaaaagccagttgctgagtgataaagttttaaaacttacaaaattactatatttttataaatacatatatttatattaatctataaagttatacaaatatgtatccaaatgataaactttatatcaaaacaatgactgctcacaaatagagatgcataaaataatttaaccaatattaaacttcttaatgtttaaacaaaattcaagagaaaatatgaaaagactattattttaatgaagttgaatgatgtgaatgtggatgtatattttttaatttctgattgttaaaaatattatatattaaaagaaatctcactgaaaagtaaccctaaatctttatttyaaaatttatggtaaatatttaataaataagagtgaacaaaataaatttgaaaattatggtgatttagcaattgtctagaaaatgttaatatttaacataaatctactatagtagaaataatatatgtatatgattttcaaaagtaaatgatttgccattaaatcaaaggaagaagaaagatcaaaaaaatatgttttagttaacaaatgatcaagagggcattttataacagtgaaaaagtaaattctttgttttttaaatttttgggggc

SEQ ID NO: 126738 - DNA, 641 bp, Homo sapiens
taaaaatggatacatcagaaatattgtaaaaagccagttgctgagtgataaagttttaaaacttacaaaattactatatttttataaatacatatatttatattaatctataaagttatacaaatatgtatccaaatgataaactttatatcaaaacaatgactgctcacaaatagagatgcataaaataatttaaccaatattaaacttcttaatgtttaaacaaaattcaagagaaaatatgaaaagactattattttaatgaagttgaatgatgtgaatgtggatgtatattttttaatttctgattgttaaaaatattatatattaaaagaaatctcactgaaaagtaaccctaaatctttattttaaaatttatggtaaatatttaataaataagagtgaacaaaataaatttgaaaattatggtgatttagcaattgtctagaaaatgttaatatttaacataaatctactatagtagaaataatatatgtatatgattttcaaaagtaaatgatttgccattaaatcaaaggaagaagaaagatcaaaaaaatawgttttagttaacaaatgatcaagagggcattttataacagtgaaaaagtaaattctttgttttttaaatttttgggggc

SEQ ID NO: 126739 - DNA, 543 bp, Homo sapiens
ctacttctttttgtctttggatgccttttatttccttttcttgcctgattgctctggccagcycttccactttgatgctgaatagaagtgtgtgtttggtggagggcagcctacccttgctctcgatgttagagggaaagctctcagcccttcactattgagtgtgatctggctgtggggctgccatgtgtccttctgtgccacatgtgtgctgggacatcacactatactgatgctgagagcttgatcatggaaggtgctgagcagaagcctccagggcacccaccatcttccttctgtgccacatgtgtgctgggacatcacactatactgatgctgagagcttgatcatggaagatgctgagcggaggcctccagggcacccaccatcttccttctgtgccacatgtgtgctggggacatcacactatactgatgctcacagcttgatcatggagggtgctgagcggaggcacccaccatcttccttctatgccacatgtgtgctggggacatcacactatactgatgctgagagattga

SEQ ID NO: 126740 - DNA, 492 bp, Homo sapiens
gtaaaagaaagctacacagatgcacgtgagaatatactttcacaggcactgcgttttaaataggaatcaggaagttctgccaactccattttattaaaggcataaccaaggcttggttgcttcactaacatgtgactgttctaaaaattatcactcatcaaaattattttgcaaagaaatacgaatagaagagtagggaaagaaacaaatatttaaatacaactgtcctggctagtaataccacatttctgtaatgcatttttttacagatgtgtataaatagatataaataggtgtcytaagttggagcaataacgtcttccaccctcttgcttattggctttctcccatatttcttctgcatttacatatttctggtataattttagatttggggcacacttggtttgaaaagggtcgatggtttctccactacttttgtctcacattccaaaaaacaaaggggatgccattcttcatggcagcacctgc

SEQ ID NO: 126741 - DNA, 576 bp, Homo sapiens
gtgactcatttatgcagttgcacgaatgagtctatttattcctttgcattgctgagtaacattccattctgtgtgtacacagcaaattgtttattcattaactgctgaagaacagttgagatttttccaattaaagttatcgcaaaaaaaactaatataacacttgcatataagttttttcatagatccttggtatgcatttaatcactatagtgttgtgtaatggtatttttttattatactttaagttttaggktacatgtgcacaacgtgcaggttagttacatatgtatacatgtgccatgttggtgtgctgcacccatcaactcgtcatttaacattaggcatatctcctaatgctatccctcccccctgcccccaccccacaacaggccctggtgtgtgatgttccccttcctgtgtccaagtgttctcattgttcaattcccacctatgagtgagaacatgaggtgtttgattttttgtccttgcgatattctgctgagaatgatggtttaatcacagttttaatttacattttacagtatattaataatgttgagcaacttttcatgt

SEQ ID NO: 126742 - DNA, 612 bp, Homo sapiens
ctagtccacaggaaatcttcacatgaattagcaaaaagccccagctgggcagctgcacctttgtggtttgacaggyagccagtaataattcaaaaatcgcccacttttccaggatggcgcagcctccacaaggaaacacggtttggagagcagagcaagggtcttgtgtcgtcacctcaattgtttgcctattttagggaataacctgtgcaatgctcaaacaacacgttttttaactttataatcaggtcctcatcttcttgttctttcatctactaattgaagatgattgaaatggcaaaaatggcttcaataagatgaccttaaaaggaggtgggggcaatctttgaaggatccctgtgttgatttctttagagaagaactttgcaaagagttaaataatgtcactgttatataagtcacattggatccttcaagccagaaaatcagttagttaattctaataacggtttaattgtttatattcaattcatggaatcagagtcaagatattggaagctcactttgccaaaggtaaaacatctaacattgtaaatgttattgtaaaattattttatatgttcaacattaagaacaaatgacttgctctgt

SEQ ID NO: 126743 - DNA, 612 bp, Homo sapiens
ctagtccacaggaaatcttcacatgaattagcaaaaagccccagctgggcagctgcacctttgtggtttgacaggcagccagtaataattcaaaaatcrcccacttttccaggatggcgcagcctccacaaggaaacacggtttggagagcagagcaagggtcttgtgtcgtcacctcaattgtttgcctattttagggaataacctgtgcaatgctcaaacaacacgttttttaactttataatcaggtcctcatcttcttgttctttcatctactaattgaagatgattgaaatggcaaaaatggcttcaataagatgaccttaaaaggaggtgggggcaatctttgaaggatccctgtgttgatttctttagagaagaactttgcaaagagttaaataatgtcactgttatataagtcacattggatccttcaagccagaaaatcagttagttaattctaataacggtttaattgtttatattcaattcatggaatcagagtcaagatattggaagctcactttgccaaaggtaaaacatctaacattgtaaatgttattgtaaaattattttatatgttcaacattaagaacaaatgacttgctctgt

SEQ ID NO: 126744 - DNA, 573 bp, Homo sapiens
cctaagaaagaatgcagaggaacccctcagtgaatggggaaagggtctcagaatgttggcttccattggttctcattgaagtgaaatatcttggggcaactgtttttaaggagagatactgataaaacaaatgctgcatgagctttgagaatattaagataacatttagaattaggaggaggtaacaatttgaggatgaattaattttaagttcacagaaaactaatataacttttctaaacctakaccattatttaccccataggaagtaaaatatgcacaaaacaaagacaagaagatacactgcttggctgaactgtaaataatatttgcctaaccaaaatcatacaacagggttggaagaaggagagatgggatatgtgtgagtggttgatctgtatcatctttcatagtagaaggttagtacataatacttaaaactgagaaagcaaagaatagaacaaaaagcatattatttaaatatatggagataataataaagctaatgggttttgtttttttttcattttgagatggactctcactctgtcaccgaggctggagtacagtggc

SEQ ID NO: 126745 - DNA, 517 bp, Homo sapiens
agaatgagtaaataaattgtaatatattcatgsaatttacaataacaaaaatcaaaatgaattaattagatctatgtgtaaagacatgaatggatatcaaaaatgcaatcttgagtaacaaaggggaaacaagttgttaaaaactgtagtatgaaatagttctgtaaataggtaagaaatagcaaccatatgtattattagtggatatatctcataataaacatagaaaatgggggctgcaatgatacacaataaaattcatattggtgattgcctttagagaagggggaatgatattagggataagagcttccatgttatctgtaatactttagatttttaaaataaataagttgcatgatgaaatacattttttaaattatagttaggagaaggagtccaggagaaaaatctgacactgccactaaaaggtaagcaacaggaggaagtgagatttggtgtttgtttatttttccatctgttctcatattatacaaggcatataattaccattggt

SEQ ID NO: 126746 - DNA, 547 bp, Homo sapiens
tggatgctatgagagcgtgaacactggcgatattgtttgaggccctgagtgcatttatgccttaagtgctgcattgagttattgagccaatatatcttttcctctgtgtttttttaaatcaaaatcaagttgatttgagtttattgtcacttgcaacaaaatattwctggatttccacaaattcacaatcagttggggaaaagtcgatatgtgaacaggtaaacactgaaaatagatggtttgtatgatacaggtgaacacgagggcctttaaccagtgtgggtgttgaggtgggggaaagtgtccacttccctccaggagacaatatctggtctgaatcttgaaatatacttagcagttgtcatgatgtatctatcaaacagaggatggcagagagacattccagggagaagagaaggcatgagtcaaggcatggcgtgaaatgggatgatagtttctgggaactacaagtcactcatactagctttaatgcagcctggatggtgaaggcaaagggagagatgctacagagaaaggcacaggccat

SEQ ID NO: 126747 - DNA, 547 bp, Homo sapiens
tggatgctatgagagcgtgaacactggcgatattgtttgaggccctgagtgcatttatgccttaagtgctgcattgagttattgagccaatatatcttttcctctgtgtttttttaaatcaaaatcaagttgatttgagtttattgtcacttgcaacaaaatattactggatttccacaaattcacaatcagttggggaaaagtcgatatgtgaacaggtaaacactgaaaatagatggtttgtatgatacaggtgaacacgagggcctttaaccagtgtgggtgttgaggtgggggaaagtgtccacttccctccaggagacaatatctggtctgaatcttgaaatatacttagcagttgtcatgatgtatctatcaaacagaggatggcagagagacattccagggagaagagaaggcatgagtcaaggcatggcgtgaaatgggatgatagtttctgggaactacamgtcactcatactagctttaatgcagcctggatggtgaaggcaaagggagagatgctacagagaaaggcacaggccat

SEQ ID NO: 126748 - DNA, 569 bp, Homo sapiens
aaagttgaccttgctttcactcctatcaggagcaactttctcagtgacatctgttaaaagcatttaaagaagtatactatctatatccatgcaggaaaagaaaaggtgggcaagacaagcagcatacagacccaaagcctggaaaggtagagggtgargaggaatactttttggaggaaacagagcatggaagattcactacatatactgtggaatctagaatgcaatgtgccccaacagtagatttgagcagaaaaataaagaatcaggaaacttaaaaatacaacaattgaaattacccagtctgaaaaacagatagaaaaaataataaaggaatgtgaacagaacctaaatgacttctgtgactccatcaagtgaaccaacatacacactgtgggagtcttagaaggagaagaaagaggtaaacagaataatggcttcagaataatggctgaaaatttcccaaatttgatgaaactcatgaatccacaagtctgagacattcagttgtctccaagtaatacaaatgaaaagagatccacactcaaaaacacatgggatattcccca

SEQ ID NO: 126749 - DNA, 600 bp, Homo sapiens
tcatcctaaccattgtcacgagactattttttcctaatagrcatcaacatttatttttgttattcttattggccttatttattgacaccaattgtgtctctttctaaggattagtaatccttaccaaatatcacacggactttcttacctaaaaccagctcccagtatttaaaaacaaaacagaacactttcttccttagatattagatcaacaatggtttcttcctttcaaaaaaactcaagtattttaggcagatcagaacatttgtcagaaacacattttcaagtgtgttcttatagcgctatcaggactgtggagcctttgcataccactgacttggcctttctgcacttcagtttgcaggactgtgaaaataggtataatgatatgtttttcaagtgttttttgtgagaactaagtcagggaataaataaagcatctggcatatagtaagctctcataaattgttagttcccttcttttgacaaaatgaaaggactttttaagcacatttatttgttgtttaaacagttctgccagcatcagtcctgaggcacaggctaaataagacgccatgattttccctgcatggagaccaa

SEQ ID NO: 126750 - DNA, 600 bp, Homo sapiens
tcatcctaaccattgtcacgagactattttttcctaatagacatcaacatttatttttgttattcttattggccttatttattgacaccaattgtgtctctttctaaggattagtaatccttaccaaatatcacayggactttcttacctaaaaccagctcccagtatttaaaaacaaaacagaacactttcttccttagatattagatcaacaatggtttcttcctttcaaaaaaactcaagtattttaggcagatcagaacatttgtcagaaacacattttcaagtgtgttcttatagcgctatcaggactgtggagcctttgcataccactgacttggcctttctgcacttcagtttgcaggactgtgaaaataggtataatgatatgtttttcaagtgttttttgtgagaactaagtcagggaataaataaagcatctggcatatagtaagctctcataaattgttagttcccttcttttgacaaaatgaaaggactttttaagcacatttatttgttgtttaaacagttctgccagcatcagtcctgaggcacaggctaaataagacgccatgattttccctgcatggagaccaa

SEQ ID NO: 126751 - DNA, 507 bp, Homo sapiens
atagcttctctgacacctcacatgggcccaactattcagaattccttttttttttttttttttttccatttggctggttctgtgtagttcttcaaaccttggcatgcttatttcacttgttgggatagacagaccaataagcttgctgatcccaccactggggacagcagcatccaccagggactggcatattcaggtgagctctcttgatggattgatatccactgtatgttttttggtttgaggttaccatgaggcttgcaaatactatcttataatccattattttaacctgataacaacttaacactatttgtataaacaaacaaacaatcaaaaagaaaactaataaaaactctacatcttaacttcattctctccaccatccccccacttttwaaatttttattgtttcaattttactaactatgtcttgaaaagctgttgcagttatttttggttggttcatcttttagtggttccacttaggatatgagtagtttatgc

SEQ ID NO: 126752 - DNA, 524 bp, Homo sapiens
ttctgcagagctgccaatgactggccagacagctagggagccctgcagagtaccatgacccaggtcaccaggtcacccctctgtcctggctgatcatccttgtgatggtcatctaacctggcaataggttatatgacctggcaacaggggttatagaaaaaatgctccccactcagttgatggcatgttttatacccagtgatgcctgtgtttacaagagcagagttgatgaataagcctgtgctgacctccatggggagacggccggtttttgaggctcaggacaccttctatttgttgtggacacctggccccgcgtgcctccctgctctgcattttgtagtagcagcccagtgtcggctgagacattagcccttaaagcatgccctcttttgggaaatgaactgctagttggcttgaaggtaggaggctggagcagctgctgatttaaatgtcatcaaagtctcaggacactcatgtagcaggstaacatttatgtaggagtaacaaccggatggatatag

SEQ ID NO: 126753 - DNA, 591 bp, Homo sapiens
aatatagtgaaatatataagtcaacagtaaaagaataaaaaaaaatatattgtgacccagtgcggtagctcttgcctgtaatctcagtattttgggaggccaaggcaggaggattgcttgaggtcaggagttcgagaccagcctggccaacacrgcgaaaacctgtctttactaaaaatacaacaattagctgagcttggtggcacatgcctgtaatcccagctacttggaaggctgaggcatgagaatcacttgaacgtgggaggtggaggttgcagtgagccgaaatcacaccactgtactccagtctgggtgagacagccagaccctgtctcaaaaaaatgaaaaaagatatactgcccaaacattaaacaaaaagaaagagactatatcaatgtcagattaactagacttcagaacaaagaaaataacaaaagacagagaaggatgttatataatgataaaagagtcgatcctcccatagaaattcaaaatgttaatgcaccaattaacagagcttcaaaatatgtgaagaaaaactgaatgaactgaaggaaaaagtagaggaaaccaacaattacatttcaagac

SEQ ID NO: 126754 - DNA, 515 bp, Homo sapiens
aaaaacttagaaaaaaaaagatcaaaataaaggcaaagaaagaagaaaggtaataaaaataaaagcagaaatcaataaaattgaaaacagataaataatagagaaaatcaataaaacaagaagttsgttatttgaaagtaaagtaaggttgacaatttctagaaagactgacaaataagagataagacacaaattgccaatattagaaatgaaacgggatatctagagcctgcagacatcaatatgataagaaatgatactaccaaaaaaaaaaactctatacctaaaattagaacacttagataagcatcaattagttccttaaaaacacaaatagctacaattctcccaatatagcaatttgaatagttctaaaactattaaagacccacaaatgttacatttataatttaaaaccactcccaaaggaaatatagccaagctatttcattggaaaattcaaccaacagcttaaagaagaatttctgtacaatttctttcagaaaaaagaaaag

SEQ ID NO: 126755 - DNA, 515 bp, Homo sapiens
aaaaacttagaaaaaaaaagatcaaaataaaggcaaagaaagaagaaaggtaataaaaataaaagcagaaatcaataaaattgaaaacagataaataatagagaaaatcaataaaacaagaagttcgttatttgaaagtaaagtaaggttgacaatttctagaaagactgacaaataagagataagacacaaattgccaatattagaaatgaaacgggatatctagagcctgcagacatcaatatgataagaaatgatactaccaaaaaaaaaaactctayacctaaaattagaacacttagataagcatcaattagttccttaaaaacacaaatagctacaattctcccaatatagcaatttgaatagttctaaaactattaaagacccacaaatgttacatttataatttaaaaccactcccaaaggaaatatagccaagctatttcattggaaaattcaaccaacagcttaaagaagaatttctgtacaatttctttcagaaaaaagaaaag

SEQ ID NO: 126756 - DNA, 515 bp, Homo sapiens
aaaaacttagaaaaaaaaagatcaaaataaaggcaaagaaagaagaaaggtaataaaaataaaagcagaaatcaataaaattgaaaacagataaataatagagaaaatcaataaaacaagaagttcgttatttgaaagtaaagtaaggttgacaatttctagaaagactgacaaataagagataagacacaaattgccaatattagaaatgaaacgggatatctagagcctgcagacatcaatatgataagaaatgatactaccaaaaaaaaaaactctatacctaaaattagamcacttagataagcatcaattagttccttaaaaacacaaatagctacaattctcccaatatagcaatttgaatagttctaaaactattaaagacccacaaatgttacatttataatttaaaaccactcccaaaggaaatatagccaagctatttcattggaaaattcaaccaacagcttaaagaagaatttctgtacaatttctttcagaaaaaagaaaag

SEQ ID NO: 126757 - DNA, 567 bp, Homo sapiens
tgtatgttttcttttgaaaaatgtctgttcatgttctttgcccatctttcaatggggttgttagtttttcttttgtaaatttttctaagttccttatagatgttggatattagatctttgtcagatgcatagtttgcaaaaattttctcccattctgtaggttgtctgttcactctgatgatagtttcttttactgtgcagaatctcttggacacagctcaggtattgttargaaggaaattcatagcactaaatgcccacatcaaaaaattagaaacagctcaaattaaacctaacttcaaaatggaaagaattagagaaacaagaacaaatcaactccaaggctagcagaagacaataaataacacaaatcagatctgaactggaggaaatcaagacccacaaaaaattcaaaagagcaatggattcaggagctggtttttagaaaaaattaataaaatagactactagctagattaataaagaagaaaagagataagtcccaaagaaacacaacttcttagatgaattttattggttcattcggcttttctattacttctggag

SEQ ID NO: 126758 - DNA, 499 bp, Homo sapiens
gaattctgtgaaatacaattcaagtgaaaattggtgggagatgggtggggcagggaatactgtcaaaccatatcaaagaccatgctgttcttctttcctaaattcatataccagatatttgttgagcttccatgctttcaattcaatgtgttccccaaaagtatgtgttggaaacttaatctctaatgcaacaatgttaagaggtaggacttttgacaggtgattagtccatgagagcttcaccttcatgaatgaatgaatgtcagtaataaaagagtttcagtctctcagttggatcagaggcagaagcctcttgctatgggatgatgcagcaagaaggccttcactagatgttggtaccttgatattagacttcccagcctctagaactgtgagaaataaaattcttctccttmtaaattacccagtttgtgacattctattatagcaatgcaaaacagataaagacaatccacatatcaataattatgctcagttt

SEQ ID NO: 126759 - DNA, 590 bp, Homo sapiens
tcaaaaggagaataattaaggggcaagcctcagtgtacaaacctattacaagctcctacttatacaatgtctgctaacatcacatggtttaaagcaagtcaagtaggtaaagtgtcacaaaaaaattttactttgtaggtctacaggaagacctacaaagttacaaactcatggaaatgaaaagggcaaataatggttaggcaatcattcaattttccataacttccaatatagccatagatgagcttacctctctctgaaatgcatagtaatagattaacttacctctctctgatgaaaacatagcaaagacaaggaagttttgaatactgcagttatcaaactggacttaatggaacctataaaacataacatcagacaaattttgaactttgaggcggtatttttataactcggccatttatggagacatatagaaatcagcaagtgttaaataatcagagytcacaggctatttttacaaagctgttaaactgtacaacaacaataaacagaaaatttgaaacccccaagaaaacagcttcaataaactcaaagcggattttcagaaaagtgttaagtcactagca

SEQ ID NO: 126760 - DNA, 605 bp, Homo sapiens
attcacacgggggaagggaagtatcaaattccaatattcttctgcttttctacctagcctcaaaggaggaggagggagtagaaacagagaagtaattatgaargtcaaaacccagcggcacagactcaccaaaagactgaggcataatgaaaggaatatagaacactttctctttcccaacatcttaccacaacataaattgggttcctgtatcataacaggaatatcgtaacaggagaatacaattgtaagaaatatatttatcataccttacttaagaataaatctctagggaaatccaaagccaataggggagacaaaaacaggaaaaatgaagcttcagacacttaaagttatagcaaacaataaacataggctaactccttgtgaaataaccataaaacgtcatagtaaagttctatttactgtcattcttcttactcagtgtatcatgtctagctttcaataaaaattgagaagacatacaaacaaacaaataaacaaaaacctcaacatactttgaagagacttaagcataagaaccagactcagatatgggagaggttgtggaatcatattaggagttattgataattgtaattaat

SEQ ID NO: 126761 - DNA, 540 bp, Homo sapiens
agggaatcaaagaattcaggactgccaagcaaataaaatattccctctcaaattaagcaacaaattcatagataacaaggtttatgccatgaatttgaaggatgtctcctttgtagcgcaagacaaaggaagcatagaggaataaatattgattgaactaatcatctgatgaatagaaatgagatttaccagtgcaccaatataataggctatgttaactagttctttcatagcgcatatgctgccctttcaacccctgaccccatccattcaattcttaatgagggaaaccacaggtgttataacggcatttatagtgaatcaagctacatataataaccatgtggttaactaatggcactgggggtagattcttatgaaaggaaatattgtgatcataatgtgacaaaattattgtatatttcaaaccacttagaattttggyttgctcaggtaacctctaaaatatacctacgtggccattaatatctcaagtcccagatttggtggctctgtaataagtgcaaattttattagtgc

SEQ ID NO: 126762 - DNA, 547 bp, Homo sapiens
cacagtcagtcaactgaccaaactgtaatcaaataaggcaaatgcctagttgtagccaatcagatgatttatctcctttgtttctrtgcttggcctaaaaaagttcactgctcatgctgctgggcaaagctctctgaactacttgttctgattactgccctgttcatgaattgttctctgttaaatgtatctaaagtatttattttaatacctatatgaatgcatatatatatccaccaacagacatatgcaagaattttatagctgtataatttataaatgtccaaatattttcttaatccagtctatcattgttggacatttgggttggttccaagtctttgctattgtgaatagtgccacaataaacatacgtgtgcatgtgtctttatagcagcatgatttataatcctttgggtatataccaagtaatgggatggctgggtcaaatggtatttctggttctaggggagtggaaggatggcattaggagatatgtctaatgtaaatgatgagttaatgggtgcagtacaccaacatggcacat

SEQ ID NO: 126763 - DNA, 566 bp, Homo sapiens
caacagaaaaaaaaataaagttgaagagcacatcacttagacatatcaaagccaacttctgaaaactaaggataaagaaaaaaatctcaacagaagccagagaaaaatgataaaataataagaacctgatcaaaaacaacggagaacaaaaatctatggagcaatatctttaaaatgctgaaagaagaaaaaccatctactctttttctggatttagcaaaaatatgcttcaaggtaaggtcattgaaaggtacattcaygaaaaagaaaagtaaggtaataatagattgttctcatacaagaagtacaagaaatactaaaagattttcagcttgaagaaaaatgaaactggaaaaaatcacaatcgttagaattgaatgaaaatattggaaatgttaaatatatgggtaaaaataaaatcttttttattaatgtatttaaaatatatatgattgtccataacaaaaattatgcaatattatggtgggaatatatgtagaatataatacctatgtcatttaaagcacagagggtgatggggactggacctaatatggttgcaagtt

SEQ ID NO: 126764 - DNA, 566 bp, Homo sapiens
caacagaaaaaaaaataaagttgaagagcacatcacttagacatatcaaagccaacttctgaaaactaaggataaagaaaaaaatctcaacagaagccagagaaaaatgataaaataataagaacctgatcaaaaacaacggagaacaaaaatctatggagcaatatctttaaaatgctgaaagaagaaaaaccatctactctttttctggatttagcaaaaatatgcttcaaggtaaggtcattgaaaggtacattcacgaaaaaraaaagtaaggtaataatagattgttctcatacaagaagtacaagaaatactaaaagattttcagcttgaagaaaaatgaaactggaaaaaatcacaatcgttagaattgaatgaaaatattggaaatgttaaatatatgggtaaaaataaaatcttttttattaatgtatttaaaatatatatgattgtccataacaaaaattatgcaatattatggtgggaatatatgtagaatataatacctatgtcatttaaagcacagagggtgatggggactggacctaatatggttgcaagtt

SEQ ID NO: 126765 - DNA, 654 bp, Homo sapiens
tgtctctgcacttgctgtctatgatatgtttctatttatcagagtcctggtgctgcttttgttagagaacaacagtgttgtaccatattgttaattgytttttaatatattaatttggtcatgatgttctgttttaaattagattcagtatattttaaaggtttttgattgggtattaatgtggggatatgagaatccctcacactacttaggtttgattaatatacagatgtttaaaaattcagacttactgaatcttttgcttgataatcttaatatattttggtgtgtttaattgtatgcatggtatattcatgatatttatattgatggattattttttgttttgcaaagacatattttttaaaaaaaattgtgagtacataataggtgtatatatttataaggcatatgagaaattttgatacaggaatacaatgtgtaagaatcacatccgggtaaatggggtatgtatcacctcaagcatttatcctttctttgtgttacaaacaatccaaatatacttttagttattttaaagtatacaataaattattgttgactgtagtcaccctgttgtgtcatcaaatattagatcttgtatattctattcaactgtatttttgtacccatttaacatgccccctctcccca

SEQ ID NO: 126766 - DNA, 654 bp, Homo sapiens
tgtctctgcacttgctgtctatgatatgtttctatttatcagagtcctggtgctgcttttgttagagaacaacagtgttgtaccatattgttaattgttttttaatatattaatttggtcatgatgttctgttttaaattagattcagtatattttaaaggtttttgattgggtattaatgtggggatatgagaatccctcacactacttaggtttgattaatatacagatgtttaaaaattcagacttactgaatcttttgcttgataatcttaatatattttggtgtgtttaattgtatgcatggtatattcatratatttatattgatggattattttttgttttgcaaagacatattttttaaaaaaaattgtgagtacataataggtgtatatatttataaggcatatgagaaattttgatacaggaatacaatgtgtaagaatcacatccgggtaaatggggtatgtatcacctcaagcatttatcctttctttgtgttacaaacaatccaaatatacttttagttattttaaagtatacaataaattattgttgactgtagtcaccctgttgtgtcatcaaatattagatcttgtatattctattcaactgtatttttgtacccatttaacatgccccctctcccca

SEQ ID NO: 126767 - DNA, 654 bp, Homo sapiens
tgtctctgcacttgctgtctatgatatgtttctatttatcagagtcctggtgctgcttttgttagagaacaacagtgttgtaccatattgttaattgttttttaatatattaatttggtcatgatgttctgttttaaattagattcagtatattttaaaggtttttgattgggtattaatgtggggatatgagaatccctcacactacttaggtttgattaatatacagatgtttaaaaattcagacttactgaatcttttgcttgataatcttaatatattttggtgtgtttaattgtatgcatggtatattcatgatatttatattgmtggattattttttgttttgcaaagacatattttttaaaaaaaattgtgagtacataataggtgtatatatttataaggcatatgagaaattttgatacaggaatacaatgtgtaagaatcacatccgggtaaatggggtatgtatcacctcaagcatttatcctttctttgtgttacaaacaatccaaatatacttttagttattttaaagtatacaataaattattgttgactgtagtcaccctgttgtgtcatcaaatattagatcttgtatattctattcaactgtatttttgtacccatttaacatgccccctctcccca

SEQ ID NO: 126768 - DNA, 623 bp, Homo sapiens
aattatttcctattcctagaagtttatattcagtcatttgaagactgtgcaattaaagaagatatctaactgagcttaagctcatttaaagtaaccaagcaccttttacctcctcatccatcttggacttcagttccccacccccagctatgttcattctaactactatgagataatattatttgatggagaaggtggaggcaaaatggatttgtgtagctttatggtcccttctcctgttaatgatcttcctcatttgtattcttctccttgcttttctctatattttttcaagcattggtccattcagaactttggcatcctccagcactttctaatgttttgtgccatttttatatttgycttgcattatgattttcctccatcttcttctaccatatttctttgcttgaaaccacaccttcacataccataaagggaagagatttttttttcagttgtgttcctgcctcttcaaattcctctgtggtcataaaaaagcctgtcttgccaaaatgtcacgtagctataaccttgcgccaaatagtacatcttgtttccaaaagctgtttttttggcagctggtaggaacatggattattcatatctgcagaaatcacaat

SEQ ID NO: 126769 - DNA, 633 bp, Homo sapiens
  misc_feature (1)...(633): n = A,T,C or G
tctatcttcctactggacagtaagccttataaagccaggattaagtctattttgctttatatccccattataaaactctatatttagcacagagtaagtggggaaggaagggaggaaaggagggagggagagannnnnnnnnnnnnnnnnnnnnnnnnnnnnnnnnnnnnnnnnnnnnnnnnnnnnnnnnnnnnnnnnnnnnnnnnnnnnnnnnnnnnnnnnnnnnnnnnnnnaaaggaaaggagggaggaaggaagcaaggaagtaagcaaggaagkaaggaaggaaggaaggaaggaaggaaggacagtagatcttttgaaatattttcagggcttcacagtttctacagtttcctcatttttaaaatggggataaaaacacaacttacttcctagaactatcatgaggataaaatgagatggtgtacttaaagcaatttgcatttgtttgcatgtagtaagaactcagtaaatgtaaaatagtattatcatatgaaaactggatatgatatatgggtggaataaggactgagggcttctcctcaacttaaggggcatattccagtggtcccctggctgtgtaaaggaagaatgtgctacctcaagaaggagtaaaatccctatcacagga

SEQ ID NO: 126770 - DNA, 572 bp, Homo sapiens
cattgtagcttaaaacaacatgcattattatctcacagtttctgtgggctagaggtctaggtgtagcttatctgaatcctctgtttaggtctcacagactgtaatcaaggtgttgggtaggctrtgttctcatttggaagatcaactggagaagaatctgcttccaagctcacttaggttgttgacagaattgatttccagaaataaagtgggcaatatcctaaaaaagatctgtctctctcctaaacttcagtaggaatttttaacagtcaacatcttaatgtaagtcagaggtaggggataaaatcatatccctattcttctaaatagcaggaaaggcatagaaagaaagaggaattaatatatttttccatcattctcctttcctttaccaaaactggtaaaggagttcccctgaagaatttgactcttaccatcttgagggaagaagatgtgatttcaaagttcccattggttctttgtatagctaaaggtagaggcctctgcaaaggccatgtctttttacagagctctttagtaagcttttggccgaaaaaaaaaaatgggtcaat

SEQ ID NO: 126771 - DNA, 572 bp, Homo sapiens
cattgtagcttaaaacaacatgcattattatctcacagtttctgtgggctagaggtctaggtgtagcttatctgaatcctctgtttaggtctcacagactgtaatcaaggtgttgggtaggctgtgttctcatttggaagatcaactggagaagaatctgcttccaagctcrcttaggttgttgacagaattgatttccagaaataaagtgggcaatatcctaaaaaagatctgtctctctcctaaacttcagtaggaatttttaacagtcaacatcttaatgtaagtcagaggtaggggataaaatcatatccctattcttctaaatagcaggaaaggcatagaaagaaagaggaattaatatatttttccatcattctcctttcctttaccaaaactggtaaaggagttcccctgaagaatttgactcttaccatcttgagggaagaagatgtgatttcaaagttcccattggttctttgtatagctaaaggtagaggcctctgcaaaggccatgtctttttacagagctctttagtaagcttttggccgaaaaaaaaaaatgggtcaat

SEQ ID NO: 126772 - DNA, 571 bp, Homo sapiens
gtggttcaaagggactcaaggtttagagacacttgatctcatagtcgccactctagaattttctgactggttacctttgtctggaaaacttttgccctcattgtctgagtgactaggtggtttgagttttttttttttaattacttttcttcttcttttttttttttgagacagagtctcactctgtcacccaggctggagtgcagtgtcatgatctcggttcactgcaacctctacatccagggttcaaataattctcctgcctcagcytcccaagtagctgggattacaggcacctgccaccacatccagctaatttttgtgtttttagtagagacagggtttcaccatgatggccaggctggtctcgaactcctgacctcaagtgatccacccacctcagcctccaaaagtgctgggattacaggcattagccatcacgcctggcccctgtctttttattctctaactattacagaatctttcacagaacaaaagtctttaaatttgatgaagtccaatttatcaattttttcctactatgcctcatgtttttgatgtcaagtttcag

SEQ ID NO: 126773 - DNA, 579 bp, Homo sapiens
ctgacatatttttaatgaagcatgccttgtaaaataataagtgaatgaaaactacacagtaatatttacatcaacaaagctagaagactgtatgtctcaagaggctccattatctacccagtggccacttgaccaaattaagatccaaataccaaaaagaaaagtaattaaaatttgtgttgtatgccttataagaccaaacctataaaatgaggggaaacttcacaattacttstaatttgctctgtggaattgtaacagatggattataaagatgattccatgataaacatctaaatgtggttactaccttctgtgctttcttggttcatatttttattttttttctttataaacagacaattcattcttatctatggcaatgcaaacttttcagatgtattgaatatgtcatagtttttttctattgtaggcatctctaaaaaaggtatagaaaacaaacagagaaaagtctggtgttggaaaggagagagaaataaagcttgtaaaggaatgaagattagagctttctggagataaaaattcttagaagatacaaaagctagttactgaattaga

SEQ ID NO: 126774 - DNA, 499 bp, Homo sapiens
gcacgtgtagtcccagctactcagggggctcaagtgaggattggttgggcctgggaggcagagtttgcagtgagccaagattgcacyactgcactacagtctgggtgacagagcaagaccctgtcttaaaaaaaaataaaaaaatagaaaataagtagaaaaatggcagacctaaatccaaccttagcaatgattagttacaatgtaactggacaaatactctacttaagacagagactgccagacctgagaggaaggcaagacccaaaaatatggcatccacagagacacaatttaaacacaaagatacaaagtatgagaaaaaatatgctatgcagacactaatcgtaaaaatatgctattcagacactaatcataaaaagctccaacagagatgttaacactagatgaaagaggcttcagaacaaaatatatcaccagaaataaacagggtaatttaataaaaataaaagaatcagagacgatgatgttacaatta

SEQ ID NO: 126775 - DNA, 631 bp, Homo sapiens
gacaatccaaaattatagctggtgaattaatactgctctctcagtaactgatggaacaaccagataaaaatataggaaaaatacggatctaaatgacaaaatcctgacccaaatggtacttggcagtaccaagatagactctatgtcgatcgattgagaaaaggttcaagcctgaaatagtatacaaagtatgttgtctgaacacttgaaattaaattagaaaccaacaacaaattgatatccagaaaagcctcaaatgtctgaaarccaagtaataaactttgaaataccctgtgagtcaaaaaagtattcacaaggggaactggaatgtatttggaacaaacttgttataaaaatctcatttctggtagactaaaggtgacaaattctttcctgctcctgtctctgtgagaaccaattccccttaaaccttgcccagactactgacttgtttggccaacagaaggtgacaaaggtggtatttggggacttcagaagccaggctgagaaaacagaacacttatccaggagaaagccagtcaccaggcaggaaatcccactcccctgagacctcatgatagaaaccacatggccagtccatgactagctacacgcattgacatcccccact

SEQ ID NO: 126776 - DNA, 512 bp, Homo sapiens
aatctgaatataatatatttttaaaaacttcttttatcctgtcaggaatgagatgtattttttgaaggactacttaaactagcaattacaattcgattattatgattatagaatctcgggatttctcttccttcttgtcaaggtctttacttgatgtttgtctcattaaaaaaaaaatgagactgattacactctactcaagactgaagacatgtactttaacctgtctctgttaccagtaaaccaaagccttaactttcagaatctgtcagggacactgtgtggtccctggatcaaccacccatgggcttatgaatgtgttgacygctggcatatgagaagtaattgtctattaggttatgtgactcttcctctttctatttataactccaatgtttctgaacactgaagtaattcatcgaaattactttccaggattagacaaaccttacctgcacaccaaggagatgaattttggcctatgtttggcagaagtcacttgcaatggtggg

SEQ ID NO: 126777 - DNA, 518 bp, Homo sapiens
atctgtcagggacactgtgtggtccctggatcaaccacccatgggcttatgaatgtgttgactgctggcatatgagaagtaattgtctattaggttatgtgactcttcctctttctatttataactccaatgtttctgaacactgaagtaattcatcgaaattactttccaggattagacaaaccwtacctgcacaccaaggagatgaattttggcctatgtttggcagaagtcacttgcaatggtggggagtaacctctcatgaacgtataattagaaatctgtcaaccaaccactctaggtaacttagcaaatgaactagctgaagccatagctaccaaacaaagatctttagactctttagccaggatagtcatggatgatggaataactttaggctacatagtggtgaaacagggagaaattcatatggcagctagctaacacatcatgttgtgtttagatccatgcatcttctgaagttgaaacacatgtaaaaaaataagacaatatgagaa

SEQ ID NO: 126778 - DNA, 518 bp, Homo sapiens
atctgtcagggacactgtgtggtccctggatcaaccacccatgggcttatgaatgtgttgactgctggcatatgagaagtaattgtctattaggttatgtgactcttcctctttctatttataactccaatgtttctgaacactgaagtaattcatcgaaattactttccaggattagacaaaccttacctgcacaccaaggagatgaattttggcctatgtttggcagaagtcacttgcaatggtggggagtaacctctcatgaacgtataattagaaatctgtcaaccaaccactctaggtaacttagcaaatgaactagctgaagccatagctaccaaacaaagatctttagactctttagccaggatagtcatggatgatkgaataactttaggctacatagtggtgaaacagggagaaattcatatggcagctagctaacacatcatgttgtgtttagatccatgcatcttctgaagttgaaacacatgtaaaaaaataagacaatatgagaa

SEQ ID NO: 126779 - DNA, 478 bp, Homo sapiens
attggatccaggcttttctttgctaggagttgttttattatgggttcaatctcatttatccatttcttctaggtttgttttttggttgtttttggttttttgtgggtttttttgtttttgtttttgttttgttttgtttttttttttttgagatggagtctttctctgtcacccaggatggagcttgatacaatctcagctcactgcaacttctgcctcccakgttcaagtgattctcctgcctcagcctcaggagtagctgggagtagaggtgcacaccaccatgcctggctaatttttgtatttttagtagagatggggtttcaccatgttggccaggctggtcttgaactcctgacctcagatgatcacctgccttgtcctctcaaagtgttgggattacaggcatgggccacggtgcctggccattacttgcaggtttttcaatttactggaatatagttggtcatagtagttt

SEQ ID NO: 126780 - DNA, 607 bp, Homo sapiens
atttgttataggctgttttgtcaagtgcatggaagggacagcataagacatgtggtacttcatttcaaaattgcttgagatggttttcattataatcatacattatttgcttctggttttccagaaaagccagctaaacctgtggttcatttagatataaatgaaatatcctcaaaggattgctcaaagtgacttatgcaacttgaatatatatttttttctgtagggtgtttattccaaattatctggccatttgtggcaatttgcagttttttagaaaacaccaaatatttttcaagttagagatgttttaataaaaacagtcatattgaactggaagcagccaaataaaatggccctttatttcacagttgagaatttgaaattggaaggtaattaacatatgtaaggatgatgtatttgctgcctggcttataggaakgagccaaggtgttttttgagggatgttgttgctgtgtatgtcccacctattttgcttccttaatgaacaatgcaagtttgagacagaaatatttgagaacatttttatcagttgcgacattttgatagtgaacattttatatcttctgtcaacttaaaatgtttg

SEQ ID NO: 126781 - DNA, 322 bp, Homo sapiens
tacggtggttcctcaaaaaaattaagaaagtagaactaccatatgatctagtagtctcacttcaggttatttatctgaaagaatggagattgggatgattctcaggctcattgcagcattatttacactaattaaaatgtggaaataaggttaatgtctattggcagatgaaaagataaagaaaatgtggtatattcatacaacggaatattattcagctttaaaacaagaaagcccgkcaatatgcaacatggatgaacctagaggacattaatgctaagtaaagtaaatcagtcacagaaggacaaactgtatgattcca

SEQ ID NO: 126782 - DNA, 485 bp, Homo sapiens
gtatctaagatagccaaattcattagaatcacagattagaatgatgatagctctttaaattgaagtcaattttgcattcctaggttttgtaattttggtatcaggattctgactcataaaacaagtttggaatttcccccttctttatttctgaaataatttaaaaawtttattttttttaaacgtttgaaagaattcaccagtgaaattctttagatctggggtttgcttatttttttatttatttaattttatgtttttatgtgcaggtattttacaattaatttaattactttaataaatgtcaattacttcatatgttccattaaatcttgtgaatttttttataagtttttttcaaggaagtcaccctttcatccaagtaatgaaaatttgtatataatgtttcacaatattccattatcttgttaatgtctcttgtgtttacaactgtacaatctcattaatccctgatatgtataatt

SEQ ID NO: 126783 - DNA, 242 bp, Homo sapiens
atacaataaatgttagtttcctgtgaacctgctaattaatatgacttttgcagacatttccttaacctaaacagtttgggtttcctgtatatagactgcatgtattctcayctttaacctttccataatcttccctaattacagatgtcattggttcttaatagcaaaagaacagcagtagcttataaagttatattatttgttttttactaatatgtgaagtgattttgtctttcatttca

SEQ ID NO: 126784 - DNA, 242 bp, Homo sapiens
atacaataaatgttagtttcctgtgaacctgctaattaatatgacttttgcagacatttccttaacctaaacagtttgggtttcctgtatatagactgcatgtattctcatctttaacctttccataatcttccctaattacagatgtcattggttcttaayagcaaaagaacagcagtagcttataaagttatattatttgttttttactaatatgtgaagtgattttgtctttcatttca

SEQ ID NO: 126785 - DNA, 242 bp, Homo sapiens
atacaataaatgttagtttcctgtgaacctgctaattaatatgacttttgcagacatttccttaacctaaacagtttgggtttcctgtatatagactgcatgtattctcatctttaacctttccataatcttccctaattacagatgtcattggttcttaatagcaaaagaacagcagtagcttwtaaagttatattatttgttttttactaatatgtgaagtgattttgtctttcatttca

SEQ ID NO: 126786 - DNA, 689 bp, Homo sapiens
tcaatgaagaaaggaatatttgtaaattctgattaccttaagtgggaattgactttcttcctgtttccatggctcttcttgtgaaagagcatagctttccaaagacctgaaatctctgacaaatcttgcaattctctatagcctgcattatgaaggtcacctggtatcaaaaggggcaaaatggtagattataaagacctgtactttcttgtcacttcctaaacatagcaagcattggtctatcttgaacatttctgcagttataaatgagccttgggtcatgattttctgcctttttatcatagacaagatttaatttaggagatgtccttttaatgtgtaatgtgaataataagtgacacttatgaagcctattttcttccagccattttaattgtcaaatctgtccagtcaagatgcaatgttagaggtttcactgacaacaccgtctgtgtgtgtgtgtgtgtgtgtgtgtgtgtgtgtgtgtgtgtgtgtgtatacatacatatgattgagcaggatttattgtaagtcaaaacagtctcaaatttcttaggacaatacagcttccttggccattcccttggagctctgagttgaggagctggtgatgtgtatttcttttgcatgttctccacattatccmtatgcaggccttccatgggcttggttttggaaccagtgatgag

SEQ ID NO: 126787 - DNA, 618 bp, Homo sapiens
ttattacttcataccattttccccttaccatatttgtctctcctttctctgctgacttcagaaaatgtctcttccacactactcaattcatctccttattttgtcaaaattttaagtctcagagtctccaaaaaaattccagacaagtctcatcagctttcagtcattgattaatcgatatccttagaggctttcccttccccttctcaatttaacatagcttccaaatacacttgccagtaaaacaaagttgtttatatggttttgtatttcttcctgctgaattatgaacattttttcatattgacattgatttccatctggccatgaaatactcaaggtgaagaaaatgaaacaaaattgttaatatttatcaagagccaggtactgttttcrgtgtcctagaagcataaactagtgtaacgctcaccagatcatatgagaggcaaaaatggatgaaactataaaatcaagacacagagagttaagggaaatttcccaagatcacacagccactgaggatatgaactagattttgacttcaggctatttaccccagaacctgtgctttcaaccattatttgtactgcttccctaaattactcttgagtacactgt

SEQ ID NO: 126788 - DNA, 618 bp, Homo sapiens
ttattacttcataccattttccccttaccatatttgtctctcctttctctgctgacttcagaaaatgtctcttccacactactcaattcatctccttattttgtcaaaattttaagtctcagagtctccaaaaaaattccagacaagtctcatcagctttcagtcattgattaatcgatatccttagaggctttcccttccccttctcaatttaacatagcttccaaatacacttgccagtaaaacaaagttgtttatatggttttgtatttcttcctgctgaattatgaacattttttcatattgacattgatttccatctggccatgaaatactcaaggtgaagaaaatgaaacaaaattgttaatatttatcaagagccaggtactgttttcagtgtcctagaagcataaactagtgtaacgctcaccagatcatatgagaggcaaaaatggatgaaactataaaatcaagacacagagagttaarggaaatttcccaagatcacacagccactgaggatatgaactagattttgacttcaggctatttaccccagaacctgtgctttcaaccattatttgtactgcttccctaaattactcttgagtacactgt

SEQ ID NO: 126789 - DNA, 543 bp, Homo sapiens
gaggaaatgggattggggtttattgcctaaactccctctctgctaggtctccttgaccaatctttttcataagaaaattagtgtttccttgcgtgatcagggaagtttactccccagaattctgcctgctgctactaacccagagttattgtggggtgtgatttctgtgattccttcacccttctcccctgacattttcgtaagtagtctctttggaaataaacctatgttaaattatcttagtttgagtgtgttctgtttttcctattgagactctgaaatgagtatctaaatgaaaaaatctaccatcttttctcatatacatagtagtttcattcttgcaaaattcatggcatattaaaaccatgcaaaagtacttggcacttaggcagttacatttgggattgtataattaaacaaagcaggttattcaccttcattacattagaaagtcattcaggacatacagcaatccttaattaggaraggctatcccatgttactggacatatggcatccctgttttccaatccttaaagtttt

SEQ ID NO: 126790 - DNA, 543 bp, Homo sapiens
gaggaaatgggattggggtttattgcctaaactccctctctgctaggtctccttgaccaatctttttcataagaaaattagtgtttccttgcgtgatcagggaagtttactccccagaattctgcctgctgctactaacccagagttattgtggggtgtgatttctgtgattccttcacccttctcccctgacattttcgtaagtagtctctttggaaataaacctatgttaaattatcttagtttgagtgtgttctgtttttcctattgagactctgaaatgagtatctaaatgaaaaaatctaccatcttttctcatatacatagtagtttcattcttgcaaaattcatggcatattaaaaccatgcaaaagtacttggcacttaggcagttacatttgggattgtataattaaacaaagcaggttattcaccttcattacattagaaagtcattcaggacatacagcaatccttaattaggagmggctatcccatgttactggacatatggcatccctgttttccaatccttaaagtttt

SEQ ID NO: 126791 - DNA, 345 bp, Homo sapiens
cgtcccagaagtcttcaattggaggctcctgggatgggacctgggaagctggatttccggcacgcttcccaggtgattcttctgctatctacatttttttcaagcaaagcttctagggcagaagcaattctctggacatcactttaataagtcatctaatggatgtgaaatcttttaccrtaggggttggtagggatagggagcactttatctgctctgtaggacatttagcagcttctggatctttcaatattaaaaaatctatccaaggggctttattttatatttatcctttcccttcctggatagttttaagatcaacttcaaaaatttgggccaaatttt

SEQ ID NO: 126792 - DNA, 540 bp, Homo sapiens
gaattcatgttctcagaccatgtgactgaatagaagtttagtcayaggattccagtttaacatatgcagttactatagcaattgaggtttccttagtaacagttgcaaaaataatccggccccaattaataatacattttaaagctctttctactccatgctgaacaacccagtttttttggccaagaaccagataattcaggtggtgtcatttgcactgatatagatatcatttgcatgcggtgaattgggttggaaaggaatgaaaagggagccggttgtttcaagtattataggaatccaatctgaaaagtcgactggcaagcgaatgcaaatctagtttccagagcttgggagcttaatggtaaaccctgtcctggattcctagtgtgccctagaggactttctgcatttgaagaagggagaaggcagaagattggacttgctaacaaaaaagatgaacccgggagggtggggccgtggcacacaggatttctctctaagtggtgcctggtgtgttcttgatggcgtgagaaggtc

SEQ ID NO: 126793 - DNA, 478 bp, Homo sapiens
aacatatgcagttactatagcaattgaggtttccttagtaacagttgcaaaaataatccrgccccaattaataatacattttaaagctctttctactccatgctgaacaacccagtttttttggccaagaaccagataattcaggtggtgtcatttgcactgatatagatatcatttgcatgcggtgaattgggttggaaaggaatgaaaagggagccggttgtttcaagtattataggaatccaatctgaaaagtcgactggcaagcgaatgcaaatctagtttccagagcttgggagcttaatggtaaaccctgtcctggattcctagtgtgccctagaggactttctgcatttgaagaagggagaaggcagaagattggacttgctaacaaaaaagatgaacccgggagggtggggccgtggcacacaggatttctctctaagtggtgcctggtgtgttcttgatggcgtgagaa

SEQ ID NO: 126794 - DNA, 478 bp, Homo sapiens
aacatatgcagttactatagcaattgaggtttccttagtaacagttgcaaaaataatccggccccaattaataatacattttaaagctctttctactccatgctgaacaacccagtttttttggccaagaaccagataattcaggtggtgtcatttgcactgatatagatatcatttgcatgcggtgaattgggttggaaaggaatgaaaagggagccggttgtttcaagtattataggaatccaatctgaaaagtcgactggcaagcgaatgcaaatctagyttccagagcttgggagcttaatggtaaaccctgtcctggattcctagtgtgccctagaggactttctgcatttgaagaagggagaaggcagaagattggacttgctaacaaaaaagatgaacccgggagggtggggccgtggcacacaggatttctctctaagtggtgcctggtgtgttcttgatggcgtgagaa

SEQ ID NO: 126795 - DNA, 441 bp, Homo sapiens
ataaaagtcggaaagaaaaaaaaaaaaaaaacaggctctgcttccaaaattcaagtgaaatgattatgtcaccaaaagatctagaggttagaaatgagattcatgtttcgggaacattgtaaaacagaccaatgactcggttgtgttttcattagactcctttttttttttttttttttggctatgggcaaatgctcataaaatgaggtattatttgaatatacgaatgcaaattcaagaaagccagcaaagcaggtgaatagtttataagcgtacaaaatgaaccaagcccttctkcagccactcagtgtgtatacataccaaaagccacataattacacagtaattatgcaatttctaacttgaggcttcaatatccacactgaaaattatgtaccagttatatttggaactgttataaggttttagagaagaatgaaa

SEQ ID NO: 126796 - DNA, 568 bp, Homo sapiens
gttttatctttagcatttacaaagcattggcattttcaagaatattattcagatcaccttgatgctttccctcctgggatcttccttcccaatcaatagaagtgccagcagcaggaagaatcaagaaatscttgttgagctgagaatgcctgttcagaacaaactgggaggatttcctgacttgtttatctttgggattttcagccggtgaccatgaattcctccaaagatgtactttttgatcttttgatatagtacacaggcaatcatttttacccctctgggtttcacgaatttcaatatctgcgttttctgttgttttagatgtttaaaggagatgataaaaatgctgcaacccagataatgatcaccttactcttcaaaaatactgcccaaggtactgctgattatcattacctctctgtatctggtctctttcactacatggtaggaaattatgtatggtgggttgaatggctgcccctgtcccgaccccctgcactccctccatcccccatcttcctacccccaacaaaatacgtgtccatttggaccctgagaatgtgtt

SEQ ID NO: 126797 - DNA, 568 bp, Homo sapiens
gttttatctttagcatttacaaagcattggcattttcaagaatattattcagatcaccttgatgctttccctcctgggatcttccttcccaatcaatagaagtgccagcagcaggaagaatcaagaaatccttgttgagctgagaatgcctgttcagaayaaactgggaggatttcctgacttgtttatctttgggattttcagccggtgaccatgaattcctccaaagatgtactttttgatcttttgatatagtacacaggcaatcatttttacccctctgggtttcacgaatttcaatatctgcgttttctgttgttttagatgtttaaaggagatgataaaaatgctgcaacccagataatgatcaccttactcttcaaaaatactgcccaaggtactgctgattatcattacctctctgtatctggtctctttcactacatggtaggaaattatgtatggtgggttgaatggctgcccctgtcccgaccccctgcactccctccatcccccatcttcctacccccaacaaaatacgtgtccatttggaccctgagaatgtgtt

SEQ ID NO: 126798 - DNA, 447 bp, Homo sapiens
ggattgcctaaagtcacctgtgagagaactctgggtccccactccctattttccatcagggtcccacagctctcatctaacttttctccgtttatgtcagagcaggttttctgtctcttaggcactctagctctgagtggaaaagacccrcacactctatcttttagttactctggatataaataaagtttgaataaagttctgccatgcagcagcagaatgagttaactcacatgtcatggtcaaccaggacagacaacctttgacattttggatctataagaggtagagtgagttgtgaggatgcacaatagctcattgtcacaggagatgcaagtcccgtgaggaagagagtcctcaaatcattactgccctcgttagggtggtgtccgttaaggattaatttgttagcagtgcatttctagttttccgtaattattattcttg

SEQ ID NO: 126799 - DNA, 602 bp, Homo sapiens
tcacatgtaaaattccaccagatattcttttcatgtgctatctctcctcctttacttcggattgcttcagctactaaacatttattacatccagatctctcagttctttctcttctgtcatagcatcttctgycattttaacacttctctttatctaaaaatgaattacagaattggtgagtaaagcatcatgcaatagaaggtagaaagtagaaactggtcaaagaagtttcagacttagtttgaaaatggaaagtatgtactggaacctcctttaacacagagcttggcatgtgcttatagggagtgagcaggaccatttacagaagctgtgctgggctaactggctgtgggttacctattcacattaaccctggcaacatttcgagtgaccagatttactaatatggttaacttccatttatttaggcttgcagtgcaccagggacagtgctagaaacagttatgtttttaaaagctccacaatccatgaaaattaatcaaagaaagattttgttgtgaaattctgtatcttttggacactaggggtagtgtgatactacaggaccatttctatgagacaaagaacattctatatggag

SEQ ID NO: 126800 - DNA, 567 bp, Homo sapiens
cccaagctcctataacatggactgatagacagtggacaaaataaatatgtgctatgtgaataagcaactttatgaaatatatactggacagtatatatttctatgtacattttgcagataaataaacagaggcacagagcagttatgcttcatttccaagattttatactcagtagtaataactaagattcaggatagggaaagtgattctcctaaacttcaagtgaggtggtcaacgtcattagagccaaaacaactctagattctctaacttcaaacctatacataatttataggattttctgccaaataaaaataaattttgtgcacatgcacacataacaccaacacatgtgttcatgtaacagccagcagctttcctttcagaggtttcctaagaaacaagcaaaatcatagccataaaaagtgctttgaaagatrtaaaatagacccatgcaaggtgctataaaaataataatgattaaaatttatcacaaatttgcctggggccagcctcataggtctcgatctgtcttcttcactcctgatgccaattgccagctgctt

SEQ ID NO: 126801 - DNA, 532 bp, Homo sapiens
tgggcctccaaaagtaattatcagagaaatacagaactctcccactaggaaagctactactttcaaggtcactgagagctagtaaattcaagaatgcatcccagagcaggaatctagatttgagaagctgctgcagatcccaccactacccctgcctttggcaccaaagaagctgggaaaaggacactggacccctgctgcagatgtagcctcacacctccaagatctagcgttccagcagaaaaatggccaagtgaggtgagagaatggcctccacatctgccttccaaatttcaaacaagccaatctaaatgacgagactgacctaacatccaaatccctacgtgccaaggggtttgagaaatgcagatattagcttttcaacctccgcaggaggrgaaggacccctggagggaggtggaatataggataagcaaggcaatccactttattccaggtaagtactattattatcatccttattcctcacccttcagtttgatagatagggtaactgagacacagaggatta

SEQ ID NO: 126802 - DNA, 592 bp, Homo sapiens
tactcccagaattttgttaaattctccagcaatcttgtgatggagacatcattatcctctgtttacaggtgaagaaatgaaaatttagaaagaagtactcggccaaagccttctggtgcatgccagagctaagattcaccccaatgctccctgatacccatatccagtgctgacatggtctaccctgtacctggttggttatatggcactgttcccaccaaaacaaagtcagcytcagaaacagtgctcacaggtgaccttgagcactccactggtctcgacctaaaagaactaaaagtcttatttgctaaaggagcattcagtctaatataagaaataatatagtcaggcaattatatgagttcttttcacagttaaatccaaataaatatcaacctaacctaaatttcaatatccatacaatgttccaaagtatctttttccattttcttatcccctgaaaaaaaggcacatttctttagattggtccagtgcattctctcaacatttgctgagtacctactaaaatttgtagtatgatatgctttgaaatccttcttcccttgttttggacatttttattttactgtaa

SEQ ID NO: 126803 - DNA, 592 bp, Homo sapiens
tactcccagaattttgttaaattctccagcaatcttgtgatggagacatcattatcctctgtttacaggtgaagaaatgaaaatttagaaagaagtactcggccaaagccttctggtgcatgccagagctaagattcaccccaatgctccctgatacccatatccagtgctgacatggtctaccctgtacctggttggttatatggcactgttcccaccaaaacaaagtcagcttcagaaacagtgctcacaggtgaccttgagcactccactggtctcgacctaaaagaactaaaagtcttrtttgctaaaggagcattcagtctaatataagaaataatatagtcaggcaattatatgagttcttttcacagttaaatccaaataaatatcaacctaacctaaatttcaatatccatacaatgttccaaagtatctttttccattttcttatcccctgaaaaaaaggcacatttctttagattggtccagtgcattctctcaacatttgctgagtacctactaaaatttgtagtatgatatgctttgaaatccttcttcccttgttttggacatttttattttactgtaa

SEQ ID NO: 126804 - DNA, 448 bp, Homo sapiens
taaaaactacaagggaggtaagaattcgctggatgtccttctctgaagaaacccattgattcaaattgtatttatctaatagaatccaaattggccgccattgttaaatatatgatgacctgctttgtgatagtattgtaatgagtatgtttaattttggaaaaaaatgtttgcycccacccctggctccagaagatggctgatgtgtaaatgcaagatttttcctaagaataaatgcttattttttcagctaacataaaaagtaacttatttcatataaattttccagacttctagatattgttgttgagaatatggagtaaattatggatgatgtagtttttaaagccaggtgagctgacagtaaacaataagagtatagggttaaaatatggtggggtatattcatggtaggtccagatccagtcagtaggttaagacatgagga

SEQ ID NO: 126805 - DNA, 448 bp, Homo sapiens
taaaaactacaagggaggtaagaattcgctggatgtccttctctgaagaaacccattgattcaaattgtatttatctaatagaatccaaattggccgccattgttaaatatatgatgacctgctttgtgatagtattgtaatgagtatgtttaattttggaaaaaaatgtttgcccccacccctggctccagaagatggctgatgtgtaaatgcaagatttttcctaagaataaatgcttattttttcagctaacataaaaagtaacttatttcatataaattttccagacttctagatattgttgttgrgaatatggagtaaattatggatgatgtagtttttaaagccaggtgagctgacagtaaacaataagagtatagggttaaaatatggtggggtatattcatggtaggtccagatccagtcagtaggttaagacatgagga

SEQ ID NO: 126806 - DNA, 640 bp, Homo sapiens
gaagaagtaaatatatctatttgcagatggcatgatcttatatgtggaaaaccataaagaatccacaaataagctagcagagctaacaaacaagctcagcaagtttgcaggatacaagctcaatgtacaaaagtgaggggtaattatacataccagtaatgagcaatcacatatataagcaatgagtaatctaaaaataaaatcaagaaaacaattacacttaacaatagcataaaaaaatacttaagagtaaatttaaccaaagaagcataagacatttacactggaagctactggatattgctgaaagaaattaaagaagacctaaataaatggaaagacatctggtattcttgcattggaagcttaatattgtcaagatggcaatatccccyaaattaattacagatataatgcaatctctaacaaaattccaacttcctttttttcagaaatagatgagctgatcctaaaatttatgtggaattacaaggaacccagaataataaaaataaccttattcttgaaaaataagaacaaaattgaaggatgtacactttctgatttcaaaccctacttcaaagaaatactacttcaaacagtataatactgatataaatttagacaaataaacccatac

SEQ ID NO: 126807 - DNA, 581 bp, Homo sapiens
aaaaaatgtctataaagagataaacaagtcataaagcaggtcatgaactgtcaaagtcgtgattctgatgctgccagaatggagctgtaggtcttgagttggctttgtgtagtgggtaggacttatctgagtggagaaatggcacagaggtaatggcaatggtgtgtttasaggaggagaaaaactcctttcactgtaaggcaaggtttaatgagaagaagatggagatgaaattggagtggtgtgctgggcatggactgtggatgagcccatcctatgagatatttgctctgagctgggagacatgaggacagcctgcatacacagtgacagtgagggtgggacagggctttcctgccaggtccctgctcctcgactagaagcactggccttcctcctccatccactcattcatctcctgcttgcctttctctgatgacgtggacttgccagatttggtgtttgtcccctctggacctagaattctcagatatcctactgacctggccatggagaccactagtgttcctctgggctatagcacagactctagccctcctgaaaaaggcctcaagggacag

SEQ ID NO: 126808 - DNA, 280 bp, Homo sapiens
ctttctgtctagaaaaacaaatgggttcactatgacaatcagaaataaactctttcatctgtcccgcagaatttcatgaaggagtaaccttccattctaggctttgtctaatggccaagcattagacaaagcattaraaagcagttcctttctcaaaactgcctgctgagaataagcacatagctgcccgactatccggagcctcaggcccaaaggttccacttcagagacagagatgctaattgatccaacctgctgtccttcgtggagaagacagtgg

SEQ ID NO: 126809 - DNA, 604 bp, Homo sapiens
tttattcagcttaccactctcaactccttgcaggagggagtttgcgagtcgacaaggcagaaactggagtacacgagtgctggaaccagctggctgctttggcactggcaggagcgaactccatgcactctgacctgctatgttccacccctcatgggagggagcatgcaggtgagtgagtgcaggagcccgggcaagcacttttaggcaccagcaggagcaaacttggtgcaggtcccatggcaatatctagaggaggtgcatgtgacttctgaagccccagtaggcatgttacagtgctcttttagctctgccatccacagacagcttaagtgttaatggcttagtgggcccttttgtatccacacttgctcctgagctcttgtctggcatccaggaaaaatgaagttgcaggaaaaaattaaaggatggtaaatgtggggaattttattgcttgygaaagtggctctcagtgggaagaggagctgaaagaagatgatgggagtggggaggtgtgcagttaatcttattctgaagtccagccatctctggctggattcttctcaggagttatgccgtcaagctgtccctctgaagtcaagcc

SEQ ID NO: 126810 - DNA, 547 bp, Homo sapiens
cctgttgtacactgctgaaaacaattttacgtttgtttatggaggcagggttagtctgatatgatttattctaacagacagaagcagaaatctgttatactcttttaattactgtgtctttataatattatggtagacagaatcctaagatgacccccagtgatctttgctcttatataatcacttcctcctgagtgtagacaaagctactgaggagatgtcactcctgtgattgtgttacaatttatggcaaaaacaagttaacagatgtaatcgagatcccaaatcggtcaaatttaagatagacagattatctgatgagcttgacctagtgaasgtgagttccttggagggactgaggacttcctggagagatgtgaagtgcaggagggtttccatgcagggcgatcctcctctgctggctggaggaagcatgcagtgggaacatgggaggcctctaggagcagcgagaggcccctggctgacagccagcaagaaaacagagatctcagtcctacagtcacaaggaactgaactcagctgacaa

SEQ ID NO: 126811 - DNA, 550 bp, Homo sapiens
gaggcaggagacacaccccctctggggctggagcgaccccgcgcttaggactgcaggcctcgcgctgccgcaccgccccgartctgacttccaggcacgggcacgcggtgcagttgggcaggcttcagaagagcccccagctctcccagaggtggccttaggtcactctcaaaaagaataaccaacgtgtcaatggcacttgtagttattttctagtttaaatttattaacagattttgcagatgggcttccactgaaataagcctttgagaaaaagaaaaactttttttttcaacaggattagaataccaagaaataggaagtaaagccatgccgtccacccagctaaaaactttgaaaacttgatattttatctaaggcaaatgtttgcataactttaggtcatgccattatttaaagtcaatttcaattaacaatttcattgcaactgaatctatcttgtataagaaaactaagatacatccctgataatctacctctcccctcctatactccatccgtcagcaaatcctactggtttttaccttcc

SEQ ID NO: 126812 - DNA, 550 bp, Homo sapiens
gaggcaggagacacaccccctctggggctggagcgaccccgcgcttaggactgcaggcctcgcgctgccgcaccgccccgagtctgacttccaggcacgggcacgcggtgcagtygggcaggcttcagaagagcccccagctctcccagaggtggccttaggtcactctcaaaaagaataaccaacgtgtcaatggcacttgtagttattttctagtttaaatttattaacagattttgcagatgggcttccactgaaataagcctttgagaaaaagaaaaactttttttttcaacaggattagaataccaagaaataggaagtaaagccatgccgtccacccagctaaaaactttgaaaacttgatattttatctaaggcaaatgtttgcataactttaggtcatgccattatttaaagtcaatttcaattaacaatttcattgcaactgaatctatcttgtataagaaaactaagatacatccctgataatctacctctcccctcctatactccatccgtcagcaaatcctactggtttttaccttcc

SEQ ID NO: 126813 - DNA, 572 bp, Homo sapiens
gatctgaccttccataatcttgtactcttcacccaatccaccaracttctttgctactctggttttttgcagctaggctcatgaaagaccaaaaagtgagcagtgcatagtatttgaaagtgaggatggcagcaagaaaaacaaagaagcaatgagccatgtgggttgcactctccaaaggctgcccctctccaacatgtatctcaacattatttctgcaaatgttatggacccagggactgaagaagtttaccacttgtgtgatgaagtcaaaggtgcaaatgtcatggtttcacattcaaagccctctgtgcttgatggatacttacaaaaataatgctaaaaagctgaaagcctactgacatatcccgcagtttactgagtgaatctgcattccatgtgaacctacatgtcatgttctagcacaaagggccacagatcaatgatactctatttattctaaattcacagaaggaaaagttgaaaatataaagagtgaaatcagagtggcttcattttctattcacaatagagtattagcaaaagtattacccacaaccacgatccaacca

SEQ ID NO: 126814 - DNA, 572 bp, Homo sapiens
gatctgaccttccataatcttgtactcttcacccaatccaccagacttctttgctactctggttttttgcagctaggctcatgaaagaccaaaaagtgagcagtgcatagtatttgaaagtgaggatggcagcaagaaaaacaaagaagcaatgagccatgtgggttgcactctccaaaggctgcccctctccaacatgtatctcaacattatttctgcaaatgttatggacccagggactgaagaagtttaccacttgtgtgatgaastcaaaggtgcaaatgtcatggtttcacattcaaagccctctgtgcttgatggatacttacaaaaataatgctaaaaagctgaaagcctactgacatatcccgcagtttactgagtgaatctgcattccatgtgaacctacatgtcatgttctagcacaaagggccacagatcaatgatactctatttattctaaattcacagaaggaaaagttgaaaatataaagagtgaaatcagagtggcttcattttctattcacaatagagtattagcaaaagtattacccacaaccacgatccaacca

SEQ ID NO: 126815 - DNA, 585 bp, Homo sapiens
agaaattcaaaacctaaatagtccaataacagtaataaaattgaaaccatagtttattgtacattgatgaaaagtttcctggcctagtaaagcccaggactcaatggtttcactgctcaattttacaaaacatttaaagaaataatacygatcctactttaactatttcaaaaaatggaggaggagggaatacttccaaactaattctgtgaggctaatattaccctgataccaaaaccagacaaaaacacatcaaagtaagaaaactataggccaatatccctgataagcattggtgcaaaaatcctcaacaaaatactagcaaaccagatttaacaacacattaaaaagatcattcatcatgactaagtgggatttatccctgggatgcaaggatggttcaacatatgcaaatcaatcaacgtgatacaacatatcagcagaatgaaggacaaagccatatgatcatttcagttgatactgaaaaagcattggataagtcactattacttcatgataaaaaccctcaaaaaactgggtatagaaggaacaaacttcaacacaataaaagccacatatgacaga

SEQ ID NO: 126816 - DNA, 585 bp, Homo sapiens
agaaattcaaaacctaaatagtccaataacagtaataaaattgaaaccatagtttattgtacattgatgaaaagtttcctggcctagtaaagcccaggactcaatggtttcactgctcaattttacaaaacatttaaagaaataataccgatcctactttaactatttcaaaaaatggaggaggagggaatacttccraactaattctgtgaggctaatattaccctgataccaaaaccagacaaaaacacatcaaagtaagaaaactataggccaatatccctgataagcattggtgcaaaaatcctcaacaaaatactagcaaaccagatttaacaacacattaaaaagatcattcatcatgactaagtgggatttatccctgggatgcaaggatggttcaacatatgcaaatcaatcaacgtgatacaacatatcagcagaatgaaggacaaagccatatgatcatttcagttgatactgaaaaagcattggataagtcactattacttcatgataaaaaccctcaaaaaactgggtatagaaggaacaaacttcaacacaataaaagccacatatgacaga

SEQ ID NO: 126817 - DNA, 398 bp, Homo sapiens
  misc_feature (1)...(398): n = A,T,C or G
nnnnnnncccacagtctgattgcaacagattgtgtgttttagactgagctcarttaaaggtgttttgctgataggaatcagaccatatccaaagcgaggtgtgagtggatccgtcaggggtcatgacaaatggtcttagcagttaggtccctttctgtgttcatgatgttctcatcatatttctctagcacttcagtctttctttcttcttagtaggatttctctacgtccaattcataacacccacccctccaaacacacacacacacacacacacacacacacacacacacacacacacttctctacttccaattcataacacccacccctccatacacacacacacacgcgcacgcgcgcgcatgccccatagcgtctttcatcttgaaaaaatt

SEQ ID NO: 126818 - DNA, 398 bp, Homo sapiens
  misc_feature (1)...(398): n = A,T,C or G
nnnnnnncccacagtctgattgcaacagattgtgtgttttagactgagctcagttaaaggtgttttgctgataggaatcagaccatatccaaagcgaggtgtgagtggatccgtcaggggtcatgacaaatggtcttagcagttaggtccctttctgtgttcatgatgttctcatcatatttctctagcacttcagtctttctttcttcttagtaggatttctctacgtccaattcataacacccacccctccaaacacacacacacacacacacacacacacacacacacacacacacwcttctctacttccaattcataacacccacccctccatacacacacacacacgcgcacgcgcgcgcatgccccatagcgtctttcatcttgaaaaaatt

SEQ ID NO: 126819 - DNA, 381 bp, Homo sapiens
tccaagatgtcctgcaaagatatggatgtgcctgtttccaaataatagctatttcaggtatattcaagctatgcagagtgggatgttgaataaatttttcaactgagccatttgtgaaagcaaaacttggcataggtttaacagacaaagaagcctttagatgggcaaaagaagcaaaaatcactgagccacggaggtcaaagtttacagaggcagtaggacttgggtaagactctctgctggcagataggaagaactcaaggagacggtagtgaawacggtgatatttttgaaggacagaaatgcaattgctccataatgtagggttgaggtaggggaagagggtgaaattaagtggtgtaggcaaaataaaggcaggtt

SEQ ID NO: 126820 - DNA, 342 bp, Homo sapiens
gaattcctttgtttaatcaaaaattagctctcctcctaaactgataccctatttaaagccaatagagagaaactagagtgtttaaggcacaaatggctaatgtctgaaacttcttttataattaaaaatatgcaaagattattcatttacataaaagaatgtatgggtcacttcaccacaaaattgtrttatggcaaacaaactatacgctagtaactactggagttctcaatgatatttcacagactacctactaactggtccatatcctcaccaattccagtaactcatttgggaacatttgaaagacagaaggtgctacatcttcagatactggattta

SEQ ID NO: 126821 - DNA, 655 bp, Homo sapiens
cctgactaggcatgttaaagcaactagtaaggactttctgtttcaggtttgtcacagttgcttgtgtgttctctaaggtcagcaaggatctctgagaatgcatttctgtctcctctcacagttcatgatgtagacacctaccagcccaggattcctaataatctctaatggaaccccacaaatacaatctgaacttcccaggcttcgacttcctgtggacacaagacaggacagcaatctctatctgttatctatttatctctatgtattgatgcaggacctcttgaagacctactgtggttatttctgaaagcttccagatatcttacttatgctcaggcacaagatcaccttctgctcccacctcctcattgatatttcctaactatgggcctatttattgaaggaagtgcttccctagagtactacctctcagtattcttaaaacaaaaatgctcaaaattccacacagaaactggagkactgcatatctcccaactctacattttaccctctcttgactttgaaacattgctcatgcccagagactcaaaataaaacaaacaaacaaaaacccttgctaaaaagagaatcttttcagtctctgcttattgactatttctgcatagtagttagactcagcccagccatccct

SEQ ID NO: 126822 - DNA, 655 bp, Homo sapiens
cctgactaggcatgttaaagcaactagtaaggactttctgtttcaggtttgtcacagttgcttgtgtgttctctaaggtcagcaaggatctctgagaatgcatttctgtctcctctcacagttcatgatgtagacacctaccagcccaggattcctaataatctctaatggaaccccacaaatacaatctgaacttcccaggcttcgacttcctgtggacacaagacaggacagcaatctctatctgttatctatttatctctatgtattgatgcaggacctcttgaagacctactgtggttatttctgaaagcttccagatatcttacttatgctcaggcacaagatcaccttctgctcccacctcctcattgatatttcctaactatgggcctatttattgaaggaagtgcttccctagagtactacctctcagtattcttaaaacaaaaatgctcaaaattccacacagaaactggaggactgcatatctcccaactctacattttaccctctcttgactttgaaacattgctcatgcccagagactcaaaataaaacaaacaaacraaaacccttgctaaaaagagaatcttttcagtctctgcttattgactatttctgcatagtagttagactcagcccagccatccct

SEQ ID NO: 126823 - DNA, 554 bp, Homo sapiens
attctgttttagggctgaacagtattccattgtgtatacatatgtgccaccgcttatttatttattcattcattcatggattcttagattgtttccatatcttagctattgtgaataatgctgcaatgagcatgggagagcacatatctttacaatgtgacgatctcattcctatttctaatatttctaaaatattaattttgaagaacctccatactgttttccatgatggctgtactaatctacatccccacaagcagtgtacaagtgttgcctttcctccaygcatttgccaacacaggttatattttgattttttataatagctatcctaactggtatctcataacggttttgacttgcatccctgatgattaattgatgttgcgcacctctacatatacctgttggagatttttatgtcttccacagagaagtgtctattcttgtcttttttctaatttttaaacaggatatttgtttttccattattgtgtgaacaagttattgataaattttggatattaaccctttaacagatatatggtttgcaa

SEQ ID NO: 126824 - DNA, 657 bp, Homo sapiens
tactggacccaatgtaagtcagacatgagctaaaactccattaattacctgacctccataagcccgtactttacctggaggaccacagtgatgttttgggtcccctggaatcaatgtcagctcagagcctgtatccagtagtccctgaaatgtctaatcatttccctttcctaatgcacagttacctgggtaaaaggccagaggtctcctcagagaaagatgggagaaagattaatagcataaattgtcggtagtgtagcgggatccttccttcccaaatgccttcattcaagagattctgggtctgtaaactgactgaactctgttgattgaggggccatgattgtctgtttttataactcaaattactcttttgtccattcaacctggaagttttctgcttatataaattaagtaggaatgcagtaggctgcctatcaatttcacttctacgaacactgtgttaaattagtgaatgccagagctctacatgagtctgactattctgattcctgctttgcctttgctgtccattaaggtagctacaccaaccttrccgttgacagttgagtgccaccacttgacccctgtcacatcaggatccaattattcccattgtatttaaattttgtagttgagtgactgtgattcctacta

SEQ ID NO: 126825 - DNA, 561 bp, Homo sapiens
agatcattgctagatgaaaaagcgagatgtggaacagtgtgtattacgagctgttatttatataaaaagagataaggggattttttgttcattttacttatacgtttatacagtagctttacaaagatttacaaggaattaacggcattgattgcctatcacagaagaactgggtaaatgggggataagkgtagaatacattttattgtaaacctctttatgctgtttgatactgaaccatgtgaatgtattactatcctaaaaattaaattcaattaaaataggtttttaaaataaaataaaatatactgttactgtattaattatccataattcttagcaaagtcatagacattgggtgaatactaaataaattttaaagtaggtgtactaaaaccacatttaaaatgggagctagtaaaacatgttaccttaaacaagtctctctttcactcattcaatcaaaattacctgagtgcctgatgtaatggaagcatgaaaggcacttgagatgtagtggtaaccaaatccagcatatttgtcctcaacaagctggtgatt

SEQ ID NO: 126826 - DNA, 553 bp, Homo sapiens
gactgaaataatcaagatgccattctccctaaattaatttataattcaatgccataccaatcacaataccaatgggatttttagtttatttgggaatataaacaccccagaataactactggtagtaatattctgcaaaagaaaaggaacaatggtagctagtcctaacagataataaatgtctgataaagctgctgtcattatatgtactattgcaaaaataaattcaaatacaattctgaatgccacacaagaktgtgatatgataaagagggcatttaaaatgagctgaaagtggattattcaataaatgatattagaaaaaatggtagtcatttgaaagaaaagttcttttaaaaaagttttagattggatcaagggcttaataaaaaaggaaatcacaaaactagtaggcaacagggatgaaatgttctaaatctcagggttaggaaagctcttttcaaccatgatacttagccagaagccagcaaggaaaagacaaattgggccatataaaaattacaaacttctacatggaaaaatactacccact

SEQ ID NO: 126827 - DNA, 573 bp, Homo sapiens
tttatgtaatcttgcagggtatctttgagatgtgactttcttttaaaaccatgctttaaattatctctcctaaatatttggtcaaacctgtgcttgaatgtagaagagacgaaaaccttaacaatttactcttttctatgtgtgagcatggatatagtgcaccattcaaataaacccggccttacataggtttctaagtttgctctccctccactctcaataaagccctaaaccacccatgtttcattcctgaaatacaccagggactttaaaacaccrctgccttctgttcatgatgtcctttcagcctgaggtcttctttctcaaggtcaggtttggaagttcagctttaatatcccctcctttgtgacaccatcactaatccccccagttattagaaaagagaacttgaaaggcaagattcaaatcttatttgtctctgtgtccttggtacctggcatatactctgacctgatattcagatgaaccaaataaactgatccttcctcttgataccctcaaacttcagcttgcaatcactcaccttctgcttggatacgatttttgaaatgg

SEQ ID NO: 126828 - DNA, 568 bp, Homo sapiens
tgctccttctcctctctgctctgctgttctgccattctgctctcctgtatgtctccttgtggaactgggggtttgaggtttatatgggtacaaaataggggtgtgtggtgggccaaaagacaactttctgttgcaaaaacagaatgcctrttctcatttagggccatagtttttcaggcttgagggcagggtctttcctggggaaccaccctcttctaaccagtatttccctgtttcctgtctgtatcatttctcccctctgaagaggcacatctaactgccattagaatatggacaatgaccaatcctagctacttcctgctaataaggggcattgtttcagggaaaacagcagtcagatttctcccagaggtctatctaggggtcccaagcagaagggagccgttcatctggggttccattgcctgacaatttggagtttgatagcctctaggtgagaggaaaaaaaagtaagtttttataaggttaagtatgcatgggttaaacatgtgtattatacaaggaaggaatctactgccaaatattacagcaataagaagtgaaatat

SEQ ID NO: 126829 - DNA, 580 bp, Homo sapiens
gtatcatttcttctttgaatgaaagaagacattctttgaatgtctggtagaattctgctgtgaatctgtctggccctcggctttttttgctggtaattttaaaattaccatttcagtcttgctgcttgctttattggtctgcttggggtatctaattcttcctgatttaagctaggagagttgtatttttccaggaatttatccaactcgtctaggttttgtagtttatgtgccaaawggtgttcatagtatccttgaataatctttaatattttagtggtgtcagttgtaatatcccctgttttatttcttagtgaggttatttggattttctctcttcttttcttggttaatcttgctaatggtctatcaattttatttatcttttcaaataaccaactttttgttttatttatgttttgtatttttttgttgttgttgtgtcaatttcatttagttctgctctgatcttggttatttcctgtgtttgctgggattgggtttgtcttgttcctgcttctctagttccttgagatgtgaacttagattgtctctttgtgctgtttcagactttttgacg

SEQ ID NO: 126830 - DNA, 226 bp, Homo sapiens
gctgtaccgttttacattccaaaaagcaatgcatacagcttccaatttctctatagcattgctgacagttaatattttctgtttatgtattgtatttttatagkgtttgaaattaatctgaggctttttgctgataccgaaatattaggaaaggttttccaaaaataatactacttattataaagaattttacgtgttacttgatgccctgtgatctgttttctaa

SEQ ID NO: 126831 - DNA, 226 bp, Homo sapiens
gctgtaccgttttacattccaaaaagcaatgcatacagcttccaatttctctatagcattgctgacagttaatattttctgtttatgtattgtatttttatagggtttgaaattaatctgaggctttttgctgataccraaatattaggaaaggttttccaaaaataatactacttattataaagaattttacgtgttacttgatgccctgtgatctgttttctaa

SEQ ID NO: 126832 - DNA, 226 bp, Homo sapiens
gctgtaccgttttacattccaaaaagcaatgcatacagcttccaatttctctatagcattgctgacagttaatattttctgtttatgtattgtatttttatagggtttgaaattaatctgaggctttttgctgataccgaaatattaggaaaggttttccaaaaataatactrcttattataaagaattttacgtgttacttgatgccctgtgatctgttttctaa

SEQ ID NO: 126833 - DNA, 226 bp, Homo sapiens
gctgtaccgttttacattccaaaaagcaatgcatacagcttccaatttctctatagcattgctgacagttaatattttctgtttatgtattgtatttttatagggtttgaaattaatctgaggctttttgctgataccgaaatattaggaaaggttttccaaaaataatactacttattataaagrattttacgtgttacttgatgccctgtgatctgttttctaa

SEQ ID NO: 126834 - DNA, 615 bp, Homo sapiens
  misc_feature (1)...(615): n = A,T,C or G
caagggttaaacttatccagtccttgactggagaagacctattccagtctgtgggtcatggctgagtgttttaaagaagtttccaggaaggaagtaggattacctgtttttttgaaccaattgctactttgctcaccctaaaatttatatctgtttggaaaataagtttcattacatgttccagtttgaatctactgagaaagcactgtgtcgactagtgaagggttccaggcctggtgaaaaaggttctgagatcaattaggnaagtttggggaaaaggagaatgtctgcccatttggatctattccttacaactttcacaggtaaaacttgaatgtcccatctagccttagggcctatgataattttctttaaatwattattattattatgtccagtagcttcttttcagtattttttatgaacccattttatctccttagttttcatctatatacacttcctttgtgattttatctagtctcatagctttaagtatgacttaaaggttactgacttccaaattattatctccaacccagaactctcccctaaattctagaactatgtctgcaactgcctgctccactgtatgcttattagatatcgcaaatg

SEQ ID NO: 126835 - DNA, 555 bp, Homo sapiens
ttcttagacagaattaaaaagctgagattggatcaccacaaatacaaaatgtctgtgggtgagtgaaaatacaaaatcacatttctcccagcacgaggttctgaattttagcttgttattggcatctccagcaggttgctgttaactaccagtggtaataaaactattcagctacgtgcttcagactaccaaacctatataaagagaaatataaaatgacatcaatcatgaatgtcgacgatagttttactgttatacttccgggtagacttcacggtgggtacacttccctacttcgtcccaagatgcctgtggggtcagtgtgatcatcccccctggtgatatcacaagtctgttctcaccgattgtctaagccaagtccactttttggtcacctatstccaactgtgctaggctcagggtgtttctacattaccccaaacttttttttttttcttaaaaaatgcaaaaaccaaaaccctcaataaatagcactaagcaatcatccaactacatcacagtcggaagaatgaagtggaaagaaaggtgaacctt

SEQ ID NO: 126836 - DNA, 555 bp, Homo sapiens
ttcttagacagaattaaaaagctgagattggatcaccacaaatacaaaatgtctgtgggtgagtgaaaatacaaaatcacatttctcccagcacgaggttctgaattttagcttgttattggcatctccagcaggttgctgttaactaccagtggtaataaaactattcagctacgtgcttcagactaccaaacctatataaagagaaatataaaatgacatcaatcatgaatgtcgacgatagttttactgttatacttccgggtagacttcacggtgggtacacttccctacttcgtcccaagatgcctgtggggtcagtgtgatcatcccccctggtgatatcacaagtctgttctcaccgattgtctaagccaagtccactttttggtcacctatgtccaactgtgctaggctcagggtgtttctacattaccccaaacttttttttttttcttaaaaaatgcaaaaaccaaaaccytcaataaatagcactaagcaatcatccaactacatcacagtcggaagaatgaagtggaaagaaaggtgaacctt

SEQ ID NO: 126837 - DNA, 455 bp, Homo sapiens
tttgtaaagcggagaaaaattaaggagaaaggaattgtagaacactaacaggaagaggacagatactgaggaatggctcatggtataagtgagattatcagagactytctacaatggaatttgaaatgcagggagcacatttggtgtatggttgtagaggacttacactaagggcattcttcggctacctctgccagcagatgagtggctcctgagaatgcataccaaattaattccccagctgttcacatgcatataagcagctgctgctgttactgcctaacacttatggcagtctggcagcacctctaatctctgccatagcagacaagccactcacctaaggcctctgctgtacctccaaagaaagaatttctcaagtagagactgagtggaactagactgccagctgtgagcctcagagctcctggctgcctgttgctgagtctatcagc

SEQ ID NO: 126838 - DNA, 455 bp, Homo sapiens
tttgtaaagcggagaaaaattaaggagaaaggaattgtagaacactaacaggaagaggacagatactgaggaatggctcatggtataagtgagattatcagagactttctacaatggaatttgaaaygcagggagcacatttggtgtatggttgtagaggacttacactaagggcattcttcggctacctctgccagcagatgagtggctcctgagaatgcataccaaattaattccccagctgttcacatgcatataagcagctgctgctgttactgcctaacacttatggcagtctggcagcacctctaatctctgccatagcagacaagccactcacctaaggcctctgctgtacctccaaagaaagaatttctcaagtagagactgagtggaactagactgccagctgtgagcctcagagctcctggctgcctgttgctgagtctatcagc

SEQ ID NO: 126839 - DNA, 455 bp, Homo sapiens
tttgtaaagcggagaaaaattaaggagaaaggaattgtagaacactaacaggaagaggacagatactgaggaatggctcatggtataagtgagattatcagagactttctacaatggaatttgaaatgcagggagcacatttggtgtatggttgtagaggacttacactaagggcattcttckgctacctctgccagcagatgagtggctcctgagaatgcataccaaattaattccccagctgttcacatgcatataagcagctgctgctgttactgcctaacacttatggcagtctggcagcacctctaatctctgccatagcagacaagccactcacctaaggcctctgctgtacctccaaagaaagaatttctcaagtagagactgagtggaactagactgccagctgtgagcctcagagctcctggctgcctgttgctgagtctatcagc

SEQ ID NO: 126840 - DNA, 455 bp, Homo sapiens
tttgtaaagcggagaaaaattaaggagaaaggaattgtagaacactaacaggaagaggacagatactgaggaatggctcatggtataagtgagattatcagagactttctacaatggaatttgaaatgcagggagcacatttggtgtatggttgtagaggacttacactaagggcattcttcggctacctctgccagcagatgagtggctcctgagaatgcataccaaattaattccccagctgttcacatgcatataagcagctgctgctgttactgcctaacacttatggcagtctggcagcacctctaatctctgccatagcagacaagccactcacctaaggcctctgctgtacytccaaagaaagaatttctcaagtagagactgagtggaactagactgccagctgtgagcctcagagctcctggctgcctgttgctgagtctatcagc

SEQ ID NO: 126841 - DNA, 385 bp, Homo sapiens
acacaatgtacagaactcagctttctactaaagagtcaaaggttaaatttttagctaagaaattatgcttcttacatgataaaaatcatacatgccaaaacttaccatactttattaaacaacataatgtaaggtctgattcaacagaaatattggagtggtgattttttaaaatatgtggaagtatatatttgttttcaaaatattggaaataaccatgatggaactataaattcaaacagtttgagctaagcagataaacttgcatgcatgaaaacacattaaacagactcatttggctgggaatattcattgcaactctcaaggctagamgtgtatttgtggctcatctcagtcattgcttccctctcattgtactcccatt

SEQ ID NO: 126842 - DNA, 571 bp, Homo sapiens
  misc_feature (1)...(571): n = A,T,C or G
cattataatccctggaacaaccacttcagagaaagagcaaaaaattaaaataggattgtaaatgacacactgaaataagttgattttaaaaatggtagtcaatggaaaaacaggatcagaagacaggagagacagggaaaacaaataagttatctgactgaaacagaattagaaactaacaacagtaagaaatattggacatctgaaaatatgtgaaaatttaacacccaccgctggtatcattggatccaaaaaaatcacaagataaattggaaaatattttgagctgcactccagtttgggtaacagactgagaccttgtttctaagaaaacaaaacaancttagaagagctataaaattaaatgccaaytttcccccttacccaaactctccgtggctctcctttgccctcagagtcaagcccatgcttctcactgtgggctccaggacctaggtggcctgaccagtgcacaccctatcacgatctcctcctctgcccacttgctcacgctgtccagtcacacacactatttttgcaaatgccaagctcctgatcaccgctgggcctt

SEQ ID NO: 126843 - DNA, 571 bp, Homo sapiens
  misc_feature (1)...(571): n = A,T,C or G
cattataatccctggaacaaccacttcagagaaagagcaaaaaattaaaataggattgtaaatgacacactgaaataagttgattttaaaaatggtagtcaatggaaaaacaggatcagaagacaggagagacagggaaaacaaataagttatctgactgaaacagaattagaaactaacaacagtaagaaatattggacatctgaaaatatgtgaaaatttaacacccaccgctggtatcattggatccaaaaaaatcacaagataaattggaaaatattttgagctgcactccagtttgggtaacagactgagaccttgtttctaagaaaacaaaacaancttagaagagctataaaattaaatgccaattttccccyttacccaaactctccgtggctctcctttgccctcagagtcaagcccatgcttctcactgtgggctccaggacctaggtggcctgaccagtgcacaccctatcacgatctcctcctctgcccacttgctcacgctgtccagtcacacacactatttttgcaaatgccaagctcctgatcaccgctgggcctt

SEQ ID NO: 126844 - DNA, 571 bp, Homo sapiens
  misc_feature (1)...(571): n = A,T,C or G
cattataatccctggaacaaccacttcagagaaagagcaaaaaattaaaataggattgtaaatgacacactgaaataagttgattttaaaaatggtagtcaatggaaaaacaggatcagaagacaggagagacagggaaaacaaataagttatctgactgaaacagaattagaaactaacaacagtaagaaatattggacatctgaaaatatgtgaaaatttaacacccaccgctggtatcattggatccaaaaaaatcacaagataaattggaaaatattttgagctgcactccagtttgggtaacagactgagaccttgtttctaagaaaacaaaacaancttagaagagctataaaattaaatgccaattttcccccttacccaaactmtccgtggctctcctttgccctcagagtcaagcccatgcttctcactgtgggctccaggacctaggtggcctgaccagtgcacaccctatcacgatctcctcctctgcccacttgctcacgctgtccagtcacacacactatttttgcaaatgccaagctcctgatcaccgctgggcctt

SEQ ID NO: 126845 - DNA, 571 bp, Homo sapiens
  misc_feature (1)...(571): n = A,T,C or G
cattataatccctggaacaaccacttcagagaaagagcaaaaaattaaaataggattgtaaatgacacactgaaataagttgattttaaaaatggtagtcaatggaaaaacaggatcagaagacaggagagacagggaaaacaaataagttatctgactgaaacagaattagaaactaacaacagtaagaaatattggacatctgaaaatatgtgaaaatttaacacccaccgctggtatcattggatccaaaaaaatcacaagataaattggaaaatattttgagctgcactccagtttgggtaacagactgagaccttgtttctaagaaaacaaaacaancttagaagagctataaaattaaatgccaattttcccccttacccaaactctccgtggctctcctttgccctcagagtcaagcccatgcttctcactgtgggctccaggacctaggtggcctgaccartgcacaccctatcacgatctcctcctctgcccacttgctcacgctgtccagtcacacacactatttttgcaaatgccaagctcctgatcaccgctgggcctt

SEQ ID NO: 126846 - DNA, 599 bp, Homo sapiens
ataagacaagtctatgacaaacccacagttaactcattctgaatgggcaaattttgttttggcgtcccttaagaactagaacaagacaaggatgcctactcttaaccacttctattccacatagtactgcaagtcctagccaaagcaatcaggcaagagaaataaataaaaggcaccaaaatagggaaagaagtcaaattatctctctttgctgacaatatgattcyatacctagaaaatcctcaacactccaccaaaggctcctaggactgacaaaccacttcagtaaagtttcaaaatacaaaatcaatgcacataaattagtagcatttctatgcagcaataatgttcaagctgagagccagatcaagagcacaaacccatttacaatagccacaacaaaaataaaatacccaagggtacatctaaccaaggagatgaaatatctctacaatgagaactacaaaacactgtggaaagaaataatgggtgacacaaacaaatggaaaaacattccctgctcatggattggagggaatcaatatcgttaaataggcatactgcccaaagcaagctccagattcaatgctattcctatc

SEQ ID NO: 126847 - DNA, 526 bp, Homo sapiens
ccttcccttctgctctgattttggctatttcttgtcttcttctatctttggatttagcttgtttttgtagtttctcgaggtgtgatgttgggttgttaatttgagatgtttctacctttttcatgtgggtgtttagtgctataaacttccttcttaacactgctttagctgtgtccccaaattgaacaaaactaaagaagtgttaagaaggaatgttgtatctttgttcttagtgrtttcaaagaatttgttaatttctgccctaatttcattatttacccaaaagccattcaggagcaggttggttaatttccatgtaattgtatagttttgagtgattttcttagtattggtttctatttttattgtgctgtggtccaagagtgtgtttggtaagatactggggttttttgaatttgctgaggattgttttatggctgattgtgtggttgactttagagtatgtgccatgtgcttctgagaagaacgtatattctgttgttttttggggaagatttctgtagat

SEQ ID NO: 126848 - DNA, 603 bp, Homo sapiens
cttcgcttctctggacgttttcaaaggcggtgaatgaatcagatcgcttttaaatagttataccctgcatcctcgcatttcctcttgttcatrtactaagtgtgtgatgtctaaaacagttgaagtacggtttattaattcattcagcaaatctttactgcacctgaacatggaacatggcgtgtgcctggcaggggttaactctggggacctcagtccttgcttttgaggggcacacagtctggccatggggagaggtggctcagtgcctatctgcaccagggtgagcaggctccatgaagtgggcctgggggatggagggtgtcatagaccagctgaagttctctggaatctcaggaggggctgcacaggactcatggggcatggagaagagtcacgtgggtgtgccccctcaacactgtgcttctcaaatatgtgcgcgtccattctggtgtctgggtcaagggcggttccgcctcagcaggtctgggtgggtcctgagcttctgccttcccaacaacctccaagtgaggctgatgctgctggctggaggagcacaaggttggagacaggtagcaagcttgggggcaaaaagagacacca

SEQ ID NO: 126849 - DNA, 462 bp, Homo sapiens
agtagctgggactataggcgtgtgccaccacacccagctagtttttgtatttttagtagagatggggtttcaccatgttggccaggatggtctgaatctcttgacctcgtgatccacccacctctgcctcccaaagtgctgggattacaggtgtgagcaaccatgtctgacccttctttgaaccaattattttggttggaggttaaaaaggtccacttgagttgcatgcccaggcttgtttcatagaacctgagcttattccctcaacatcagacctcagctaggctaatttgagtcctgctctaaaatttctcaaaccatagctgatgtttctgcagtcacaaagtracatgccatggccatctcctatgatgtggaggggacttgcccgcagtgagagagaattaggccaactcagtgagagaagctaggtgaaccctgggacaggagacatattagtcc

SEQ ID NO: 126850 - DNA, 498 bp, Homo sapiens
tctgcctcccgggttcaagcaattctcctgcttcagcctcctgagtagctgggactataggcacatgccgccacacccagctaatttttgtacttttagtagagatggggtttcaccatgttggccaggatggtctcgatctcttgacatcatgatctgcctgcctcggtctcccaaagtgctgggattataggcataagccactgcgcctggcctctatttgcattattttccctaggaagtagattggtggtaatcattaygtttttcaccaaatgcttctggctctccatcttctgggcaaaggatagaattgtacatccttggctcctttgaaatgaggcattgtcctgggatttcttttggcctctgaaatgtgagtggaagtgatgtgtgtctcttttgggcagacaccataagagcaatgcatgattcaccatgctccttccctccaccatgattgcatcatgatcgtgggttgtatattgagatggaaca

SEQ ID NO: 126851 - DNA, 620 bp, Homo sapiens
agaaaaaagaagcagcaaatatcaaagataatcccaatgtctctggatgaacaataggtaggatgatgctgccaaatactgggttagaaacaccagaaaatgagcaaatttgaaggaaaataggtcaaattcaattttatgtgtacagagtttgggaaatttgtgaaatatccatctgcaaatgctatgtggaccattgaatatagatctggaactcaagagacacaactcaatatagtgacttcggagttgccagacatgggtggtgatcaaagacacgtggctgagtgtgagtaccccaagtcagaagaaatccaagacagaatctcaatggacctaatacttcatactttggaatatgggtcttccaagtgattaacgagtgactggaagacaggaggtgcagaggactgtgtgtcagggaaagcccaatgaagagkatgttttcctaaagagtggttcatgatgtcacataacacagagatcacataagattagacttgaaaagtgtctctaggtcttaaggacaaagacatcttaggcgacatttcactgcagggagtgggtgataggaaagccagtttggagcaggttgaggagaaaccagaaggtgaggaatt

SEQ ID NO: 126852 - DNA, 583 bp, Homo sapiens
ctggcccagatatatctaacatgacatcagggtcccccttcctcaatatgctctctccttcctcaggacactcaggtttccaacttgcattaagcagggcttcaccaaaggttgaggaacccagaacttggatgcataaagcagcagagaagagaacacaggctaaagcccagatggttggtgcctcttccagatcttccttcaggagagtgacagctgaatggacatctctgattgaggcattggtgaggtaggaatatggaggggaragtgagttgatactaaggcccccatcccccgccatggtagattggatggggatagacccttcagactctcccctgggattggaacacagttcctatggccaatctcagtgtttaaaattcaaggacattttgacccatgtgcagagaggatcaagctgatgagacagacagaagaagggagcagacacccacaggatgcaggaataagctgcagagagggaagctgctccatctcctggtgcctttcaagttcttgctccagcctgtcatgaaacccagcgcccatccctgacttggcttccataaaaccccca

SEQ ID NO: 126853 - DNA, 583 bp, Homo sapiens
ctggcccagatatatctaacatgacatcagggtcccccttcctcaatatgctctctccttcctcaggacactcaggtttccaacttgcattaagcagggcttcaccaaaggttgaggaacccagaacttggatgcataaagcagcagagaagagaacacaggctaaagcccagatggttggtgcctcttccagatcttccttcaggagagtgacagctgaatggacatctctgattgaggcattggtgaggtaggaatatggaggggaaagtgagttgatactaaggcccccatcccccgccatggtagattggatggggatagacccttcagactctcccctgggattggaacacagttcctatggccaatctcagtgtttaaaattcaaggacattttgacccatgtgcagagaggatcaagctgatgagacagacagaagaagggagcagacacccacaggatgcaggaataagctgcagagagggaagctgctccatctcctggtgcctttcaagttcttgctccagcctgtcatgaaacccagygcccatccctgacttggcttccataaaaccccca

SEQ ID NO: 126854 - DNA, 518 bp, Homo sapiens
cctctgcacagtctcagcaaagaaggctgaagtgctcctcctttgtgtcccagcacactggacacacactttcatcacagcaattcctttgcatcaattttcccaccagcctctaaactcctttaagggtggggactggaccttgctcaccactcttccttcacccagctgctagcactggcctggtccatggtaggwctctacacatgtttgttgaatgactaaaggacaatgagggggatagaaacagcaccagactgagaatcaagggacatgaactctagaccaaacttggttggggaggaaaatagctttgtgaccttggccaaagcagccccacctgtgtgagattaccttcacaaaagcacttgggaagtacacataagaggtcaaggttcacagacagctgtcttcatttcagggtaggcctgtgaccaatgtggagaagagccaggggacatgcttctcatcatgaatggaaacacacaaaggttggcttcattccaaatatgaagccc

SEQ ID NO: 126855 - DNA, 574 bp, Homo sapiens
atactcaaagtcatttgtcattagaaaattgcacatgaaaacaatgagataacagaacccacctattagagtggctaaaatctgtaaaaagtgacaatcccaaaagctgtcaaacaaacagagctacaggaactctcattcattgttggtggaaatgcaaaatggtacaatcactttggaaaattgtttgggagttttttttttcttttacaaagctaaacataatcttaccctataatcttgcaatggcagtttgacttatttagccaaatgagaggaaagcttatgttcacccaaaaacctgcacacaagtatttacagcagttttatttattattgtcaaaaactggaagcaaccaagacgcccttctcaacaagtgaatggataaacaaattgtggtgtatccatacaatggaatattagtcagtgatgaaaagaaatgagctatcaagctatgaaaagacataaagaaacattcaattcataacacctgaaagaagccagtctgaraacctacatattgtatcattccaactgtaggacattctgagaaagtcaaaaagatagagatag

SEQ ID NO: 126856 - DNA, 574 bp, Homo sapiens
atactcaaagtcatttgtcattagaaaattgcacatgaaaacaatgagataacagaacccacctattagagtggctaaaatctgtaaaaagtgacaatcccaaaagctgtcaaacaaacagagctacaggaactctcattcattgttggtggaaatgcaaaatggtacaatcactttggaaaattgtttgggagttttttttttcttttacaaagctaaacataatcttaccctataatcttgcaatggcagtttgacttatttagccaaatgagaggaaagcttatgttcacccaaaaacctgcacacaagtatttacagcagttttatttattattgtcaaaaactggaagcaaccaagacgcccttctcaacaagtgaatggataaacaaattgtggtgtatccatacaatggaatattagtcagtgatgaaaagaaatgagctatcaagctatgaaaagacataaagaaacattcaattcataacacctgaaagaagccagtctgagaacctacatattgtatcattccaactrtaggacattctgagaaagtcaaaaagatagagatag

SEQ ID NO: 126857 - DNA, 538 bp, Homo sapiens
actaggtgtgaatcctttctctaggtgagtagctgcatggtgtgccaatcctgccttacagagcccacatctagaggcctcaagaagagactgggcagtgggaacacaaccggcttgtgtcctccccacgagcgtttccccgttcagggacaggggacacgagcagtgagcatgacaaatgaagcacagtgaaggaaggggaagtgggtgacttcagaccaagaggctactgtggtcatgtgcagtggggccgcttctgataggggaagcrcaagaggcagtgtgggccagggagaatgtcctggatctggcattcctgcatcttgcccccactcacactgcctggtaacaatgtacccaaccacacaacttctggcctccatgtcactacgccctcaggcatctagatgcgcagcctggggatgggggcatttaataatagacagatgtctgaggcagatgtcgtcagacttccaggcacaacgtgcctcattgtggagcaattagggcagtcatcggcaaaaaactaaagactact

SEQ ID NO: 126858 - DNA, 574 bp, Homo sapiens
aatgatctgagagccttttcctggggcagcaggctctccgatctggcagctgtcctcttcccctgttgctctgctgcactgatttgcaactaggcagatttgacggtgggggtgggagagagcatgcagaagygcccccactgacctcatgtgcccttccccacctagcctcaatcacacccatactgactgagaaccatggctccaacagttaagcctttaacgtgagggaacactgttttctcaactaggcatattctgctagaaatatcagatccttttcagtgtaccttaattttacaaatatttcagatgaaagttactttgcccttgccccaaattacctgagccatgatctcaatctgatcattttattttaatagtcccaaccttaaaatgttcaaatccaccttattctgtagagaagtccatgtgtctgcagaaacaccatgtttctttgtctgtccttgtgagtctgaataattaaacaggattttgatggcgtgtgtgccatgtgtatttattgtgcacacaggtagatacatgcataacatattaattgaattattttaaa

SEQ ID NO: 126859 - DNA, 574 bp, Homo sapiens
aatgatctgagagccttttcctggggcagcaggctctccgatctggcagctgtcctcttcccctgttgctctgctgcactgatttgcaactaggcagatttgacggtgggggtgggagagagcatgcagaagcgcccccactgacctcatgtgcccttccccacctagcctcaatcacacccatactgactgagaaccatggctccaacagttaagcctttaacgtgagggaacactgttttctcaactaggcatattctgctagaaatatcagatccttttcagtgtaccttaattttacaaatatttcagrtgaaagttactttgcccttgccccaaattacctgagccatgatctcaatctgatcattttattttaatagtcccaaccttaaaatgttcaaatccaccttattctgtagagaagtccatgtgtctgcagaaacaccatgtttctttgtctgtccttgtgagtctgaataattaaacaggattttgatggcgtgtgtgccatgtgtatttattgtgcacacaggtagatacatgcataacatattaattgaattattttaaa

SEQ ID NO: 126860 - DNA, 570 bp, Homo sapiens
taatctatcataatgtacacttgttcaggtaggtgtgaaaaagccaaatgaagaagaagcgtggaaattatctagtgacatttgggtctgacaataggagaatcaatttaaatactgtcgagaatagactacaatctctgctggagataaatcctaacatactaacagtaattactgtaattgtttaggacaaagcatcaaaatgagtaaaatctcataaagtgatctaattttacagctctaaacaccacacactagtatctcacacaaaatacaacttagactttattatgcatcatatagttacatgcatctatcttgctccactagtgtttttygtactcttccctgaaccacattttttttgtgctgctacattcaaggacccatatagaagttaggaaaacaaagatgagttagacatagttactattgtaaaaagttcatactttatcagagggaaagggccaggtaaataaaacacagaatggtaggtgctatatggaagataagtatgtgtgtgtatttataggtgtgtaaacacacacatgtacacacatgatgggtatg

SEQ ID NO: 126861 - DNA, 588 bp, Homo sapiens
tcctcccaactcagcctcccgagtagctgagactacaggagcacaccatgacacctggctaatttttgtatttctcgtagggacaggattttgccatgttgcccaggctggtcccaaactcatgagctcaagctatcagccagccttggcctccataaatgctggggttataggcatgagccactgccaccacacctggccataaaaatttattgaatgttaaaattgtgctattatattgtatacttaatgatagcaataagtataggaaagaataatttgcataataaatattcctattttttttctaattagtacaataattgaatagtaaccatcaccaaagtaggacaaagaagggctattaccataaaggttagtttgatctttcaagatttgattacttctacccagackccacttcatccacttgaacaaaggttctgttgttcatcaatcaaatgttaagtgtctctgttgcactgaagtattaccctagctggccatattccacataaagggcaaagaacagtttctctcagcagattttgtaaaaaaacaaaacaaaacaaaaacaacaacaacaac

SEQ ID NO: 126862 - DNA, 588 bp, Homo sapiens
tcctcccaactcagcctcccgagtagctgagactacaggagcacaccatgacacctggctaatttttgtatttctcgtagggacaggattttgccatgttgcccaggctggtcccaaactcatgagctcaagctatcagccagccttggcctccataaatgctggggttataggcatgagccactgccaccacacctggccataaaaatttattgaatgttaaaattgtgctattatattgtatacttaatgatagcaataagtataggaaagaataatttgcataataaatattcctattttttttctaattagtacaataattgaatagtaaccatcaccaaagtaggacaaagaagggctattaccataaaggttagtttgatctttcaagatttgattacttctacccagacgccacttcatccacttgaacaaaggttctgttgttcatcaatcaaatgttaagtgtctctgttgcactgaagtattaccctagctggccatattccacataaagggcaaagaacagtttctctcagcagattttgtaaaaaarcaaaacaaaacaaaaacaacaacaacaac

SEQ ID NO: 126863 - DNA, 617 bp, Homo sapiens
tgagggagtaaggagtaagtccctttgcctgaattcatgccatgttttattaaagtgaacaaggaatasccatgcttgaaatcccctccccaaacggctttgttagctggacacagccactccatctcaggtgtaatttcgcacgcacaggcaggtgaggtcctgagttggggacagctctctggcggtgagacatctccccagaggctcacaggtacactctagccgcctatgggtctataggagccctggggaagaaaagatggagtttctggtttagattaggttattctggcaacaaaaaggaaagggcaggggaggagaacattatcagtgtccttcaagaacgggcaacttcagagggtatgcaaataggcaatagctataggggaaaaaaaattcacaatggcatccaaaaaatgtaacttaaattaaggatgttacgtcattttccacctatcagaagggcaaaatgaaaaagcatgacatatccattactgaatatctgaggaaagagacaccagacaccactattaaaaggagcaaaaatggtcttcccacttctggagaccagttgtatccaatatcttcaaaacgtgcatatcttaaggtccggt

SEQ ID NO: 126864 - DNA, 638 bp, Homo sapiens
aatgagccaattccatgatgttccagcagtaaggaaatctgagcatcaccaagtcacacatttcaggcctggacagtttggcaaggtcattccatcccggcaaaccctccgccatacctgtgtgtctggcatcctcactgaatcaggaaaggatgctgacactcagagtttctgagcactgttcaagttcatggcgatgcataaatgcccagaatctagtttcctccccaaactgcaccccatgtgcaattaactccaccctcagccccatgagtgaacatgtgctgggctgaccaacccaaacactgctacccacccggacacagtaattcattctggtataagctcacaaatttaagtgatgagatacaaggtctgggactscattaaaactattaagagggtggtatattttctgctggccttaaacctaggaccctccggatctctccgtgttctagagttgccggcagctacgttgctatcccatgggcctgaagaatgaagccagcagagaagcaagcagaagagacagctggagagagaagaggtcctgatggtatctgtaacagtcagagaaatgctagttgctgtaacaaataaaccctcaaatcctaaataataaaaatttatttctt

SEQ ID NO: 126865 - DNA, 606 bp, Homo sapiens
ttttgggagggcaaggcaggaggatcacttgaacccaggagtgtgagaccagcctgggcacagagggagatcccttctctacaaaagaaaatttaaaaattagccgagtatggtggtgcatgcctgtagtcccagctacttgggagatagaggctggaagatcccttgagtccgggaggtggaggctgcagtgtgccatgatcatgccaatgcactcctgcctgggcaacagagcaagaccctgtctcaaaataaaaattaaaaaaaaaaaaacagaaagcagaaagcagaagagtggctgtctagggctgagagtgggaacaggtatttactgtaagtgggcacaaggaaacatttagggataatgggaatttcctaaaactggttgtggtgatggctgcacaactctataaatttattaaaaccactggcggggggaaagacctcacagctgccacctgcrtagctcttgcactttcttgaccatttgttgcccactgctgtgtcacttgcaaccctgtggaaaggtccaagtcatgaagaagtgaagcctccacaaagccaggaggaaatgaggctgcctggaatagccatgtgagtgcgcca

SEQ ID NO: 126866 - DNA, 548 bp, Homo sapiens
atggtatcatggaaatagtgtttgtaatctagttttaaggacaagatatacacacaaaaagatatttgttataacaagaggctgaataaactcagtgacaaaatttcatagatgaggccaggcacagtggctcacgcctgtaaccccagcactttgggaggctgaggctgggggattgcttgagcccagaagttaagaccagcgtgggcaaaatggccaaatcctatccctaagaaaaatactaaagttagccaggtatggtggcgcacacctatgggcccagmtactcagaagtctaaggtgggagggtcacgtgagcccgggaggtcgaggctgcagtgagctgagatcgagccactgcactccagcctgggtgacagaacaatacttggcctccaaaaagatttcacagactacaagagctatagcatttctacaggatagagaactttcttccatcttaggtgtctcaggagaacttctgagtctttgaggagtcactctcagaagacatgacctatgtcttgtttaccatcaaagctcaagac

SEQ ID NO: 126867 - DNA, 647 bp, Homo sapiens
ccaaagagtgagtagcaagatttattgcaaagagtgaaacaacaaagcttccacaggtggaagcagacccaagcaggttgctgctgctggctctggtggtcagcttttattaccttatttggccctgccgacattctgctgattgatccattttacagagtgctgattggtccgtttttacagagtgctgattggtgcttttacaaacctttagctagacagagtgctgattggtacgtttttacagagtgctgattggtgtgtttacaaacctttagctagacacagagcactgattggtgtgtttacaatcctttagctagacagaaaagttctccaagtccccacccaacccagaagcccagcctcttcacctcttacaaagtgcctcaggattatggcctgtgagcctcacagcaaccctatgcragaggtaatgtggatgctcttatcttcacagtgttgatcaggaaacagaggcccaaagaaatttggttacttgagcaagctcacgcagctagtggcaagaattggatctttaccccagctcatctcattctcacttctctacttggtgcactatgccaaatcacctcagtgtttgtgggagagatgcaccttcccttcaagtattaatgctgtcactt

SEQ ID NO: 126868 - DNA, 535 bp, Homo sapiens
caagatctgacggttttataaggaacttttacccccttcactctgcacttctccttcctgccaccatgcaaagaagcatgtgtttgcttccccttctgccatgattgtaaatttcctgaggcctccccagccttgtaaaactgagtcaattaaacctcttttctttataaattacccagtttcaggtatttcttcatagcggtgtgaaaatggactaatacagagccctgagtaccaaaacattcctcctcttcatgttcttatggatgccttcattcagtccaagtgcaatatccttggaaaacagccctatatgcccatcccaccatactttctggccccacatggattcamctctataactcatttgcaacacaaaagagctgaggaggttaaaaagtattcaggcccctcccattctaaaatgattgcaaaacatctgtttacatttttgagagaagacttggacatttcatgagcttttggtagatagggaacaagtaaatacatgaggaagaaaaggagcaaagaacat

SEQ ID NO: 126869 - DNA, 562 bp, Homo sapiens
aagaccttatagacatttctcaaactaagatatacaaaaggccaatgtgtacattataamttctcaacaacactaatcattagggcaatgcaaataaaagccacaatgagataccacttcactccagttagaatggctacaataaaaaagacaacagaaaacaaggtttggtgaggatgcagataacatagaacacttaaacatttttaatgagattgtaaatggaaaacagtatggtggtacctgagaaaattaaaaatagaactatcatacaatccaggaatcccactactgagtatatatccaaaggaaatgaaatcagtatgttgaagaggtatttgaactatgatataaatcaaaacattatttacaatagctgagatatggaatcaacccaagtgtccaaaactggatgaatggataaagaaaatttggtgtgcatacgcaatggaatactattcagcgataaaaaaagattgatatctttttatttgctacaacatggatggacctggaggacatcatgttaagtgaaataagccagacacaaaaaggcaaatac

SEQ ID NO: 126870 - DNA, 562 bp, Homo sapiens
aagaccttatagacatttctcaaactaagatatacaaaaggccaatgtgtacattataaattctcaacaacactaatcattagggcaatgcaaataaaagccacaatgagataccacttcactccagttagaatggctacaataaaaaagacaacagaaaacaaggtttggtgaggatgcagataacatagaacacttaaacatttttaatgagattgtaaatggaaaacagtatggtggtacctgagaaaattaaaaatagaactatcatacaatccaggaatcccactactgagtatatatccaaaggaaatgaaatcagtatgttgaagaggtatttgaactatgatataaatcaaaacattatttacaatagctgagatatggaatcaacccaagtgtccaaaactggatgaatggataaagaaaatttggtgtgcatacgcaatggaatactattcagcgataaaaaaagatygatatctttttatttgctacaacatggatggacctggaggacatcatgttaagtgaaataagccagacacaaaaaggcaaatac

SEQ ID NO: 126871 - DNA, 513 bp, Homo sapiens
tctttttctaacccattcacacttcctcctaacattgtatgagtcatgaactcttaaaatagactacttctccaagactatggattccacttggacatttataatatttgtttcctttatactaaaaatttatctgtttaacatatactggaaacaaagataaatgaaaaaygactgaaggctagcttcaaatcaattcaaccactgattgtgttaaaagttacctaattctaccttaagtcttcaaattgttaagacaaatcctccctggtgtaaaataacataaccctaatactcaatttatctgtataaaaattatacacagaatgttaaaaatattactggggaaagttaaaaaaaaaaagccatctagcagaaggaatctcagtaaccaaaccagtggcctttgttaggaagggaaagggctcaactcagtaatggactgatacagatggctcctgggacgaatgtgggtgggtggtttctgccagcatgaatgcttagagaaatgtc

SEQ ID NO: 126872 - DNA, 526 bp, Homo sapiens
ttctgcctcctgatgaaccagttgtttattcaatattttttttctctgaagtttggataccttcattttactttaataagtgaggaatatgccttcattttattattatcatccaatttcttaacaatgttttatgatagacgccattctctaacttctcaaagacattattaaaatcctgtggtcccctacaataaatcaaattggtggtctcatacacatatttggtacactttcattttgcttttctaagctagaattttgttttccactttatctggaatgttgcagyatccttcttttcaagttgtagaataatactatacttattttttaagagaatgtataattgtagaataatacatccttcttttcaaattgtagaataatactgtacttattttttaagagaatgttcaaaggatgtttacggagtacttacatattaatatttatgtctatatttatatatatcctcctatctttcttatatctgtctctatcatctatctctatgttaattttc

SEQ ID NO: 126873 - DNA, 610 bp, Homo sapiens
tctcctcaaaggctttcatgccctgtgggacagtggttaaggatactctgtgtgtgtgtttgaaacttggggaaactcaagtagctgcctaacgaaaagtttcacagcttgtgttatcccgctatcagattcctaccaatctgcacttgataaacaattggggaaccagccaccttctgtaatatgggcagtagagcaggagaaatgkaagctgaatctatttgtgtttattctgacccaccacttagtgcatttgtgtttataaattcctgagcatgtggggaacctcagtgattcagagttgccagaggtttctgtattgccccaggctcaaaaatacctgctgagtccgtcttctcattcaggtaaacaaattgctttcttaaaaattaaaaagaaataaataaaataaacttttgaatattttggaccattagacgttcaaaccttagtgtttattataaattattttaaagaaatcactttgttctcatacactgttttggaatcagatactcatttaaattatgtaatttcaactgtcagctcgctgcattcctcttgtggtgtgatcatcttgacatatgggttgtcattttattgtttaaac

SEQ ID NO: 126874 - DNA, 610 bp, Homo sapiens
tctcctcaaaggctttcatgccctgtgggacagtggttaaggatactctgtgtgtgtgtttgaaacttggggaaactcaagtagctgcctaacgaaaagtttcacagcttgtgttatcccgctatcagattcctaccaatctgcacttgataaacaattggggaaccagccaccttctgtaatatgggcagtagagcaggagaaatgtaagctgaatctatttgtgtttattctgacccaccacttagtgcatttgtgtttataaattcctgagcatgtggggaacctcagtgattcagagttgccagaggtttctgtattgycccaggctcaaaaatacctgctgagtccgtcttctcattcaggtaaacaaattgctttcttaaaaattaaaaagaaataaataaaataaacttttgaatattttggaccattagacgttcaaaccttagtgtttattataaattattttaaagaaatcactttgttctcatacactgttttggaatcagatactcatttaaattatgtaatttcaactgtcagctcgctgcattcctcttgtggtgtgatcatcttgacatatgggttgtcattttattgtttaaac

SEQ ID NO: 126875 - DNA, 634 bp, Homo sapiens
agggaggtctgaaaaaaggggtaacagccagttgcttaaacagtcagaacacacacaacatttatcaattaggtttatcatcttatatggatccagtttatgatacccaaaasaattacaatcataacatccaagatcactgatcacagatcaccataacagataaaataatatttaaaaagcttgaaatattgcaggaattaccaaaatgtgacacagagacaggaagtgagcacatgctattggaaaaaggcaccaatccgctagcacgacacaaggttacaacgaactttcaatttatataaaacacgcagtatctaaaaaagcacaataaagcgaaacaaaaatgaggtatgcctgtatatatgtgtgtgtatgtatatatatatataaacaattatgtctcacttaacgatggcggtacattctgagaaatgggtcattagactcttcagcattttttgaacatcatagagtgtacttacaccaacataggtgggatatcctactatgtacctaaactatgcggtttagcctattgttcctggcctacaaacccatataacatgttactttactgaatgctaaaggcatttgtaacacattcataggtatctgtgtttctaagcataga

SEQ ID NO: 126876 - DNA, 566 bp, Homo sapiens
caagatcactgatcacagatcaccataacagataaaataatatttaaaaagcttgaaatattgcaggaattaccaaaatgtgacacagagacaggaagtgagcacatgctattggaaaaaggcaccaatccgctagcacgacacaaggttacaacgaactttcaatttatataaaacacgcagtatctaaaaaagcacaataaagcraaacaaaaatgaggtatgcctgtatatatgtgtgtgtatgtatatatatatataaacaattatgtctcacttaacgatggcggtacattctgagaaatgggtcattagactcttcagcattttttgaacatcatagagtgtacttacaccaacataggtgggatatcctactatgtacctaaactatgcggtttagcctattgttcctggcctacaaacccatataacatgttactttactgaatgctaaaggcatttgtaacacattcataggtatctgtgtttctaagcatagataaggtagagtaaaaatatggtattttaatctaatgggaccactgttaaatatgtggttcatt

SEQ ID NO: 126877 - DNA, 529 bp, Homo sapiens
ttcaacaactaattccccactttagaccttgttatcaatatgaactcttcgagggttgaaatataaaactccatacttctcttgtccttggataggcttacgtatctctcagtttcactatttttgtgctcatatattattatgctcttctagtcccttagcttttctttccccttgctcttatgtttctattccctctgcccttttctttcttttctcccgamgtgtacactttgaggcattgctttaactaagatcctcagctctgactgtcaactctccactcacacatctgaaaaaataatattgtccacatttgtgattatttccctgttctgttgtaaagtattcctaatggttagcattctttaatttcaaaatctacctctaaaaaactattctcaaggactatttccttggggaaataatgatcatctctcatgacactaatcaattaactttcttttagatattgaattactttacatctttgttcacaattatctgttttcttatgcagaaaggacta

SEQ ID NO: 126878 - DNA, 648 bp, Homo sapiens
gcatggtggctcacgcctgttatcgcaacactttgggagacagaggtgggaggatcgcttgagcccagaagttcaagaccagcctgggtcacgtagaaagactcccatcactacagaaaattttaaaaattagccaggcgtgatggcacccacctgtagtcccagctactcgggaggctgagatggaaggattgcttgagcctgggagattgaggatgcagtgaacaatgattgcaccactgcactccagcctgggtgacagagtraaacctcatctctaaataaataaattttaaacagagagacacaattcaagtcacaaaaattaagtttcagggtcaggacttgtgggtaaagcaagtttctggctgcactcgtagctcacttgatttttatttcataagctctccagggaatcatagcccaccagtgtgccgcgttcccagtgatgagtctggaagggaataagggacttcatccaggctatttaggacataaaatattctaggaaaactactccctgtcctctcctggaaatctctagccagcagttacacttacccttggggttgagcatattttgttggcttttgttgtatgtaaccaaatctttcctgcttctaattaaatttattcctttagtaaaat

SEQ ID NO: 126879 - DNA, 314 bp, Homo sapiens
gaattctatgtgactgacaaacattcagactccagcagcagtgttctgtaatcctatgtgagkgacaaacattcagaccccaagagcagtgttctgaaatcctatgttaagggaaacattgagaccccagcatgaatgttctggaatcctatgtgagggacaaacattcagaccacggcaggagtattctggaatcctatgtgaggaacaaacattcagaccacaacaggagtattctggaatcctatatgagggataagcattcagaccctcgtagcagtgttctggaatcctatgtgaaggagaagcattca

SEQ ID NO: 126880 - DNA, 314 bp, Homo sapiens
gaattctatgtgactgacaaacattcagactccagcagcagtgttctgtaatcctatgtgagggacaaacattcagaccccaagagcagtgttctgaaatcctatgttaagggaaacattgagaccccagcatgaatgttctggaatcctatgtgagggacaaacattcagaccacggcaggagtattctggaatcctatgtgaggaacaaacattcagaccacaacaggagtrttctggaatcctatatgagggataagcattcagaccctcgtagcagtgttctggaatcctatgtgaaggagaagcattca

SEQ ID NO: 126881 - DNA, 506 bp, Homo sapiens
gagaaatcccgagattctataatcataataatcgaattgtaattgctagtttaagtagtccttcaaaaatacatctcattcctgacaggataaaacaagttttwaaaaatatattatattcagattcactagggaacacttggagccaggaaataattcagattcagcccaaattataggcaaataataaaaactctaaaacaatgatcagggttggaatctaataacatatgtcatagttttcttttggaatataaattttctctctagtccatcattttatcaaaaacaaatcatagtaggaccaattttgtgtgcaaaataagttttagtcttatcatactgggcctgattatttccataaagggcagcaagaatatttattggccatataggcttcttaaaattggctttgttggaaatttttaataggaaatcttatacttttaacagccttgaagctagcactcaagatttgcatcagactgtgtctgtaatacttttta

SEQ ID NO: 126882 - DNA, 506 bp, Homo sapiens
gagaaatcccgagattctataatcataataatcgaattgtaattgctagtttaagtagtccttcaaaaatacatctcattcctgacaggataaaacaagtttttaaaaatatattatattcagattcactagggaacacttggagccaggaaataattcagattcagcccaaattataggcaaataataaaaactctaaaacaatgatcagggttggaatctaataacatatgtcatagttttcttttggaatataaattttctctctagtccatcattttatcaaaaacaaatcatagtaggaccaattttgtgtgcaaaataagttttagtcttatcatacygggcctgattatttccataaagggcagcaagaatatttattggccatataggcttcttaaaattggctttgttggaaatttttaataggaaatcttatacttttaacagccttgaagctagcactcaagatttgcatcagactgtgtctgtaatacttttta

SEQ ID NO: 126883 - DNA, 260 bp, Homo sapiens
ccacctctgcaagggtgtaacaggagcagatggaccagccgccaacctcactcactgccagacgtggtacatcagttcttctaycctaaaggtggggccaagaggcagaccacaggccgtcttgaggaggactttatgttcaagtgcagaaagcaggcaggattaccaccctggggactcacccttctgtggcccacagtgccatatgagccctgaggcatggactggtgccatcttctttatacaaaaattaacttaag

SEQ ID NO: 126884 - DNA, 260 bp, Homo sapiens
ccacctctgcaagggtgtaacaggagcagatggaccagccgccaacctcactcactgccagacgtggtacatcagttcttctatcctaaaggtggggccaagaggcagaccacaggycgtcttgaggaggactttatgttcaagtgcagaaagcaggcaggattaccaccctggggactcacccttctgtggcccacagtgccatatgagccctgaggcatggactggtgccatcttctttatacaaaaattaacttaag

SEQ ID NO: 126885 - DNA, 260 bp, Homo sapiens
ccacctctgcaagggtgtaacaggagcagatggaccagccgccaacctcactcactgccagacgtggtacatcagttcttctatcctaaaggtggggccaagaggcagaccacaggccgtcttgaggaggactttatgttcaagtgcagaaagcaggcaggattaccaccctgggkactcacccttctgtggcccacagtgccatatgagccctgaggcatggactggtgccatcttctttatacaaaaattaacttaag

SEQ ID NO: 126886 - DNA, 260 bp, Homo sapiens
ccacctctgcaagggtgtaacaggagcagatggaccagccgccaacctcactcactgccagacgtggtacatcagttcttctatcctaaaggtggggccaagaggcagaccacaggccgtcttgaggaggactttatgttcaagtgcagaaagcaggcaggattaccaccctggggactcrcccttctgtggcccacagtgccatatgagccctgaggcatggactggtgccatcttctttatacaaaaattaacttaag

SEQ ID NO: 126887 - DNA, 579 bp, Homo sapiens
tattgtgtgtatcagatggtggcctaagaagtgaaaaaggggaggtttgcatgtagataagttttgcaacctctgaggctccttaaacatttttgaattgctgtagcctaggcttgttttgtaaaaagtgcttgttkctgaaaatgatgatttgtttggataaaccccctcctcattttttgggtggtgggggagctttttattgcatagtcacaatgggaggcattgttcacacagaccagcatcgtcatacttctattcttgtcactgacagtattatttgcaactgctttttttccagcctcttctaatttccacactaccacttattgtatttcattaaagctgggttagaaatgcaaggcatataattagattgagaactatgctatcgatttggttttccattatgatgttatcacatgcacaaaaaagtcatttggtacaattgttatgattaaaactacaaaagagatctattacatcagacttagttttcagtgcctgatgcagtgtaaaataagagtgagaggggttgatctgtttatattagagctgcatatgccatgtaaccataaa

SEQ ID NO: 126888 - DNA, 579 bp, Homo sapiens
tattgtgtgtatcagatggtggcctaagaagtgaaaaaggggaggtttgcatgtagataagttttgcaacctctgaggctccttaaacatttttgaattgctgtagcctaggcttgttttgtaaaaagtgcttgttgctgaaaatgatgatttgtttggataaaccccctcctcattttttgggtggtggggkagctttttattgcatagtcacaatgggaggcattgttcacacagaccagcatcgtcatacttctattcttgtcactgacagtattatttgcaactgctttttttccagcctcttctaatttccacactaccacttattgtatttcattaaagctgggttagaaatgcaaggcatataattagattgagaactatgctatcgatttggttttccattatgatgttatcacatgcacaaaaaagtcatttggtacaattgttatgattaaaactacaaaagagatctattacatcagacttagttttcagtgcctgatgcagtgtaaaataagagtgagaggggttgatctgtttatattagagctgcatatgccatgtaaccataaa

SEQ ID NO: 126889 - DNA, 558 bp, Homo sapiens
aatgtgaatcacatctaaaaatactttcacagcaacattgagactggtgcttgaacaaatatctggaaaccacaggctataaaagttgacccataaaattaccaccacagtgtatttctttataacttgcttttttctcaccaacaaggtaacattgacatcccttcatatcaataattacaatattcacctttccatcagcagcatgtgagagaatttttcctttgtcctggtcagcacagggcattagaattatttgtaattaatgcagatcaaatgaatgaaatayggcatcttactatacctttaatattaatttcccagactgtgggaagttgagcatctttttatttatttattaatcatttagcctctattctgtgaattgtattttgagaattaaatcatattccttgcccacttttccatttatttctattgttttttcttatcaatttttgtattcaagaatttaactctcaatatttcacgtcatttgcaaatactattttcctgtctgtcatttgtcttttgacattatttgtgaaatcattgaac

SEQ ID NO: 126890 - DNA, 444 bp, Homo sapiens
aactgcaaaaatgatagaaagagtgggaactgtcttgtttcctctttgtccccagtgtctgcacaagggtaggacacaataggcatttgctaaatgttgattgaatgaagcagagctaacaaagctattttgtcggtcgggcgttgtgacagcactttgggagrccgaggtggatggatcaactaaggtcaagagtttgagaccagcctgaccaacatggtaaaacccagtctccactaaaaatacaaaattagctgggcatggtggcaggggcctgtaatcccagctactcgggaggctgaggcaggagaattgcttaaatccgggaggcagaggttgcactgagccaagattgcgccattgcactccagcactccagcctgggcaacaagagtgaaactctgtcaaaaaaaaaaaaaaaaaaaaaaaagctattttgtccca

SEQ ID NO: 126891 - DNA, 582 bp, Homo sapiens
cctggatatggggacaccccattatttctgagtgtttacaagtcttcttccaaagctcacattcattgctcctacccaagggcagacacctctacttggcaaggagaggtcggagcttatctcatctggctgctcctaatgcatgtcgcaaaccagttacccccaggtttgcctctgggctcccctcttactcctcacaagctgtacctcccagcttggggttggaggcttggagcattccagaatgacttcctccttctacaacagtcgtttgctttcagaaaaacagcctcctcwatgaacgaaccctgcctgccttcccttatttagatattccttcttatttctggtcctccaagaataccccttcctgttctccagccctattatgggtttattattttaaacttgtaatctcttttctgtcatttttaggcatctgtgctcagttaaccatcttaattcaatcttctgtctcttccaattctaaatgttataattttataaatgcaaaggggaaagtaaacaaaaaatacagtcattacaaaaatagctcattttaaagctgtggtttttttccta

SEQ ID NO: 126892 - DNA, 676 bp, Homo sapiens
gcttgctgaactatgggagtgaaaaagctgcaacaacaccatgtaggtacgagaagaaaatgttggaaaaacactccaggaagttggtctgggcaaagattttttgggtaagactttaaaagcacaggtaacaaaagcaaaaataggcaaatatgttgaccttttctccaggatcccattatttttttaaggtaatttgcctttggtttcttttaacctaattgggaatacaacttcactcaggtttcagctcagatgctacttgttaaggaataacttaccaagttacaaagcaataatatttatttcctactgctacatatcattttttaatttaattcatagaatttatcactaactgaagtcactttaaaattttattattttcttacatgtttgttggtttctcccatgaaaaaataaactccttgaaagcagaacctttggctttsttgatctccatcacattctcattgcatgaatacagctggtattgaatatgctgttttgtatgttttttaaaaatgaattttaaaaggccaagcttaatattcaattaggaatttcaacaaataatgtacctggtctctagaacattgatattaatgttaatgcttagtctagaattaagactatggattaagtaatgtacatttatgttggtgattaatggata

SEQ ID NO: 126893 - DNA, 624 bp, Homo sapiens
ctgttaaccctttaaggtatttaaccatatggttagctttccgcataatcctacttttcctttaacaaacacaaacttcactacataattccccttcagcgttccctcctcttcgaaattcacatcaacactgccgtgaagcaacatacataggcatccctattctcaagccccaattcatcagtttagcgccactaaagaagaatttaaatctccggaccctcatttccgtactccgatgaagctttkcactcgcgttcccgcactacccggccagcctccctcagctggcaattacaaggtcctttgctgcccggagcacaagagtgcaactcgctacagtgttcacatgttgctctccgtcatcccagcatctcctcccatttctgcgcacctatcccttcatgagcccccaaaagaattcgtatccagatgcccatagctcaaattagaatacccctcatctgacattgccagggcttcctgtacgacttccaagagaacacgcgatgctaagcgcttctgtctccggagaccagcaacacacgctccccactgagttcggtcttctctctcgctctctctccgcggaatgcctacttcggggctaccctttggctaggg

SEQ ID NO: 126894 - DNA, 567 bp, Homo sapiens
gagggtgatgataagttggttaaagaatacaaaaatacagttagatgtacagttaaatagaagaaataagctctagtatttgacagtattgtaggcaaattatagttaacaataatttaatgtgtatttcaaaatagctggaagaggataattataatatttccatcacaaagaaaacataaatgtttgaagtgatagatagcccaattatcctgatttgatcattacgcattgtatacaggtatcaaaatagcaaatgtactcccaaaatatgaacaactattatatatcaattttaaaagtgatttttaaaaagacttgatcacttcttcctttcaacagatgtctcatcctgcacctagctcagtgcttctggtatctktcacagaacctggctcacgccaggcactcaataaatacttactgggggaatagtgggatggatggatgatatgatgtccatctgggtataattttatctcagagtagcttgttgttctagggtgtatgcatgtggggatagaggagcccacaagaaaggtctgagactcattaattcatctattt

SEQ ID NO: 126895 - DNA, 582 bp, Homo sapiens
gaattcaatcctctagaagaaaaaacaggttactccaactagaccraaggaagccatgaaggctcccttggagagcaaacaggccccacaaaaggggcatcccctccctggattggcactaaatgacagggcaaatatcaatcacagatgtaccttaggagatagtcaaaggaaattctctttttcagaagaaacatacagcattaagtcaaatttcaatatttcacaccctctactatctgccagacaagaaggaaaaccctgagcgtggtgttttatacccacagtctgggtgcaattgatttactttcactggaatcattcatctatctggacggaaaacataaacgtcaaaagcagccataatatatctgcaccaataaagtcatcagttatgctttcataccacatagagagagaagactttattaaccttcatgaggattaaatgcaaaaataacattaaagaaaatatttggtagtattttgggtgacaggtgtgtgaatgggtgaagtccagtgaaatgaggctagtaagtaataattggggtcctaagctgagtagaaaaagcaaaaaaatgg

SEQ ID NO: 126896 - DNA, 566 bp, Homo sapiens
gaaacttaggaaaaacagagcattgttgcatagaaaagtaatctgattatttaaagtcatgacaagatgaatagtgttaacctttcaaaacaaaacttaggcaagagatcaaaagaggcaagacatggagaagcacagttttaccaaacaggccagattttctttatattccttatttccaagtgatattgtaggccctgacccctcatgccttcctccaagttaatgagacaaaaaacacaggttggctcttgagggtcctgctcatgtacacataacactttcagtgagctctagaccacagcgcctkaaagtatttaagtttatttaaatataaagattctattataacatagaaaaaaagaaaatcattaccaattcaggtaacaaagtagtatagcaaagctcaatgtgagttgttttaaaaaaagaaaacatagtttcttcttttaaagaaaaaaagccaattttctatactctgtaacatcaacaaataataatatagaaacaaacaaacaaacaaaacaaagctagtacctagctcagtggtcttaccattgttccgg

SEQ ID NO: 126897 - DNA, 529 bp, Homo sapiens
caggccgcccatcctcccaggtctacactgcgccgcaggcccaggatgtgcagtccctccaggccctggagacccgtttatatggctctgaatttctccrtgtgggtggcactaactgccaggaaccctcctggcctcctgcaaaattacccaggggagcactgagcagtggcagcctctgagcccagatcagaccagctgcacagccaggagagggtctggagtgtgtggatcaaccatactatactgatcccctgctttcttccaccagaaggttccagaatgggcatcctaaagccagccgcaccacctcccccgttcctggggacccacgctctccctcgcccagcctgggaagcagggagactgctgtccgctgccaggcccggcaggaggccaaggtcaagcccaaggagaggaaccagggcgagaacaagtggttctcaggaactgcggttttggatatcttttgtttcaatcattaaatataaaaagtccctgaaagccttttgaaaaaggctcccacctc

SEQ ID NO: 126898 - DNA, 529 bp, Homo sapiens
caggccgcccatcctcccaggtctacactgcgccgcaggcccaggatgtgcagtccctccaggccctggagacccgtttatatggctctgaatttctccgtgtgggtggcactaactgccaggaaccctcctggcctcctgcaaaattacccaggggagcactgagcagtggcagcctctgagcccagatcagaccagctgcacagccaggagagggtctggagtgtgtggatcaaccatactatactgatcccctgctttcttccaccagaagkttccagaatgggcatcctaaagccagccgcaccacctcccccgttcctggggacccacgctctccctcgcccagcctgggaagcagggagactgctgtccgctgccaggcccggcaggaggccaaggtcaagcccaaggagaggaaccagggcgagaacaagtggttctcaggaactgcggttttggatatcttttgtttcaatcattaaatataaaaagtccctgaaagccttttgaaaaaggctcccacctc

SEQ ID NO: 126899 - DNA, 529 bp, Homo sapiens
caggccgcccatcctcccaggtctacactgcgccgcaggcccaggatgtgcagtccctccaggccctggagacccgtttatatggctctgaatttctccgtgtgggtggcactaactgccaggaaccctcctggcctcctgcaaaattacccaggggagcactgagcagtggcagcctctgagcccagatcagaccagctgcacagccaggagagggtctggagtgtgtggatcaaccatactatactgatcccctgctttcttccaccagaaggttccagaatgggcatcctaaagccagccgcaccacctcccccgttcctggggacccacgytctccctcgcccagcctgggaagcagggagactgctgtccgctgccaggcccggcaggaggccaaggtcaagcccaaggagaggaaccagggcgagaacaagtggttctcaggaactgcggttttggatatcttttgtttcaatcattaaatataaaaagtccctgaaagccttttgaaaaaggctcccacctc

SEQ ID NO: 126900 - DNA, 548 bp, Homo sapiens
attctgaatgttttaaatttcttcatgttgtttttcacctttctctggcatgttcttgagtaacttaataatgttttgacatctttatctggtatttcaaagatttcatcttggtatggatccattgctggaaagccagtgtgatcttttggggttgttatagaaccctgttttgtcatattaccggaattatttttctggttccttctaatttgggtaggctatttcttctaattatttttaaatttatttttgattcaactgtgtttttctttaatttcctttttaccctgttaaggatgtgattttaatgtttatagtttattgtagsctaattcggctcttggtgctttcagagttgaagactctgtgggttccttggttatggagagtctttgtttgatgactggctttctcagatgctggttgtagtagcaatgtgcttggtgtgtgtacaagttcacggtctcctatggggttggaatggtagagatattttgaggctcatctcgtttcccatgatgtgcacttttttatttatttatttt

SEQ ID NO: 126901 - DNA, 626 bp, Homo sapiens
attactgatttcttagaagtttctaaaattctattttaaattaaaatatacatttctaggtgttaaagtcaaaaaagatcatcttcagatatgtgtggcagaaagttttacaaatcttggtggggaggaattcttggtcaagatggacttcataatttattttttcttagttgatcaccattaargaatagtaatagaaatattagtaatacattctaggacatcagcatgaagacgtcatatactaattaaagtatgcccctaaatgcaaacatgtcacttgggaatcttaaaaaccgtggagatgaaagttggattcatagatgtgaccgaacctggtttgcagagagacctgtgcgaaggccagatcttgggggactgaggatgcgacagaccctttcttccagtcagcgtgagagatccaaatcaaggtgatttaatttaataagcatccattgaacacctactgtgggttatgaattggcattattctgggaaattagagatacaaaaataagtgctctgtacctgacaaacattctgttgcaatgttttccttaaggtaaggtaccttttaccttaatgagcatttaagacattttttacccgtctcactccccactgta

SEQ ID NO: 126902 - DNA, 583 bp, Homo sapiens
ctcaacattaacaatgtaacagtttgctagtatgcatacctaggagtgagtgggatagctgtggggataatttgggctgcaaaggtattttagaaactatctatcctgcagaaacccattcmggtatcattccctggtagttgtgtaatcaattccaaagttgctcgagcccagcaccccaccccatcccaagtcccccagccagtatactgtttataccagcttgatcagggagcctgtcaactgcatttgtatatgtcatcatagctattctgaagatatgatgaaccctggagtaatgtactgtacttagcagcaactgcctcagcttttgagcacatatgcttcaaatctgagaatatcatagatatatatgggaatctttgtagagatctctaaggcaagctggtatttaacgcaaaagcaaacccatttagaactaaagcactttccattaggcaatttggcggctgttctacgaggccaactcactgtgctctacggacacatttcgattaaatgctgctttgtattcttccgaagatgggaacaataaagacgtttgtcaaaggaaaaactgcag

SEQ ID NO: 126903 - DNA, 583 bp, Homo sapiens
ctcaacattaacaatgtaacagtttgctagtatgcatacctaggagtgagtgggatagctgtggggataatttgggctgcaaaggtattttagaaactatctatcctgcagaaacccattccggtatcattccctggtagttgtgtaatcaattccaaagttgctcgagcccagcaccccaccccatcccaagtcccccagccagtatactgtttataccagcwtgatcagggagcctgtcaactgcatttgtatatgtcatcatagctattctgaagatatgatgaaccctggagtaatgtactgtacttagcagcaactgcctcagcttttgagcacatatgcttcaaatctgagaatatcatagatatatatgggaatctttgtagagatctctaaggcaagctggtatttaacgcaaaagcaaacccatttagaactaaagcactttccattaggcaatttggcggctgttctacgaggccaactcactgtgctctacggacacatttcgattaaatgctgctttgtattcttccgaagatgggaacaataaagacgtttgtcaaaggaaaaactgcag

SEQ ID NO: 126904 - DNA, 583 bp, Homo sapiens
ctcaacattaacaatgtaacagtttgctagtatgcatacctaggagtgagtgggatagctgtggggataatttgggctgcaaaggtattttagaaactatctatcctgcagaaacccattccggtatcattccctggtagttgtgtaatcaattccaaagttgctcgagcccagcaccccaccccatcccaagtcccccagccagtatactgtttataccagcttgatcagggagcctgtcaaytgcatttgtatatgtcatcatagctattctgaagatatgatgaaccctggagtaatgtactgtacttagcagcaactgcctcagcttttgagcacatatgcttcaaatctgagaatatcatagatatatatgggaatctttgtagagatctctaaggcaagctggtatttaacgcaaaagcaaacccatttagaactaaagcactttccattaggcaatttggcggctgttctacgaggccaactcactgtgctctacggacacatttcgattaaatgctgctttgtattcttccgaagatgggaacaataaagacgtttgtcaaaggaaaaactgcag

SEQ ID NO: 126905 - DNA, 583 bp, Homo sapiens
ctcaacattaacaatgtaacagtttgctagtatgcatacctaggagtgagtgggatagctgtggggataatttgggctgcaaaggtattttagaaactatctatcctgcagaaacccattccggtatcattccctggtagttgtgtaatcaattccaaagttgctcgagcccagcaccccaccccatcccaagtcccccagccagtatactgtttataccagcttgatcagggagcctgtcaactgcatttgtatatgtcatcatagctattctgaagatatgatgaaccctggagtaatgtactrtacttagcagcaactgcctcagcttttgagcacatatgcttcaaatctgagaatatcatagatatatatgggaatctttgtagagatctctaaggcaagctggtatttaacgcaaaagcaaacccatttagaactaaagcactttccattaggcaatttggcggctgttctacgaggccaactcactgtgctctacggacacatttcgattaaatgctgctttgtattcttccgaagatgggaacaataaagacgtttgtcaaaggaaaaactgcag

SEQ ID NO: 126906 - DNA, 595 bp, Homo sapiens
gcaacacaactacagttggtgaaatattgtattcttgataaacataaagagattgaaggttatttggtctcatcacaaaaatgataactaggtgaggtaatgtatttgttaattacctaaatttaaccattctacaatgtgtatgtacttcaaaacagcatgttggacacaatgatacctgtcaatttaaaaaaagcaaacttttaaaaataaaaaaagcataaaacatactcaaaaataaagagccaggaaaagatgtaagaaacagacaaaacaaaaaagaaaatgatggagctctgatttaaacactgcctggactaccttttttttttttttcgtatttttagtaragacggggttccgccacattgaccaggcaggtcttaaactcaggtcattctcccacctcagcctcccaaagttctgggattacaggcatgagccaatgcgcctggccaagcctggactaactttcaatgttgctttcttttctgcatggtgttgcctattggaagggaaccgcttgatgcctcttgcttgttccactcttgggtcagagatatctccctggctggaaattaagtagtggccacag

SEQ ID NO: 126907 - DNA, 595 bp, Homo sapiens
gcaacacaactacagttggtgaaatattgtattcttgataaacataaagagattgaaggttatttggtctcatcacaaaaatgataactaggtgaggtaatgtatttgttaattacctaaatttaaccattctacaatgtgtatgtacttcaaaacagcatgttggacacaatgatacctgtcaatttaaaaaaagcaaacttttaaaaataaaaaaagcataaaacatactcaaaaataaagagccaggaaaagatgtaagaaacagacaaaacaaaaaagaaaatgatggagctctgatttaaacactgcctggactaccttttttttttttttcgtatttttagtagagacggggttccgccacattgrccaggcaggtcttaaactcaggtcattctcccacctcagcctcccaaagttctgggattacaggcatgagccaatgcgcctggccaagcctggactaactttcaatgttgctttcttttctgcatggtgttgcctattggaagggaaccgcttgatgcctcttgcttgttccactcttgggtcagagatatctccctggctggaaattaagtagtggccacag

SEQ ID NO: 126908 - DNA, 595 bp, Homo sapiens
gcaacacaactacagttggtgaaatattgtattcttgataaacataaagagattgaaggttatttggtctcatcacaaaaatgataactaggtgaggtaatgtatttgttaattacctaaatttaaccattctacaatgtgtatgtacttcaaaacagcatgttggacacaatgatacctgtcaatttaaaaaaagcaaacttttaaaaataaaaaaagcataaaacatactcaaaaataaagagccaggaaaagatgtaagaaacagacaaaacaaaaaagaaaatgatggagctctgatttaaacactgcctggactaccttttttttttttttcgtatttttagtagagacggggttccgccacattgaccaggcaggtcttaaactcaggtcattctcccacctcagcctcccaaagttctgggattacaggcatgagccaatgcgcctggccaagcctggactaactttcaatgttgctttcttttctgcatggtgttgcctattggaagggaaccgcttgatgcctcttkcttgttccactcttgggtcagagatatctccctggctggaaattaagtagtggccacag

SEQ ID NO: 126909 - DNA, 624 bp, Homo sapiens
cctgcctcttcttcttttcccagggcttgtccccagcgacagaaactacatagagaatggcagaatcatcctataagatctggagtatctacttctgaattgtgaaataagagaaaaataaactataatcttatttaatctttgaatgaggggtcttcaaaaagttcatggaaaatgcatagtatgaaaaattacacatgagtttcatctttttttgcaccaaaataaacttgtactaacttgtttgtctgaacmggatctagtttgaggcacaaaagataagacatctgtttgaaaagagccccaatcagggcaacataaattctgctaaaatcgaagcaagaacaaacaacaaatttatgatgaagcttgggtggacaaatggcaaaaccattggtgttttacaaaaaatttatggggaaagagtccccaaagaaaccgggattttataaatggacaactcattttaagaagggatgagatgatgttgaagataaaacccacagtggcagaccatccacatcagtttgtgaggaaaaatttaatcttattcgtgccctaattgaagaggactgaggattaacagcagaaacaatagccaacaccatagacatctcaattggt

SEQ ID NO: 126910 - DNA, 624 bp, Homo sapiens
cctgcctcttcttcttttcccagggcttgtccccagcgacagaaactacatagagaatggcagaatcatcctataagatctggagtatctacttctgaattgtgaaataagagaaaaataaactataatcttatttaatctttgaatgaggggtcttcaaaaagttcatggaaaatgcatagtatgaaaaattacacatgagtttcatctttttttgcaccaaaataaacttgtactaacttgtttgtctgaacasgatctagtttgaggcacaaaagataagacatctgtttgaaaagagccccaatcagggcaacataaattctgctaaaatcgaagcaagaacaaacaacaaatttatgatgaagcttgggtggacaaatggcaaaaccattggtgttttacaaaaaatttatggggaaagagtccccaaagaaaccgggattttataaatggacaactcattttaagaagggatgagatgatgttgaagataaaacccacagtggcagaccatccacatcagtttgtgaggaaaaatttaatcttattcgtgccctaattgaagaggactgaggattaacagcagaaacaatagccaacaccatagacatctcaattggt

SEQ ID NO: 126911 - DNA, 559 bp, Homo sapiens
ctcatgtatcattgcagagtctgggggcagaaataaacagaaaatcagaaacatgtaaaaaataccttcatgtgagcatctacttcrtttcattttctcttcacaacaactatgagaagtacaagtaggatagatgagaaaggtaaggctcagagaggagcctctgctcctgtgccacagtggctgaggcagagctgactcccacctggtctagttagccttctgccccaaaatccactcaaacttgctatcccttaaagcaatcgctgaattaatggaaaaccttctaaagagacataaatggatagcaacatctagtttatattagactagattcttcttagattatattagactaattcttcttgactaaacatcaagaagaattagggtaggaacagaaatatgaatattataaatattaaaacagtggagtccataatgacatggcacattattaaatagataaaatatactatgacttaaatggtgttttgtggcactttaaaagttcaaaataacatactaaaagcacagttcctaaagagaaatactgata

SEQ ID NO: 126912 - DNA, 335 bp, Homo sapiens
ctccatggcgaagtcctgagtttgaaactctcttaactgttacctgctagtggaaaacacttggcaagtcaatggatatttgagcctaagttttttcacctggaaaattgggggtgggagagggttaatacctagctcacaggactatggtgagtatgagatgggattaaatatgtgaaaaggtttaaagcactagcaactgcccgcatyaatcattagagatcccctgtccaacattgttatatgtgaaatctaagggaaaattagaatcaagggcccccttgaaaccacaaggaggcaagcaaaagtgtggaagacatgggaaggacagatcc

SEQ ID NO: 126913 - DNA, 598 bp, Homo sapiens
ctaaaacaatgcacaccaatatgcacaaagaggtctagttgggatcaacctctagccttatatcctactgcttgctcatctacacttgtccttcaagcgaccttgtgtctggaaaactttctgtgacactctatacctctccctttcctccaagtcagagggaatgagggttgcctctttgatccttccatcttccatagtgactgcaaacctctatcagatgcctgtctttatcattgttcattttaattggttgcttgcctgttgttcccaacttgactttagggcaagaaggatttattttattttattttattattattttttgtgcttaacacagttcactgcacacactgggcaaatacaatatgttaatatagtatttgggccaggcacagtgattcacacctgtaatcctagcactttkggaggctgaggtgggtggatgacttgagcccaggagttcaagaccagcctgggcaacatagtgagaccgtgtctctatagaaaaaatccaaaaattagccaggcatggtggtgcattcctgtagtcccagctactcaggaagctaaagtgggaggtcaagacctgagccca

SEQ ID NO: 126914 - DNA, 600 bp, Homo sapiens
actgtgcacatgaaaatcgttaaagtagtagattttatgttttgtatattttactacaatttaaaaaatgcaatcaaaaaagcaaagccagctccaagtttttgcatccagagctcaggcatttcgtacttgtccctaccactagaacacatcccctaggtcccactctggcttcttcatctgtggccccctgcactgtcacacacattaccacagcaacttgcttccacacagactcagttcagctcaaactcactccactgcttccgccgtgaaggctttgaggagcacaaaccacacagctctagctttatcctgcttaggaagaaattttactatcatccacttctgtccaacctattttgttgggaatcttctgctgagaactctgagaaacatatcttcttgtctggttagctttttactagctcaaacatagagaaaagtgtaaaaaatactataaagcagggcttcccaactgtgtacagaaggtcactgaggactgacaaataggtgattggtgtgctgagayattatgaattcctcagtccatggtggtggcaagaagtgtccttgggactgctgacttgctggccagtc

SEQ ID NO: 126915 - DNA, 532 bp, Homo sapiens
atcaattggttctattattatcaaatgttaatttggtaactaggttggtatgatatctacaaagattccccactgtagagttaccatttctctctttgtaattggtaagtattttgtggagaaatactttgaagcaatacatttgctttgtgaatatatcattctttattgtattttcattagttgcctttgattcttgcctgaataaattattastatggtggttgggaattagtgaattttgaatactattaatgcttctatatttatacataagcgtttgaaggtaaagagtaaatgagatttttaatgtgatttttaacttgtctattgacaatttaaaaatatatataattttaatataataaacttttaatttttgacctttgtgatggttagttttaggtgtcaacttgactggattaaagaatacctggagaactggcaaagcattatttttggtgcacatgtaagggcgtctctcaaggagattgattagtgagttggggtttgagtggggaagatctgttct

SEQ ID NO: 126916 - DNA, 593 bp, Homo sapiens
atgaaggggatatttcctgtcatagctgaagtgtttccatttgatttagttctaggaagtccttaggtttcctgcctccaggtcctattctcctgcctcagaagagggctatagggcaagctggttgatgcttagcaatgcttctattcaaagcttttgcctttgttaaaatcctaacaatttctttttattaattttgtgaggatggtttcacagtaacatcttgtgttctcaggtttggggccttgggctgagagttacaccatcagctcccctggctctgaggttttggaactttgactgagacacaccaccagcatctcaggatctccaacttacagacaacctgttgtaggacttctaagctttcataattgcatgaaccaatttctctaataaatcctctcatctatctatgtaactgtgtatctatctatgtgtctatctatctatctatctatctatcatctatctatctatctatctatctatctatctrtctatctatctactattcatccatccatctatctatatcctattagttctatctctctgaagaaccctgactaataaagattttggaaccagga

SEQ ID NO: 126917 - DNA, 577 bp, Homo sapiens
aaggttcatttggtctagttttttttttatatttatttatttattaaagagagtctcactttgtcacccaggctggagtgcagtggcaggatcttggctcactgcaacctccaccttctgggttcaaggaatcctcctgcctcagcctcccaagtagctgagactacaggggtgtgccaccacgtctggctaatttttgtatttttagtagagatggggtttcaccatgttggcctggctggtctcgaactcctgagctcaagtgatccaccagccttggcctcccaaagtggcaggattacaggcmtgagtcaccgcacccagcctggtctagtttaaatatgatgtttgtttgttttgtctggatgatctgttcattgctaaaagtgggttgttgaagttccctactattgtattgaagtctatctcttcctttagatctaataatatttgctttatatatttgggtactcctatgttggagatatatatatatatatatatatatatatatttataactcttacatcctcttcctgaattatttctcttgttatttcctcttccctgttttttc

SEQ ID NO: 126918 - DNA, 474 bp, Homo sapiens
attgtacccattatgtaattttcatccctctccccaaaacccaccatcccacctttctgagtctttattgtctattttccacgttctatgttcatgtgtacrcattctttagctcccacttataagtgagagcatgtaatatttgactttctgtttctgaactgtttcacttaaaataatggcctccagttccatccatgttgctgcaaaagacatgatttaattctttttcattgctgaataatagtattccattgtatattattagtattccgtgtgtgtgtatacatatatacacacacacacatatataggcatatatatgcatgtgtatacatacatatgtgcatatacatatatgtgtgtatacatacatacatatatatgcatgtatgtgtgtatgcatatatgtgtgtgtatatatgtatgtatgtgtatccataccttcacacacacctcatttcctttatccag

SEQ ID NO: 126919 - DNA, 474 bp, Homo sapiens
attgtacccattatgtaattttcatccctctccccaaaacccaccatcccacctttctgagtctttattgtctattttccacgttctatgttcatgtgtacgcattctttagctcccacttataagtgagagcatgtaatatttgactttctgtttctgaactgtttcacttaaaataatggcctccagttccatccatgttgctgcaaaagacatgatttaattctttttcattgctgaataatagtattccattgtatattrttagtattccgtgtgtgtgtatacatatatacacacacacacatatataggcatatatatgcatgtgtatacatacatatgtgcatatacatatatgtgtgtatacatacatacatatatatgcatgtatgtgtgtatgcatatatgtgtgtgtatatatgtatgtatgtgtatccataccttcacacacacctcatttcctttatccag

SEQ ID NO: 126920 - DNA, 474 bp, Homo sapiens
attgtacccattatgtaattttcatccctctccccaaaacccaccatcccacctttctgagtctttattgtctattttccacgttctatgttcatgtgtacgcattctttagctcccacttataagtgagagcatgtaatatttgactttctgtttctgaactgtttcacttaaaataatggcctccagttccatccatgttgctgcaaaagacatgatttaattctttttcattgctgaataatagtattccattgtatattattagtattccgtgtgtgtgtatacatatatacacacacacacatatataggcatatatatgcatgtgtatacatacatatgtgcatatacatatatgtgtgtatacatacatacatatatrtgcatgtatgtgtgtatgcatatatgtgtgtgtatatatgtatgtatgtgtatccataccttcacacacacctcatttcctttatccag

SEQ ID NO: 126921 - DNA, 598 bp, Homo sapiens
atgccatttgaattttgacagatattgcactgaatctgtagataattttaggtagtatagacatgtaaacagtatccagtatcccaattcatgaacatgggatgtatctccatttgtttgtgtgatttgatttttttcatcagtgttttgtatttttcagtgtacaagtttcttacctcctcagttaagtttattcctaagtgattatttcttataggtgctatggtaaatgggattgttttcataataaattttgcagatagttttctgttagtgtatcaacaatgcaactgatttttgcatgttgattttatttactaaaattttactcaatttgtttattatttctagaagtattttttgtggactctagggttttctacacataagatcatgtcatttgcatttttccttcatagattattactagttttcagattaggagaaagagacaaactattttgtccaatgtaattttcagaacttcattaatattatgtgtagtatatawatgaatgtttcaatatctatagttatagctgtctatatacatatatacatttatgtaacacctctcatttgtgtataatgttattgc

SEQ ID NO: 126922 - DNA, 579 bp, Homo sapiens
cgctgtgatttctcaatatgattaaggtagtctaattcaaattcattcagcttatctgaggtattgcaaaagtgctgttgcagtcactggtgacagtattcccaaagagaggcaattagacttcactagatttaaagtttaggtctcattatatatgatattttcagctggtacacatattgtagttttcatgaaagagctgcataaaacaagggttcctgtttgagctccactgatcctttaagaatgctgactgccaaactgccaattgtgttctcaaagaatagacatatcagccactgagtcaaacagctacgaagctctcacctgtcaacagtgggtaatcaagaaacaactgaaagatataccttcagaatgccagaataaagtgttaggaaacatcggattgctataaaactttccctcctgtagtcaccaggcataccatggsttaaagcaagcatgctccaaagccacatctttctccacatctttcttgaacagcaacaacaaaaagtttaaaaaaaaaaaactgcagattaaacccagctatagttccatgttatcaaagaaatacta

SEQ ID NO: 126923 - DNA, 579 bp, Homo sapiens
cgctgtgatttctcaatatgattaaggtagtctaattcaaattcattcagcttatctgaggtattgcaaaagtgctgttgcagtcactggtgacagtattcccaaagagaggcaattagacttcactagatttaaagtttaggtctcattatatatgatattttcagctggtacacatattgtagttttcatgaaagagctgcataaaacaagggttcctgtttgagctccactgatcctttaagaatgctgactgccaaactgccaattgtgttctcaaagaatagacatatcagccactgagtcaaacagctacgaagctctcacctgtcaacagtgggtaatcaagaaacaactgaaagatataccttcagaatgccagaataaagtgttaggaaacatcggattgctataaaactttccctcctgtagtcaccaggcataccatgggttaaagcaagcatgctccaaagccacatctttctccacatctttcttgaacagcaacaacaaaaagttwaaaaaaaaaaaactgcagattaaacccagctatagttccatgttatcaaagaaatacta

SEQ ID NO: 126924 - DNA, 695 bp, Homo sapiens
aatattaagaaaaagcctttccctacaccaagattacagaggattcattcaggtttccttcttgttgttgcatgattttattttttacatttagactattaatccatatggtgtttattactgtttgttgtgagataygtgtccaattttcccttttttccaaatggctacccagttgtctcagcaccatttattaagaagttagcttttatctcactgattccagatactatctttgtcatatattaaattgctatatgtaggtgggtctaattctaatcttcttactctgttccactggtctacttgtctattcatgcatcagtacttcactgttttaattacagaggctttatagtatgttttaacatctggtaaagctagttcccctcctctgtagttttcctttgtcagtcttttcctagctattcttgcatgtctgttttcccatatgagctttagtatcaacttttatatgccacaacatatatattttcattggaactacattgaatttacatattaacttaggaagaactgacatcattataatgttgagtcatcctatccaagaacagggaatgtctttccatttattcatgtcttcatttctttctggagtgtttaaattttttcctcatataggctttgcatatttcttgttaactgtattttgaactatcttctttattact

SEQ ID NO: 126925 - DNA, 695 bp, Homo sapiens
aatattaagaaaaagcctttccctacaccaagattacagaggattcattcaggtttccttcttgttgttgcatgattttattttttacatttagactattaatccatatggtgtttattactgtttgttgtgagatatgtgtccaattttcccttttttccaaatggctacccagttgtctcagcaccatttattaagaagttagcttttatctcactgattccagatactatctttgtcatatattaaattgctatatgtaggtgggtctaattctaatcttcttactctrttccactggtctacttgtctattcatgcatcagtacttcactgttttaattacagaggctttatagtatgttttaacatctggtaaagctagttcccctcctctgtagttttcctttgtcagtcttttcctagctattcttgcatgtctgttttcccatatgagctttagtatcaacttttatatgccacaacatatatattttcattggaactacattgaatttacatattaacttaggaagaactgacatcattataatgttgagtcatcctatccaagaacagggaatgtctttccatttattcatgtcttcatttctttctggagtgtttaaattttttcctcatataggctttgcatatttcttgttaactgtattttgaactatcttctttattact

SEQ ID NO: 126926 - DNA, 695 bp, Homo sapiens
aatattaagaaaaagcctttccctacaccaagattacagaggattcattcaggtttccttcttgttgttgcatgattttattttttacatttagactattaatccatatggtgtttattactgtttgttgtgagatatgtgtccaattttcccttttttccaaatggctacccagttgtctcagcaccatttattaagaagttagcttttatctcactgattccagatactatctttgtcatatattaaattgctatatgtaggtgggtctaattctaatcttcttactctgttccactggtctacttgtctattcatgcatcagtacttcactgttttaattacagaggctttatagtatgttttaacatctggtaaagctagttcccctcctctgtagttttcctttgtcagtcttttcctagctattcttgcatgtctgttttcccatatgagctttagtatcaacttttatatgccacaacayatatattttcattggaactacattgaatttacatattaacttaggaagaactgacatcattataatgttgagtcatcctatccaagaacagggaatgtctttccatttattcatgtcttcatttctttctggagtgtttaaattttttcctcatataggctttgcatatttcttgttaactgtattttgaactatcttctttattact

SEQ ID NO: 126927 - DNA, 492 bp, Homo sapiens
gaattctcctccatcagatctttggctttcttctccaatggtttcttccctttagcttcaaatctttattttattttattttattttattttattttattttattttttgagttagggtctctctctctcacccaggctggagtgcaatggtgcaatcatggctcactgcagcctcaagctgctgggctcaagctatcatccagccacagcctcccaaatagctgggactacagatacatactgtcacgctcagctacaagtctttaaaaataaaaccaacccccccgcccccacaaacttgtttgttgtttcttacatctcatttctcctttaatcttcaaccacttctactccaaccattttgytataaaagttttcactatggaaaccaatgaccttctagaagccaaatccaaaggtcagttttcaatacttttagtaccatttgaaactgtttatcaatccctcttttctgaaacattccgcttttt

SEQ ID NO: 126928 - DNA, 511 bp, Homo sapiens
aattaaaaatatactaaaagcagatggcagaacatgagtgcagatttttactacaaagcttaggaaaagcaaaaggaacttgaatagagaaaatgcagaaaagccctcctttggctattaggacggagagagcagaagtatgtttagagcttcaaagagtctgactctttgcaactgttatcttaggactttaaggaagtaaaagtgcaagtgaaacactctggattataaaatagaatctgacacagagggattcaacccagttaatatgcatgttgcttacatggaaatgctgagaaatttttagcaaatagatagaaaatgacagatggtaggtatatagaaaataattgtaggaaaaaatgtaaaatgaagayttatggtattccttttatattttattttgttaatatgttgcccataatgctttatttcaaagaatgcaaaaccaaaaaagtagttccttcctaacttcccctgcagccttgtcttgtggagcttgtattttact

SEQ ID NO: 126929 - DNA, 522 bp, Homo sapiens
atcttgtctctataaaacactaaaaaaaaaaaaaattagccaggcatggtgacacactactcaggaggctgaggcaggaagatcacttgagcccggragtttgaggctgcagtgagctatgatctgccactacactccagcctggatgacaaagcgagaccctgtctctaaaaaataaaaacaacaacaaacatacataaataaagagatcacatccaaataatagaaaaagatgatatggttttggtccccaaaactgacatcacgtaggagatattggaactttgtgggtgggagccaagcccatgctggtgccccttctctaggtcacgtctatactgcttgtttggattccttggcaaaaactgactatgcaaagacagtaggatgcctgactcaaattgggtcaatcagatcctttttcttggaatttaaaaaaaaattgcatgaaaacgtatagttaaatgcacaggtcttaagtgtacaatttagagttttgacaaatatatacattcatgtaac

SEQ ID NO: 126930 - DNA, 522 bp, Homo sapiens
atcttgtctctataaaacactaaaaaaaaaaaaaattagccaggcatggtgacacactactcaggaggctgaggcaggaagatcacttgagcccggaagtttgaggctgcagtgagctatgatctgccactacactccagcctggatgacaaagcgagaccctgtctctaaaaaataaaaacaacaacaaacatacataaataaaragatcacatccaaataatagaaaaagatgatatggttttggtccccaaaactgacatcacgtaggagatattggaactttgtgggtgggagccaagcccatgctggtgccccttctctaggtcacgtctatactgcttgtttggattccttggcaaaaactgactatgcaaagacagtaggatgcctgactcaaattgggtcaatcagatcctttttcttggaatttaaaaaaaaattgcatgaaaacgtatagttaaatgcacaggtcttaagtgtacaatttagagttttgacaaatatatacattcatgtaac

SEQ ID NO: 126931 - DNA, 522 bp, Homo sapiens
atcttgtctctataaaacactaaaaaaaaaaaaaattagccaggcatggtgacacactactcaggaggctgaggcaggaagatcacttgagcccggaagtttgaggctgcagtgagctatgatctgccactacactccagcctggatgacaaagcgagaccctgtctctaaaaaataaaaacaacaacaaacatacataaataaagagatcacatccaaataatagaaaaagatgatatggttttggtccccaaaactgacatcaygtaggagatattggaactttgtgggtgggagccaagcccatgctggtgccccttctctaggtcacgtctatactgcttgtttggattccttggcaaaaactgactatgcaaagacagtaggatgcctgactcaaattgggtcaatcagatcctttttcttggaatttaaaaaaaaattgcatgaaaacgtatagttaaatgcacaggtcttaagtgtacaatttagagttttgacaaatatatacattcatgtaac

SEQ ID NO: 126932 - DNA, 522 bp, Homo sapiens
atcttgtctctataaaacactaaaaaaaaaaaaaattagccaggcatggtgacacactactcaggaggctgaggcaggaagatcacttgagcccggaagtttgaggctgcagtgagctatgatctgccactacactccagcctggatgacaaagcgagaccctgtctctaaaaaataaaaacaacaacaaacatacataaataaagagatcacatccaaataatagaaaaagatgatatggttttggtccccaaaactgacatcacgtaggagatattggaactttgtgggtgggagccaagcccatkctggtgccccttctctaggtcacgtctatactgcttgtttggattccttggcaaaaactgactatgcaaagacagtaggatgcctgactcaaattgggtcaatcagatcctttttcttggaatttaaaaaaaaattgcatgaaaacgtatagttaaatgcacaggtcttaagtgtacaatttagagttttgacaaatatatacattcatgtaac

SEQ ID NO: 126933 - DNA, 637 bp, Homo sapiens
gtctttgaatctagcctagtcagacagaaataaagaaaaaagaattttaaaaaatgaacagtcttcaagaaatatgggattatgtaaagcaatcaaacctataaatattggcattcctgagaaaaagagaacaatctggaaaacattttttgagggactagtttgagaaaatttctctaatcttgctagagaagtagatgtccagatacaagaaatctagagaacacctgcaatatgctacacaaaatgaacatcatcaaggcattagtcaccagactgtccaaggtcaacactaaagaaaatatcttaaaggcagctagagaaaaatgtcagataatacacaaaagaaaccccatcaaactaacagtggacttctcagcagaaaccttacaagcaaggagagactgggggtcaattttcagcattcttagagaaaaaagattccaaccaagaatttcatatccttccaaactaagcttcatgaatgaaggtgaaataattkttttccaggtaagcaagtgctgaagaaatttgttactactaggtcaaccttacaagagatccttaaggtagttctaaacgtggaaacaaaagaacgatacctgccaccacaaaaacacacttaagtatagccccc

SEQ ID NO: 126934 - DNA, 529 bp, Homo sapiens
agagaagaaattcagaattctatcacagaaatttaacaaagaaactaaaataatttttaaaaattaagcagaaattttggagttgaaaactttgacaaactgacaaatgcatcagagtctctcagtagcagaattgattaagtagaagaaagaaatagtgagacgaagagaggytgtataaaaatctacagtcagaggagaaaaaagaaagaataaaaaataataaaccacacctacaagacctagacaatagactcaaaacagcaaatctaagacttgttgaccttagagaagaaatatatctatatgtatctatctatccatatctatatatctgtacacacacacacacacacacacacacagagagagagagagagagagaaatcagggtagaatatttattgaaaagaataataacagagaacttttcaaacttagaggaagatataaatatccaggtaaagaaggtcatagcacatcaagatgattcaacccaaataatactacatcaaggaatattaaactc

SEQ ID NO: 126935 - DNA, 613 bp, Homo sapiens
  misc_feature (1)...(613): n = A,T,C or G
caagaggcctttttttggaaaagaactatcttgaccacagattgcctggactggaattgtaagcacatggtaggctgatgatacagactctacgtgcattcatcactcatgttcaaagatctacagcataattttacgtgtttaattaatagcaatgaacattcccatcgcgctgcaaataaatagaatacagttcatttaatagataaatatgataaataatagacccaggtggcatttgataacaagaaaaaagccattctctctggaaaacaggaaatggaatttagtttcttattttttttaagaagaacattktttctaccatcagtctcctgatttcagccaatgatttcagctaatgatccccatagtctttctctattttaaatcatgttagttttacatgctgagaaaaattgctgcatatccactaaatttgtgtgtggcactttatatttctattgtttaacaatttaacaacacagtcctcagggattaggaatcagtttcactcttcatagaatttctatattactatcattatccacgggataacctggaaccttggaatataaccactttgttactattactaaataaattcataggn

SEQ ID NO: 126936 - DNA, 625 bp, Homo sapiens
gtgctcccagctgtggtgtcagctgctgtgcagaagtggtggaatgtctagttgcttgcttgtttctaagagcacagatgctaccaaagtttcaattcagaaaggggtttggcattgattttgaggcctgagtggttcatcagaaactgtgccttgaaattcatgtaatcaaaagacctcaccttaagaaatatctctccccaacagagcttgaaagccaaaaagtacacaatttcctgtggcccacacacttaccagctaaaaaagccaacccccaggataacatatcaagggggtggaagaggattcagagtgtagactgtccagtgactccatgtgttgaagaaacktttttagtttctctcttatttttctcatgctccttcccaaacggttttccagggacaagataatgcatggggaaagttcattaccagttaatgtccaaaccaggacacttttgagagtgctagtgggtgcttattaagaatacactagaacaatgggtataacccactactacccagggcaaactggagcacataatctccctacccaaatgaatgcttaggactttggtgacagaaaacatgcttgtgggtggtgggagatggtaagggggctg

SEQ ID NO: 126937 - DNA, 550 bp, Homo sapiens
aatcatctatagaggaaaaatgattagactgacatcaacaacagattcaaaagacaattatgtaaatgagaggaggaaaagcaactctcaatcgagaactttataccaaacaatccctcaaaggtgagaataaaatgcaratatttccagacattcgaaaaccaaaagtactgattttctgagatctcaactcaatgaactcttaaaggatataagaaattattttgagcacagtaaatgatcaaatgttggttaacttaatttttattgttttttaacatttatccagttgagtttcttaattaaaaagtgatttagttctttttgtattaaaagaacacatcaagacaaaactctagatggcaatgaaaaaaggagaaatagaaagtggtgttaacggaacagaatgtcaagattcatgtcatgtttaggaagcagaaaaactaaacaacttaagccttgtcaaaaaaaatatgatttaggatgtattttttaattagataaaaaaaatagcaatacaatctatagcttttaaatcagcagacataac

SEQ ID NO: 126938 - DNA, 565 bp, Homo sapiens
gaaatcaattaaaaagacaacaaaaaatcaatgaaaagaaacaacacaagcaaaagtaggttcttaggggaaaaaattcaaaatgaataaactattggcaaaactgatcaggcaaaagagaaattaatcaacactaggaataacaaaatgcatgcagacmaaggaagagtatgagcaaaattataccagagtgttcattgtacagcaaggaaatccatttgactcctctaggaagaacagtgagaaataatgctatgaacatcagtaagaaatttatactcgaagcgtatcaaattaaagtcaatacgggccgggcacagtagctcactcctgtaatcccagtactttgggaggccgaggtgagcggatcacctgaggtcaggagttcaaagccagcctggcctatctctactaaaaagtacatacaaaaattagccggacgtggtggcgcatgattctccatgataatcccagctacttggaggctgaagcaggagaatcacttgaacccaggaggtggaggttgcagtgagccaagatcatgctactgcaccccagtctgggt

SEQ ID NO: 126939 - DNA, 565 bp, Homo sapiens
gaaatcaattaaaaagacaacaaaaaatcaatgaaaagaaacaacacaagcaaaagtaggttcttaggggaaaaaattcaaaatgaataaactattggcaaaactgatcaggcaaaagagaaattaatcaacactaggaataacaaaatgcatgcagaccwaggaagagtatgagcaaaattataccagagtgttcattgtacagcaaggaaatccatttgactcctctaggaagaacagtgagaaataatgctatgaacatcagtaagaaatttatactcgaagcgtatcaaattaaagtcaatacgggccgggcacagtagctcactcctgtaatcccagtactttgggaggccgaggtgagcggatcacctgaggtcaggagttcaaagccagcctggcctatctctactaaaaagtacatacaaaaattagccggacgtggtggcgcatgattctccatgataatcccagctacttggaggctgaagcaggagaatcacttgaacccaggaggtggaggttgcagtgagccaagatcatgctactgcaccccagtctgggt

SEQ ID NO: 126940 - DNA, 568 bp, Homo sapiens
gaattgagggaaatttattaccactatgtgcagaaatcaggcaaaccattaaaattttggctagttcacttgggaaatgaaagagtggggcatataatgcttattaaggaggaacagcaactgatgagtgttttatggcttagtctctcctgcagtctagactgtcaaccctagaccctttcagggttttgttgttgttgctatcgttgttgtgtgtcctgacttctatgtgggaactttggctctctcaggaagacttccaaaacgaagacagactgcttgggaaaacaacaggtgaggcattagctagtatttgggctcttactacactggttagactttacagtgctaatgaaagtgatccactaatttatgagaaaaacactcaaataaatctagataaattcttgyaggaagccaggccatcttggaaaattatcctaggccttatgttgaaactacacaatcttgatcttaagaaatgttatttcttaagatcttaagagatgttattttggtaatggtactgcaaatgttctagagtaaggtggactctaaagaaaaataa

SEQ ID NO: 126941 - DNA, 522 bp, Homo sapiens
ctattacaacattgaatataagaacaatgtactacttggaaacagaataggtaagcaaattytggggcatccactacaatgcccattatgtaaaaaaaaaaaaaaaaaaaaaaaaccataaaaagcttaaattggcaattaaagttacactcgataacacatatattgctgttcctttcaaatactatccttttcttatagaattatgtctactttgttctgggaaatgatctatcataattctgttctgacttatttttttaaatgtgggatcagagaaatcataaatagttctttttgccgataaaagctataagataggatgttcagcctgagctagatatacaaagaggaatcaaaaacatgtcagagagattccagcgatggtttgagtgtctggtagttcttgaaactaagtaagagcattcatcttttcagagaccgaaggttaaaatttccttcagttgtttgatataagcttttatctttctaacaactaactttttcccccctcaaccagtt

SEQ ID NO: 126942 - DNA, 521 bp, Homo sapiens
tcagcatttaggacatcattctttatttttatttagaggtaaaactaaatacaatcaatcctaagattcattgtgatttccagctctgtttttaacaagtccccattatgctgatttctygtgtcagtctgattgataacatcaagctaagcagcctctatgcaaaagcatttgagcatgaaatacttagcattttaccttcctgcaacagcaaattttaaaacttatgggaattattctcaaaaacgcccatatactctgtatctacagccctgttttggtaggccagcttttgcaatcaagtcctttgcatctataaattcatcatataggatatccatctctaaaataaccataattttaaaactcacattgaatgtcatcagaatttaaacttttttttttttttttttcaggaaaagtggatttaaagcagggaggtaattagaacttgtgaagtttaaagtaaaagccagttaagtaacagtcttagtgaaaaaaaaattgagaaaagtcctgtt

SEQ ID NO: 126943 - DNA, 521 bp, Homo sapiens
tcagcatttaggacatcattctttatttttatttagaggtaaaactaaatacaatcaatcctaagattcattgtgatttccagctctgtttttaacaagtccccattatgctgatttcttgtgtcagtctgattgataacatcaagctaagcagcctctatgcaaaagcatttgagcatgaaatacttagcattttaccttcctgcaacagcaaattttaaaacttatgggaattattctcaaaaacgcccatatactctgtatctacagccctgttttggtaggccagcttttgcaatcaagtcctttgcatctataaattcatcatataggatatccatctctaaaataaccataattttaaaactcacattgaatgtcatcagaatttaaacttytttttttttttttttcaggaaaagtggatttaaagcagggaggtaattagaacttgtgaagtttaaagtaaaagccagttaagtaacagtcttagtgaaaaaaaaattgagaaaagtcctgtt

SEQ ID NO: 126944 - DNA, 547 bp, Homo sapiens
agatgatttttagctattagtataaaattgctgatttgcaattattcgagactgactttattatttcctgctttgcatttctacatatcttttagaatcagctgtcatttcccatcccttcaaaaaacactaccatttttattgggattatgttgcatctatatatacgagagaattgtcttctaattcataaatatagcatatcccaatttattttatttgttctaatatctcttaacaatggtttattttctacttgaagtttccacagccttcattagatccaygccattataaatggtatcattaaaaacaaacaaacaaaaaatttactttccgtttgttgctagtatatgtaactacaatttatttttatactagcttcatgtccagtccagtgatcatctcaattaactaatcccaataatttgaggtatatatttttttgaattttctatgaaaaaaaatcatgtctgcacataagttgatttttatttctgcaatataattatttggcttattgtactggctaggctttgccagataa

SEQ ID NO: 126945 - DNA, 633 bp, Homo sapiens
caatcttcaatattctaagactagtctttctctgagtcataataaacatgatttagttatggcagttggagtataagtaccatatactgtatttaggcttaggctcaaatttgaatgctgtttctctcacgtgtaagttgtatgtccttgaacgtgcattgtttaatttctatcactgttttcttctactgtagagtaggaatattaacacctacctgatggtaatcaactggtgttagagttaaatgagattaaagagtgccttgattaagagctagctaagagcaagcactcatgtaagagttaatttctttaggttacacatccaaatttgctatttatctttgacacctttctctgctgagtgagtgttcaggttgtttcaaagayataggacaaagtaaaagaaaaggaaagagggaaaggaagggaagggaagggaaaggaaagaaaagtaaggggaaaagaaaaagaggaagagaaaagaaagaaaaaataaaataagataaaataaagaagaagaactgatcagagatttctgagctggctagcaaactctcaaaatgtgctggaccaatattgccatcttacaaagtcaaaaacctaaattataagctttatttaaattccaac

SEQ ID NO: 126946 - DNA, 394 bp, Homo sapiens
gaattctgagatgtattgcctaccatttctggttgtcagttttaatgtttgctgaatactgtgttggcatatgacatctgtcttaagtagcagcaatgcatcctcttggactccctytgaggtaatgcatcttccctccactactgagctgggcctttttgctaccccaacattttgcagctgctggaacctctcctcagtctgggatgctttcctctatgccatccagagtcctaaagggaacactggcggaagaagggaattagaaaaaaaaaaaaaaaaaaaaaaaaaaacacttagaatttatctagttcacacataccaagttaatatttaattttttcaaatttatatcttttttcatggatttcctacaactaacaatttatggtac

SEQ ID NO: 126947 - DNA, 484 bp, Homo sapiens
gttcccaccacaccatcctcatytcaaccataggattctagggcatgcaatctacagtttgagactgaaggtaattgggaaaaaaaaaaaaaggagaggagaaaaaagggcaagggaaaaaaaacttcctgttgagcagcagttcctctggcctgcgcgtctctttctcctctttgcagtacaatgggttgtctgatgtgtccatgcttaaaagagggcaaatttggactaatttgagtcaaaagacagtttactttatttctataagaagggggatgataagcaagctggacatgtgtcatttttcaggatcgggaaaacgtaatgcgctgagggagaagcatatactctcctaagtgttctccaaactaggaacaatctttaatttttttgtaattgcattcgtcaacttactttatacattttaattttgtttagaatttgatttcatctgctacttgtttctttttttttttcaaaacag

SEQ ID NO: 126948 - DNA, 484 bp, Homo sapiens
gttcccaccacaccatcctcatctcaaccataggattctagggcatgcaatctacagtttgagactgaaggtaattgggaaaaaaaaaaaaaggagaggagaaaaaagggcaagggaaaaaaaacttcctgttgagcagcagttcctctggcctgcgcgtctctttctcctctttgcagtacawtgggttgtctgatgtgtccatgcttaaaagagggcaaatttggactaatttgagtcaaaagacagtttactttatttctataagaagggggatgataagcaagctggacatgtgtcatttttcaggatcgggaaaacgtaatgcgctgagggagaagcatatactctcctaagtgttctccaaactaggaacaatctttaatttttttgtaattgcattcgtcaacttactttatacattttaattttgtttagaatttgatttcatctgctacttgtttctttttttttttcaaaacag

SEQ ID NO: 126949 - DNA, 620 bp, Homo sapiens
ttcattatagcagccaaagctgcctaagataccgagctaatacacttctttatgtgtaataataatttaagcagttgatattttcactggatcatagctgaagtaagaaaattaatgagttttctatagcagagcaatttttgaaatgctaatgtttatagaatttaaggatgagcttcagaaacctgagcctgaggacttagaactggggactgaactcagtatatctctcttacctcagctcagctcatttttacatgtcaaccagcctcatgacctctttctgcagataggccttccctaggtggcaggaacagggccactggtaattctgcaaccctaccagaaaaaaagcacatagttttttccagccatcaaaaatcaacataatcccagagaaggcttctgattggcccacttgagtgatatggatatccctrtggccaggatcctttccaggagggggattggaagatttgatgcatggatcaaattagctacacagtccacatgaaatgcaaatttgttttgctccctccatggcagctaagtatagtacaacatattaggatgtgagaaacctgagctaaacccccacattttcctgataactcactagc

SEQ ID NO: 126950 - DNA, 626 bp, Homo sapiens
ctgctgcacacagaccgaatggcccataaagcataaaatattttcttaaaagaaaaaaacacccttatatttgtgaccaaaagaaattaaaaagtagtatttggctgcaccttggggcaggtgaggaagtgatggggaggagatacagtggaaacttttggggtgaaaaaaaatgtttatcttgattgtggtagtgatttcttggatatagagaatttgacaacatttatctaagggcacttttaaagaacatgcatttactayttataactaattctatgaagataaaatacatatagttatgacaacatgatgttccttggtagggaattgagaaaagttaatatatttactttcatttgtttgcataggttttgcatcttttagtgctttaatgacacaaactcacactttttcaaatatgaaatgaagataatactaattaaataattttaattttaagatctgtactgttaaattgtgcctatttataaacgcaaaataatatattttaaataatgttactttttgatattttccttgcttctcagttgatatcaagtcagctcaagtgcaattacttaaagggcatcaaagaaagtaaaacttacataaaataaacaaaa

SEQ ID NO: 126951 - DNA, 632 bp, Homo sapiens
agagtgagaccccatctctataaaaaaaaattaaaaaattagccgagcacagtggcatatgcctgtagtcccagctactcgggaggttgaggcgggaggatggcttgagcccaggaggtcaaggctgcagtgagccttgattgcaccatcgcactttagcctgggcagcacagcaagaccttgtctcaaaaaaagagatgaaaatatagttaatacagacagacagaagaacagacargaacagggactttgtggcccctgacaggcagacatcttccttgcagggcagctgggaagtgagcttttgtctctaccctgaggtctcattccatccggcaggtgaatacgacgctcctgctagttggcttcaaactccataaattagctcctgctagttgacttcaaactccataaattacagcttttttttttaaagtccctgtttggaaaaagtgaaatgaacaaataaagacaggagcgaaattaaaagataattggaagtctatatcgggcttctgtgaatgtgcgtgcctgccgccaatctggtctctccgtgcgggcaggataaattgagaactcttgggttggctcagggggtggataaaacagtcagagacaaatgcgtgccatgc

SEQ ID NO: 126952 - DNA, 632 bp, Homo sapiens
agagtgagaccccatctctataaaaaaaaattaaaaaattagccgagcacagtggcatatgcctgtagtcccagctactcgggaggttgaggcgggaggatggcttgagcccaggaggtcaaggctgcagtgagccttgattgcaccatcgcactttagcctgggcagcacagcaagaccttgtctcaaaaaaagagatgaaaatatagttaatacagacagacagaagaacagacaggaacagggactttgtggcccctgacaggcagacatcttccttgcagggcagctgggaagtgagcttttgtctctaccctgaggtctcattccatccggcaggtgaayacgacgctcctgctagttggcttcaaactccataaattagctcctgctagttgacttcaaactccataaattacagcttttttttttaaagtccctgtttggaaaaagtgaaatgaacaaataaagacaggagcgaaattaaaagataattggaagtctatatcgggcttctgtgaatgtgcgtgcctgccgccaatctggtctctccgtgcgggcaggataaattgagaactcttgggttggctcagggggtggataaaacagtcagagacaaatgcgtgccatgc

SEQ ID NO: 126953 - DNA, 562 bp, Homo sapiens
ttgatgtcttatgtctccctaaaatgtatgaaaccatgctgtagcgtgatcaccttgggcacatgtcatcaggacctcctgaggctgcrtcacagtcatgtgcttagccttggcaaaataaacttctaaattgattgagacctgtctcagatagcttttgacttacaccaggaacaccacttacttatatggtagaaacctattctaaacctagaaaattacttcctgggctttccatgaagaggtttattgaattgagtcactactggaataagtacaccattggaaattatttatgtaacttttgacttttgagggtactcatttgttattgatcctttttccttccatggacagcttttgatttcctatctcccatctgtagggcatatgggccgtttggacctttgtgtgtagatggtcagctgagaaactgaggccctagagaatatggcaggacagaaacatggattggaccccgtttgtggctagtgaaacttgcttttctttgagctatctttgggggtggttctggatcttgtgaagactgatttgtacctct

SEQ ID NO: 126954 - DNA, 566 bp, Homo sapiens
gcacacgcatgggaggaatttggctctgaaggctttgactctaggagacaatcctgactccctaygccgacgttcacaactctctgtgtaccagcttcggtttactcttccagatgcatctcctgatcactgcctagcaaaccgggctcagggtgacttcttggcagggaaggctggtggacatccctctggcccatcagagttgggtgaaaggctgtgtctgggccttcttccctggtgccttcatccgtccaagatcaccttttcttcctttgggtctcgtgttctctgatgctcctcttttaggcttggccacagctgctgcatcgtaaagtgcattgtgtgcaagatctgatctgctgcattctaagtccttgaggacagaggctgtagctggctcagctgtggaccctaagcctatgtggggccctgcaccatttgggacaatagccagcagggattgtctttacactgagtggattggggtgaacactcgggatgaagctcatctcatctcgtctcatgctcacagcccctttggggagagacacgattgttatccccat

SEQ ID NO: 126955 - DNA, 582 bp, Homo sapiens
ctgtgggccacaggaagcacacgcatgggaggaatttggctctgaaggctttgactctaggagacaatcctgactccctacgccgacgttcacaactctctgtgtaccagcttcggtttactcttccagatgcatctcctgatcactgcctagcaaaccgggctcagggtgacttcttggcagggaaggctggtggacatccctctggcccatcagagttgggtraaaggctgtgtctgggccttcttccctggtgccttcatccgtccaagatcaccttttcttcctttgggtctcgtgttctctgatgctcctcttttaggcttggccacagctgctgcatcgtaaagtgcattgtgtgcaagatctgatctgctgcattctaagtccttgaggacagaggctgtagctggctcagctgtggaccctaagcctatgtggggccctgcaccatttgggacaatagccagcagggattgtctttacactgagtggattggggtgaacactcgggatgaagctcatctcatctcgtctcatgctcacagcccctttggggagagacacgattgttatccccat

SEQ ID NO: 126956 - DNA, 582 bp, Homo sapiens
ctgtgggccacaggaagcacacgcatgggaggaatttggctctgaaggctttgactctaggagacaatcctgactccctacgccgacgttcacaactctctgtgtaccagcttcggtttactcttccagatgcatctcctgatcactgcctagcaaaccgggctcagggtgacttcttggcagggaaggctggtggacatccctctggcccatcagagttgggtgaaaggctgtgtctgggccttcttccctggtgccttcatccgtccaagatcaccttttcttcctttgggtctcgtgttctctgatgctcctcttttaggcttggccacagctgctgcatcgtaaagtgcattgtgtgcaagatctgrtctgctgcattctaagtccttgaggacagaggctgtagctggctcagctgtggaccctaagcctatgtggggccctgcaccatttgggacaatagccagcagggattgtctttacactgagtggattggggtgaacactcgggatgaagctcatctcatctcgtctcatgctcacagcccctttggggagagacacgattgttatccccat

SEQ ID NO: 126957 - DNA, 599 bp, Homo sapiens
tagtactatttttcagcatcccattgtcttgtattttactatacattttatgaatctgatactacatgtattttttccctagtattgatttacatatacctacacacatccgtactttcacctgggattcctttgttttagtcctttagtattcaytttagagaagatctgcaagttgtgaattcccttagcatatgactgtctctattatatgctaaaagaatatgatagaataaataaaagaatatgtttttcattttgaaggatattttcacagagtatagattttgaggggtttatatttacttttaatattttaaagatatcattcacttatcttccagcttccatcgtttttgacaaaaatttaaacatcagtcttgattttcctttgaagatactatgattttctaactgctttaaaatgtttccctttgtctttgatattcagcaatttgactaggacatatctagatgtggtcatctttatatgtgtccaaataagtttcgctgcgctttataaacatgaattgataattttatctgatttgaaaaattctagacaaatactttatcaaatattgttcctattccatgct

SEQ ID NO: 126958 - DNA, 599 bp, Homo sapiens
tagtactatttttcagcatcccattgtcttgtattttactatacattttatgaatctgatactacatgtattttttccctagtattgatttacatatacctacacacatccgtactttcacctgggattcctttgttttagtcctttagtattcactttagagaagatctgcaagttgtgaattcccttagcatatgaytgtctctattatatgctaaaagaatatgatagaataaataaaagaatatgtttttcattttgaaggatattttcacagagtatagattttgaggggtttatatttacttttaatattttaaagatatcattcacttatcttccagcttccatcgtttttgacaaaaatttaaacatcagtcttgattttcctttgaagatactatgattttctaactgctttaaaatgtttccctttgtctttgatattcagcaatttgactaggacatatctagatgtggtcatctttatatgtgtccaaataagtttcgctgcgctttataaacatgaattgataattttatctgatttgaaaaattctagacaaatactttatcaaatattgttcctattccatgct

SEQ ID NO: 126959 - DNA, 599 bp, Homo sapiens
tagtactatttttcagcatcccattgtcttgtattttactatacattttatgaatctgatactacatgtattttttccctagtattgatttacatatacctacacacatccgtactttcacctgggattcctttgttttagtcctttagtattcactttagagaagatctgcaagttgtgaattcccttagcatatgactgtctctattatatgctaaaagaatatgatagaataaataaaagaatatgtttttcattttgaaggatattttcacagagtatagattttgaggggtttatatttacttttaatattttaaagatatcattcacttatcttccagcttccatcgtttttgacaaaaatttaaacatcagtcttgattttcctttgaaratactatgattttctaactgctttaaaatgtttccctttgtctttgatattcagcaatttgactaggacatatctagatgtggtcatctttatatgtgtccaaataagtttcgctgcgctttataaacatgaattgataattttatctgatttgaaaaattctagacaaatactttatcaaatattgttcctattccatgct

SEQ ID NO: 126960 - DNA, 599 bp, Homo sapiens
tagtactatttttcagcatcccattgtcttgtattttactatacattttatgaatctgatactacatgtattttttccctagtattgatttacatatacctacacacatccgtactttcacctgggattcctttgttttagtcctttagtattcactttagagaagatctgcaagttgtgaattcccttagcatatgactgtctctattatatgctaaaagaatatgatagaataaataaaagaatatgtttttcattttgaaggatattttcacagagtatagattttgaggggtttatatttacttttaatattttaaagatatcattcacttatcttccagcttccatcgtttttgacaaaaatttaaacatcagtcttgattttcctttgaagatactatgattttctaactgctttaaaatgtttccctttgtctttgatattcagcaatttgactaggacatatctagatgtggtcatctttatatgtgtccaaatragtttcgctgcgctttataaacatgaattgataattttatctgatttgaaaaattctagacaaatactttatcaaatattgttcctattccatgct

SEQ ID NO: 126961 - DNA, 602 bp, Homo sapiens
caattagcatacacagatggcctaaatacattgaccaacttcactcytaatgtcctccagtactttccactagctcagcccagcaaataaaaatttccctgctttgctttagctgagtttaatctctcttccttactgcaatagtcttaacccctgtggcaattgtcctgaatagagtcttttcttgcctgattaattctgttcagtgcaattcctctttggtagagcactaagggaagatttctatatttttcccaaatttgtagaatgggaatatatgttggatacttttttccaaactgctacaattttgtaaagctcatagagctttcaacttggctttgagaaagaagaaatttcatttcattttttaaatgtaataactagaaaagagagagggacaaggaccaggtgagtgatcctgtctgatttatgcactagttatagaaaagtttctcatggagcatgaaactgaagatgttaatgggaaaataacgaataaatggctttgggaaataattagcaaaaagtaggaagggtaatgaagaacctattgtagttgtccagacttaatgcataatcatcacctacttcccctgcga

SEQ ID NO: 126962 - DNA, 602 bp, Homo sapiens
caattagcatacacagatggcctaaatacattgaccaacttcactcttaatgtcctccagtactttccactagctcagcccagcaaataaaaatttccctgctttgctttagctgagtttaatctctcttccttactgcaatagtcttaacccctgtggcaattgtcctgaatagagtcttttcttgcctgattaattctgttcagtgcaattcctctttggtagagcactaagggaagatttctatatttttcccaaatttgtagaatgggaatwtatgttggatacttttttccaaactgctacaattttgtaaagctcatagagctttcaacttggctttgagaaagaagaaatttcatttcattttttaaatgtaataactagaaaagagagagggacaaggaccaggtgagtgatcctgtctgatttatgcactagttatagaaaagtttctcatggagcatgaaactgaagatgttaatgggaaaataacgaataaatggctttgggaaataattagcaaaaagtaggaagggtaatgaagaacctattgtagttgtccagacttaatgcataatcatcacctacttcccctgcga

SEQ ID NO: 126963 - DNA, 602 bp, Homo sapiens
caattagcatacacagatggcctaaatacattgaccaacttcactcttaatgtcctccagtactttccactagctcagcccagcaaataaaaatttccctgctttgctttagctgagtttaatctctcttccttactgcaatagtcttaacccctgtggcaattgtcctgaatagagtcttttcttgcctgattaattctgttcagtgcaattcctctttggtagagcactaagggaagatttctatatttttcccaaatttgtagaatgggaatatatgttggatacttttttccaaactgctacaattttgtraagctcatagagctttcaacttggctttgagaaagaagaaatttcatttcattttttaaatgtaataactagaaaagagagagggacaaggaccaggtgagtgatcctgtctgatttatgcactagttatagaaaagtttctcatggagcatgaaactgaagatgttaatgggaaaataacgaataaatggctttgggaaataattagcaaaaagtaggaagggtaatgaagaacctattgtagttgtccagacttaatgcataatcatcacctacttcccctgcga

SEQ ID NO: 126964 - DNA, 640 bp, Homo sapiens
aacttgttttatgctattaaaatatcctattcccaacacttaacacactgcatcattcaaaaacattgtgtgaaatctctaaagactaattaaattaattaattagtttttaaagcatatataattatctctatttttcttcaatatttcagaaaaataaatttaaatttttatatatttatattgaataagaagaaattgaaacgaaaacttattttcattaagttctggcactaataaactggatcttctaaatgtaacaataggaaacaaattgcctgccaaggaaacaacaggcagtgaaaaatctatctggtcctgcctgcagttctgagcctyattctccgacagctgttactagaagatcttttaatgagtcccttttgtgaagtgtaaggtgaaaagccaacttagagcatgatgaaaatgaatcacaggcatattagtagtggaatataacggaagaaattaagtattacaagtgagaaattacattttcaacgttgcatgcacagtaactaccagatcagatcatttctgtcagtattgagcaataatattttaaatacttgtaatatttaatttaagctacttataatgctggtagcagttgttaaggaaatccagtatcatagtgaac

SEQ ID NO: 126965 - DNA, 607 bp, Homo sapiens
ttgaaattctgtaagctaaatactctttttttttttttttttttattttcactctttgcttgaaaaatatgagcgccctaatttaagggtatgctgactaattacagacagcatttataaggtaaaatatgtggataggaaataacaagtattgcggggcccaatttagattaattgaacttcattatcgtagggcttgttggcacatggtttaagcatattgccagtttctgactccaaaaagcctgaaaccaacagataattctcattgttgattaacaagtaaagtgtaaattgctcctatgatccattrcctggattagaaagtgatgttaatctctggaaaactttagagcatccgataggagtggagctatagattaggaacatttacatagtccaggagggcagtatgaagcaactccaaaattgaggtgaaagggagttttgcacaagtagaaccaaaatgggcctattgtgaaagaaaaagcccaatgttactgtcacaatcagaccaccataggagaaaatgtgcccagtggcctacagacaaccccgacctttttttcattctggcaacagagaaacaagattggcttgccagcct

SEQ ID NO: 126966 - DNA, 595 bp, Homo sapiens
aattatgcaagaggaagaatggcttaattaagggataagatgtgggagatacaagtcaggaatgaatcaacgaaacacacatattaagagagaacaaagktcacaatttttcctttactggatcatttctacccagtgacacatacgctgtttatcccagcaccaaaaataaacacaaaaacaaaaccctaattcccttgccctcctgctagctttcctttccattgtgaccctttacatataccaatgcctcaagagcgtgttacctagagtcactgccccagcttcctgtgctcccagttaatcagacatctgtccctaaccagtcaacagagactactcttgcggatgtcactcattcacccaagatcccaaatccaggtcagttctcagtcctcatctttctcaccctagcactagcagtagtgtgcatggttcttcctcaatacgctccttcttaaaggcctgacctcacttggcccactaggctacatagtctggccccaatgctccctctccgaattcatcttctacctctcaactctcactcactctgctccagccactttaggcacttgactaaacatgctccttc

SEQ ID NO: 126967 - DNA, 595 bp, Homo sapiens
aattatgcaagaggaagaatggcttaattaagggataagatgtgggagatacaagtcaggaatgaatcaacgaaacacacatattaagagagaacaaagttcacaatttttcctttactggatcatttctacccagtgacacatacgctgtttatcccagcaccaaaaataaacacaaaaacaaaaccctaattcccttgccctcctgctagctttcctttccattgtgaccctttacatataccaatgcctcaagagcgtgttacctagagtcactgccccagcttcctgtgctcccagttaatcagacatctgtccctaaccagtcaacagagactactcttgyggatgtcactcattcacccaagatcccaaatccaggtcagttctcagtcctcatctttctcaccctagcactagcagtagtgtgcatggttcttcctcaatacgctccttcttaaaggcctgacctcacttggcccactaggctacatagtctggccccaatgctccctctccgaattcatcttctacctctcaactctcactcactctgctccagccactttaggcacttgactaaacatgctccttc

SEQ ID NO: 126968 - DNA, 595 bp, Homo sapiens
aattatgcaagaggaagaatggcttaattaagggataagatgtgggagatacaagtcaggaatgaatcaacgaaacacacatattaagagagaacaaagttcacaatttttcctttactggatcatttctacccagtgacacatacgctgtttatcccagcaccaaaaataaacacaaaaacaaaaccctaattcccttgccctcctgctagctttcctttccattgtgaccctttacatataccaatgcctcaagagcgtgttacctagagtcactgccccagcttcctgtgctcccagttaatcagacatctgtccctaaccagtcaacagagactactcttgcggatgtcactcattcacccaagatcccaaatccaggtcagttctcagtcctcatctttctcaccctagcactagcagtagtgtgcayggttcttcctcaatacgctccttcttaaaggcctgacctcacttggcccactaggctacatagtctggccccaatgctccctctccgaattcatcttctacctctcaactctcactcactctgctccagccactttaggcacttgactaaacatgctccttc

SEQ ID NO: 126969 - DNA, 601 bp, Homo sapiens
caatagcctttcagtaaagcagattactttccataatgtagatgtaccttatccaatctgttgcaggcctcaagagaaaaagactgagatcctcagaggaagagggaattctgcctccagagtgtctttgaactctagctgcaacattatatctttcccgggtctcagcctgcgagcctgccctgcagattttatacttaccaggcccccacaatcacatgaaccaattccttaaaatgaggaattcctaaagtaattctttctctttgyatattctcatatcttattggttctattcctctggagaacccttcataacccaatggccaacattatttatgaatgacagaaaaattatgaaatagaagttaactacaaatgtaataaagttatagaatggttaatgcttataaaagatttttcattttaaatataaagaagtaaattatccacttttaattaatttgacaatcataaaaattagatgaaaaatgcagatacagcataatcataaattcttcatagaactcattgaattatagaaaaatatttttaaatagattaaatacagaatatcaatggaataaaattataggatatc

SEQ ID NO: 126970 - DNA, 510 bp, Homo sapiens
tctgtgtggaagctccgatcccagattttccttccatgctgccctagcagagtctctccatgagaccctaacccctgtagcaaacttcttcctggacatccaggcaattctatacatcatttgaaatctagggggaggttctcaaacttcaattcttgacttctgtgcactcgcagtctcaacaccacatgaaagctgccaaggcctggggtttgcatcctgygaagccatggcctgagctctaccttggtcccagtcatggttggagtggctggaatgcagggcaccaagtccctaggctgcacacagcacagggaccctcagctcggcccatgaaaccactttttcctcctgggcctccaggcctgtgatggaggggctgccatgaagacctctgacatgacctggagacattttccccagtgtcttggggattaacatttggctcctcgttacttatgcaagtttctccagattgcttgaatttctcctcagaaaatgggattttct

SEQ ID NO: 126971 - DNA, 588 bp, Homo sapiens
ttgggaggctgaggcacatggatcaccttgaggtcaggagttcaagaccagcctggccaacatggtgaaaccctatctctactaaaaatacaaaaaattagccgggcatggtggtgcacacctataatcccagttacttctgcctcagcagactgaggcagaagaatcacttgaaccagggaggcaaaggttgcagtgagccaagattgtgccactgcattccagcctgggtgacagagcaagattgtctaaaaaagaaaaaaaraaagaaaaagattaatctcaattcagttttttcaacataagcacaaatatgtccaatttgtcatgagtatagggtttaggactaaaaacacagaactaaacaccaaatgcaaagcaattcttcccaaaaaaatagctttccccaaatcactcagtaatttcacgatagaattcccaaaatattaagaaatctaggactattaccctgtaataataaagccctcaaaatctaaagaaagaaatagatcaaaatacatttattattgagatgtaaggacaaagtattggagactataagttaatagtctgaataatgaatctaga

SEQ ID NO: 126972 - DNA, 596 bp, Homo sapiens
caatcttctttgtgcaggctaaggatagaaaagaaattagtaaatggaaaggttggttttccctctgaaactggctcctgatcctctgctttactagactacagagtttagagtttgacaaatgttaaccagtagtgatatccaggccaacatggacattttataaatagcctcagctggctgactacccctaggctttgctatcttgaagaggacaaaaataagcatgacaacaaaaataaaaaaaatatgaaatacactaattgtttctcatgcttatcttcaaagcttgatcaagacaggtggcaacaacagttcaatggctagttacaccagcatgtagtgtgtcaacagctgctgcattagggcaaagtgaaaccacattcccartgatcttccatctcttccctatttaactctactgctgtccctcctactgctcaccgctaggccttacacatgggacccactcaatgaaaggaggatagatggacagatagaaagctgattgcacagagtagagcacatttattcccagttttttcttctgatcaaatgttgtcaagctcaaatgaaaatcatctacctatatatac

SEQ ID NO: 126973 - DNA, 596 bp, Homo sapiens
caatcttctttgtgcaggctaaggatagaaaagaaattagtaaatggaaaggttggttttccctctgaaactggctcctgatcctctgctttactagactacagagtttagagtttgacaaatgttaaccagtagtgatatccaggccaacatggacattttataaatagcctcagctggctgactacccctaggctttgctatcttgaagaggacaaaaataagcatgacaacaaaaataaaaaaaatatgaaatacactaattgtttctcatgcttatcttcaaagcttgatcaagacaggtggcaacaacagttcaatggctagttacaccagcatgtagtgtgtcaacagctgctgcattagggcaaagtgaaaccacattcccaatgatcttccatctcttccctatttaactctactgctgtccctcctactgctcaccgctaggccttacacatgggacccaytcaatgaaaggaggatagatggacagatagaaagctgattgcacagagtagagcacatttattcccagttttttcttctgatcaaatgttgtcaagctcaaatgaaaatcatctacctatatatac

SEQ ID NO: 126974 - DNA, 645 bp, Homo sapiens
tgtaacaaacctatatgtataccccctgaaatctaaaataaaacttgaaattgtttttaaaaaattactatccaaaggaaaatatcagtgctatgcatctgaaacctaagaacaatgttttattaaaattacaatgacaaaaataactatctattcagttatttgctctatttgctccctgagaggcacttactataatctcacaggcattcagtgacagtcactttcatttaaaggctccgatttgcttctgttactcagttctatttatgagagaggctactatgtttactacrtgagtttgatagtcttaaaaacacaaatataacttaatggtaatcataagtactgaagtatttacggtgctgtaaatttttgatttattgatgcaataaataaaagaattgctaagaaagaatgtttcagccatacaatactgtgaagcatgccattttaactacagatcttcacaatgtgaacagcaattgtataacttgatggtatatattgtattcataagcaacattttaacaccagttagaagaaaaatatgaatacatttgctggcttcaccaatcctataaatgtctttgaataatttttctaccaagaaagccaaatttcttgaactgttgttaaacacca

SEQ ID NO: 126975 - DNA, 620 bp, Homo sapiens
atgagcatttcaatgaaaatttgtcttatacaattaagtagaaaagcccatcattaaaatgttaattcctttctagtagagtgatcagagattgacttaactatgccaggaaagactaaggaaaatctgtcaattttcactacatctgctttatgaagcatttggatgcatttcattttaattctcttgttttacttttcaatccccagcaagttaaaaaaaaaaaaaaaagaaagaaaacaactgattgagaaattagtggcctgtgagcacatgagaatgtcttattgaaagaatgacatcctcagtttctttgtaaatttaggaaattatccacacagaattgttcaaaatgctcttgattataaattgtggcagactagggattggaacactgtttctctaattcagaggttccaaactcaaatgcctacagaggacaagcagacaaaggaaaagaatgaattagccaaaggggacaatagtgatggtagaggctgtgataaactgtgcaatgcaaggttttctraagagaccagctggtgctcaacttctgtcagtggttgtgatgtggcaatgcaagccagtgtttctgggtcttctgattttcaaagagaagg

SEQ ID NO: 126976 - DNA, 506 bp, Homo sapiens
gaattctacaaagtggcttaacaaaatctggtaccaatcctactgaaactattccaaaaaactgaggagggacttctccctaacttactctatgaggccagcattattctgataccaaaacctggcagaaacatgaaggtaaaagagaacttcaggctaattactgtggtgaatgtagatgcaaaaatcctcaacaaaatactagcaaactgaatccagcagcatatcaaaaagttaatcaaccaaaattatgaaggctttattcctgggatgcaaggttagttccacatttgcaacacaataaaatgattcagygatccatcgtataaacagaactataaaccaaaccacgtgattatctcaatagacacagaaaagacttttgataaaattcagtgtccctttatggtacacatcctgaacaaagaagacatcattttgaatatacctcaaaatataatagccttctattgactgacccacagagaacattatactgaatcggc

SEQ ID NO: 126977 - DNA, 608 bp, Homo sapiens
actcatcaaacaaaaagaaatatgagctattaggttgggaaagtgtgatagattgaatttcagcccaaattctttctcccctctttatatctgttcttttcgtatacaagtttcaagtactgtccaagtctgggcaggaaattttactcagcccttaatgttgtgattcatagctttggccacgtgctgtttgtaaacaagacacaaatagagacttcgcacatacttagataattggacttgtttacctttgcacctctactttcaccatgagaacttgcccaagttattctgaagaatgaatgtgggacatatggagcttcactgcatagccagccaactgtagacakaaaatgtaactcaggaagacacaaacaaacaaacaaacaaaacacaaaccaaacaaacaaaaatcccaccaaacctaaatctctgattttcaaattcacaatctgaataattattagaacagtgagtttaaagtcaactttctacatagtattattgtggtaatacgtactaatacagaaagagtaaatttttattctaagatgatataatttcatgtagaaaattcaaaataatctacagaccattataattcaaaa

SEQ ID NO: 126978 - DNA, 584 bp, Homo sapiens
taaataaaatctccaggattggccaatatcagtctatgcctattcagctccaaagataacctcaaaatggcaccaacaggaaatgagctacacaaaatatgtagctacatagtgtatgcatggccaaatgatttgctgttgatctgaaattcaagtttaactgagcatcctatatttttccttgcatgggaatcctccctaatacccatcttctgtgtatccaatggatcccaagaaaaagggaagattctccagtaggaaatatcagatggccagccacattggctgaccaagattcttcctctcctacctggaaaaagagacttctctatttctatacattcattacttcctcatcaaatatcaattgactaaatgctacatgccaagaaccattctaatttctaaagacatggtagtgaagaaaagtccctatcctcaaggatttgtattctaatggcaagagacagacaacaaatatataaaaaatatgtcagtggtgttaaataaaatgaggagcrtaagagtggaagtctatttgatacaggacagacaaagaaagctggtctatattggagcaaaga

SEQ ID NO: 126979 - DNA, 560 bp, Homo sapiens
agccaaaacaataaaaccccatctctacctaaaatacaaaaatgagctggacatggtggtgcatgtctgtaatcccggctactcaggaggctgaggcatgagaatcacttgaatgcgggaggcagagattgcagtgagccgagatcatgccactgcactccagcctgggcaacacagcaagactatgtctcaaaaaaagaaagaaaaggaaragagagaagagaataaaaagaaaagagagaagagacaagagacaagacgagacaaagaaaattggccaggcatggtggtgcatgcctgtagtctcagctactcaggaggctgaggtgggaggatggcttgagtcctggaggtcaaggctacagtgagctgtgatctcatcactgtaatccagcctgagtaacagaatgaaaccctgtctcatttaaaaaaaaaaaaaaaaagaccattatcttagctacgaagaaaacttaaatattgaatagtaaagattttattggctaaattttctaataaaaaatataacaaaattataaatacataaaactaatcagaccaag

SEQ ID NO: 126980 - DNA, 573 bp, Homo sapiens
tctgtgtagggtctccaaccccacatttcccctctgtactgccctaatagagattcttcaggagggctctgcccctgcagcagacttctgtctggacatccaggcatttccatacatcctctgaaatctaggcagaggctcctaaagctcaactcttatcttctgcacacccactggcccagcaccacatgcaagccaccaagacttggggcttccactctctgaaacaatggcctgagccatatgatggccccttttagtaacagctggagctggaggggctgggakgcagggcaccatgtcccaaggctgtgcagagcactgaggccctgggcctgacccatgaaacaatttttcccttgtaggcttctgggcttgtgatgggaggggctggtgtgaagatctctgaagttccctgaagacaattgtcttggcttttaatattcaacttctcattatttatgcaaatatatccagcagacttgaatttctccccagaaaatgggtttttcttttctactgcatggtcaggctgcaaattttccaaacttttatgctctgcttcccttttaa

SEQ ID NO: 126981 - DNA, 623 bp, Homo sapiens
atatgtccatgtaaaataataaagacactactaaataatgaacgaatcaaagaaatcacaagggaatttagaaaatattttgcgaagaataaaagtgaaaatacaatgtaccaaaacttattggatacagtgaaaacagtactcagtggctaatttatagctataaatgcctacattatraaagaaaaaaaggtttcagatcaataatctaacctcccaccttaagaaaaacaagagcaaactaaacccaaaatgtacagaagaaaagacgtaataaatgattttaaaggaaacgagttaaacagagaatagaaaaagaataaaatcaacaaaatcaaaagttctatgagaatattaacaacactgataaaacttttagatagactgaacaagaaaaaaaagaaagctcaaatgattaaaatcaggagtgaaagaaaggacttaactactgacttcacagaaataagaagcattataagggaatgaaaaattagaaatcaacagattacataagtgggtgaaacaaacaactcctacaaagatgcaagctaccaaaatttagtgaagtgtaaaatccgaatagacctagaacaagtaaagagattgtattggtaagcaaaaaa

SEQ ID NO: 126982 - DNA, 569 bp, Homo sapiens
gctgtactgtccttgccctgatagatttactaactaaaattacattaacattttacttgttttgtggctgagtttatcactaaggcccrtgcttaaaaatgttgtgtcaattttttctcagtattgcctcctagttctcaaaattgtttctattacattttaacaaaaaaatgtgttgaataagtctgaagttatctaaatataaactcaacataactcagtcttttagtcccttgcacttcgaggctccaatgatttttatgtctgctctaatttgttaatacctcagattagtgttttctttgcaaacatctatagacttgaattctgaccacaactacttatctccctatttgtctcatgctttcattcccaataatcctgatctgctactttatctagtccttaaatctcttaatacccactttcatctttttcttggctaatacaccacctcaattcaccaccaacccatgctcagatatttataaatttctgggccttcccaccatcatttttcacttgaatttctcatatttttttctctcaactccttcaatatgtcaagt

SEQ ID NO: 126983 - DNA, 569 bp, Homo sapiens
gctgtactgtccttgccctgatagatttactaactaaaattacattaacattttacttgttttgtggctgagtttatcactaaggcccgtgcttaaaaatgttgtgtcaattttttctcagtattgcctcctagttctcaaaattgtttctattacattttaacaaaaaaatgtgttgaataagtctgaagttatctaaatataaactcaacataactcagtcttttagtcccttgcacttcgaggctccaatgatttttatgtctgctctaatttgttaatacctcagattagtgttttctttgcaaacatctatagacttgaattctgaccacaactacttatctccctatttgtctcatgctttcattcccaataatcctgatctgctactttatctagtccttaaatctcttmatacccactttcatctttttcttggctaatacaccacctcaattcaccaccaacccatgctcagatatttataaatttctgggccttcccaccatcatttttcacttgaatttctcatatttttttctctcaactccttcaatatgtcaagt

SEQ ID NO: 126984 - DNA, 604 bp, Homo sapiens
acagtatcatttaaatggtctataattaatctaatccatgacattaattgtcaaatgtacttcacaatggaagagctgcgacagcttaattattatattttaggtagtactatcttcttcacatattaacttcagtggatttaataagaaaaaagatamtgcaaagcataaatgatcaagtcatcctcacattcctttgcttgattactctctctcaaaaatcagtgaatccagaaaatatggctcatgagagctttaaaggcaaaatgtatctagaatccaccctttcaaatttgtgcatgtgcctagccttgtgttttctggtgctttctatcaggctcccagttgttccttgcactagttctccagattgttcccactggctctctacttgggctccagacattttcttaatccacctctggccttttctccaactcctctataaaatcactagtgatcttagaaataatggagctagcttaataaactaatataaagtgttaatgatttatataggttttaattttttatgtttttttttctgtgaaatttatcatttaatggaaggcaccagacaaggaaaatagagaaaaaaagaaga

SEQ ID NO: 126985 - DNA, 601 bp, Homo sapiens
gacttaattacttttaaaacccctacagaatgtgcatttggaaactgatgaaataagacctaaaaatgtaagcagagaccaaacaacatgtctcaaattaggcacttttcattctgataatcagaatcactgaaaaaatactaacatgttacagaaaaattactcagatttacatgtggtgaactgtcaaggtggggtcaaacaggacacaggcaaaccagttgggaagttatttcaataaaccaactgaaagacagagaggatagaattaagccagggaaacrcataaaaggatggatttaggagatcagtatacttggaagacagaatcaatgtggaataggatttaaagaaggagaaaggagcaggacactcaaatttctggcttaggaaatgttgaagagtggaggagtctatatgtatagagggcatcaggaagaggaatgataattctgttttggaaaactttaattatgggctatcaagtggggcatatggttttggatttcctatcagaggtctgggctggaaatccagaatttcatgttatcacttcatcatagttaaaaccatggatgaacataatattgtctaagtcaaa

SEQ ID NO: 126986 - DNA, 632 bp, Homo sapiens
ttgtgggaaatattacttcttaaaaataggaaagtaaatgatcaggtgttttcacttaaaggaattactctggctgcaacacaaagttgaaggtctagagtagagctgctgcaataattcaaggaagaaaagctgcaagcctaaattaagaaaggggcagcctatatatacaggggacaactgagagaaatttagctgctagtgtatgtaagacctgatgactgattaaataggaggggatgaggcagagagaagaatttagaatgagatataggctttttgttttgagcagtgttggtgagtgatagtgccatttactaaggtgaggaataggaaataggaaaaacttttgtgcatgttcagcatacagtgttagttaggagcaagtgttagttaggagcaagacccctgaatgtaggctgagtttcagtcttcactatcccacattctatctgccagactttaggcaagttacttaacctttmggcaagttacttaacctttctgcaacacatgattcaaattgccaggtgaggctaggcttgtattaaggaaatttagtacttgccaaattaaattagaaatttaatttttgctccatttaatttgtgccacatttgtgtttccttcct

SEQ ID NO: 126987 - DNA, 593 bp, Homo sapiens
ttaaacgttcctgcctgcaggctctgaagagagcagtggatctcccagcacagtgcttgagctctgctaatggacacactgcctcctcaaatgggtctctgaacctcatgcctcctgactgggagacacctcccagcaggggtcaacagacacctcatacaggagagctccgctggcatctgacaagtgcccctctgggatgaagcttccagaggaaggaacaggcagcaatctttgctgttctgcagcctctgttggtgatacgcaggcaaacagggtctggggtggacctccagcaaactccagcagacctgcagcggaggggcatgactgttagaaggaaaactaacaaacagaaaggaataacatcaacaaaaaggacawccacacagaaaccccatctgagggtcaccaacagcaaagaccaaaggtgataaatccacgaaaatgaagaaacaatagtgcaaaaaggctgaaaatcccaaaaatcagaacacctcttgtccaaaggatgacaactccttgccagcaaaggaacaaaactgaatggagaatgagtttgacgaactgacagaagtaggcttcagaaggtg

SEQ ID NO: 126988 - DNA, 606 bp, Homo sapiens
cgataaagtaattgaagaatgagtgcctattagctggtaaattggattgaggtattcatttaaacaaaatatgtacagggtatgcatgctgaaagtttccagtgttgttggaaaatatcgaagccctaaataaatggagtgacagactgtgttaatggattggaagattaacatcatgaagatatctattcttcctaaatttatttataggcttaatgtaattcccatcaaaatctccataaggtgtttttgtagacataracaaaattattctgaaataatgtcaaaaggcttaggtcctgaaattgataaaacaatcctgacaaagaagaataaagctcaaggaatcactctacccaatattatggcttactatgtagctaccaatatgtgaaattggtagaaagaacagaatagagaacacaaaataggcccatacaaatattcaactgatttttgacaaaactgcaaaagcaattcaatggaggaaggacagtacattgaaaaaatagtgctagagcaattggatatccatggacaaaaaaataaatcttgacctaaatgtcctaccttatatatagaaattaactcaaaatgaattctaaa

SEQ ID NO: 126989 - DNA, 589 bp, Homo sapiens
tttcttgtcacatgaaagtacagttcctggctcagaacacacgccaaggctggtggccagagggaagaaagaagggaagaaaggagggaaacagttgaagccactggctgctttcttctcaagagcatgctttctgttcaaagcacttaktatgtttgcctccaaattctgaactcctatgacttcctgctaaagcactcaccttctttttatttagctttccaaccacaagtcagagctgccctacctcagaatagagcttctttattccttcaaattcccaagtttatttacatggaaggggcatactgctcttgttagaagaatattaagaatatccttgaggttcccaagaattgtacaaataactgttgattctttggtgatagacattctgattttcaacatagaatggctatgcagagtagagggtgtctgttatgtgttgattctacaaacagaagaactaaatccacctgtgtgttcagttttttatacctttatgtcctttatattcccaatgggggtgaggagcgcaggtaggaagggtaagagtctaagaaattgtgctaaaaactcataagctttt

SEQ ID NO: 126990 - DNA, 575 bp, Homo sapiens
gtgaaactcaaattaaaatatatgtctagaaaaaaatcctcagttccaaatcaagcctactccacaatcaaaaactctaattattttatagatattaaaggtgttgcaggaagcacaagtctgagaccagaatacctacttaggacttccttcctagcctacttatttttaaaccaccatttctgaaaaagcattgattaaatatattcctaatgatcctgaacaactgttgttttattttttgagacaatagtgtcttcttctgtcacccaggmtggcatgtgatggtatgatcatagctcactgcagcatccaactcctgggctcaagcaatcctctgaagcagctggaactgcaagcacaagtcatcattcctgactaatttttaaatttttttttgtagagataggatttcactatgttgtccaggcttgtgttgtaagcctcttgcctctgtctccctagcagctaggactacaggctatgatgctcagctataactgtaattttaaaactagtatcaaaactcaaaatgaaatttggtaatcaaaaatagttatatggcatgtacaaag

SEQ ID NO: 126991 - DNA, 484 bp, Homo sapiens
atcatattctatgtcacaggtttgaattcagaaaatatagccacttcattgttcactcttaagttgctaattcacaaagaaattgcatgtccactttgccctgtaaaaattcaagttatacaccaatcgttgtatatctccccagtcytgttccccaaggtcaccagcaacttgagggcttctaattaaagactgaagctcagatggcaattcagggaaattaagaactttgctcaactctatgcacggcagaattatttgtttttgttaatcctttggccaaacaaatgtttaacaaggatttaatattgaaaaaaaagaagaaaaagccagcagagaagaatgaagcaccaggtcccttctatgtgcaaaaccctgtatcgcccttcggatcctgcataagtcaccagaatggcttagcattagtgggagttaggacataatatttcctgcttatgagtacttggcacacactattatataa

SEQ ID NO: 126992 - DNA, 588 bp, Homo sapiens
ttatttcagagagagttaacaataggaaggataactgtttccaaaaaattttaggaaacaatgttgctatggtcatttaacataggccaggaatcctgacacgtcttgaagtggtgtcctaaaaatagcacactaattttttgtataagcagagccatggttgtattttatcttatattctaaactccctctttaagaatcttgccattatatttttaaagtcttatatagaagaaatatttccaactttgatcatgtcttattccaagaacacatatagtttatgccagcctgggtcatcattctttctctgaacaaataatgtaaagataataatagttacattrtatgtctctataactatattacttaattttttggattgtttttaaatttttaactcaaacaaataatatagaaacactttcaatgctttgtataaaatattctgtgactcagaagtacataaatccatttatttgaccttcacaatgaggtggagttgatatagtaaggttaatgaggcaattattcttatacagaacatcagccataaaggcacaatttcttcctccctttaattaaaat

SEQ ID NO: 126993 - DNA, 588 bp, Homo sapiens
ttatttcagagagagttaacaataggaaggataactgtttccaaaaaattttaggaaacaatgttgctatggtcatttaacataggccaggaatcctgacacgtcttgaagtggtgtcctaaaaatagcacactaattttttgtataagcagagccatggttgtattttatcttatattctaaactccctctttaagaatcttgccattatatttttaaagtcttatatagaagaaatatttccaactttgatcatgtcttattccaagaacacatatagtttatgccagcctgggtcatcattctttctctgaacaaataatgtaaagataataatagttacattatatgtctctataactatattacttaattttttggattgtttttaaatttttaactcaaacaaataatatagaaacactttcaatgctttgtataaaatattctgtgactcagaagtacataaatccatttatttgaccttcacaatgaggtggagttgatatwgtaaggttaatgaggcaattattcttatacagaacatcagccataaaggcacaatttcttcctccctttaattaaaat

SEQ ID NO: 126994 - DNA, 563 bp, Homo sapiens
aatatccagagtctacaaggagcttaaacaaatttacaagaaaaataccatacaaccccattcaaaagtgggtaaaggatatgaacagacacttctcaaaagragacattcatgcagccaaaaagcatataaaacaaatctcaacatcactgatcatcagagaaatgcaaatcaaatccacaatgagatatcatctcttgacagtcggaatggagattattaaaaagtcaagaaacagcagttgctggcaaggttttggagaaaaagggacgtttttacactgttaatgggagtgtaaattatttcaaaaattcaattattgtggaagatagtgtggtcatttctcaaagacctagaggcagaaataccatttgacccagcaatcccattacagggtatatacctgaaagaatataaattatcctattataaaagtacatgattgtgtatgttcatttcagcactattcacaatagcaaagccagggaatcaaccaaaatgcctattaattatagactgcatagagaaaacgtggcacatgtatactatgagatattatatag

SEQ ID NO: 126995 - DNA, 563 bp, Homo sapiens
aatatccagagtctacaaggagcttaaacaaatttacaagaaaaataccatacaaccccattcaaaagtgggtaaaggatatgaacagacacttctcaaaaggagacattcatgcagccaaaaagcatataaaacaaatctcaacatcactgatcatcagagaaatgcaaatcaaatccacaatgagatatcatctcttgacagtcggaatggagattattaaaaagtcaagaaacagcagttgctggcaaggttttggagaaaaarggacgtttttacactgttaatgggagtgtaaattatttcaaaaattcaattattgtggaagatagtgtggtcatttctcaaagacctagaggcagaaataccatttgacccagcaatcccattacagggtatatacctgaaagaatataaattatcctattataaaagtacatgattgtgtatgttcatttcagcactattcacaatagcaaagccagggaatcaaccaaaatgcctattaattatagactgcatagagaaaacgtggcacatgtatactatgagatattatatag

SEQ ID NO: 126996 - DNA, 563 bp, Homo sapiens
aatatccagagtctacaaggagcttaaacaaatttacaagaaaaataccatacaaccccattcaaaagtgggtaaaggatatgaacagacacttctcaaaaggagacattcatgcagccaaaaagcatataaaacaaatctcaacatcactgatcatcagagaaatgcaaatcaaatccacaatgagatatcatctcttgacagtcggaatggagattattaaaaagtcaagaaacagcagttgctggcaaggttttggagaaaaagggaygtttttacactgttaatgggagtgtaaattatttcaaaaattcaattattgtggaagatagtgtggtcatttctcaaagacctagaggcagaaataccatttgacccagcaatcccattacagggtatatacctgaaagaatataaattatcctattataaaagtacatgattgtgtatgttcatttcagcactattcacaatagcaaagccagggaatcaaccaaaatgcctattaattatagactgcatagagaaaacgtggcacatgtatactatgagatattatatag

SEQ ID NO: 126997 - DNA, 316 bp, Homo sapiens
aaattctttgaagagaaaaaaaacccaccaaagctcatttaagaagaaatacctaatatgaataaccctgtatctatttataaatgttcatttttactaaaaaccttcctacagagaaaatrcaaggttcagatgccttccctagtggattctaccaaacatttagggaagaaataatatcaaatctatatacactattttacatactttaaaagagggaatacttcagactcattctatggagccagcattaccttggttccaaaaccaaacaccacataagacaattactgaccaatatcccttataaacatag

SEQ ID NO: 126998 - DNA, 583 bp, Homo sapiens
caagtctctctctctcaaccacctatctatgtagctgtgtacatttggatttcatataagaatgtttagattccccagctgaaataaaatttaaaattattattatacaacttattttttgtatctccttcatatgtttgcctagatttcactgcctaggtttaaattttatttgtttatttatttttgagacggagtcttgctctgtctccaggctggagtgcagtggcgcgatctcggctcattgcaacctctgcctcccgcattcaagcaatttccctgcttcagcctcccaagtagctgggattacaggcacgtgccaacaggtctggctaattttttgtattttagtagagacggggtttcaccatgttggccaacgtgatctcctgacctcgtgatcyaccctccttggcttcccaaagtgctgggattacaaatgtgagccactgtgcccagcctaaaatttttaattgttaaatttgttcaattgttgccagcctttagcatattatgttgaaacaaatattgctatccataactctctgtgtatatttctactatttcctccagataaatgctg

SEQ ID NO: 126999 - DNA, 567 bp, Homo sapiens
ttttgattgagaagacaatgtatcctaaatatttagttgtccaaaaccctatacaaggctcactaaaaatatttcccattagcacaatttactaccatctgataatattgcaatgatggtagctatgtctttgcccacattcttaattatttaaatagataatttatttaattaaataattatttcttagatattaaatattatttacttaaataattaaggacagattaccaggataggattgtctattctagggatatgcacatttttctaaggctttttatatgaacgatctaattctactgtaatctatattcctaccaaatggtgtatgtgaatattcatatccctaaacaactagcatcaactagcattatcttttctttgtttaatctataccaattgaataacagaataatagttttaagatgtctcagctgacasagaaaacctcagcccctccaagcccgttgtttaaaagcacgtaaaatatatcatcatagaacgaataaatgcataaccaagccagaaattagtcaaggaaaacacctggaagccaacttctcc

SEQ ID NO: 127000 - DNA, 553 bp, Homo sapiens
ccaaaaaaatatatttaaccaaggaggtgaaagatctctctaaggagaactacaaaacactgatgagaaattatagatgacacaaacaaatggaataacatcccgtgccaagaattggaagaatcaatacaattaaaatgaccatactgcccaaataatttacagattcaacacaattcctatcaaattaccaatgtcatttttcacagaattagaaaaaactattctataattcatattaaaccaaaaaaaaaaaccctaatagctaaaacaatcctaagcaaaaagagcaaagccagaggcatcacattacctgacttcaagtacactacaaggccatagtaacccaaacagcacagtactggtgtaaaaatacatagatcaatggaacagatgagagaacccagaaataaagccacatatctacagccaactgatcttagacaaagtcaacaaaaacgtacactggggaaaggacatcctatgcaatacatggtgctgggacaattggatagccatrtgcagaaggatgaaactggacccatacttgtca

SEQ ID NO: 127001 - DNA, 541 bp, Homo sapiens
gagctcattgaggccaatggagaaaaagtgaatatcccaggataaaaatttaaggaagctatctgagaaaccactttgtgatgtstgcattcatcccacagttaaacctttctacacattcagcagtttggaaacactgtgtatagtctttgaagggatatttgggtgtgcattgaggctatggtgaaaaagaaaatatcttcagataaaaagtcgaaggaagctttctgagaaagtgctttttgatttgcacattcatctcacagaattaaacctttcttttgattcagcagtttgaaccagtgtttttgtccattcagcgaatggacagtttgtggctcattgaggccaatggtgaaaaactgaatatctcaggataaaaactagaaagaagctatctgagaaactgctttgtgatgtgtgcattcatcttgcagagataaagcttacttctcattcagcagattgcacacactgttttcatagaatctgtgaagggatattttggagtgcaaggagacctatggtgaaaaaaatcttc

SEQ ID NO: 127002 - DNA, 618 bp, Homo sapiens
accacaacatgtttaatagacaacctcagcaaactagcttcaaatcctgactttattacttaatatgtgactgtaagtagtgaggttctcactatttgggaacctcattctctcaagttcaaaatgaagctactggtgctgttaaagaagcgaataaaataatgtgctttaaagtgtcaagcaccatttctgggttaaaatacttttgacttgaatcaaaataaattgaactataaattgtctttattatttttggtctggaggatgatttagtcatgcagtaggccagttaatctaggaaacagagagacggtcagaaaatatcatctggtaaactacttgagtaaaaatgtcccaatgttgctgttggttgtttatttatttgtaggttcaagggaagaatttatactacagattgctgtagaatgccaaacatctcccatttacaattggttagtatgaacagtaacagctttcctctaattctttgagacacaaatttgcattattcagtagaattaataccctgaatcaagaaatgwcttcatttaaagttacatacactaaaaaatcactgagagtttcttatagccaaataaagcaagattgtaatgactg

SEQ ID NO: 127003 - DNA, 618 bp, Homo sapiens
accacaacatgtttaatagacaacctcagcaaactagcttcaaatcctgactttattacttaatatgtgactgtaagtagtgaggttctcactatttgggaacctcattctctcaagttcaaaatgaagctactggtgctgttaaagaagcgaataaaataatgtgctttaaagtgtcaagcaccatttctgggttaaaatacttttgacttgaatcaaaataaattgaactataaattgtctttattatttttggtctggaggatgatttagtcatgcagtaggccagttaatctaggaaacagagagacggtcagaaaatatcatctggtaaactacttgagtaaaaatgtcccaatgttgctgttggttgtttatttatttgtaggttcaagggaagaatttatactacagattgctgtagaatgccaaacatctcccatttacaattggttagtatgaacagtaacagctttcctctaattctttgagacacaaatttgcattattcagtagaattaataccctgaatcaagaaatgtcttyatttaaagttacatacactaaaaaatcactgagagtttcttatagccaaataaagcaagattgtaatgactg

SEQ ID NO: 127004 - DNA, 566 bp, Homo sapiens
ctttgttgaaaatgaatttattgtatatctgtgaatttatttctgggtttgactgtaaatgtgtaaatttatttctttattctgtctcattggtctgtatgtctattttaatgccagcaccatactattttggttactaaactctgtagtataatttgaagtcaggtaatatgatatttccatctttgttctttttgctgaggattgctttggccattaagaatgggacctttttttgtctacataatatttatgagagacaagcctgacctagaaagggaaaatgtcagggccaactgagagccactattcaatactgaaacattttacacaataatgccctatctccagctccacagcctccctgtccttaataaaygagcaacagaggcaggagtggatatttcttgcttctgtcttgtagttctgttttttcattctctcggatattgatactatcctcaactttacatttatgctttggaagataccagatcaccttcattttatataaaggagggaggtactcaccagagaaccataaaatgctatagacaaacaatgac

SEQ ID NO: 127005 - DNA, 190 bp, Homo sapiens
gccctcttctcatagcttcactaggcagtgccccagtggggactctgtgtggggcctccaaccccacatttcccccctgcactgccctagtagatgatctccacgaggtctccacccttgcagyagacttctgcctggacatccacacatcctcttaaacctaggtagagtttgccaaacctcaattctt

SEQ ID NO: 127006 - DNA, 571 bp, Homo sapiens
attagctaataatactaataatctagtatagaaagcatgtgccaactgatctagactcttgtgacagttgtatatctacycagctgcttgaccttaggtgtatcaaaatctcgatttcctagactacaaatgagtaagagggatggaggccccttacagttttaagattctggaattctaagtgggtgtaactggagcaaattttattttctaaaatttgcataataaattttaaaataggagaaaaactaatatttaaagtacatatttctggaagtcttttttaggtgacttatactaccaggaatggatttaccactaaatattggttttgcctaattcagcattgctatgtaatttgatggaagtataactccatagacaaagagatttggtcctaacatagcttgtattttatatgtatatacactatttctatttaaatttctgtgtagtcatgttttacccttttaaaatgaagattagttttattatgtattttcttttgtctataaacattcagtgaattcacactgaaaactgattatgaacagatagtctgctaggcact

SEQ ID NO: 127007 - DNA, 489 bp, Homo sapiens
taaaataggagaaaaactaatatttaaagtacatatttctggaagtcttttttaggtgacttatactaccaggaatggatttaccactaaatattggttttgcctaattcagcattgctatgtaatttgatggaagtataactccatagacaaagagatttggtcctaacatagcttgtattttatatgtatatacactatttctatttaaatttctgtgtagtcatgttttacccttttaaaatgaagattagttttattatgtattttcttttgtctataaacattcartgaattcacactgaaaactgattatgaacagatagtctgctaggcactaaggaaacacatatgaaaaactaagtcctcctctgccctcaatatgctcacaagactacagttactgaagcctgacctcaaaacctagctaacaaagtccttgaatcaggtgatagttcagaataccattcatgctctctcccaagagta

SEQ ID NO: 127008 - DNA, 527 bp, Homo sapiens
tcatttgcttttaggccagtacaattcttaattcattcatcagactagaaaaataaaggaatatcttaacactttaccaaaatctctgttattttctccttcttgcaccatagaaaatatttctatgcagttttcaactttacttatgggcagaaatttcagaatcccattgaatttcagggattgggtcactgccttcgtgcagtagtaacaatgacaatgaagagagtcttatggtttcttccatttccccaatgtctcttattttgtatcctctgatgttaaacagagcatctatacaaaaccttctcttcgtaccgatcttccctttgttgtccatttcttcccgtcatcattaatctctccwatttctttttaagacatcatatgagcttctttctaacattaatctttcttttattttctcaatattagactttactctttcctaactcaagatgggttgctgatggaatatgaattagtttcctaaggctgctgaaaaaaactactacaagcagggtagc

SEQ ID NO: 127009 - DNA, 588 bp, Homo sapiens
tgcattttaggaagctcacttttgctgcagtgtggattggattgaggcaaagctggaagcagagaaatcagtggatgctgttatagtcctaggcaattaattacaaaaagtaacaacagtagatatacaaagtattttttgaattctgctatgttaaaggtatgttgtttcttaagagggggaaacacatcccgaaagacatggttcttgccttatcgaagattagagtctaactgtgcttatcattcttccattactgttctsttcaggtgctcacaaaatcagggcttatggcccactgaggtttggggatcagttttgaggccaagaagaattggaagggaccatgggagtgatgcaggccgacaaatgaacctgtgctgtatccatttcctctccttaaactgcatgttcatgaaaacttctgtgcaacagtcaaaaataaaataaagtaaaataaagattgaaatgctatgtcctggaccaaagtatctcgtcgccacatatcctatttgctatcatttccccaacattcagaaagacagttaatgggtaccatttttctccatgtttagttcttctcgcata

SEQ ID NO: 127010 - DNA, 551 bp, Homo sapiens
ttgaagcccacattccttgatgctgctgtctgagaatctacaaggctcaccccagctggagcccagctcagaataccaggaatactaagtgactcggatacttgctgttgctgtgtccagtagagaaagaagagaggaggcctaaggggcacagagagaagtctagttactttggaccacttgagactcttctatgtggagttccattcaagagagactgagttcccgagttcttcattattgaaggtgtgtaagcagaaattgagacctctaagtgtgaagatagaaatgtgatttagaccttgtaggtcaagggctggccacttataagtgatgtcaccttgagtaatgacctcagcattcctgaatttgyactttcacaatggccaacatggttcactctagctctgcagaatgctaagaaggggaaaaagtgagagttcttgtatgaggggtgggattttgtaactttttcctgacacatgaggcctttctgtcccctcttaccccaaatataacccatcttggtacctgaggaggtcgagtgcaga

SEQ ID NO: 127011 - DNA, 560 bp, Homo sapiens
ttccttctcttcaaaggaaagtattctcttgatgtcaaataaattaattttgcctaactttgaacttcacatataatgaatcatacactgtattttgttttgtctgatttctttgctcaacattttgtgaaatccaattgtgcatttttatgtagtcatagttcatttttatttttatagttttgcattgtatggttacataataattgatttatccattccaatgttgatgaacttttaggttgtctacagttttgagccattacaaatagatttttatgcattcattttggtacacttacaagacacacttcttagttatatacctaggagtgaaattgccacttttctgtaccaatttacaccccaacatcagtttttgaaagttctcaaatttgtcctttttaatgtctgtattatgtcaaattcatcgtktgctgaattatattccattgtatggatatcttcatagttttctattgatgaaaattttgattgttttcaaccccccacatatttttttttgaaaaaacaatgcttccataaatatccttgtacat

SEQ ID NO: 127012 - DNA, 560 bp, Homo sapiens
ttccttctcttcaaaggaaagtattctcttgatgtcaaataaattaattttgcctaactttgaacttcacatataatgaatcatacactgtattttgttttgtctgatttctttgctcaacattttgtgaaatccaattgtgcatttttatgtagtcatagttcatttttatttttatagttttgcattgtatggttacataataattgatttatccattccaatgttgatgaacttttaggttgtctacagttttgagccattacaaatagatttttatgcattcattttggtacacttacaagacacacttcttagttatatacctaggagtgaaattgccacttttctgtaccaatttacaccccaacatcagtttttgaaagttctcaaatttgtcctttttaatgtctgtattatgtcaaattcatcgtgtgctgaattatattccattgtatggatatcttcatagttttctattgatgaaaattttgattgttttcaaccccccacatattwttttttgaaaaaacaatgcttccataaatatccttgtacat

SEQ ID NO: 127013 - DNA, 579 bp, Homo sapiens
taagaaataggctttaaatatcaaggctcagataggataaaagtaaatggatggaagaatgagtaacatgcacatactaatcataagaaacttgaagttactatattactatcaaagtagattacagagcaagaatcatcatttcagggataaaaagagttatttcatcagacaaagggtcaagacataaaattgctaaatgcccattttaaaactcaaagaaaaaaagagctttaaaatacatgaggcaaaaacctgattgaactaaaaggagaaatagacaaatccacaattatagctgaagatttyaaccctcctttctcagtaattgatagaagtagtccgaaaaataatagagaaatagaagactctagcacattgatattattaagacatgcccaaaaaaacaaaatacacattcttttcagttgtatgtggaacattcaccaaggtaggccacaagctaagatctaaaattagtcttaattaatttcaaaaaaatttattttacaagggatattttctgaccactacagaattaaattagaagtaaattacagagatgtctgaaaaagccac

SEQ ID NO: 127014 - DNA, 575 bp, Homo sapiens
acatggtacaattctagtttttgtgcctcaatggttggagaaaataagttatggaaaagttaacttattagtaaattttgtagacatgtgagaaaactttgccttgtcaaccccacgtaattttaataagggtcagattagccctcaaactttttgaaattttttttgtaagctgagaaagtctgatagaggttagtggattctttactcactatcagactgtaactgaacagagcaggccagatgcttgccacctgcagagtccaagtaacaagagcacggtctggtagaaagagaatttggataagagtggtggctcgtacttgttatcccaggactttgggaggctgaggcaggtggattgcttgaagctaggagttcaagaccagcctggccaacatggtgagacctcatctctrctaaaagtacaaaaattagctgagcatgatgttgcacgcctgtaatcccagctactcgggaggctgaggcaggagaattacttgaacccaggaggtggaggctgcaatgagctgagataatgccactgtactccagcctgggtgacagagtgaggt

SEQ ID NO: 127015 - DNA, 605 bp, Homo sapiens
aattaactgaggaacacctctgtgaatttacaaaaatatacatgtttataataatagtttttttaaaaagatagcccttaaccccccaaattaaaaaagactcattggtcacattggaagtaacctcactctgaaaattaaagggaaataattaaacatttattttttctttcttggataagcagtatttcaatatgaccaagtagccctagttgacgaagaaaackacttctttatagaggaattccacctaataaatgtaaagggttgaagaagtgacagaattagaacattatcattttgcaacttataataagaatcaataatttaggcaaagattttcaatgaatgaagacatttttaaaaatgaatggagaatttttccatgaaaggtcaggcttttaccatttgaacccactgattaatttaagtaatacttattctagtgaataaaccagaaatatttaccacttgaaggaagataaaatacatggcatcccgtatgatgtaattttgggaagaaaggtcaaacatgactataatggaaccctcagagaaaaagtgttgttattaacaaacatgaagtttacagaaacaaattaaaa

SEQ ID NO: 127016 - DNA, 594 bp, Homo sapiens
caagctaacttaagggtgacccaaccataggctagtgaccttcctccaaatgcttttatttattctattatttttattttagaggcagagtcttggtctgtcacccaggctggagtgtagtggcatgatctcagctcactgcaacctccacctccccggttcaagcaattcttgtgcctcagcctcctgagtagctgggattacaggcatgtgccaccatgccaggctaatttttgtatttttagtagggacagcattttgccatgttggccaggctagcttgaactcctgacctcaagtgatctgcccatctcagccttccaaagtgttgggattacaggcatgagccaccgtacctggacccccaaatgcttttaaacraatcacattgctctctcagcaaggaagaattggaacactgagagactaagccagttaggtatcacaggtgaagttggggcaggctggatcttaagagaccaagtacaagttaaagttttgagggagaaaagactgagaaagcagaggacagtggatggtaagaaagagaagaaaacagatgtgctgagaaaagcagagaagtcctaacacatt

SEQ ID NO: 127017 - DNA, 621 bp, Homo sapiens
accaagcgtacttgactgatatataatcctcaaaccttacctatccctcagactgaagaccatttttctcttcctctccagtatctattttcttaaaaatatagcccacattttctgcctcatcaccatgccaggactatttcatagcctaaaacaaaatagcatcactacactttttcatatttctcttgtaatatttatatcctgccacctgagatagctattgatctcttttcccattagatgttaagctccttaagggcaagagctttatcatatttaccttaatatcctccamagcacctggcaggtactcaattattgcttgtggaatgagtgaaaaaaagtgaagtaatgaatgaacaagtgaaccagctactactcagtgcctccgaaaacagattattgagatgtactatgttttaatgtatttgatatcaaaggttaatgcatccctttggacttaagctgctggaatcacttaatttttctatacttgttccacatgtgaaattccaaccgacatcatgaaagtttgattaaacagaccaagaacagtatacctgatggatgtcaattcccccagggcaggatgtggatctggaaaccagaagactcgac

SEQ ID NO: 127018 - DNA, 632 bp, Homo sapiens
cactttatacaaatagagaaactgaaggtcttaaaatttaattttttttttttaggcaacaagtgttcattgagagtgtggggcatggtgcgaaattctggggacagcacagtccccctgggctctcagtgaaagcacattgaaactagtgtgctgcaacaggttacagaggaagtctttgagcgcttcatgtgtagcgggtttaattcttcttttttcttgattttcacacgcccctgcacttcctgctctttcctgggcctggaagcggaagtactgaaatactgagacaaactgttcttatggtttttagaggttggtcaaaaccaggaaggacaagacatcagaaggctggttctctctgggttytctctgagtaggggataagagctgggtcttgggtcccttgaccatgtttttattcttcctttgaattggttgggctcggcaaagtcagtcaagaacttgatcttagctgcagctgcattgttcaatgacaggctgattattgtgttttcaacttcatttttcatcgataactgaaaggatatgtctttagtggaaggtgatgctcatattgattttgtgacttcagattggtatatgcactgatttatttatccaacaaatat

SEQ ID NO: 127019 - DNA, 632 bp, Homo sapiens
cactttatacaaatagagaaactgaaggtcttaaaatttaattttttttttttaggcaacaagtgttcattgagagtgtggggcatggtgcgaaattctggggacagcacagtccccctgggctctcagtgaaagcacattgaaactagtgtgctgcaacaggttacagaggaagtctttgagcgcttcatgtgtagcgggtttaattcttcttttttcttgattttcacacgcccctgcacttcctgctctttcctgggcctggaagcggaagtactgaaatactgagacaaactgttcttatggtttttagaggttggtcaaaaccaggaaggacaagacatcagaaggctggttctctctgggttttctctgastaggggataagagctgggtcttgggtcccttgaccatgtttttattcttcctttgaattggttgggctcggcaaagtcagtcaagaacttgatcttagctgcagctgcattgttcaatgacaggctgattattgtgttttcaacttcatttttcatcgataactgaaaggatatgtctttagtggaaggtgatgctcatattgattttgtgacttcagattggtatatgcactgatttatttatccaacaaatat

SEQ ID NO: 127020 - DNA, 632 bp, Homo sapiens
cactttatacaaatagagaaactgaaggtcttaaaatttaattttttttttttaggcaacaagtgttcattgagagtgtggggcatggtgcgaaattctggggacagcacagtccccctgggctctcagtgaaagcacattgaaactagtgtgctgcaacaggttacagaggaagtctttgagcgcttcatgtgtagcgggtttaattcttcttttttcttgattttcacacgcccctgcacttcctgctctttcctgggcctggaagcggaagtactgaaatactgagacaaactgttcttatggtttttagaggttggtcaaaaccaggaaggacaagacatcagaaggctggttctctctgggttttctctgagtaggggataagagctgggtcttgggtcccttgaccatgtttttattcttcctttgaattggttgggctcggcaaagtcagtcaagaacttgatcttagctgcagctgcattgttcaatgrcaggctgattattgtgttttcaacttcatttttcatcgataactgaaaggatatgtctttagtggaaggtgatgctcatattgattttgtgacttcagattggtatatgcactgatttatttatccaacaaatat

SEQ ID NO: 127021 - DNA, 580 bp, Homo sapiens
gcagtggtagaagtaatgaaaccccaaagtctctctgtgtttcttgctgcccttgctgtcttggaggggaatgttacgcagtggaaatgggacactcctaagttcagagggaaacagtcttgacacaggtggttccccaagaacctacaggcctccaagccaatgggcaaactcccccatgggtggagtggcccttgtctcagtatcaaaaaattgtaatctctctgagggtagggaccctatctctattcacctctttatccaatgcctgacacctagaaatcctcagtaaaaatctatttattaattctgccccacctataagaccggctctgaacactgagagtcagccttgcgagtgacctacttaagtcctcctgaccctcagcccccattgctgactgcagctaagaagaaataccttgggttggtgcatattttggaataaaaatarttataatgatagttatagcttaacctattgagcgtttactgtgtgtaggcacttagtactttacatattgtaactcactgaatccttccttctaccttacaataatagtaggtataatgctcattc

SEQ ID NO: 127022 - DNA, 450 bp, Homo sapiens
agaattcagaccaaggaacaattattgatcccaaaatagggatcaagcattttatacaggaaacagctctgcaaatatagaaaagatgtcaacagacagtttgtagaagaatgsacaagaaaaaaataacatttcaagaagaaggacaaatttgattatatgcagaggaaagaaaaataagcaatatttatacagtttggctgaggcaaaaaggctacatagagaatgagtggaaaataaacccagaaaataatgatgtggggtcaaattgagaaggcatttgaagataccagattcaagagtttacaactaattcagtaggaaacgggagtgatactactacttgaggaagatttatctagtccaggtctgccatccctaattcacaattccaaaatccaaaaagttctaaaaaaccaaaaatattaaggtttttttctgaaaccttaa

SEQ ID NO: 127023 - DNA, 556 bp, Homo sapiens
gaccatatattcacctctcttatggaaatttagctcctcctgatgaggttcctatctttccatcccattttcccacctttccccacacctccccaacattaccaccatatcctacgataacamatctctcatagagactcagtctttctgcttttctaccttggaaacaataacaaaagtagtaggctcccacttggttaaacaaatcttgcagcaagacaaagatattcttaggaaatgttctgggtgttttgctgggtcacatcttccagcttttaaattctcttttcaaaaaattgtttggctgaggtttcatttacataccattaaattttcccattataagtgtacaattcaatgacatttagtaaatttatttagtaaaatgatgcagccgtaatcacaatacagttttagaacatccaccacacccattaagttctcttgtgcctgtctgcagttaagaccttctttccccgccatcccaccgcagcctcaggccactaccaatttgcattttctggagctttttatataagtggaatcatactataag

SEQ ID NO: 127024 - DNA, 668 bp, Homo sapiens
tgatgatggtaatcatttcacaacatatgcatacatcaaaatatcacatcatacaccttaaataatacaatttaaatttcagttatacctcaataaagctataaaataagataaaatagccaatgcaaatacattctagcttcatactttatttctacatattacttttatgctataaaattatctttatttttaatttttgtcatttacccacttaaatccatttgcccctctaagaacgtgggctgggtgtggtggctcacgcctgtaatccttgcactttgggaggccgaggagggcagatcacctgaagttaggagttcgagaccagcctggccaacatggcaaaaccctgtctctactaaatatataaaaattagccaggcatggtggctggcacctgtaatcccagctactcgggaggctggggcaggagaatcacttgaatctgggaggcagaggttgcagtgagccgagatcatgccactgcactccagcctgggcaacagagcaagactctgtctcaaaaaaaaaaaaaaaaagtgaatttcaggagagcagggacccttttgattttgctcattgccayatctttagaagttataacaatgactagctcaaagactcaccaaattcaaaattgttgaattgataaatgtttaaataac

SEQ ID NO: 127025 - DNA, 481 bp, Homo sapiens
ctccaactgcatccatgttactgcaaagaacataatttcattctttcttatggctgcatagtattctatagtgtacatgtaccacatttactatttttaattgaatctaaaaaattttttaaatggtttcaattaaattgtgacatgcccttttatcaagatttttattgtgtgcttactgaaatatacctttttgatttattyagacatgtactcaactatgtataatttttgtacatacaaaaagaaatatgtaagcaaaacaaatcatttaaggtatttctaaaatttcttcacatttacatttgtgttcagtcactttaactcagtggcacaaatatctgtttttctatccagtatcatcccatgtaccataaagaaagtttgtgatgcagcatttttaaaaagtgcttcattattaacctctgggattttcttacaaattgctgacactggctcaacagattttaatgctggctat

SEQ ID NO: 127026 - DNA, 647 bp, Homo sapiens
ctaccaaattgtcaaatgaaaattcagaaattaaccagctgaccagaaaatctttacaagattattattggcaaataaggtaggttttgagccattcatgttcatcaagcattcattaagtaacttctttagacaaagtactgcacttgctatggaagataaagaaaagtacacaatccttactttttaggcgattacagaaatggtttcaatcttttttaagacccacgtttgtgtaaaaatatttcacaggggtgccatgtgaaaatagttctagttttaacatccattgatttgttttaaaaagttgaagwactatgagttcatgagtactttgaaattgacttggattatattgatctgaagtgttagtatatatttgagaattagtgcacatttacacatgtgcaagatatattattatttcagtctaaagacaatatttcacaagtagtgaatttaaggacccctgtaaaaagcatggtctacaagttgggagccattggcttatagactggaaagcgaagttatgaaagtatgaaataactgggaaagtaattccaagacaaaacatattcatgtgtcacagaatctctaaaagcaggaaaattcactggaaggtattcataatcagaagacagccttca

SEQ ID NO: 127027 - DNA, 519 bp, Homo sapiens
ctaaattagatttccaatcaaatatcaatcaaaaatcagagttgactaaagatgttttcagataatcatgtttttaaaatgacccctcagaaaattactagagaatgaaaggatataccaggaaagaatacacggactttcagaaggcacagaaacaaccacaagagagatgagtaaaatttttagcatggtggaagaggggagcctcagcataatatttattcactaggcatagggactcacaagccttcatgagaattcagagagagagttcaggggggaaaacaaatggaactgatacattacttaatgtatttgaccgtatttaatggaattttacacattcttacataatgtttgaagaaaaaaattaatgataggtgtatataaaactagcaactggaaagcttagataattatatactatgttttacaacaatttccttataaaayggtttagctgaggataatgcttatgcttaaaaattccagaaacatcaatataggaaaaatgaaaga

SEQ ID NO: 127028 - DNA, 518 bp, Homo sapiens
gtttgcaccactgcaccccagcctgggcgacaagagcgaaactccatctcagaaaaaaaaaaaaaaaaagttttaaatgtaagatctcaaactataagaatcctgtaagaaamcctcagaaagattattctggacatgggccctaggaaataattttaattctagttaattttctgacattcatttgttggatgatcttcacaaaatctcttatttcctcaactgaactctatatttctgcctacctctcataatcattgttatgatcagatgaaattattgtctgaagagagcttgaaaactatacagttatatacacaggaaacataaccattatttcctgattaattagatttcctgtaagttgtgaaagacatattgaaggctttctttgttttaaatctgagaagattgtatttgttcttggctatataagttaagaaaattgttcacttccctagcatatgtttgcctctggactctttcaacaaatttttccatttcaagtagcactaaaa

SEQ ID NO: 127029 - DNA, 518 bp, Homo sapiens
gtttgcaccactgcaccccagcctgggcgacaagagcgaaactccatctcagaaaaaaaaaaaaaaaaagttttaaatgtaagatctcaaactataagaatcctgtaagaaaacctcagaaagattattctggacatgggccctaggaaataattttaattctagttaattttctgacattcatttgttggatgatcttcacaaaatctcttatttcctcaactgaactctrtatttctgcctacctctcataatcattgttatgatcagatgaaattattgtctgaagagagcttgaaaactatacagttatatacacaggaaacataaccattatttcctgattaattagatttcctgtaagttgtgaaagacatattgaaggctttctttgttttaaatctgagaagattgtatttgttcttggctatataagttaagaaaattgttcacttccctagcatatgtttgcctctggactctttcaacaaatttttccatttcaagtagcactaaaa

SEQ ID NO: 127030 - DNA, 556 bp, Homo sapiens
gtagtataatttgaagtcaggcaatgtgattcctccagttctgttcttctttctcaggatagctttggctattctgggtcttttgggatttcatataagttttaggattgttttttctatttctatgaaaaatgcctttggtattttgataaggattgtattgaatctgtagatttctttgagtagtatggacattgcaacaatattgattcttccaatccatgaacatggaatatctttccmttttttgtgtgtccttgtgaatttctttcatcagagttttatagcgttcattgcagatatcttttacttttttggttaagtcatttcctaggtatgtaactttatttgtggctattataaatggtaatttttaaatttccttttcagattgttcattgttggcatatagaaatgctactgattttcatatgttaattttctatcctgcaactttcttgaattcgtttatcagttctaaagttttttgatgaagtcattagatttttccaaatataagatcatatcatctacaaagataatttggataatttga

SEQ ID NO: 127031 - DNA, 600 bp, Homo sapiens
cattttattcccttctaagccaatatgaaaatcacttctatcagttgataacttgctgaaaaattatttgtctgcactggcaatagtcttaatatgttcctcagtccaccatgttttgtaagccgtttatttttagtcgtgaaatgaatggccctgcctctagctaaagacacttgaagaggcaactggaagttgaggggcctatcatttaccaatgctgtcataccctaatgcctccaaaggcaagagtaacctgtgtcctcaggttcattgctctgcttcctcttcctgaacacagatcaagacttgcccatcaaatgccctcctaccatttgttactaagggcattattgagtatatgctcagagaaaccaccacattctggcagaatgctactttaacacaattagcatctatcagagtgttggttgactctttaatcagagctcttatctgttcagttacacaaaccagaaatccactaccttttcttttactcctatttaaccaattttcaagtcctgttaatgcaacctcctaatttctctctccaaactctctccattgcyactgttcttgttccatgatcccttgcttagt

SEQ ID NO: 127032 - DNA, 615 bp, Homo sapiens
atgaagcacatacgaggccttgtgccagaatccttgtgcatcttccttcctgtcaagtagcaatgtgtatgacatgctgtagggtgtgcctgtgtggctctccctgcacccaccaagttgttccagctatgaagtaaacaaaagcgacaccgcagccagcaggaaacgagccgccaggccattccagagacacttgaaactcctgatgaggcataaagagttaagcaagtttgagggcttccttgtgaggggaaatggaagacagtgaaaaggatggaacatactagtttagtggtaaggaggccacttactgagtttaatgccagtccaacttaaaactagagcagcttctcaacctcagtactgtgctactcayggacgtttctccatcgtggaaggctgtccatgatggagaaacacgttgaaggatgtgtagcagcatccttggtctctacccactagatgccagtagtatccctcctcccccagtgtgacaaccaaaaacatctccagaacattgccaatgtgccctggtgacatttttgtgccctcattgagaaccactgccttagagtgaggcaggaactcaagtggtcaggaattatgggtttggtt

SEQ ID NO: 127033 - DNA, 545 bp, Homo sapiens
cagctcctcccttcccactccaaatttccccactccagaagcaaccttcacagtgttaggcacttctgacatctgctttcatgtttctaagtaacagtctgatgctcctatggaagatgagaatttagctctcatacctcctaaccattcatatacccaaacttacttatttacatacttttctcatcctccaagagtttatatcttaaatattggtcagaattyatggtttacatttttgttactatgtaaatattattcacagcagggacatgtggtatgctatgatgacattttctttctttcacaacttttgtttaccctggagttatttattaactatctctatttttatttgcttagcttcctattaatctattctaaattcatccctaaactgtaccagagtagtaaatctcctgtttctatatgcagacacctcaggtaaccatcagtttcatcttctccttggagatatctgctcctggagccatccctccttctgttcccatctggacgggttgattgccgtgtttcctgaacag

SEQ ID NO: 127034 - DNA, 621 bp, Homo sapiens
agaaatccagtaccttttaaaatttccaatccttttcttggtcctgctttttttctgtcttgatacttttaagatcttctccctgttcctagtgatcttttatttggctctctttttattctgttcgctaggtatgtggttagaccctgtcaatctgaaattagtgcccttcagtttagggaaattttcatgttaattttttctttgataatgtcattctttccttttttgtgcattccttctgaaatttttattagtcagatattggaattcctcaaacagtactctaatttttatatattttctcttctttacttttcctctcttttctgataaacctccttaatcatctaaattttctgttgaaacttacatgttgctatcatattctaatttccaaaagctcttttttattcctcaaaatgtcccttttatagcttgttttcttgtttttggatgcaatgccttctattttctctctgargatatcaattttagttttatttatcttcttttcctattttttcttttttctttctttcctctttttttcttttctccactcagttgctttctttgcttttccagtaggtagtttgtttttttttcatggtccctgaa

SEQ ID NO: 127035 - DNA, 513 bp, Homo sapiens
aaagaaccagaataggaactctggcaactcaaaaacccagagtgtcttcttacctccaaatgaccacactagcttcccagcaatggttcttaaccaggctgaaatggctgaagtgagatatagaattcagaatctggattgcaatggagatcactgagattcaggagaaagtcaaaactgaatccaaaaaatctaaaaaatccaataaaatgatacaagagctgaaagatgaaacagtcattttaagaaagaaccaaactgatctgatagagttgaaaaactcactacaaaaatttcgtgatacaatctggaagtattaacagcagaayagatcaagctgaggaaagaatctcagagctcgaaggctagttctttgaatcaagtcaatcagacaaacatagggaaaaaagaatacaatgtaatgaagaaaacctctgagaaatatgagattacgtaaaaagaccaaatctatgactcgctggcattcttgaaaggagagagagagcacaagca

SEQ ID NO: 127036 - DNA, 569 bp, Homo sapiens
taataaagggcaaaggtttttctttttaaagtaaagggccaggtaaacaaaaccagctgcccctggagccaacaaactctcctcattaaatgttttaaaagcctaatgggcataagtggctaattgtagtacaatcctgaagactgaatctaggggcctgatgaagggggtcagtgggacgggaatggggttaaaacttggctgacagagacaggaaggaggtgagctctgctcctggcagaggacctctaaatggccagaatgaaattaaaataagagtaagatgctttgactgggagtctgtaatcttgctaacagtatccctgtgagatgggcttggatgtctcatttggagcaattttaagtttaaatgctagttgaataggatctggartacaggtttattaaaaaactaattaggggaaattttatgtttatttactatgaaaaactggaagagtatgcagcaaaatgttgcaatgagcttctctaggtgttgtgcttattatactgtaggtgattttccattttcctatttctattttgttcatgttcattctctaattcgt

SEQ ID NO: 127037 - DNA, 621 bp, Homo sapiens
aatcaaccatttcacttatttctctggatttctaaatgtttcattacaggaagggtgttgggtacaagttctttaacatggtcatgaatgatgttgagaaagattcttttcccataacrttttattatggaaattttcaaatgtgtacagaggtagagaaaggaacctaatgaacccttatgcccaccatccatctttaacaattagctacatggtgccaaatttgttcacctataccttcttcccagcctcttacccatctagatcataagaaagaatttagaagaatttaaaatggcaaaacttcatgctgtgttaaagaaaaaaaaaaaaacaggagaagatagtatttattgaatctcttctttatttatttggtacttattcttgaactatagatctcaatctgttttattatcacagaaaccttacaacttaatctttttgaatgctgccaaatctattttaaataaagctttgatttgcatttttatttttgttgcccaaagctttacaaatagtctgatagtttcaacagtttgtataccttatgcatcatcttgtgtatacaatgtgattcatatcacatacaatgtgatttggttgcaactgataaaacac

SEQ ID NO: 127038 - DNA, 616 bp, Homo sapiens
tatagctgagttgtatgaatatttttgaaagcctagttaaaacttcactacttctgtgactgggtcctgaaaatcaaaacaagtcgaccaatcatcaggaaagcctggacacattgctgaccaaactggatcattgaattattgattcagatgctacccaattaatcgttaagttagctgaaaataccagacggatcatcccgtgactaacagattttgactgcgttgcatgggctgtgtggtccatatgtgggggcctgaacatttgcagattgacaggactggctgggcatgatgaaaatcattgcaagaaacatcgcaggccattcacaacttactatgtatcaacgcagtggcagagacatgttgtgaagtcctggctaaactgcttgacttgattcaagcagcagtaataatgaagcaagtaattcattagaagttacagtctgcttttaagaactctgtatggaagtttttcaaactgtgcttggacagggcttcttgcaattcttgcttattattttacttaactcaagtataattggctgtcttattgatttggaatggcctaaagcagttcccmgcatctgaacaagcccagttgaagatggtaagt

SEQ ID NO: 127039 - DNA, 565 bp, Homo sapiens
agaggttgaagggcatacaaaatccagtatataaaacatactggtctatttagaaagtttaccctggacaagaaaaaaatgccttcaagatagctactttattaagaaatgggggtggccaagtaagaggcctaaggaggaagtaggtatgtttatcagtttaggatgtgtctttttcagggcttaagtcatcttaaataaaagctaaaataatgtagtgtactgtaatttagatatcgaggctgcatgaataaaatgaaagaatataagttataaaatgcagtttctgctttaagatctccattattgagttatcctcatctttgttttttkttggctaatggacataagctaaagagtgctgtttgttaattattctaggaagtgcgctggagaaatccttagctgtcagccaaggtggagagctctatgaagagtggctggaacttagaaacggttgcctctgctgttcagtgaagtgaggaatgtgtttactgtgtacatggtttactagaaatgtttattgattatatttccagctttaattttcttgagtaatttaact

SEQ ID NO: 127040 - DNA, 579 bp, Homo sapiens
gacagtgccagtccaatacaacctaatttgtcacctaatactaaaatccacctaaggactatattcagtctcttcctgatacagccttcctttctggtttcagctgtgtcaggtagtttagtaacttttcagtactggttaggtaactccccgccccccaatgcccaccaaatatcagtgcccttttaagcatataagacaaagttcactgcatagactacaatagactacatatgaaaacaaacccaaagaaaaataaagcttttttgaaatttagagtttctgactttcaaaactgtccttatttactacattggaatttatgagcaaacatttggatagcaaaatacaaagagaacaaatgtgtaagtacttcttcaaactgagactcaacgaatgatacatagaaaacattttgccccagaggcttcggtccacggtgtaccatgtcagcctttcggatgaactcctctgartttctgaatgtttatgacatacattttcatatagaacaaaaatatactggtttcacacaaacataaataaaatgtaatgaaagcatctcagattttcagcatt

SEQ ID NO: 127041 - DNA, 550 bp, Homo sapiens
tcttaaacaagttcatgaggcagaaggagcacttgtgcaaaggcagggagacaggggacaccgcaacttatcctgagaactagaagaaygatgggagcccgggggtgcggagtgaagtgagtagcaaaaatacagccttggaggtgggcagggtctgagtgtgatcaagcttgatctcacaggctgttgacacccgcacacggcgattgctgtttctgtatctaggtcatagtctcttgggggaggccttgccaccggctgtccacagtgagggtgctgctgatcccagtagaacatggcagcagagggtggggaacattatgtctcctagacctggcaccgtcagctccacctttctcaacctgagctcacatattggacactaatgcaaaatacatagttctttagggaaaaatttaggcaattttcccaaagtcatatctcacggagagaaaaataaattacggggacagagagtcaagagatgattgtgtagtgtggtcatttttgtccctcatttgagtgcctacgtgcctctggtcactgcctc

SEQ ID NO: 127042 - DNA, 550 bp, Homo sapiens
tcttaaacaagttcatgaggcagaaggagcacttgtgcaaaggcagggagacaggggacaccgcaacttatcctgagaactagaagaatgatgggagcccgggggtgcggagtgaagtgagtagcaaaaatacagccttggaggtgggcagggtctgagtgtgatcragcttgatctcacaggctgttgacacccgcacacggcgattgctgtttctgtatctaggtcatagtctcttgggggaggccttgccaccggctgtccacagtgagggtgctgctgatcccagtagaacatggcagcagagggtggggaacattatgtctcctagacctggcaccgtcagctccacctttctcaacctgagctcacatattggacactaatgcaaaatacatagttctttagggaaaaatttaggcaattttcccaaagtcatatctcacggagagaaaaataaattacggggacagagagtcaagagatgattgtgtagtgtggtcatttttgtccctcatttgagtgcctacgtgcctctggtcactgcctc

SEQ ID NO: 127043 - DNA, 357 bp, Homo sapiens
acaagaacaacaaggttgtggaattcagaagccatagagacaagaggtaacacacctgagaaagatgatccctaagtttgtcttggagaaaactcagaagtacctgactacatcrtagacctcccaaacagcttccaaatgtcagataccactgaacatggggataaaggtagggtcaaaaataggaggattgggttataagtctgtataagaagttgttagatccctacatcctctcttcaaacctgtatagccagataatggtccctctcccagcctggcagaggctggataaggtaaatagagaaagttacctcctggagaacatttggcacatttggggatggagttcagtaa

SEQ ID NO: 127044 - DNA, 375 bp, Homo sapiens
cttggcagcttccacatggctttgagcctgygggtgcacagaagtcaagaattgaggtttgggaaactccgcctagatatcagaagatgtagaagtttgcggtaggggtgggtccctcatggagaacctctgctagggcagtgtgaaagggaaatgtgagattggagcccccaaacagagtccctactggggcaccatctagtggagcagtgagaagagggccactgttctttagaccccagaatggtagatccatggacggcttgcactgtgcacctagaaaaaccacagacactcaatgccagcccgtgaaagcaacctggagagaggctgtaccctgcaaaacctcaggggcagagctgcccaagaccatag

SEQ ID NO: 127045 - DNA, 375 bp, Homo sapiens
cttggcagcttccacatggctttgagcctgtgggtgcacagaagtcaagaattgaggtttgggaaactccgcctagatatcagaagatgtagaagtttgckgtaggggtgggtccctcatggagaacctctgctagggcagtgtgaaagggaaatgtgagattggagcccccaaacagagtccctactggggcaccatctagtggagcagtgagaagagggccactgttctttagaccccagaatggtagatccatggacggcttgcactgtgcacctagaaaaaccacagacactcaatgccagcccgtgaaagcaacctggagagaggctgtaccctgcaaaacctcaggggcagagctgcccaagaccatag

SEQ ID NO: 127046 - DNA, 375 bp, Homo sapiens
cttggcagcttccacatggctttgagcctgtgggtgcacagaagtcaagaattgaggtttgggaaactccgcctagatatcagaagatgtagaagtttgcggtaggggtgggtccctcatggagaacctctgctagggcagtgtgaaagggaaatgtgagattggagcccccaaacagagtccctactggggcaccatctagtggagcagtgagaagagggccactgttctttagaccccagaatggtagatccatggacggcttgcactgtgcacctagaaaarccacagacactcaatgccagcccgtgaaagcaacctggagagaggctgtaccctgcaaaacctcaggggcagagctgcccaagaccatag

SEQ ID NO: 127047 - DNA, 375 bp, Homo sapiens
cttggcagcttccacatggctttgagcctgtgggtgcacagaagtcaagaattgaggtttgggaaactccgcctagatatcagaagatgtagaagtttgcggtaggggtgggtccctcatggagaacctctgctagggcagtgtgaaagggaaatgtgagattggagcccccaaacagagtccctactggggcaccatctagtggagcagtgagaagagggccactgttctttagaccccagaatggtagatccatggacggcttgcactgtgcacctagaaaaaccacagacactcaatgccagccygtgaaagcaacctggagagaggctgtaccctgcaaaacctcaggggcagagctgcccaagaccatag

SEQ ID NO: 127048 - DNA, 501 bp, Homo sapiens
accccttgcatcagcatgacctggatgtgagacatggaggcaaaggagatcattttggagctttaagatttgactgtcccactggatttcagactttcatggggcctgtttcccctttgttttggccaatttctcccatttgggatggctgtatttaccaaatgctgtacccccattatatctaggaagtaactaactcgcttttgattttacagscccgtaggtggaagggacttgccttgtctcggatgagactttggactttggactgtggacttttgagttaacgctgaaatgaattaatactaaaatgaattaagactttgggagacggttgggaagccatgactcattttaaaatgtgagaacatgagatttgggaggggctggggtggaatggtatggtttggctgtgtccccacccaaatctcatcttggattcccatgtattgtgggagggacccagtgggaggtagttgaatcatgggggcaggcctttct

SEQ ID NO: 127049 - DNA, 501 bp, Homo sapiens
accccttgcatcagcatgacctggatgtgagacatggaggcaaaggagatcattttggagctttaagatttgactgtcccactggatttcagactttcatggggcctgtttcccctttgttttggccaatttctcccatttgggatggctgtatttaccaaatgctgtacccccattatatctaggaagtaactaactcgcttttgattttacagccccgtaggtggaagggacttgccttgtctyggatgagactttggactttggactgtggacttttgagttaacgctgaaatgaattaatactaaaatgaattaagactttgggagacggttgggaagccatgactcattttaaaatgtgagaacatgagatttgggaggggctggggtggaatggtatggtttggctgtgtccccacccaaatctcatcttggattcccatgtattgtgggagggacccagtgggaggtagttgaatcatgggggcaggcctttct

SEQ ID NO: 127050 - DNA, 501 bp, Homo sapiens
accccttgcatcagcatgacctggatgtgagacatggaggcaaaggagatcattttggagctttaagatttgactgtcccactggatttcagactttcatggggcctgtttcccctttgttttggccaatttctcccatttgggatggctgtatttaccaaatgctgtacccccattatatctaggaagtaactaactcgcttttgattttacagccccgtaggtggaagggacttgccttgtctcggatgagactttggactttggactgtggacttttgagttaaygctgaaatgaattaatactaaaatgaattaagactttgggagacggttgggaagccatgactcattttaaaatgtgagaacatgagatttgggaggggctggggtggaatggtatggtttggctgtgtccccacccaaatctcatcttggattcccatgtattgtgggagggacccagtgggaggtagttgaatcatgggggcaggcctttct

SEQ ID NO: 127051 - DNA, 501 bp, Homo sapiens
accccttgcatcagcatgacctggatgtgagacatggaggcaaaggagatcattttggagctttaagatttgactgtcccactggatttcagactttcatggggcctgtttcccctttgttttggccaatttctcccatttgggatggctgtatttaccaaatgctgtacccccattatatctaggaagtaactaactcgcttttgattttacagccccgtaggtggaagggacttgccttgtctcggatgagactttggactttggactgtggacttttgagttaacgctgaaatgaattaatactaaaatgaattaagactttgggagacggttgggaagccatgactcattttaaaatgtgagaacatgagatttgggargggctggggtggaatggtatggtttggctgtgtccccacccaaatctcatcttggattcccatgtattgtgggagggacccagtgggaggtagttgaatcatgggggcaggcctttct

SEQ ID NO: 127052 - DNA, 622 bp, Homo sapiens
tttattgccaaataattttccattgtacggatagatcatattttgtttatccatttgtcacattttagttgtctatcagttgatagatatttgtggtgcatttaatttttggccaatgtgtaaaacttattttgctgtcactgaggctacatactgttacaacaatgctatttrgtcaacttgactgagctggcctcataggttacaggctgctcattgttagagatgagactttagaccagactggacaacatagtgagaccctgtctctaccaaaaggaaaaagaaaaattagccagatgtaatggcatatgactggagtcccagctacttgggaggctgagatgggaggatcacctgagcccaggagtttaggactgcagtgagctgtgatcgtgccaatgcaatccatgctgggcgacagagtgagaccctgtctcaaaaaacagaaagagggattttagtataacattcagccagtgccatattgggaacccacaagaatgtactttaaaaaatatgtcaaagaaggtggtgagggctgtaatagctgctattcaggcagtaatgcagtgctgaagggacatcaagcaaatagtgtgatgcctgtgggtgcaatgtt

SEQ ID NO: 127053 - DNA, 554 bp, Homo sapiens
attcaagacctgatttctcagaccgagtgtatgtgtgaatataatatactcatttgcacaaatataaaccctctgtcttaactgtgttctgcaaaaggcgtgataaatactttcaagttatatgtccttatcagtagaactaatggaatacacacagtatattttatggggaatttcagagaaggaaggaaaagtcaaccttttatttggcatcaggatagtagtaaaacattctacttgtgcatcagatagatttttatgacctaacctggacaagtaacttaactcttggtgcctcatgtttgaaagagggataacactctacagggtcattctaagaattaaatattgccaaaacacatgaaaagattctcaaccttgttagtaatcaaggaaatgcaaatgaagatcacaatgaagtcttcttttgtacwcaattgattggtgaaaaatgcatgcctgataatattgacctacagaccaatgagatctcttataatttgctgggaaaatgtatcaatttgtacaaacattttgaaaaataattgtgcatt

SEQ ID NO: 127054 - DNA, 567 bp, Homo sapiens
tgtttacgagcattctgaatggtttaatcttgctgtgcagcatatgattttaattttctttatggatatagggggcaatgaaatgctgacttttgatataataatctttcaggtttaggaggaactataggaggccagtcagtccccaagcctgccctcttaaatctctacttataaagttctcagtgatagatgtaagcttaaaaaaaaattatacctcacattatatagtatgtcttttatctttgatttgaatgaaccctttcagttgactactcaggcttgcaaaatcagggaaaacctgtaaaatggaggcacatatcttatttacaaaataatgactcctttctttggaacagaatagagtattccaaagaaaattcaatttcattatttactatatacaaaacttaaggaatagtcatctttatattgaaacttatatgtaaacatacttcaaagcaagtgctaaattggtcatttcttaggaattgctaaagcagatttgcttacaataaaaaaagaaaaacgtttgaattgsctctagttattgtaagttaattgatc

SEQ ID NO: 127055 - DNA, 584 bp, Homo sapiens
ttgtttatttgtttaggataccgcatatctacatagtacttcctagaggcaaactcatctattgagtattcattctgggttataattttggtatcgataaatctaatctttgtcagaaatataaataaatagaagagtcakatttagtttttattgatttctaagcatttccttaaaatgtgggaagaaaatagaagagccatagaaatatgctggaggaaaattgaacatattcttttggaggaattcaaaagctagtgagatattttgctcgaaaaaatagcaaaatattacatgagtccacatgaatatttaacagactgatatattctattgaagtttaacaagcagcttcacatcccttcagtctttccactcctgactgcactaacacctgttttactcaattctgaaataaaacgtacatcagattttcttactggattgtaaacatgttcaaaggcagtccagggtgaggatgtgttcctggtgcaaattgctttttaatatttctagacatatgaacctcccctcagccatcctcctcacaacttcatattaacctaaggatctgactacaacaa

SEQ ID NO: 127056 - DNA, 403 bp, Homo sapiens
catcctcagatctcatttctatacatagtctcctggytctagcccatatatgttggcttgttctgtagcttttgttggcttttagttccttttcttccttagcaaaactggcatttccccaacctggctgtgttagttatgtatcttatgaccaggagggaaaatgggaatagattccaaggaagtttatgttttctttcaaggcagatgactccacatcatgttcaagccagggtagggaagggtctggcctttaatagggaagaatgaaccacttcagccctctaagagagttgagaaggatctggagtcttgatgattttcaaatgaactcatctgaattctcagggtcttcttccttcataatcaggaccttgatttttttgtaagatattggattggg

SEQ ID NO: 127057 - DNA, 576 bp, Homo sapiens
atttatgtggaatatcttttttccacctctttacattaagtttatgtgagtccatgtgttaggtgagtctcttgaagacatgagccatccaccaagacaccacttgtttggtggatttgtatccattctgccattttgtattttttaagtggagattttaggccatttacattcacgttagaattgagatgtgaggtactgtgctattcctcatgttaattgttgccttaacacctttgtttttttctgttgtgttaatgctttctaagccctatgagatttayactttaaaggggttttattttggtgtatttccatgttttgtttcaagatttagaattccttttagcagttcttgtacagctgagtttgtagaggcaaattctctcaacatttgtttgtctgaaagagactttatcttttcctcacttatgaaacttaattttgctggatacaaaatccctggctaacaattattttgtttcaggaggctaaagatgggaccccattcccttctggcttgcaaggtttctgctgagaagtctgctgttaatctgatagttttcctttataggt

SEQ ID NO: 127058 - DNA, 579 bp, Homo sapiens
tggtgatagtcactttataatgatgtgaatttggaattactatttttctgcactatttaattaatgcaatgattcttcttttgcttgctttccatgacaaactgacccatttttactatacctttaggtaaataatttaataaaaatgagaaagtggtttttctggttcctatttctctgttatgagcatacaaatattacgttttctaccataattattgtcattttattttcaggcttctctacataattagatgttattagaatacttatagattagaattacacaatagaactttctgtaactgttgctaataactcacaaccttgggtaatttttcyctcccactattgacactttcagttgtttctgatctggtatgagtttggaaaaatgctagggaaaaggggaatgttctattttctattttctattcagtatacagcctgtagatccctttgaaaaaaaatcaataaaatttctataaagattcaaagataatttacagaaaatataatgctaccttttatgataaaaaaatacttttaagagccattactcctgctaaatatgctgaa

SEQ ID NO: 127059 - DNA, 579 bp, Homo sapiens
tggtgatagtcactttataatgatgtgaatttggaattactatttttctgcactatttaattaatgcaatgattcttcttttgcttgctttccatgacaaactgacccatttttactatacctttaggtaaataatttaataaaaatgagaaagtggtttttctggttcctatttctctgttatgagcatacaaatattacgttttctaccataattattgtcattttattttcaggcttctctacataattagatgttattagaatacttatagattagaattacacaatagaactttctgtaactgttgctaataactcacaaccttgggtaatttttccctcccactattgacactttcagttgtttctgatctggtrtgagtttggaaaaatgctagggaaaaggggaatgttctattttctattttctattcagtatacagcctgtagatccctttgaaaaaaaatcaataaaatttctataaagattcaaagataatttacagaaaatataatgctaccttttatgataaaaaaatacttttaagagccattactcctgctaaatatgctgaa

SEQ ID NO: 127060 - DNA, 579 bp, Homo sapiens
tggtgatagtcactttataatgatgtgaatttggaattactatttttctgcactatttaattaatgcaatgattcttcttttgcttgctttccatgacaaactgacccatttttactatacctttaggtaaataatttaataaaaatgagaaagtggtttttctggttcctatttctctgttatgagcatacaaatattacgttttctaccataattattgtcattttattttcaggcttctctacataattagatgttattagaatacttatagattagaattacacaatagaactttctgtaactgttgctaataactcacaaccttgggtaatttttccctcccactattgacactttcagttgtttctgatctggtatgagtttggaaaaatgctagggaaaaggggaatgttctattttctattttctattcagtatacagcctgtagatccctttgaaaaaaaatcaataaaatttctataaagattcaaagataatttacagaaaatakaatgctaccttttatgataaaaaaatacttttaagagccattactcctgctaaatatgctgaa

SEQ ID NO: 127061 - DNA, 579 bp, Homo sapiens
tggtgatagtcactttataatgatgtgaatttggaattactatttttctgcactatttaattaatgcaatgattcttcttttgcttgctttccatgacaaactgacccatttttactatacctttaggtaaataatttaataaaaatgagaaagtggtttttctggttcctatttctctgttatgagcatacaaatattacgttttctaccataattattgtcattttattttcaggcttctctacataattagatgttattagaatacttatagattagaattacacaatagaactttctgtaactgttgctaataactcacaaccttgggtaatttttccctcccactattgacactttcagttgtttctgatctggtatgagtttggaaaaatgctagggaaaaggggaatgttctattttctattttctattcagtatacagcctgtagatccctttgaaaaaaaatcaataaaatttctataaagattcaaagataatttacagaaaatataatgctaccttttatgwtaaaaaaatacttttaagagccattactcctgctaaatatgctgaa

SEQ ID NO: 127062 - DNA, 562 bp, Homo sapiens
actacaaagatagaaagttatgtaccccataaatatctatctatctagctagctagctagctagctagctacacacacacacacacacacacacacacacacacacacacacacayacatacatacacacacactaggtatccacaaaattaaacataaaaagttttaaaaaacaaaaatagatggatagtaagatgagagagagagttaaagagagagagacagagagacagataatttttgtttgcttttgtaaaaatagaaaagtaatataaatgaattatttaaaattaaaaggtatacttcttgtgacaatggacttttttgcatttcatttaaaattaaatacctttaatctctaataataaatattcgaggtagtgtttatatacaataatcatctttggacctgatttaaactttcctaatagagtcaaggttctatgcttcacaacaagagacaagatatttcttagatgtgaaactcaaatatattaaaatactagttagtataaatgtagacatctggaccttaggataaaacaattcccagtgcaggagg

SEQ ID NO: 127063 - DNA, 515 bp, Homo sapiens
tctgtatacaagggtggaaacataactcaagcccccaagccactgtaattagactggaaataatgaagggcaaagccaagtcagtaaaatcccttccttgcagcgttttatagtgatgttgagagaaggatcatccttcttctctcctggatttctatttgtgataacattagctaattctgctctgacaccatattcctcctccacttgccgcattaaaaaaaaaaaaatccacagtaaaacagaaagaggctacagtttggtgatggggtccacagttcagttgtgcatgcctgagtctagtttcatctgaggatttggcaataaattgatttgagtttagtgactcttatttgcaacctgaaaatgtctaattaatgaattcatgcttagaggatgaaaaaaatagaaggaaagtcatatttgcatkagaattcgaagaataaatagtattcaaatgagaattattccattgcaagacaagataaaagctatgtgtcaggctgactatatat

SEQ ID NO: 127064 - DNA, 528 bp, Homo sapiens
tatgccttatgtatgttaaatttaatactttcttccgtaggaaaagtgaatgattaaagtgtgacttaaatgtatgtgactgaggcaaaggacatattgctaggtaaatcttgtagatgccaagaattgaagcagaggctttataggtaaactagcagttgaatttctcaagttctcttggaaacatttgtagaaaaaatatttttgaacatttaacgaagcagtatgagcatacctaagtcactcagctgtctgagatgatgttagaatatttctctcgctgtaaaggaaaacgagcaagcagacactttctctagcccatcttcccagccgccagtgtccaagactcttaataacctctgtttgatttgttacttggaggaggaatttgctcatgtgtcatgactgtcagaagccctttttggcaactgtatcagtaattagctatgccttgtttgtgctcaaggcaagtktatctgtcacattgatttttaaaagttctagtttttattcttgttttcatttcaa

SEQ ID NO: 127065 - DNA, 605 bp, Homo sapiens
aaacccagtgttgacacttaagccacagtccacaacaatatactttcaacaacgcagctgatgtcttgatctccatctgcaggacttcataagttctatattaaggcagggtaagaaaggggtgtcatctattgggccctatgggaaggggccagaccatgcgagaccttatcagccatctgctctttctccactctctggcccatagttaggtgtttctgtttggaggtaggatcaagtgccgaatattaaatatttttaatacaactctgtttttcttttattgttggtgggctaggggtgggggaaatgagtccagaaacctctttaatatcgaagggtccggggattcaattatrcttgtctctgacagaaagtcaattttaaaagaatacatcaacagtttaaatggtagtgctggcttttttctgcagtgagaaattttgaattctctagtttggtctctttgagcccagccagcctggtagattttggcccaaagcatgagggaccccatcacccatttacccctacttgaattgcaaatggcacgaggctttcaattcttttgcagttcatttttgaaaggacacaccttccatctc

SEQ ID NO: 127066 - DNA, 605 bp, Homo sapiens
aaacccagtgttgacacttaagccacagtccacaacaatatactttcaacaacgcagctgatgtcttgatctccatctgcaggacttcataagttctatattaaggcagggtaagaaaggggtgtcatctattgggccctatgggaaggggccagaccatgcgagaccttatcagccatctgctctttctccactctctggcccatagttaggtgtttctgtttggaggtaggatcaagtgccgaatattaaatatttttaatacaactctgtttttcttttattgttggtgggctaggggtgggggaaatgagtccagaaacctctttaatatcgaagggtccggggattcaattatgcttgtctctgacagaaagtcaattttaaaagaatacatcaacagtttaaatggtagtgctggcttttttctgcagtgagaaattttgaattctctagtttggtctctttgagcccagccagcctggtagattttggcccaaagcatgagggaccccatcacccatttacccctacttgaaytgcaaatggcacgaggctttcaattcttttgcagttcatttttgaaaggacacaccttccatctc

SEQ ID NO: 127067 - DNA, 449 bp, Homo sapiens
gaattctagaagtgggaatgctgggttaaaaagtacgcacattttacatcttgatatatgtggccaagttgccctttggaaaggttgtctcagttcccagtttacactctttctgtcctctgtctgtgaygtcttcttgttgaacctttttcattttgattctgggtctcccattatgtcccccttgtgccctgaggtaaggccacctagatgcagaaggaagctggatgaacacatttttttttttaaattggtccacgagatcacaagctgccaggaaagtgttgccactgaaggcactttctgatgtggccgttgagggacctgttgcgccactgcagttcttcctgaagcagaaagggcgaactatgaagcatgaggaaggctgttgaaaagtgactttgatgaatgttaagcattgttctctccaggctgcagatcgaagcagc

SEQ ID NO: 127068 - DNA, 529 bp, Homo sapiens
tgaatttaatattaaataaaagaaactcattactcttcagtgtagtaggatgtatgtttctgcttcataaagcatcagtagcatttagcacaggctgctccacatataaagaagagcttatttacattttaagtgctacatttatagagaaaagttgtaagtatacattctttcatttttttgaggttatcatcatggattataactgtgcttctcagaaattattttttggtgccagcaytacatatagaatatgagagagataaaccaatgttttatttaggatgacatttcttaagttctaaatttttttatggctactatagtttgcatcctatttacaactacatacatatatttgagtatatacacacacagccatgcctacatatgtatgtccacacccacatacataaacacaagtttatatatgtacatatacatatattcatactaggggtatatttctgacactactgcttttcagtaaagagtgtcctaggaaagagatatcacaagttatttaatt

SEQ ID NO: 127069 - DNA, 505 bp, Homo sapiens
atgcctttccaatttgattttacttccttcacttctatacatatgtgcttctattaaaataggccatttttttccccaagcacaatttcaactttgacatctctatatcatctttgctaaaagaatgttctggactgtaaccatctatttgctattcactcttctttatgttgacttatcaataatccagccattcttcaaagtctacattaaatgcttccttctctaagaagtttttcttgatccttatacagaacaacatctcctggaataaagcactaacatttggcttatgtgacacatatcaaagtgtatttgatgtttatttatttatgtaattcttttctgtctacaactagaccgcaattttcttgcaggctagaagattagwcatttattttaatgacctgagtcattcagcaaaggctttgcttacagtaagagaaaaattatttttgtttttgcttgaacatagtcaatgggagagtaacatgtgacacatcac

SEQ ID NO: 127070 - DNA, 556 bp, Homo sapiens
ggtacctatctcatgaagttgcggtgagaacaatgtgtagcacaaattaagcccttgctaaatctattatcaccatcatcattattatygttatcatcatatattgtggtagtaacatcccacattgccatttcttgtctgttagctctacagatgtgttattcatctttctctgctctgtgcgccacgagcctggactgcaaacactgcatcacctgggctcccctgtcttctattttccagttgggtttgacagggagaggcagtagctggagaacagtggctagaaggaaaaaagatcagagtatttttttttttttcctatgtcctctcctctgttcctccactttggtcttggaagtagacttttcccttgactcatacagctcataatgtcagtctcttcttctactattctggctctccctgcaatccagtaatattatgtcctcgatttcccctttgaacagggtagcggtaatgattttccactgttgctggtgtctggtgaacctcaacatcacttgttggtttccttaaccctgctcatattgct

SEQ ID NO: 127071 - DNA, 556 bp, Homo sapiens
ggtacctatctcatgaagttgcggtgagaacaatgtgtagcacaaattaagcccttgctaaatctattatcaccatcatcattattattgttatcatcatatattgtggtagtaacatcccacattgccatttcttgtctgttagctctacagatgtgttattcatctttctctgctctgtgcgccacgagcctggactgcaaacactgcatcacctgggctcccctgtcttctattttccagttgggtttgacagggagaggcagtagctggagaacagtggctagaaggaaaaaagatcagagtatttttttttttttcctatgtcctctcctctgttcctccactttggtcttggaagtagacttttcccttgactcatacagctcataatgtcagtctcttcttctactattctggctctccctgcaatccagtaatattatgtcctcgatttcccctttgaacagggtagcggtaatgattttccactgttgctggtgtctggtgaacctcaacatcacttgwtggtttccttaaccctgctcatattgct

SEQ ID NO: 127072 - DNA, 674 bp, Homo sapiens
aataaatatggcacagtaaataacatcttaaattattctttttgtcccaataacattatagtgatggatgcaatataaaaaccagaaaccaaaaattacacagccagggtatttaatattgaaattttcacagaccaaggcagggagtggtgsctcacacctataatcccagaactttgggatgccaatgtgcgtggatcacttcagctcaggagttcaagaccagcctggtcaacatggttaaacctcatctctactaaaaatacaaaaattagccaggcatggtggctcatgcctatagtcccagctactcaggaggttgaggtgagaggatcacttgaacctgggaggcagaggttgcagtgagccaagatcacgctactgccctccagcctgagtgacagggcaaggctgtctcaatcaaaaaaaaaaattttttttcacagaccagaagtagaatagaaactccccaaagagatggaggcagaagccacagtgagattaatattggcagaggcatctgggagtttggttcttgaggggtagcagggcctggaggccaggaggtggaatgaaactccttgttttgtcaaaggactctgaaacacaattgtgcttgctactgagacttgggcatttatgagcctaggaagaacaggaagataaaggcaagt

SEQ ID NO: 127073 - DNA, 558 bp, Homo sapiens
ggagttcaagaccagcctggtcaacatggttaaacctcatctctactaaaaatacaaaaattagccaggcatggtggctcatgcctatagtcccagctactcaggaggttgaggtgagaggatcacttgaacctgggaggcagaggttgcagtgagccaagatcacgctactgcmctccagcctgagtgacagggcaaggctgtctcaatcaaaaaaaaaaattttttttcacagaccagaagtagaatagaaactccccaaagagatggaggcagaagccacagtgagattaatattggcagaggcatctgggagtttggttcttgaggggtagcagggcctggaggccaggaggtggaatgaaactccttgttttgtcaaaggactctgaaacacaattgtgcttgctactgagacttgggcatttatgagcctaggaagaacaggaagataaaggcaagtcctcatggctaggtattgccttggggacttaatttaatcctgagtgtcactgcatattgtgagcaccagcaaatccatgccttctattttagact

SEQ ID NO: 127074 - DNA, 618 bp, Homo sapiens
catttttcaaatgctctggtaatagatgttgtgttgttacacatctaattagtgttttgcccaagtgggcaaacataggtattctttacccagaagcaacacgtattayaatctcaatagctaataggttttgtagggttctttagagaagcagttctattttaattcagattccttaagaagttggaggatctttaccagaaatcgtagcattttgacagtatctctcttttaaaaaatattctgacatctaagtgatttgattaatttagtttttaataggtgtgaggtaattttaaaaatatcatagccgcaggataatttattcatggaggatcatttcgtaagtgattgagtttcatgccttcttttctggtagaagtagaaaaaagtacgtggattgctgctaacttaataactttactgataactaagaatggaacagatcttgctgtgaattacataagcagctttaaaagcactccatattctttctgtgacagagtacgaaaaacacaaggcagagaatatggttatgagaatgttttcctgcaaaagcttaactatgttgtatttagtagtatagtcagggaaagatggggttagaatgatcataac

SEQ ID NO: 127075 - DNA, 578 bp, Homo sapiens
cagtagcacgttaatgtagggactattcaggagacatcaggcttggagctgggagttatgccaccgcttactttccattgctcttcattgttcccctgcagaaaagtgccccaggaacgataagtcctcaatgaatggagagattgagacacataactccctcgtaacttatggctttatctaaatggctttaaacttgtaggtgttgccttaaaagtatcagaaaacactgattttctactgaaatcaacagaaactttgattgcgtgagtgaagattcccagtctrttattacttgtgttgatgagtgggcttgtttccctgtagcttaggaggctccatatcaagtaggttcagtttggatgacaacatggagctatggagaagctaaccacagaggcaaaggagagaaagcagtctcagagacaaatgcaaatagtcttgggaatcctttctaaatatattcactcatcaatctctccagggcacctatctggtattttccctcagtaggtcaactattgttgcttgatggctttaatcattttgcaatttcaagtaaaaagaagagtaatacc

SEQ ID NO: 127076 - DNA, 578 bp, Homo sapiens
cagtagcacgttaatgtagggactattcaggagacatcaggcttggagctgggagttatgccaccgcttactttccattgctcttcattgttcccctgcagaaaagtgccccaggaacgataagtcctcaatgaatggagagattgagacacataactccctcgtaacttatggctttatctaaatggctttaaacttgtaggtgttgccttaaaagtatcagaaaacactgattttctactgaaatcaacagaaactttgattgcgtgagtgaagattcccagtctgttattacttgtgttgatgagtgggcttgtttccctgtagcttaggaggctccatatcaagtaggttcagtttggatgacaacatggagctatggagaakctaaccacagaggcaaaggagagaaagcagtctcagagacaaatgcaaatagtcttgggaatcctttctaaatatattcactcatcaatctctccagggcacctatctggtattttccctcagtaggtcaactattgttgcttgatggctttaatcattttgcaatttcaagtaaaaagaagagtaatacc

SEQ ID NO: 127077 - DNA, 555 bp, Homo sapiens
aagtaatccacccgcctcagcctcccaaagtgttgggattacaggcataagccatggcacctggcccttttcttatttttttgttattcctttttatgatatcttgtttttaattcatgggcacaacatcacatctttgatgatatcaatgatagattatttgaatttttcagttttgtttctcacttttgtttcctattttattctctattttaaattggaggctttctcaaacgtggtaatctttgtttttctacttatgttcattaaacatggatgggaagctttgtgagaaagttacattagttcattgatcagcttttctataaccagccagatcatttttggttgggggtccccaaatgtcagtcagtatgtccacattttcccccactctctscagagcaggattctccagtctccttttaaggaagcagaaacttaactgtttacatcctaagctgggcagaagggggggcatggatgtcagtgtttctcactgtcaccctccaatgttcctaagaatctcagactcaatttctccacctaatattt

SEQ ID NO: 127078 - DNA, 536 bp, Homo sapiens
attattatatttgttgtagatcatattgacatactgtgtttactagaatacgtttactacaagatatacttcaataaagaagtcaattgtttgctgatatatgtagtaaaacaaattatgataccttatccaaaaaattattttagaagtaaactgctataggatgttctgcagcagtggtaatagtagaccaataaattctggctaatatgcattctgctattggataaagctatcaaagttagggacataatacaartaataataacgttatttttattagaacatgcctcagtatccgtttgacttacacgtatttagctcctactacatctatagacccttatatgaaaatgggtagcacaatatccagtatcgttagtgagctgaaatcaaggaggtgggggtaagaattatgtggcacattataatgtaaggtaatttgtgataaatggaccaagtgctgtaagttgttaaagcacctgggaaaaaattgtttctatctgggaaattgaggtttcagggttttagtagat

SEQ ID NO: 127079 - DNA, 536 bp, Homo sapiens
attattatatttgttgtagatcatattgacatactgtgtttactagaatacgtttactacaagatatacttcaataaagaagtcaattgtttgctgatatatgtagtaaaacaaattatgataccttatccaaaaaattattttagaagtaaactgctataggatgttctgcagcagtggtaatagtagaccaataaattctggctaatatgcattctgctattggataaagctatcaaagttagggacataatacaaataataataacgttatttttattagaacatgcctcagtatccgtttgacttacacgtatttagctcctactacatctatagacccttatatgaaaatgggtagcacaatatccagtatcgttagtgagctgaaatcaaggaggtgggggtaagaattatgtggcacattataatgtaaggtaatttgtgataaatggaccaagtgctgtaagttgttaaagcacctgggraaaaattgtttctatctgggaaattgaggtttcagggttttagtagat

SEQ ID NO: 127080 - DNA, 594 bp, Homo sapiens
ttattaagacaaatataagtatttacttaatttttaaagtggttttaaatagttggctttaaaacatttaagaaaaatactacatatgtcatggctccaataatgatttcgctgtttgaatactcagtgttattttcatcactcgtacagacaattctaagaaggggaattgcctttattatttctgcaatattcttagaaaaaataatttaaaaaacttgaaataytgaactatgtgaagttttaaaatttacatataaacatacatcatcagagagaaactgaaaatgacagactaaggaagaaaaaacattatgtgtataaagaatctctctttaccttaaataatctaaaagacatttttaaatagatatagcaatctatatcatggtaactttcagaaaatacaactaaaagaggatttttttttccagtggaaagtgcttcagtagacactaagtctaatcatgtacataaaggtaaacataaagatgaaaattatagctacaactagataatattttttaatcaaatcttaaagttggttgctgctgacattactggatcaaagttggaaatctgtttctactactg

SEQ ID NO: 127081 - DNA, 589 bp, Homo sapiens
tggactaaaaatactgaacaaaacattaccactaaagaaaaatatgatcaaatatgattttctaataacatctatgtgttgttaacatttaaacatcaattgatataattttgaatattactataatttgaaataaaagtaaaatatataattatccactcaatccatgcaaggaaaaaaatacattttccaacactcagtaccatttataatttaaactctcagaaagccaggaagagaagaaaactttctcgatcttaaattctataataaaaataaatagctaacattatacttaatagttatagactaaatgttttcctcctcagaagrgaaacaaaaaagatatctatctgttctcatcatttttggttaacattgtgctcacggtcctagctagtgcaataggcaagggaaagaaataaagaataataaagataatgaatgggtcgaataaaattttgtcaatttgtgatggcttgtttgtgtgttaaaaaagtcgctaaaatgttcaatgaaaccaaaaagaaatcttttacaagcttgagagcagttaagtgaggctactggagacaggaacaatgtgata

SEQ ID NO: 127082 - DNA, 601 bp, Homo sapiens
ggctttcccaaacctcatcctgtgttatctcagagctactcagaggtatagaatgaggcaaatagatttgggctctggattgagaggcaggcatagcacctgcaaattctattcacatcccagcgatgcgaatcccctttcttcttttaccatgctttcatagggttttttgtttttctttctaccactgcctaactgtatgcaccctttagtctcttgsctcttctgtaaatactgaccttctcagtctgcacatcttctcctgtggatccatttcacatttctggatctagctgcacctctgtctctgacttttctttctctcactccatctgctttggccacttgaaaattacaaagtcaaccgctactcatcagtgaatgagaagagtgctttaagaagaggaaacgtgtgcctaaaataatgtacatagcgtcgtccctattccctttttcactcaaaaataaaagaagagtttcagatgattcaaaaactcacagtctacttttgaaaagcatattatctcaggaaggatacaaaatgttctaatcagaattatataaatagcctaaacatacacacacagtagtgtggatggta

SEQ ID NO: 127083 - DNA, 601 bp, Homo sapiens
ggctttcccaaacctcatcctgtgttatctcagagctactcagaggtatagaatgaggcaaatagatttgggctctggattgagaggcaggcatagcacctgcaaattctattcacatcccagcgatgcgaatcccctttcttcttttaccatgctttcatagggttttttgtttttctttctaccactgcctaactgtatgcaccctttagtctcttgcctcttctgtaaatactgaccttctcagtctgcacatcttctcctgtggatccatttcacatttctggatctagctgcacctctgtctctgacttttctttctctcactccatctgctttggccacttgaaaattacaaagtcaaccgctactcatcagtgaatgagaagagtgctttaagaagaggaaacgtgtgcctaaaataatgtacatagcgtcgtccctattccctttttcactcaaaaataaaagaagagtttcagatgattcaaaaactcacartctacttttgaaaagcatattatctcaggaaggatacaaaatgttctaatcagaattatataaatagcctaaacatacacacacagtagtgtggatggta

SEQ ID NO: 127084 - DNA, 532 bp, Homo sapiens
tcctacggagcaaagctttttgtaagctatgcttggcagtgctggtagaagcccatcataattcaactcataatatgtgttgagatggctgtaatgtcaggatatctgtaaattttgaagaggtagagagttatttgccctcctcaattgtcagacttgtaattagtccttgttaatctgataataatgttagaatcataattccctgttttcttcattcaatgcatatttccaaagctgtgcccagagtatgttatttgtagctctgaagttgtcaagagaaggagaaggagaagasagatatggttcctcaccttcagaagcttaaagatggaggcagagaaaggcagattctgaaatgaacagaatagcagggggacagggctgcccagggagcactgtgccctcagagctctcctgtgggaggtgaagggtggaggtcagggggattcaggttcagagatgctttgagatccctttggtaagtttctgggactattgcatgttagactttactgtgttcgatgaattt

SEQ ID NO: 127085 - DNA, 562 bp, Homo sapiens
gctcgatgatagcgattgtcattcataacatttattgcagacccagacactgtactagttatttggaatttaaacttatagttttgtagggaaaatggacatatgaaaattaatgaaacacaacgtgatattaactccagtgarcctaaatagatggaacgagtactcaaaggagctcactcatctggggctttccaaaagaattcgtgggagaaataatatttgattttagcttccattgatgatgggttggagtttggtatgttgagaaatgggaagaaatgcactctggacagaaaatggaggtgcgtggctcagagttataaatgttcatggagtatttagagaaaattacatgaatggctgtgactggaacacggcaaatggacgagacagaatggtgaagagaagaatgagtatgatggagttttattttgcaggaaggcgtgctggggaactggcaaaccaatatgagatataaaaattgttaaaaatttggcaaagattcagaatttaatttcaagaaaaatttcactagacaccaaattaaccaaaaactgta

SEQ ID NO: 127086 - DNA, 562 bp, Homo sapiens
gctcgatgatagcgattgtcattcataacatttattgcagacccagacactgtactagttatttggaatttaaacttatagttttgtagggaaaatggacatatgaaaattaatgaaacacaacgtgatattaactccagtgaacctaaatagatggaacgagtactcaaaggagctcactcatctggggctttccaaaagaattcgtgggagaaataatatttgattttagcttccattgatgatgggttggagtttggtatgttgagaaatgggaagaaatgcactctggacagaaaatggaggtgcgtggctcagagttataaatgttcatggagtatttagagaaaattacatgartggctgtgactggaacacggcaaatggacgagacagaatggtgaagagaagaatgagtatgatggagttttattttgcaggaaggcgtgctggggaactggcaaaccaatatgagatataaaaattgttaaaaatttggcaaagattcagaatttaatttcaagaaaaatttcactagacaccaaattaaccaaaaactgta

SEQ ID NO: 127087 - DNA, 618 bp, Homo sapiens
tctgtctacttttttaacaagttcttgctccgtgtgtctccttttgcttgttctcaagtaagggagtaacagggataaactcccactccttggtaaatctttctatcatttttggaaatctcatccattgtagtaaatgctcttaaatcttcatcttcaggccgtgacttccatctagcctccattcacgtttccgggtttatgtctgcaatgagcattccgtggctctacatagatgccccaccatacctagaacccatgtatcycaaactcaattctttctttcccaggacattacttcctgcacttccttagtctatcaatggcactgttattctcttgaccatctagacttgaaattttggggtttggactcctcctgctcccttgctttatatgtaatcagacatcaagtctcaatcattcttttcttttaatgcttttttcagctttcgttctactgcctgtcttgttcatttatttttcacatcacgaaagatggtgtggacattttttctctcttcactttttctttctgcatgtaatatgttttgtgtatttcacctgaagccgtcctaaaacatggctttcattctgttaattcctggtgcaaaatac

SEQ ID NO: 127088 - DNA, 512 bp, Homo sapiens
tgaattcctttattaattccttcaacaaatatctgttgaactcctattttatgcttatcaactttgtagacacatggtgaccatgaataaacaagagagagaaaaaaaatcgctgacatcatgagagttgtattttagggaaatacagataatatatataatagatagaaatcaataatacatttgaaaataataagcaatacaggcacgaaagcaaagaacaagtaaataacattaaggttaaaagttttgggaggagaagagtttgtctcacgaaatatggacaattctttcaaaagaatttattgtaatggggagaaaagtaatggagtgggacctttaaaaaggaactgcagttaagagaatgccttttctctggtaaaatatgagtaagaatayaattttttgtgcatatggaaaagataaagtggttaataaaaaaattaagatgcaagggagtgagaaggaaaaactgttgaagcaatgtctttgaatcagtaagagaggatgat

SEQ ID NO: 127089 - DNA, 620 bp, Homo sapiens
ccttacaaaagctgtgacctttggctgatgggtgaaactgatggtgccctgatagggagttaactgaagaagtaaatgacatcacttaactgtctttccccctttctattgtttacctctggctgaaccccaaccatttagaatcccaaaaggcaaaggacccattaatataatccattagagtcaggctacccgggaacagaggagggcagtggagaataaagagcacctctgaagagggagatgcttgatatttagcccataggagaaactgaaaaatacagatacawgttaaagaatttttttttttgtaaatcttgtgcaacttagagagctatgtttttcattgttcataattatatacactgaacttatagcatagtgcctagtaaattgtagcaacacaatgcaaatttgtaaataaaaatatgtatgaataaggaagcattgacaataattcttaaattatttaaaagtggaataaagagtactcttgttttactttgctccagagaattagaattatgaccagaggattatacataaaaggaggctaaacaaatggaatacattgttttaaaaaactagaaattgtctgctaaataataaaatgccatatt

SEQ ID NO: 127090 - DNA, 620 bp, Homo sapiens
ccttacaaaagctgtgacctttggctgatgggtgaaactgatggtgccctgatagggagttaactgaagaagtaaatgacatcacttaactgtctttccccctttctattgtttacctctggctgaaccccaaccatttagaatcccaaaaggcaaaggacccattaatataatccattagagtcaggctacccgggaacagaggagggcagtggagaataaagagcacctctgaagagggagatgcttgatatttagcccataggagaaactgaaaaatacagatacaagttaaaraatttttttttttgtaaatcttgtgcaacttagagagctatgtttttcattgttcataattatatacactgaacttatagcatagtgcctagtaaattgtagcaacacaatgcaaatttgtaaataaaaatatgtatgaataaggaagcattgacaataattcttaaattatttaaaagtggaataaagagtactcttgttttactttgctccagagaattagaattatgaccagaggattatacataaaaggaggctaaacaaatggaatacattgttttaaaaaactagaaattgtctgctaaataataaaatgccatatt

SEQ ID NO: 127091 - DNA, 620 bp, Homo sapiens
ccttacaaaagctgtgacctttggctgatgggtgaaactgatggtgccctgatagggagttaactgaagaagtaaatgacatcacttaactgtctttccccctttctattgtttacctctggctgaaccccaaccatttagaatcccaaaaggcaaaggacccattaatataatccattagagtcaggctacccgggaacagaggagggcagtggagaataaagagcacctctgaagagggagatgcttgatatttagcccataggagaaactgaaaaatacagatacaagttaaagaawttttttttttgtaaatcttgtgcaacttagagagctatgtttttcattgttcataattatatacactgaacttatagcatagtgcctagtaaattgtagcaacacaatgcaaatttgtaaataaaaatatgtatgaataaggaagcattgacaataattcttaaattatttaaaagtggaataaagagtactcttgttttactttgctccagagaattagaattatgaccagaggattatacataaaaggaggctaaacaaatggaatacattgttttaaaaaactagaaattgtctgctaaataataaaatgccatatt

SEQ ID NO: 127092 - DNA, 604 bp, Homo sapiens
ctgagcatttgctcttattctgatctactattagccaagaagctttggttagacaattttcacttttagcatgagatgtgaagagcatacttyttttttttttttctttttttctttttttgagatggagcttcactcttgttgcccaggctggagtgcagtggtgtgatctcagctcaccgcaacctccgccttccaggttcaaacgattctcctgactcagcctccccaatatttggggctacaggtgcctgccatcacacctggctaattttttgtatttttagtagagatgaggtttcactatgttggccaggctgctggtctcgaacccctgacctcgtgatccacccgcctgggcctcccaaagtgctgggattacaggcatggttttttatgcagatcacctcaaattgcatgttattgaattttaggatttatatccattagaatttttcaacatgagatattcaaaataatgtctttaaaatgtttttaaaagataaatcaaaataaacaacttttaaaagttagtttatgaaatttgacagtttcctctaaaattttttcttttttccttaaatattagtaatttgtattcaag

SEQ ID NO: 127093 - DNA, 604 bp, Homo sapiens
ctgagcatttgctcttattctgatctactattagccaagaagctttggttagacaattttcacttttagcatgagatgtgaagagcatacttcttttttttttttctttttttctttttttgagatggagcttcactcttgttgcccaggctggagtgcagtggtgtgatctcagctcaccgcaacctccgccttccaggttcaaacgattctcctgactcagcctccccaatatttggggctacaggtgcctgccatcacacctggctaattttttgtatttttagtagagatgaggtttcactatgttggccaggctgctggtctcgaacccctgacctcgtgatccacccgcctgggcctcccaaagtgctgggattacaggcatggttttttatgcagatcacctcaaattgcatgtkattgaattttaggatttatatccattagaatttttcaacatgagatattcaaaataatgtctttaaaatgtttttaaaagataaatcaaaataaacaacttttaaaagttagtttatgaaatttgacagtttcctctaaaattttttcttttttccttaaatattagtaatttgtattcaag

SEQ ID NO: 127094 - DNA, 465 bp, Homo sapiens
aaatccatgtgttcattacagtcaaaaaaagaaaatacgcaaaactttttaatagtgtctagtataaatactaaagattaatttatttcattgctgagagcaagtcttaattcttcaattggttaaaagtaaaattactaaaattatcctaagaacttgtggtgaaaacagaaacctctttcttttagtcatgtggcacgcacacatacacacataacacatacttatatttctatattcaggcagttgtaaaagacaggatgggtctgatctgtttgttaaatggcataaaaagtgttggaaggatggatccagtgtgaagtggyaagggtcaggcagataatgaaatactgtccatgataactctataaatggggcatgagaaaaaataactgtctaaattgttatttattctatcattagcactagtctacaatcagcaaccaaagaacatgtggtttcaat

SEQ ID NO: 127095 - DNA, 610 bp, Homo sapiens
ggagctgacctttctctgttatctatgcatttacgtatctatctagctatcatatatctattatttattcttatttattatctgtatggactcatgggtttcctttttatagagtgagttgtaatcccaaactgccaccttttttttaatgttcgagtttttctagatttggctaggtagggaccccttcaatacagctcatgtgttaatttacatgaccccataatactttgaacactcccttactttctagcacaacaggatgtygcagttgcagcttgtgcttctgttgcctgtaatctctgcctgagatcagctgtccttctctgaggtaccttcatcatttttattagggaatggtatttaaaatcaaaatcagggtctagatatattcatcgctattgatgctactggaagtcttgtttcaaagcccattcagcaaatagagttcaaaatatacagcacatgtatgtatgtttgcatccattacaaagatgtatattgatgtgtatgtgtgtgtgttttaaaatcatgagtttatgctgacaatcccatctctaatacagcccacaagctctttctagccttccagtgattcatagttgtacca

SEQ ID NO: 127096 - DNA, 610 bp, Homo sapiens
ggagctgacctttctctgttatctatgcatttacgtatctatctagctatcatatatctattatttattcttatttattatctgtatggactcatgggtttcctttttatagagtgagttgtaatcccaaactgccaccttttttttaatgttcgagtttttctagatttggctaggtagggaccccttcaatacagctcatgtgttaatttacatgaccccataatactttgaacactcccttactttctagcacaacaggatgtcgcagttgcagcttgtgcttctgttgcctgtaatctctgcctgagatcagctgtccttctctgaggtaccttcatcatttttattagggaatggtatttaaaatcaaaatcagggtctagrtatattcatcgctattgatgctactggaagtcttgtttcaaagcccattcagcaaatagagttcaaaatatacagcacatgtatgtatgtttgcatccattacaaagatgtatattgatgtgtatgtgtgtgtgttttaaaatcatgagtttatgctgacaatcccatctctaatacagcccacaagctctttctagccttccagtgattcatagttgtacca

SEQ ID NO: 127097 - DNA, 227 bp, Homo sapiens
ggatattctaagtacctataataaatacattttaaattagttatgtcaccgagcttccatttgttatttgtcattagatatttagttttacaacaattgagtctaaatttctatattgaccactttttaaccttcaaaagtaatttaattttatggcttaaattcttcatctgccagatagcaggaatacctgttytacccaattattgtttttctaaaggaaaaat

SEQ ID NO: 127098 - DNA, 637 bp, Homo sapiens
cataaattatcacaatagattttgagaaaccgaaagactcctgcagagtctattgctgaaagtagaaatatctgaattttgtaaaacaaatcaccaaaaagaaaaaagaagtaaaataatgaaaaaaaaataaggtacaaaaaaggtcagaacttacctgcttkctaatgcttttgtcaccagtagccttgacaaagccaagaattatctcaagattaaaaaaaaaaaaaaaagtctcaggtcaaggatgaaacagaaatgttaagagatacgataatatactcaaaaggatacattgatgtcaggaaaatctgaaagataaatgtgaaatattcagaaattaattatgtcaaaacttctaactacccaaaaatttcctcaagagaataagatagaatccaatttttaaataatgtcaaaccatttgagtaaacatagttttgtgacttttgaaaattaagagccttggggtgttacacattcctaaatcttaattgtgtgttgaatttatattaggttgattacaaacagaaattttattagtcataattacaaaaaaaagactgttcttttagctctatttccattaaggcctttaaaaattgccagtacttttgaaatggcagttactaaatgg

SEQ ID NO: 127099 - DNA, 637 bp, Homo sapiens
cataaattatcacaatagattttgagaaaccgaaagactcctgcagagtctattgctgaaagtagaaatatctgaattttgtaaaacaaatcaccaaaaagaaaaaagaagtaaaataatgaaaaaaaaataaggtacaaaaaaggtcagaacttacctgcttgytaatgcttttgtcaccagtagccttgacaaagccaagaattatctcaagattaaaaaaaaaaaaaaaagtctcaggtcaaggatgaaacagaaatgttaagagatacgataatatactcaaaaggatacattgatgtcaggaaaatctgaaagataaatgtgaaatattcagaaattaattatgtcaaaacttctaactacccaaaaatttcctcaagagaataagatagaatccaatttttaaataatgtcaaaccatttgagtaaacatagttttgtgacttttgaaaattaagagccttggggtgttacacattcctaaatcttaattgtgtgttgaatttatattaggttgattacaaacagaaattttattagtcataattacaaaaaaaagactgttcttttagctctatttccattaaggcctttaaaaattgccagtacttttgaaatggcagttactaaatgg

SEQ ID NO: 127100 - DNA, 577 bp, Homo sapiens
taaatgtggttacatgaactcgtctgagaattttcataaacaatgaaattttattaaaataaagaatctttgtaaataagggattaaaattattgttgaatttgccagctkatttgtttgtgattaaaataattgttttagagcaaatacaaataatttcaatttgcatttaacatacaaatattgattattgaagatgccttagtgtttcaccattctttagttaactttgacattagtacctccaaaagtagatggaagaacaactgttgttgtcttttttccccacagaaccaggcatggaggaaaaaaatatgtttaatggttgaaggcagttttctgactgcaaaaaatgtgctgatatatagcaaaactaatagtaaaaagcaagactaaatacactgtggtggtttaataatagtggtatccattctttttttgattgacagatatctctgatagtcacattttttttaaaaattgcaaatccacttcatgttcaatccacttatcctttcttctttcagaaaaatgcaaattgaaataaaattattttatttcattggaagaatatttt

SEQ ID NO: 127101 - DNA, 577 bp, Homo sapiens
taaatgtggttacatgaactcgtctgagaattttcataaacaatgaaattttattaaaataaagaatctttgtaaataagggattaaaattattgttgaatttgccagcttatttgtttrtgattaaaataattgttttagagcaaatacaaataatttcaatttgcatttaacatacaaatattgattattgaagatgccttagtgtttcaccattctttagttaactttgacattagtacctccaaaagtagatggaagaacaactgttgttgtcttttttccccacagaaccaggcatggaggaaaaaaatatgtttaatggttgaaggcagttttctgactgcaaaaaatgtgctgatatatagcaaaactaatagtaaaaagcaagactaaatacactgtggtggtttaataatagtggtatccattctttttttgattgacagatatctctgatagtcacattttttttaaaaattgcaaatccacttcatgttcaatccacttatcctttcttctttcagaaaaatgcaaattgaaataaaattattttatttcattggaagaatatttt

SEQ ID NO: 127102 - DNA, 577 bp, Homo sapiens
taaatgtggttacatgaactcgtctgagaattttcataaacaatgaaattttattaaaataaagaatctttgtaaataagggattaaaattattgttgaatttgccagcttatttgtttgtgattaaaataattgttttagagcaaatacaaataatttcaatttgcatttaacatacaaatattgattattgaagatgccttagtgtttcaccattctttagttaactttgacattagtacctccaaaagtagatggaagaacaactgttgttgtcttttttccccacagaaccaggcatggaggaaaaaaatatgtttaatggttgaaggcagttttctgactgcaaaaaatgtgctgatatatagcaaaactaatagtaaaaagcaagactaaatacactgtggtggtttaataatagtggtatccattctttttttgattgacagatatctctgatagtcacattttttttaaaaattgcaaatccacttcatrttcaatccacttatcctttcttctttcagaaaaatgcaaattgaaataaaattattttatttcattggaagaatatttt

SEQ ID NO: 127103 - DNA, 582 bp, Homo sapiens
aagcataatgggcagtgggttaacaacataaattttattcttggttattagaaaggaaattgttctccaggcaaatttcaacaaagttggatgagtaaatgaaagaaatgccattctagttggtacggtataaaaagtaactaccttgggtcagaattcagtttcaaattggcctctgacacttgtctgtagtgtggtcttgggcaattcatctaacctctctatgccttgatttccacttgtataaaatgagaastacaatcataataataaaatatgccagcagtatactgtattactatccacctgaggtaggagtatgtattttcaccccactgtctttggacctggccatgtgatgtgttttgcccagtggaatgtaacatttgccactccttttattatgagaacagcatgctcctaaggaggctgctctttcagcctgcattctagaacaaagaggacacaggaagcagagatgcagctgatctacagcttacataaaacctgaatgataaataaactttgtcattgtaagccactgagatttgcgagttgttcctgctgcaaagccaagtaata

SEQ ID NO: 127104 - DNA, 636 bp, Homo sapiens
acatgagatttcagaggtgccaggggaagaatgatatggttaggcttagtgtccccacccaaatcttatcttgaattgtaatccccataatccccacatgtcargggagagaccaggtggagttaattgaatcatgggggtggattcccccatgctgctcttgtgatagtgagttctcatgagatctgatggttttataaggggctcttcctttttcactcagcacttctccttcctgcagccttgtgaagaagttgccttgcttccccttcaccttccaccatgattgtaagtttcttgaggtctccccagccatgctgaactgtgagtcaattaaacctctttcctttataaattacccagtctcaggtatttctttacagcagtgtaagaacagactaatacaatatcccttctgttttaatttaaagaaacattttattattcttagtatttttcccttgactcacaatttactcttcttaattttaaaatatgtaatttttgggaaaaataatttctatgagtagttgtaagtgccaccaattttggtatgaaacagatcattctctctacatttgaaaacaaaccaacaaagtcttgttcattatactaaagatatgatatattgtaagt

SEQ ID NO: 127105 - DNA, 636 bp, Homo sapiens
acatgagatttcagaggtgccaggggaagaatgatatggttaggcttagtgtccccacccaaatcttatcttgaattgtaatccccataatccccacatgtcaagggagagaccaggtggagktaattgaatcatgggggtggattcccccatgctgctcttgtgatagtgagttctcatgagatctgatggttttataaggggctcttcctttttcactcagcacttctccttcctgcagccttgtgaagaagttgccttgcttccccttcaccttccaccatgattgtaagtttcttgaggtctccccagccatgctgaactgtgagtcaattaaacctctttcctttataaattacccagtctcaggtatttctttacagcagtgtaagaacagactaatacaatatcccttctgttttaatttaaagaaacattttattattcttagtatttttcccttgactcacaatttactcttcttaattttaaaatatgtaatttttgggaaaaataatttctatgagtagttgtaagtgccaccaattttggtatgaaacagatcattctctctacatttgaaaacaaaccaacaaagtcttgttcattatactaaagatatgatatattgtaagt

SEQ ID NO: 127106 - DNA, 522 bp, Homo sapiens
acaccttgtttttataaactttccatagtggtctgggatcatggcaattttcctcaataaccaaacmtagcaaaataaacattgactcatgtatgaagtattgctgttataatagtgatctttatatattcatcctcactttgtgtttattatcatacaagcagcctatcctacggttacttcaacaagtcttctcattgtttaaacaaaaatattttttataattatgaaaagggcattattatccacaccttttgctaatataactactcttcctttttttggaaatatttctagcgagaaagttaaaactttcatacctggaaagtttcataattggaaagaaaacatattttaaaatctacgtccattgaacattttcatagacaattttagttgatttttagaagaatttaacatattttcctgatttctttttttttttttctttttttactctgagcttaaataaattctctttttgactccatatgtaacttggagaaatgttacaggatgcct

SEQ ID NO: 127107 - DNA, 553 bp, Homo sapiens
actgtgggaaatacaagggtaaataagacatggtgcctgctctcaaggaaattatgatagactgggaaaagggaagagaaagaagtagaagtaaccagcatttgctaatcgcttgccatgtgccaggtgctttacccaatcgctgcatgtatagctcccaatgactctgtaagttagatattgtaatatctactttatataggaagaagaatgaaggcactgagactttaagtaaccacctccaaagctgggatttaaactcrtatcttggattcagaggcctgtgttcattccactacacatgctgttccctatgattcaaggcagaatgtgataaatccttggggagaagctacagcaaggtagaagaggaagagaagagattgctccttgcctgagggtaaaggtacatgacaaaggtaggtcttagaggtcaggaaggcttacgtttgacagagatggagggtggaaaaaattgcacaagcagagcaaaatgagggaggcaggaaagttcagtacatacttaaggcccagtggaattgtggaccacaag

SEQ ID NO: 127108 - DNA, 655 bp, Homo sapiens
aaatgaactaacacatgggcaagaccatgagcaggtagatgccacaagctccttaggatgatgacttcaatttgtacctgagatccacactaaagaaaaaagggagaaagtggctctggatgaaggtctgaggagatcacctttgagttaagagcatgaattttcgtgtggataaatgtggaacatctrtattgtctgctcagcagccctttttctttacatactgattacaaaataagtcatctcttaatggccagtaagtcatgttcacacaagcaaagcaatgctgtactgagtttcattataataagatatacctacagtacagcctgacactcaagagtaattctttccaagacctttatgaatccctccaattcacaaattaccactatggcacataatttcccccataatatgcatatacaatgagtgaaaacaacattttttctttgggtgcctaggggcaagatgcctgactcatttactagctgtgcaacccaccactacactccagcatcccagccggcaagtgaaattctaattcatgcttcagcaaaaatacaaattataatatattttaaacatggagggtcatttgcaaataatgagaaatgcaaattctaaatcaatggaagtccagggagtactgtac

SEQ ID NO: 127109 - DNA, 545 bp, Homo sapiens
agatgtctcctcccaccatgtcgatggccacattcaccccgccctcgcccaccagcttccttactgcatccttcaggctgccctgactgtagttcacgctggactgcgcacccctctgcatcgccagcttgcacttctcgtcacttccagcagcagctatattacctgcatcaagaacacaagatatctgattatccagaacatgtcccaagaaaggggcaccccacctaacccatctccagcccaagggtgctactcaaggaaatcattgtgaccttgctgccctggcactggccttgagcccacacatcaggcccaacacacagaccatcccactggcccctccatgccctactagycatgaggtccacatttctaggaatcgtggaaccctaacaaggatagctagaaggtggttcaagagacattcagaaagtcttctcaaattcaaatgaaaaccaccatttattgagcatctactatgaatcaagcagtaaggatacaagatggatcctttagagccaagaaagcaagatacagcagaa

SEQ ID NO: 127110 - DNA, 595 bp, Homo sapiens
agaagcagctgaaaaattaaataaagaaatcatgactctaaggctctcattggttcttacttaattcatgggcatttatccaaatactcaaagaagtggaatgaaatcttgaagcacaaaactcaaattattttcactccaggacaatgaggttttctcatgaycccaaatcatgattgtagaacaccaaaacaatgaaaaacagtgattatcttttacattccaaaatgagcccttaaaactcagagacaagttttaaaagtcaaggccttggatttctaagaaccagtttggggaaacacaaaaattagctaaaattttctagccaaaagtctggatgtattgacataggatctgttccatcctgtgctggtaagtgggactttatggagtcttcgtagtatcagccacttggaagatgcttcatggagaggctgtcttctgcgtaatcttctcttggcaataaagagtaattgcgaggaaggggaagtgaaagaggctaggagtggagactggggaaaagagacattccaaaatgagcttcatgggatggcacccacgtatgtgcaacacacaaaaccatatacactcctca

SEQ ID NO: 127111 - DNA, 595 bp, Homo sapiens
agaagcagctgaaaaattaaataaagaaatcatgactctaaggctctcattggttcttacttaattcatgggcatttatccaaatactcaaagaagtggaatgaaatcttgaagcacaaaactcaaattattttcactccaggacaatgaggttttctcatgaccccaaatcatgattgtagaacaccaaaacaatgaaaaacagtgattatcttttacattccaaaatgagcccttaaaactcagagacaagttttaaaagtcaaggccttggatttctaagaaccagtttggggaaacacaaaaattagctaaaattttctagccaaaagtctggatgtattgacataggatctgttccatcctgtgctggtaagtgggactttatggagtcttcgtagtatcagccacttggaagatgcttcatggagaggctgtcttctgcgtaatcttctcttggcaataaagagtaattgcgaggaaggggaagtgaaagaggctaggagtggagactggggaaaagagacattccaaaatgagcttcatgggatggcacccacrtatgtgcaacacacaaaaccatatacactcctca

SEQ ID NO: 127112 - DNA, 591 bp, Homo sapiens
aacaaaacctaaaatgaaactcttcttttcctcactttgaacagataatggggtagatttccagtcccatatgaggaatttattaaagggttgaatgtaaatgtccccccagctcttttggtctccttatcaaaaccaatgatataaaaaggatagaaaggaattcacaaagagrtgaaatgaaacttgtttgcatctcttggatctctcattaaactcaaagacaagtggtctgagagattttttttttaaagagaaagaaacaaaaatgatggagacatttctcctaaaagagtcaagccaggctgtaagtctctgtaagtctcagcctcctcaccccagatgcctgtggtgctaccttctgatacaaatcttagtgaagagggcttcaaaagaaccatttgcagaactttgaagtggattttctgcaattagacacataaaacttatactggacccagtcaaagtttactgcagtcaggggttaccctcccacctgaaaagaatttagaggtcaagggaaaagctgattttctgctttggaagcagaacaaggagagtgatcatggaggtgcctgtactcctcgagtt

SEQ ID NO: 127113 - DNA, 548 bp, Homo sapiens
agaataaggctacaggaataagagtcgggacttaaatgagtctgaaagttttcaagatgacaggggacactgtcagcaaaacgtaaaatggaaaaggaagtagattagatgcagaaataccaactaggaggctatygaaaaagtccagcaaggactaataagagcctgaactagaataaaggaagtatgagtggggaagaatgtggacatgagaaatatatggtgatttacagacctgacagataattgactatggggcaattgcaaaggatggtgttaaagatgacgactaaatttcaactgggagaacagtggtacttcaatagaaacaggagagtcagtggaaaagtaataggtataataaattgatattttctgatttgatttaaatgctacaggtaaatcaaagtggagaggtaaaacattcaatttaaattttgagctacaaattcagaagtgaggtcataataagaatttcatattcaagaatcatctgcgtggagatgagataaaaaaacttcagaatgaatgaaattattagagagcaa

SEQ ID NO: 127114 - DNA, 548 bp, Homo sapiens
agaataaggctacaggaataagagtcgggacttaaatgagtctgaaagttttcaagatgacaggggacactgtcagcaaaacgtaaaatggaaaaggaagtagattagatgcagaaataccaactaggaggctatcgaaaaagtccagcaaggactaataagagcctgaactagaataaaggaagtatgagtggggaagaatgtggacatgagaaatatatggtgatttacagacctgacagataattgactatggggcaattgcaaaggatggtgttaaagatgacgactaaatttcaactgggagaacagtggtacttcaatagaaacaggagagtcagtggaaaagtaataggtataataaattgatattttctgatttgayttaaatgctacaggtaaatcaaagtggagaggtaaaacattcaatttaaattttgagctacaaattcagaagtgaggtcataataagaatttcatattcaagaatcatctgcgtggagatgagataaaaaaacttcagaatgaatgaaattattagagagcaa

SEQ ID NO: 127115 - DNA, 521 bp, Homo sapiens
cagtgttttcaaggcagagttactggcagcagcaaggatctatgaaaacacacaccgattggcccaaatttacctttaaagttgaaagaataactcaaaacccaaaagaatctgcctctgacttgaagcagagaaccacaattctcagcaatgcaaccaggaaatgatctactcttattgtattaactttgtatgggcttcttttctctttactatctggttaaatcactagcaatcagtgaagatgagggaaaactcattttctcacatctcttcccttttttaagaaaagctgtaatagggctgaatttcgaatgatttctttttgaggagccaggagagaaatagctatccttttctccacaaactgaagatgtttccttgactaataaatcaattccatagaaaccagagtctagagtcttggagaaatgccttttatarctccagttttttttttaatgtttgatgatactttactctgatttcttatatcatcactaaattattgaattggaaca

SEQ ID NO: 127116 - DNA, 549 bp, Homo sapiens
ggactgcctcagatagaaaaaacaaaaaatctcctgaattcctcaagacattcaaatgctttaggagacattcacatgagcaaaaactctatttgtaattatttgattctataaataacattttttgtacaaatgaaaagtatttgggcaggcttataatagacactgagttttccatgaatatattcatcatgtaaattgrgggaagatagattatattctgtttgggctggaacttaactaagaccagttcactattttaaaaaccgtctatgaacaaatttagtgtgttttgttagcaacaatatgcaaattacccataccacacacttgattaatcttcatttgaaactctcacatttatggtcattctgcatataagtgtgagcatctaattacttaattatatcttttaaatattgaagtgcttattattccattataattacttgtcatatgtctcaattatattacagttagatagttatactgagtttttaaattttgatgctggtaagttatgttattttgagtgtaggctggcaggtt

SEQ ID NO: 127117 - DNA, 466 bp, Homo sapiens
caaaccttttttccaggtttttacttcctttcattgggttagaacatccttctgcagctcagaggagtttatggttatccaccttctgaaggctacttctgycaattcatcaaactcattctccatccagttttgtttccttgctagcgaagagttgtgatcctttggaggagaagaggcactctggtttttggaattttcaggctttttgtgctggtttctccccatcttcatggatttatctacctttggtctttgatgttggtaatgttgatactactcctttctgtttgttagttttccttctaacagtcaggcctctgtcatgcaggtctgctggagtttgctggaggtccactccagaccctgtgtgcctgggtatcaccagcagaggctgcagaacaacaaagattgctgcctgttcctacctctggaagctttgtcccagaagggcacctgccagatg

SEQ ID NO: 127118 - DNA, 630 bp, Homo sapiens
cttccatgtaaataggttaaattccccaactaaaaggtatagtgtggctgaatggataaaaagacccaaccgtatgctgcccacaagagacttattgcacctataaggacacacatagactacaagcaaagagatggaaaaagatacgccctgcaaatggaaaccataagtaaacaggggtagttgtatcagaaaaaataaacattaagtcaaaaactataaaaaaaagatwaaaatggtcattatataatgataaaggaacattttcagcaagaaaatatagcaattataaatatatatgcacccaacagtaaagcacccaaatatataaagcaaatattagatctatatgtactttgaaacttaactgtagttacttgtatttttgttgtcattacttgtctatgctgtcctctctaccagaccataaactctttgttcaatgtctacatgtagtgagccgtcaatgaactaaactcaagttacaccagctttattagttttttttaaaatgatattaattccattaaaaaacttgagctatcatagtatatggctgacattataggaagtatccagaagaggtcagtataacagtaataaaagtttggttttggggacaaattaaat

SEQ ID NO: 127119 - DNA, 630 bp, Homo sapiens
cttccatgtaaataggttaaattccccaactaaaaggtatagtgtggctgaatggataaaaagacccaaccgtatgctgcccacaagagacttattgcacctataaggacacacatagactacaagcaaagagatggaaaaagatacgccctgcaaatggaaaccataagtaaacaggggtagttgtatcagaaaaaataaacattaagtcaaaaactataaaaaaaagattaaaatggtcattatataatgataaaggaacattttcagcaagaaaatatagcaattataaatatatatgcacccaacagtaaagcacccaaatatataaagcaaatattagatctatatgtactttgaaacttaactgtagttacttgtatttttgttgtcattacttgtctatgctgtcctctctaccagaccataaactctttgttcaatgtctacatrtagtgagccgtcaatgaactaaactcaagttacaccagctttattagttttttttaaaatgatattaattccattaaaaaacttgagctatcatagtatatggctgacattataggaagtatccagaagaggtcagtataacagtaataaaagtttggttttggggacaaattaaat

SEQ ID NO: 127120 - DNA, 630 bp, Homo sapiens
cttccatgtaaataggttaaattccccaactaaaaggtatagtgtggctgaatggataaaaagacccaaccgtatgctgcccacaagagacttattgcacctataaggacacacatagactacaagcaaagagatggaaaaagatacgccctgcaaatggaaaccataagtaaacaggggtagttgtatcagaaaaaataaacattaagtcaaaaactataaaaaaaagattaaaatggtcattatataatgataaaggaacattttcagcaagaaaatatagcaattataaatatatatgcacccaacagtaaagcacccaaatatataaagcaaatattagatctatatgtactttgaaacttaactgtagttacttgtatttttgttgtcattacttgtctatgctgtcctctctaccagaccataaactctttgttcaatgtctacatgtagtgagccktcaatgaactaaactcaagttacaccagctttattagttttttttaaaatgatattaattccattaaaaaacttgagctatcatagtatatggctgacattataggaagtatccagaagaggtcagtataacagtaataaaagtttggttttggggacaaattaaat

SEQ ID NO: 127121 - DNA, 648 bp, Homo sapiens
tgattttataaccagtgccactcagtgtttctattaccagttccaaatggaatctacttttaaaactatccctctgaatattttaattgcttcatattgacattacggcttttcccacacagcttttattgttggaatttctgaattcctttgtttttctctgttacaagaagaaattatgtgaaatatgtctstgacattctatcttagttgtctcctgacttttatttttaatctactatatggaatcgattccattttttttccttgaaatgtacttgccttcattttccattataaacagtttctgtcatggttggatcatgactttctcgtgtgactaacctccacttcccttgttttttaactatcttccttttcgtttcttgtattgtttacctctatcacatcctcaagcttcggccaaacttgtagtaatcatgaccattgtacacaatctcctttttctgcggtattggtgtgatgcaggctctccctcttcctgtccccatctgcaggttgaggctcccacagctgtggccttgagtaggtgtcagtgttctcttgagctgggctaattgttctctggaccttcactcatgttctttcatttactcccttgctttgatggagtgcaacctcaataat

SEQ ID NO: 127122 - DNA, 648 bp, Homo sapiens
tgattttataaccagtgccactcagtgtttctattaccagttccaaatggaatctacttttaaaactatccctctgaatattttaattgcttcatattgacattacggcttttcccacacagcttttattgttggaatttctgaattcctttgtttttctctgttacaagaagaaattatgtgaaatatgtctctgacattctatcttagttgtctcctgacttttatttttaatctactatatggaatcgattccattttttttccttgaaatgyacttgccttcattttccattataaacagtttctgtcatggttggatcatgactttctcgtgtgactaacctccacttcccttgttttttaactatcttccttttcgtttcttgtattgtttacctctatcacatcctcaagcttcggccaaacttgtagtaatcatgaccattgtacacaatctcctttttctgcggtattggtgtgatgcaggctctccctcttcctgtccccatctgcaggttgaggctcccacagctgtggccttgagtaggtgtcagtgttctcttgagctgggctaattgttctctggaccttcactcatgttctttcatttactcccttgctttgatggagtgcaacctcaataat

SEQ ID NO: 127123 - DNA, 648 bp, Homo sapiens
tgattttataaccagtgccactcagtgtttctattaccagttccaaatggaatctacttttaaaactatccctctgaatattttaattgcttcatattgacattacggcttttcccacacagcttttattgttggaatttctgaattcctttgtttttctctgttacaagaagaaattatgtgaaatatgtctctgacattctatcttagttgtctcctgacttttatttttaatctactatatggaatcgattccattttttttccttgaaatgtacttgccttcattttccattataaacagtttctgtcatggttggatcatgactttctcgtgtgactaacctccacttcccttgttttttaactatcttccttttcgtttcttgtattgtttacctctatcacatcctcaagcttcggccaaacttgtagtaatcatgaccattgtacacaatctcctttttctgcggtattggtgtgatgcaggctctccctcttcctgtccccatctgcaggttgaggctcccrcagctgtggccttgagtaggtgtcagtgttctcttgagctgggctaattgttctctggaccttcactcatgttctttcatttactcccttgctttgatggagtgcaacctcaataat

SEQ ID NO: 127124 - DNA, 596 bp, Homo sapiens
gaattctctggattaacaggcagagacctttgttcttttcccttactctctcccaaacatgtggattgtctctctctgtcctgagccacctggaactgagggtgtgttgatgcaagcacctctgtgaccaccactaggaggactgcagtgcatcagatctgaagccagtacagcacttgccttgccaaaggcccttcccttcatggtggtgagttcccccacactctgggaatgtccagaaatgcttaaaaccttagycatgtacctgatgttctattctactgtggctaagctggcaatgaaaccatgatatgaagttacagtgaggtactgtgattgttcaccttaatttttgtttttgtaatgctgtttttctgtgtgtaggtagttgttaaaatttgttgttctagtaagagggaaaagcataggcttctattctgccatcttgctccaccccctggttatgtcttataaacagcacatatcttagacttttaaaaaatcaaatctggccatctctgttttaaatggaatttttagtctgtttacaatatattgtgttttaagcctatcatcttcctacttatcttttattt

SEQ ID NO: 127125 - DNA, 617 bp, Homo sapiens
agtggctaactacaggactgtcaagtccctggaaatgtggaatggagttccctctagatggcacaaagaagagagaggaataaaaatgaagaccatcaatgaagcaaggactatgtccgtaaatcttactaaatctactcacctacttgagccaggtgatccaaatcmgttctctgttgtccctacagaatgagtctcaattgagtcacatgaatttcaacagtgcttcagcagttttcttgtagctaaggcaggatgtgccagagtgagatggggatcaggcaaactgcctatcaaagccctttcctctgctgtcaaactcagggaatctgattctgccagcctgattcttatgttccagtccaagggaaattcccaggggactggctgcttcaacctgtgggtagaactctttgttcagcttcagtgatcacagctggcagtatgaaagtactaacatgacacgcctcactctgaaggaaagcaagatgtaacctgatgtacatatttcatgtaattggtgctgaacaaaatggctgcgatgagtttattttgaatgctgaacctgtacctagaaaggaaaggagggaagctgtggaagcacaaataaaaggcac

SEQ ID NO: 127126 - DNA, 617 bp, Homo sapiens
agtggctaactacaggactgtcaagtccctggaaatgtggaatggagttccctctagatggcacaaagaagagagaggaataaaaatgaagaccatcaatgaagcaaggactatgtccgtaaatcttactaaatctactcacctacttgagccaggtgatccaaatcagttctctgttgtccctacagaatgagtctcaattgagtcacatgaatttcaacagtgcttcagcagttttcttgtagctaaggcaggatgtgccagagtgagatggggatcaggcaaactgcctatcaaagccctttcctctgctgtcaaactcagggaatctgattctgccagcytgattcttatgttccagtccaagggaaattcccaggggactggctgcttcaacctgtgggtagaactctttgttcagcttcagtgatcacagctggcagtatgaaagtactaacatgacacgcctcactctgaaggaaagcaagatgtaacctgatgtacatatttcatgtaattggtgctgaacaaaatggctgcgatgagtttattttgaatgctgaacctgtacctagaaaggaaaggagggaagctgtggaagcacaaataaaaggcac

SEQ ID NO: 127127 - DNA, 617 bp, Homo sapiens
agtggctaactacaggactgtcaagtccctggaaatgtggaatggagttccctctagatggcacaaagaagagagaggaataaaaatgaagaccatcaatgaagcaaggactatgtccgtaaatcttactaaatctactcacctacttgagccaggtgatccaaatcagttctctgttgtccctacagaatgagtctcaattgagtcacatgaatttcaacagtgcttcagcagttttcttgtagctaaggcaggatgtgccagagtgagatggggatcaggcaaactgcctatcaaagccctttcctctgctgtcaaactcagggaatctgattctgccagcctgattcttatgttccagtccaagggaaattcccaggggactggctgcttcaamctgtgggtagaactctttgttcagcttcagtgatcacagctggcagtatgaaagtactaacatgacacgcctcactctgaaggaaagcaagatgtaacctgatgtacatatttcatgtaattggtgctgaacaaaatggctgcgatgagtttattttgaatgctgaacctgtacctagaaaggaaaggagggaagctgtggaagcacaaataaaaggcac

SEQ ID NO: 127128 - DNA, 480 bp, Homo sapiens
tggctcatctgtgacacaattctgaaataaaatgaggcgaatgcagaagctcaattcctaagaaagaaagaaaagtgtccytttggtccattcaagttaccacctaagctagggctttcatgccctttaagtcccaaatgaaaagtagttataatgaggcaaaaatctgatagggaaaatgaggcagttggcttgaattcctctgttagatttttttttttttttaataataatttgctcatctcatgctggtggatttggtctcttgcattctctggcagtcaaggaaaagttagctcaagttttgctccctctgccattaacagatggcacgcagatctaagcataagctgtggctcccgggccacaggcaaagggtgagggctgctcccctgtggacaccctcaaaaggccctaagcttgagtagcacaaatgaaaaggtctagtgctggtgttaattacgcagaaaccacacagaa

SEQ ID NO: 127129 - DNA, 575 bp, Homo sapiens
catatgcacgaaacaataaccaatacttttcatacagtgtgtgtgattaaatattttgctgcagttgggtatggttgtaagtgcagtaggagatcagaataaggagaagttggtgtatattgtagtggccagtgaagttttggatttgtttccattgtgctacctgcacttattcattcctcatctttctgaatgtctccttacccttgaacaaarcagacttagttagctctggctgcctttgttccctgacagtagttaaagcttcaattaggctggtatccattgaaagttgacatacccatttcttttacgtatttgtacagacatagaagcaagcctgtatttgggttgtgttttggcagggtttgaagtcatgttcaaagatctaaaaaaattgaatgactgaggacacagactagaattctaaccttcagtttatgtgcaaaatcaaaaacatgcaaagtttgtggtatctgagcttcatctgatcgttcgtacatgaaagtataaaaagaaggcccagaagtaggagtcttgtcagtttgaatgttagttaaataagtacataagat

SEQ ID NO: 127130 - DNA, 659 bp, Homo sapiens
cttttttttttttttggatttccttgcattgggcttcgcctttctctggtgccttcctgattagcttaacagctaacctcctgaattctttttcaggtaaatcagggatttcctcttggtttggatccattgctggtgagctaatgtgattttggggcrgtggtaaagagcactgttttgtcatattactagagttggttttctggttccttcttatttggtaggctctgttagagggaaggtctagggctgaaggctgttgttcagattcctttgtcccttagggcattcccttgatgtaatctcccccttttcctatggatgtggcttcctgtgagctgagctgcagtgattattgtctttcttctgggtctagccacccagcaagtctaccaggctccgggctggtactggggcttgtctgcacagagtcctgtgatgtgaactgtctatgggtctctcagctgtggataccagcacctattccagtgggggtggcagggagtgaaatggactctgtgagggttcttagctttggtggtttaatgttctatttttgtgctggttggcctcttgctgggaggtggcattttccagagagcatcagctgtggtaatatggagaggaactggcaatgggcagagccctagaattcccaa

SEQ ID NO: 127131 - DNA, 659 bp, Homo sapiens
cttttttttttttttggatttccttgcattgggcttcgcctttctctggtgccttcctgattagcttaacagctaacctcctgaattctttttcaggtaaatcagggatttcctcttggtttggatccattgctggtgagctaatgtgattttggggcggtggtaaagagcactgttttgtcatattactagagttggttttctggttccttcttatttggtaggctctgttagagggaaggtctagggctgaaggctgttgttcarattcctttgtcccttagggcattcccttgatgtaatctcccccttttcctatggatgtggcttcctgtgagctgagctgcagtgattattgtctttcttctgggtctagccacccagcaagtctaccaggctccgggctggtactggggcttgtctgcacagagtcctgtgatgtgaactgtctatgggtctctcagctgtggataccagcacctattccagtgggggtggcagggagtgaaatggactctgtgagggttcttagctttggtggtttaatgttctatttttgtgctggttggcctcttgctgggaggtggcattttccagagagcatcagctgtggtaatatggagaggaactggcaatgggcagagccctagaattcccaa

SEQ ID NO: 127132 - DNA, 555 bp, Homo sapiens
aatcagggatttcctcttggtttggatccattgctggtgagctaatgtgattttggggcggtggtaaagagcactgttttgtcatattactagagttggttttctggttccttcttatttggtaggctctgttagagggaaggtctagggctgaaggctgttgttcagattcctttgtcccttagggcattcccttgatgtaatctcccccttttsctatggatgtggcttcctgtgagctgagctgcagtgattattgtctttcttctgggtctagccacccagcaagtctaccaggctccgggctggtactggggcttgtctgcacagagtcctgtgatgtgaactgtctatgggtctctcagctgtggataccagcacctattccagtgggggtggcagggagtgaaatggactctgtgagggttcttagctttggtggtttaatgttctatttttgtgctggttggcctcttgctgggaggtggcattttccagagagcatcagctgtggtaatatggagaggaactggcaatgggcagagccctagaatt

SEQ ID NO: 127133 - DNA, 537 bp, Homo sapiens
gatcactgtaaatacgattgtgaatagccactgaccttccttattcttctctaaattaggtgaaatcttctgaaagtggggcaaaaggtgattgtaatttaaaagacatgctgctgtccaggggatatcaattctttgtggcaggggtccaagactcatttggagtgggtattgcataaggtctgaaggagacaaagtttctttgcagagccccaggaagcaggaggagttgtaaggtattgtaaagctggcttcatgtacctggagcctgtgccagatttatttcttagctgttaayatttacacaagtgacctgcatggcttgatcctagagatccggtcattgtgccttctgtaaatttcgaaggggaagggaagttaaagtaggcagttagacatttaaaatattttctagggaacttggaggaattttgaagttataggaatttgctgaggaggtgggaccagattttgagaaaagcaggtttaagccagaggcccagcaatccaaaacagctactacggagtcagggacag

SEQ ID NO: 127134 - DNA, 455 bp, Homo sapiens
tctattcaactcacagaggtgaactgtcctttagacagagcacatgtgaaaccctctttttgtgatatttgcaggtggagatttcmagcgcttttaggccaaatgtagaaaaggaaatatcttcgtataaaactagacagaatcattctcagaaactactttgtgatgtgtgcgtcaattcacagagtataacctttcttttgatggaggagtttggagacactgtctttgtgtagtctgcaagtggatatttggacctctttgaggccttcgttggaaacgggatttcctcatataatgttacacagaagaattctcagtaacttatttgtggtgtgtttattcaactcacagagttgaaccttccttcagaaagagcaaatttgaaacactctttttgtggagtttccatgtggagatttcaatcgctttgagaccaagggtagaaaaggaaa

SEQ ID NO: 127135 - DNA, 547 bp, Homo sapiens
ctgagtaagttctttgtgttgcctctattcaactcacagaggtgaactgtcctttagacagagcacatgtgaaaccctctttttgtgatatttgcaggtggagatttcaagcgcttttaggccaaatgtagaaaaggaaatatcttcgtataaaactagacagaatcattctcagaaactactttgtgatgtgtgcgtcaattcacagagtataacctttcttttgatggaggagtttggagacactgtctttgtgtagtctgcaagtggatatttggacctctttgaggccttcgttggaaacgggatttcctcatataatgttacacagaagaattctcagtaacttatttgtggtgtgtttattcaactcacagagttgaaccttccttcagaaagagcaaatttgaaacactctttttgtggagtttccatgtggagatttcaatcgctttgagaccaagggtagaaaaggaaacatcttcgtataamaactagacagaatcattcacagaaactactttgtgatgtgtgtgttcaactcaag

SEQ ID NO: 127136 - DNA, 600 bp, Homo sapiens
  misc_feature (1)...(600): n = A,T,C or G
gtaaaaattcatgtgtctgtgctaatgtaaacaaatgatggtataaataagtaaatggaggggtatagacaaatatcccaggcagaagaaagaattccaaacaatttatgaggtttntttgtcataaatgacctcgacataaatcctcattccttgaggtttttcagtgtaggaaagaatgaggaagtaaaaagacagaacawaataaaaaaagagtaacttatagtagaaaaatctgataaacactacttcaagccagatatttaaggttaacattaccagtgatgttgatgttacgttcccttaacaacatgtaatgagaatgggaatttatctctgctgtcttttttttcaaaaacacattacccaaaggcattatgctaagtgtaataaactagtcacagagagacaaacactgcatgattctgcttacataaagtgtctattatagtcaaactcatagaagcaaacaacacaatagcagtttccaggggctgggagatggtagaaatggggagttgttgtccaatgggtatgaagtttcagttacgctagatgaatgttagtgctaaatatctgttgtacagcatagtggctata

SEQ ID NO: 127137 - DNA, 577 bp, Homo sapiens
gtatctattaccttgattatgatgatgatatcatgatcttgtaatgtccaaatgaatcataatgtaaacatcaaatatgtgtggttcttaatatatcaattttacctcaataaactggaaagaaagtaaacacacacacacacaatctcagtctaaccatgagaaaaaaaatagacaaatgacaattaaggaacattctacaaaatgccttatccrtaatcttcaaaattcccaaggtcatcaaaaacaataagaaatgtaaggggatatggctactaaatgtaacatggaatcgaggaagaaaactttaaaaacatttgtaaaaagcatattatgggaaaacaggaaattttaataaatcatgggcttttggtaataacatatgattgcttcattaattgtagcaatgtaccatcttaatgtaagatataaataattggggaaaatgaatatgagatataagagaattctatgctaaacttgcatttttgtaacattagacctgaaattaaaagtttattaaaattaataatcacacacaatattagaattttgaaaattttatacttatgtgcaa

SEQ ID NO: 127138 - DNA, 638 bp, Homo sapiens
attgctatctgagaaaacagatatcatgatgctgattgccttgaaattgtattaaaagataatagagtggtggttttggctttgtcatatcttagttttattttcacttatattttaaaataataaaccatttctattaagagagaaatcatattatatattattatacttttgcttaattgctaaatatgcattttatttcattttatattctgcctatttgaaaaacataagttggtaagtcatttttctagtcaacatggaacagacaggtatagattaatttaatagtggtgtcaccaaaccacaaagcgtagcaacatatctttttccacctaacttcaaacaaagccacgtttatctcaaatggagaaaatycttttgctaataaagggctcccagtatactttcctcttttattctctccatcttatatgtggaatagtgttgaccatgtgaaatttaaagatgaaggaaattatacatagcacttagcacattgcctggcatggcgtaggtgttcacaaaagttaactattattttcttatttgttaaaaaattgcatgtaactacaaataaaaacaaattttgaagctgcaaactagaatgcatttccctatacaagcattcatttcca

SEQ ID NO: 127139 - DNA, 483 bp, Homo sapiens
tgtggttattcatacctaaaaacagcctaggtgacatagttattattaatctctttttacaaaataaagaaattgacactcagagttttgacaacttccctgaggtgacattttaagtaagtgataaaatcataatatatctctgaatctatctcattctgaaattaatgttcactctaacacccttattgtctctagccaagtttatggttagagctaatattaaatttatgtttataaagctttataaattctagtccattgtttattctactacatcatcatgtaaaatacccagggacacagacaaaccatatcacaaggtaagcccaaatacagtttgggtaagaacaggcttactttatgatatggtttggctgtgcccctacccaaatctcatcttgaaacatagctcccataatccccacstgtcatgggagggactcagtgggaaataattggatcatggggtgggtcttttcc

SEQ ID NO: 127140 - DNA, 622 bp, Homo sapiens
acttgtgtaaggtcatacagcccctaagagacagacctcgggctattgcttaaagattaattctcaagcaaagtgctgaattactgagtcattactttacatgagtccacaatttagtgcagagaataaaggttggacatagatgtaaaatcaattaggcaaaattatcacatctgagaatataaagcagaaaacatagataactgagaggggttggagaaaagctgattgtgtccttgtgacctagactcagacactggattcgtctcatkgttactactcattttgtttccccatattttctgaagacaaggtgctttctaaaggttatttttactcataggcctatgggggctctcttttgggtgagttagggacacagcagcctctatttttctaggaacacctttaaaatatagtgttctagcattgtatagttattaatattgagagcattgtcttgaataacaactctactacaaattgttcctggggaagttacaaaagctttctaagcctcacttttctcataagtaatacaagtataaaatactaacataaatatgctgtaaggattgcaaagcacgcttagtgtgatgtatgcaaagtgcttagcccaata

SEQ ID NO: 127141 - DNA, 613 bp, Homo sapiens
gaacacaggtgcatgcatagacctattggtctatgcagccagggtctgttggctgtttgaaccatgtttgttctctcttgggtgaagcgagaacatccttcctctcttctcatgctgcaaaggctctgtgatctgcttccacagctaccccatagacatctcttctaggttccactgtgagaatgatcctagactctctacttatctggaagttctgttaacaagtcatgatttagggaaaactagtagcttaatgggtatacagctggcctggscctaccctctgtgagccctataaagagatgtattaagcaagatgagtgcaagacactatctcatcataagaatggtatcctatcatctgctcccctccattcccagccccccaaagaaatatctgctctggtgagagatttttaacaggaaattaatatagaattgaatgagtgtaagaatgaacacatagctccttattctgactcattctagaaaatgaagaaagggcataaagtggtgttgaggctaaactactttgtggaataatggatcatttgaggtcaaagtcaagaccaaatacttcaactactaccccttagctgttttgcctatgtaa

SEQ ID NO: 127142 - DNA, 610 bp, Homo sapiens
ctcttggctttcatagagttgaagatacttaggccttgctctggattaggttttggcttaagaaaatgctgtgatcrgtttgatcttctagccaggccacaaaaactttcccatatcatcaataaggcgatttcactttctttccattcctatgtttactgaagtagcactttaatttcctttaagaatcttttttttttttttttcattcacagcttggccaactggcacaagaggcctagcttttagtttatctcagcttttgacatgacttcctaagttaaatcatttctagctttttatttaaagtaagaaacagtcaactttttctttcacttaaacacttagaggccatatcaaggtaaaaccactagcctaattttaataattttgtgtttcatggaatagggaatccaaggagagagggagaaatgtgaaaatgggtcgtcagtggagcactcagaagacatgcaattatcatctaatattcgtgtagtcagtggtaccccaaaacaatcacaatagtaatatcaaagataattgaccacagattaccataaaatatataataataatgaaaataatatttcaaatattattaaaattaatc

SEQ ID NO: 127143 - DNA, 610 bp, Homo sapiens
ctcttggctttcatagagttgaagatacttaggccttgctctggattaggttttggcttaagaaaatgctgtgatcggtttgatcttctagccaggccacaaaaactttcccatatcatcaataaggcgatttcactttctttccattcctatgtttactgaagtagcactttaatttcctttaagaatcttttttttttttttttcattcacagcttggccaactggcacaagaggcctagcttttagtttatctcagcttttgacatgacttcctaagttaaatcatttctagctttttatttaaagtaagaaacagtcaactttttctttcacttaaacacttagaggccatatcaaggtaaaaccactagcctaattttaataattttgkgtttcatggaatagggaatccaaggagagagggagaaatgtgaaaatgggtcgtcagtggagcactcagaagacatgcaattatcatctaatattcgtgtagtcagtggtaccccaaaacaatcacaatagtaatatcaaagataattgaccacagattaccataaaatatataataataatgaaaataatatttcaaatattattaaaattaatc

SEQ ID NO: 127144 - DNA, 572 bp, Homo sapiens
tcttcaggttctctctcagctgactcttctgatgaaagcctttggaatacttacctgggaaactcagtgatgatctgcgagaatgtcaacctcctccttcactggcatgaggaattcaatgaaatctggctggtttctcctttctgtcatctgtgtaagggactcattttcatcycaccatctcaccatgtaaagacaaatgaaattcaaatattttctgtggagggatttttattttcctgacatttagttcattatgatttatttgtttttcagctttctaacaggttttcaaaaactgctattttgtagcttttctggcttttgaaaattttgtttttaattagcataagattgatgatctcatgctgctttctatatcctgactggcaacaaatgttcacatgtttataattgtgtaggatatgtatcaatttggcctaaacattttaattgattttttttggattgtaataaagaaaataccgtatcttggacagtggtattttaaatgttagccttacaacccagaaaaaatggcaaaacttgacatcaaatcaaagtgataacat

SEQ ID NO: 127145 - DNA, 472 bp, Homo sapiens
ctgaatttttttctccttagcctaccatacccatctccttttctctatctgctctgcactagactcttgctattacttaccataatgattgctagtgttaaatattttacctgcttttgtcccaaacctgtttcaattttcctgctttttcctaaaatgcaattatgtttatcttttctctttaaaaggtattcaatagcaacaaattgcatatataatcacattcgaatttatctgtaacacaaaacycgtttcatgattttatttttctctacctctcttgcttgccctctcctgatgtcatttctccgcttaaactagctgtatagtgctattgacagtctcattgggagactttatgttgtgtctttgttcatctccttcttcttttggcaccatatagcactttacatatggctgtattctctcataatttaaattttttctgagtttatgagaaactacatgttgc

SEQ ID NO: 127146 - DNA, 529 bp, Homo sapiens
tttaccatctttattttcctcatttcttttttcccccttctgtcccatcttctctatgtaatggtaaaactgaaatgaattggcaatcttttcaaatcactgtccttctataaattccaccttcggaggaaatccagagcattttctgtaagtggaattgcttccaggattttatattagatgaataggacttgacatattttatgctgacaataaatacactaataggtttttttttctttttgccaaacatttaatactcttgtcagaaaatatattaaagttatattatatattatacatataaattagtttcagaatttacttttagattatatttattttatgtctatgtctyacgtgtgatggggtatgtctataattttttattttttgattgatgagagtatgagaataattttagagtaacaccatgaaaacactctatggatttgtagatgaatgaatgaatttaaaagaagagcataatgcattgtcgacattttctccaagaccatattgttgttag

SEQ ID NO: 127147 - DNA, 568 bp, Homo sapiens
ctgaggcaggtggatcaggaggtcaggagatcgagactatctgactaacatggtgaaactcaatctctactaaaaataaaaaagttagccgggtgtggtggcgggcacctgtaatcccaactacttgggaggctgaggcagragaatcgcttgaacccaggaggtggaggttgcagtgagctgagatcatgccactgcactccagactgggcaacagagtgagactccatctcaaaaaaaaaaaaaaaacagtaacaacaacaataataaacaaaaatttacaatttattgtctctgaagcctgctacctggagcctttatctgcataataaaacctcagtcttcatagccccttaggtgtaacccagacattactttctattgataataactcttccaactaattgccaatcagacaatttttcaatctacctatgacctggaagcatacctctcccacccccttctctgcttcaagttgtcatgcccttccagatagaaccagtgtacatcttacatgtattgattgatgtattatgttttcctaaaatgtataaaagcaagctat

SEQ ID NO: 127148 - DNA, 505 bp, Homo sapiens
aatcaaaatatgtgtttttcccttcattgtttagaaccattcagaatatccaaggaataatcagccctttaacacaatttgaaagtttcgctgttcaaaaggagtggtataaagccaattttgtcatacaaaattatccatgccttttcacaatatcttgccatgatcagaatctaaacgctgagctgaataattatttacataaaaaatgaatatagccttccttacttttatgaaaaatataaatactttcagacgagtatttttaattgacttaaatgttctactaaagatctcaaggttactagaaaaattcccaataataatttgtcttaaagagagaatgactcaatagtttattcaataattacatttctcttttaaamtaattataattttctatttttaaaaaatactaaaattaaaatacaaaattaaatttttgcagatatctatgcaactgtgattcccagtatgagaagttttgtattttagaaaattacag

SEQ ID NO: 127149 - DNA, 554 bp, Homo sapiens
cgccgggctcgcccgggatgcctggctcccggcgtccgctgcctccgctggggacgtcccgggtctgccgccctctgccctcgggggtctcccttccagcaacagccgtgcgccctgtggagagactatggcctctgagatgaggagcgggctcctcgatgccgggagggagactggggcagccccagaggcctgggaggcgcatctgccaagcagatggtaactccgagggggcaaggtgcatgaggagcgctcattatcctcgccggagccaacagcacctgccytccgctggagaccgtctttgcttagtagagccggcctgaccacagggaggggcaaccaccccaaggtcatgccagctgctggaggcagggctaggaaacacatccaggtggcccaggtgagtctcacctggctcatcctgctgccctgcaaggggtcccatcaacagtgaaaggagctctcccctcctatctagaactctggcgggtgggagctggaggcagaaggggaaggttttttcctggtataacatctggtggaggggggag

SEQ ID NO: 127150 - DNA, 643 bp, Homo sapiens
aaaaatatatattggttaaaaatctgtttttaaaaatctggcatcctttatatagatacacaaagaattcctacaaatcaacaggggaaaaaaatgaataatctaatttttaaaatgaacaaatatattcaaacaaacttgtctcacacacacacacacacacacacacacaagatttacaagtaaccaatacaaaataaaaagatgctcattattattcaaagggaaattcaaattaaaaccaaaatgagataccatttcatgctcactgcaatagctaaaaaaacaaacaaaaaaaaaactgacaataccaagtactggtggtgatgtggaacaatcagagctctcattcactgctggtgagaatgtgcaatggtacaaccactttggtgaactgtttggcagtttcttagaaaaataaacatataattggcccaaggccagcaattacactcctastaatttgcccaagataactgaaaacatatgaccacaaaaagacttgtacaagaatgttcatagcaaacttattcataatcaaaatctggagatgatccaaatgtccatcaacaggttgttgattgctggagagtgactgagctgactaaaagtgggtacaagaaaagtttctggagaaaatgga

SEQ ID NO: 127151 - DNA, 571 bp, Homo sapiens
gaatacctgaagcctttctgaggtgcctaactcagagggactccagaagaactccaaggaagccccctccttcacaggcaagagaagccacttgagccaggcacatctactgctgtggtttgaatgtgttccctaaagttcaagtgttggaaacttagtccccatgcaacaatgttgacaggtggaaactttaagaagtgattaggccatgagagctctgtcctcgtgaatggattaatgttgttatcctaagagcaggtttgttataaaagtgagcttgccrgtggcgaagcgtaaacaaaactgagatttaaaaaaaagtgagtttgccttcttcttgctaaccctctctcactctctcaacctcttgccttccaccatgagatgacactgcaagaaggccctcaccagatgccagcacttgatatgagacttccccacctccagaacggtggcaaatacatttcttttctttgtaaattactcagtctgcggtattctgtaatagcagctccaaagagaccaagacatccaatgtacttgagttgaatctccatgaacaacaaatatt

SEQ ID NO: 127152 - DNA, 496 bp, Homo sapiens
gcaagagaagccacttgagccaggcacatctactgctgtggtttgaatgtgttccctaaagttcaagtgttggaaacttagtccccatgcaacaatgttgacaggtggaaactttaagaagtgattaggccatgagagctctgtcctcgtgaatggattaatgttgttatcctaagagcaggtttgttataaaagtgagcttgccagtggcgaagcgtaaacaaaactgagatttaaaaaaaagtgagtttgccttcttcttgctaaccctctctcactctctcaacctcttgccttccaccatgagatgacactgcaagaaggccctcaccagatgccagcacttgatatgagacttccccacctccagaacggtggcaaatacatttcttttctttgtaaattactcagtctgcggtattctgtaatagcagctccaaasagaccaagacatccaatgtacttgagttgaatctccatgaacaacaaatattcc

SEQ ID NO: 127153 - DNA, 470 bp, Homo sapiens
  misc_feature (1)...(470): n = A,T,C or G
atctctagctgtttttggctcttaactatccagctagaatcttattactagggtttcatyatcctaattcaggcagacaatgagtaaccagaaggagactcttactgatgaaatcaaacctgaaaagctgccatcttgaaagctagcaaattaaatgtcggttgatcaacagaaagcaaaaaatgtccatgtcactgtaactttaatcagagcatcataatgatgttactttggaagtgaggagttctttttgtgaaattattaacactgggaagttttatcaatgagaccaaagttctgcctcaaaagttagcacgatcttagtagcaaatagacttgtatatgaagtatcagtggaaaatacctgctatgatttgaatgtgtcccccaaaatttataaattggcagcttaattcctagtgtgacagtgttgggaggtggggcctaaaagggaatgctntaattcagct

SEQ ID NO: 127154 - DNA, 594 bp, Homo sapiens
tttttcaaaaatttcaattaaatatcatatatttatttttgtatatataataatattctatacatataaatatatgtatgtttgtatatataattgtataaataatattcataacaacatgaacatattgaaatattattcatccataaaaaagaatgaggttctgatacatgctaaaacatggaagaaacatgaaatcattgtgttagattaaataaccagacaccaaaaaacacatattttgtaattccactcacgtgaaatatctagaatacgcaacttcagagaaacaaaaagtagattagagattaccagggcctgagagaggagcgaagagggtattactgcctacgggtcgcagagtttctgtttgagttgatgaaaacattttgaaaatagcgattatggttgtacaacgttgtgaatgtgattaatacctctsaattgaacacttatgaaatggctaaaataacaaatattatgttacatattttgccatgattaaaaataattaaaaattaaaattagtaagcagtgatatagcaaaaaaagcataacattgtgttttatgtctgttgctactctgacctgttt

SEQ ID NO: 127155 - DNA, 594 bp, Homo sapiens
tttttcaaaaatttcaattaaatatcatatatttatttttgtatatataataatattctatacatataaatatatgtatgtttgtatatataattgtataaataatattcataacaacatgaacatattgaaatattattcatccataaaaaagaatgaggttctgatacatgctaaaacatggaagaaacatgaaatcattgtgttagattaaataaccagacaccaaaaaacacatattttgtaattccactcacgtgaaatatctagaatacgcaacttcagagaaacaaaaagtagattagagattaccagggcctgagagaggagcgaagagggtattactgcctacgggtcgcagagtttctgtttgagttgatgaaaacattttgaaaatagcgattatggttgtacaacgttgtgaatgtgattaatacctctcaattgaacacttatgaaatggctaaaataacaaatattatgttacatattttgccatgattaaaaataatkaaaaattaaaattagtaagcagtgatatagcaaaaaaagcataacattgtgttttatgtctgttgctactctgacctgttt

SEQ ID NO: 127156 - DNA, 611 bp, Homo sapiens
gttcaccacagtagtattcacaacagcaaagacatggaatcagcctaggtgtccatcaacagtgaattgtctaaagaaaatgtggtacatatacrccatggaatgctatgaagccataaaaaagaatgaaatcatgtcctttgcagaaatatatgtgcagctggaggccattatcctaagtgaataaactttcctctattgattatggcattatggaaagctccttttaaaataaaattatttagaaacttcagtcaattctggaagcactattctctctcaaatttttctaaagttttaaaggtaaaaatctccttagtttttgatgtctgacttgacttaggatttaggggctgacctgagccagatatttaattttcattttcaaaattaaagtcagcatcttaaatcccaggagaagtcatgtggtacagatgaacactcccttaggtatataccatgaccaaaatgaaataaagaaaatatggtacatatacaccatggaataccacatagccataaaaaagaatgcagtcatgcccttgcaggaacatgagtgtagctgggggccttatcctatgtcagaaaacaaaggaacaaaaagtcatata

SEQ ID NO: 127157 - DNA, 611 bp, Homo sapiens
gttcaccacagtagtattcacaacagcaaagacatggaatcagcctaggtgtccatcaacagtgaattgtctaaagaaaatgtggtacatatacaccatggaatgctatgaagccataaaaaagaatgaaatcatgtcctttgcagaaatatatgtgcagctggaggccattatcctaagtgaataaactttcctctattgattatggcattatggaaagctccttttaaaataaaattatttagaaacttcagtcaattctggaagcactattctctctcaaatttttctaaagttttaaaggtaaaaatctccttagtttttgatgtctgacttgacttaggatttaggggctgacctgagccagatatttaattttcattttcaaaattaaagtcagcatcttaaatcccaggagaagtcatgtggtacagatgaacactcccttaggtatataccatgaccaaaatgaaataaagaaaatatggtacatatacaccatggaatacyacatagccataaaaaagaatgcagtcatgcccttgcaggaacatgagtgtagctgggggccttatcctatgtcagaaaacaaaggaacaaaaagtcatata

SEQ ID NO: 127158 - DNA, 572 bp, Homo sapiens
ttgggattgttttcagtgggagaaactgagtgaagtgtacttacscaccttccccagaatctgaactcgaagttccttaatttttaaatgggcaaggatgagagtgaaatgaaaggtggtagaagtgaggaaataagggaaagtattggaaatggcaatatattcccaggcaagaggctacaggaggaaagcaccagtgcattaaggagaaaagcacttgctgacatacaaaggtgttttttgtgattgatttgtcctaatgagttgactggaaaagcaaagagttcatctcaataaacatacatgtgcatgtgtctttagagtagaatgatttataatcctttgggtatatacccagtaatgggattgcaggtcaaatggcatttctagttctagatccttgaggaatcgccacactgtcttccatagtggttgaactagtttacactcccaccagcagtgtaaaagtgttcctatttctctacatcctctccagcatctgctgtttcctgactttttaatgatcaccattctaaccagtgtgaaatggtatctcattgcggttttgattt

SEQ ID NO: 127159 - DNA, 572 bp, Homo sapiens
ttgggattgttttcagtgggagaaactgagtgaagtgtacttacccaccttccccagaatctgaactcgaagttccttaatttttaaatgggcaaggatgagagtgaaatgaaaggtggtagaagtgaggaaataagggaaagtattggaaatggcaatatattcccaggcaagaggctacaggaggaaagcaccagtgcattaaggagaaaagcacttgctgacatacaaaggtgttttttgtgattgatttgtcctaatgagttgactggaaaagcaaagagttcatctcaataaacatacatgtgcatgtgtctttagagtagaatgatttataatcctttgggtatatacccagtaatgggattgcaggtcaaatggcatttctagttctagatccttgaggaatcgccacactgtcttccatagtggttgaactagtttacactcccaccagcagtgtaaaagygttcctatttctctacatcctctccagcatctgctgtttcctgactttttaatgatcaccattctaaccagtgtgaaatggtatctcattgcggttttgattt

SEQ ID NO: 127160 - DNA, 572 bp, Homo sapiens
ttgggattgttttcagtgggagaaactgagtgaagtgtacttacccaccttccccagaatctgaactcgaagttccttaatttttaaatgggcaaggatgagagtgaaatgaaaggtggtagaagtgaggaaataagggaaagtattggaaatggcaatatattcccaggcaagaggctacaggaggaaagcaccagtgcattaaggagaaaagcacttgctgacatacaaaggtgttttttgtgattgatttgtcctaatgagttgactggaaaagcaaagagttcatctcaataaacatacatgtgcatgtgtctttagagtagaatgatttataatcctttgggtatatacccagtaatgggattgcaggtcaaatggcatttctagttctagatccttgaggaatcgccacactgtcttccatagtggttgaactagtttacactcccaccagcagtgtaaaagtgttcctatttctctacatcctctccagcatctgytgtttcctgactttttaatgatcaccattctaaccagtgtgaaatggtatctcattgcggttttgattt

SEQ ID NO: 127161 - DNA, 555 bp, Homo sapiens
gctttctggcctgttgagagcaaagcaatgatcccctgttttgaacctgagaaagcagtcctgatggtctctgaatggccttccggggtcattgttcttgtattgaagaataatgtctgttctcagatatatacctctctggtcccatgctgcaaaaacaacaaagcctgatagctttccttcattactttttgtttcttttcttttcagttctaactggcagttttcctgcttgggtggtggattaagttcatagttcacacccatattaatcttcttttcaaataggcaattggccatgctttttcactttttgcaatagggataggctaagaatttttcaaatcttcaagttctccttcccttctgcttaataattccctctttaactcatttctctcattttcttttttaaactgaaaattggattttaattctgacaaatttggatatcaacaataattgtgttactctttagtgtattggtttrtatatagtttctatgattattcattaataccaagctcttggaataaaattaaaccaagacattta

SEQ ID NO: 127162 - DNA, 627 bp, Homo sapiens
ggacagtaacacaaataacttttgctttctggaaaacgtttgccataggaaaaaatatactcacaagtgtacaaaaagaaaaattcaattcctgtaaatgtggatgtacataaccagagctgaatttttttcatgaagagtttgaatatataaaactcttgaatctacattaaaaactaaaccatgaagaaatatcccaaaaagtaggtattagtttacatgacacaatatgaaatgtatctaagtgtcattctctgataacacccatctatattcatgtctccctccctcattccttttgtatttaaaacctgacatgtcaattaacaccttacataaattgtatttcatagcatttattagctgagtgttgaaatcatattgattatgtcaccataagatgttctatagaataatcttgtttattaatcacttgaggtctctgtaacttgtttctgaatgagattgtcagatctgtgttgacagagctctgtctagcagttctttttcccccayggagctaaaaatatcagagtagcacagcgagctgcctctctaccagcctcccagactggggaccctagctccgtgatccccttcctccagaataatgtggaggcacagggt

SEQ ID NO: 127163 - DNA, 487 bp, Homo sapiens
tttgctgtacagaatctgattcattatgagtgaaatgatgatgtaaaggagaaataaaactgaaaaaaaagaataaacattgctaaatataaacataatctgttgctaccaggccaactgaagacaaataagcctaccacattaataactaaaggtaacactaaaaactatgtgaaaggagtctgacctacaaacaacttgaatwtttatcacacaaaggcatttcttttcatttgttggtaataataaaatattaataataatagtaacaaaatgtaacaattttcaggcttttcgtaaagcaaccacagaggaaaatatccgtgaattattataagaatgcaggactcatttactaaatcttgcacttttcgttggactgtctcaggttcacagagctccactttgtggaggaaactccttgtatatatatcattttatatgccacagtcttccaacttccaattgggacagaatttcatctcct

SEQ ID NO: 127164 - DNA, 522 bp, Homo sapiens
cagcatgagaaaggactaatacaagacccaaactctttctctacacataaaggtatcagaagggaagaaatagtttctcaccctacaaagaatcacagttaacatgtagtgagcccttaccataagctaaataccttatgtaagagactgaagcaacttatacatttatataccctggtatagattttgtattcccctctgcagtctacccaaagacacacaactataaatagtaaagaatgatctcttatcaataattccacatcaatatctaccacttctgtaatttgaatttttcccacaccactccacagaaatggttctcactaagggtaccagtaaaattgttcatttcctaaaccaataagtaactatttttctttcattcggagtattccacagaatgtgctcttattaatttttctagttgaaaatttattctctttkgattttcatgacagtagcattttttgcccctttccatatactaagatgatacttgtcaatcttgtttaaggagtt

SEQ ID NO: 127165 - DNA, 415 bp, Homo sapiens
tgccaaaaatacaaaaattagccgggcatggtggcgggtgccagtaatcccagctactcaggaagctgaggcaggagaatcgcttgagtccgggaggcagaggttgctgtgagctgagatcgcgccattgcactccagccagttgacaagagcaaaactctgtcaaaaaaaaaaaaaaatgccataaataaataataaaataaaataaaatctatgacttggtaattcagtagatttgtatgtgtgatcttttgtatcttgactaaaaggaggtgagtgttaagattcagrgatatcattccttttgactcttgtatactcatgacataatagggcaataagagatatattgttcctttccaaaacaaacacccaagtgaaatgttatcttttacagacatatctatcttgaatt

SEQ ID NO: 127166 - DNA, 607 bp, Homo sapiens
tattgcatgattctacttacatgatatatctagaataagcaaattctatagattacaatgcataatagaaaatatgaaggtatgggagaatggatggatgagcagttatttaatgagtaaagatttttagtgggaattgtctgagtctgtttagtatgctctggcagaatatcttagaatggtagacaatagaaatttaatttttatagttctggaggccggggagtccaagatgaaggtgctggyattgttgtgtagtgaggaactttgttctgtgtactcacatggcagaacagatggaagtgctcaagggcctaagtagttccttggagcccttctacagggatactaatctcagagtatgtcttcatgatttaatcacttcttaaaggctccacctcttactactactacattgggtcttagacttagacataggaatttttaagagacatattaaaaccacagcaggaatgctgaacatttttttcagaattggatagtggtaatggtttcaccataatggaatataattaatgccactgaactatgcacttaaaaataacaaaaatgttaaattttatgtaatgtatgcttaaccataatt

SEQ ID NO: 127167 - DNA, 622 bp, Homo sapiens
gtgacttggggatagccaaatctagttaatacgccttcttggttctatggagcatgctacaatctgtgccagaggcaattaaagaatggttcaaatggcaatctgtagagctttgaagatatccgtgggaaataggctgcttgactgttcattaccattgtaatagattagaagtgacattggtttaaaataaaaacaacaactcatcattctggtccagttgaccaattagggcattcacacttgtcatactgcagttgcacagttgttgacattatttttcatcatatgatggttatgggaaagatacatagtactttatagactgtatctctgcttctgcccaaattaaagtctttgtgcttatgagagtgtgtatttatgtacatagaggtaaaggggcaaaccattctctggtggtaaagaaatgagatggtaattgacaaacagatgtygaaacccacaagatacccagatactaagaaaatagatttgtatgggctgcctcattccttcaactgtaacataaataagaagaatcataactactggaataagaaacatatggttgcctgccagaagcctcttcttatcataccagatattcaggaaaactctcctg

SEQ ID NO: 127168 - DNA, 553 bp, Homo sapiens
cttctacccactacaaagcactgcaacattcagctatgaactgcaggcagttcactttgttcagaacataggaccaaagccagctatgcctgtgagttgggtggaattcctgataaggagttgtaggagggacaggtaytattgacatcactagggtcggggaagaagcaggatatcacacgcctaggaaattgacctatgatctgggaagccttctcttgccattcacacgtgaatggtgtgtgttgggacctgctcacatttgggctgagagatgcatgaatgtggtaactaagcagccctcagagtctgtgtcagagcctggctattacgtaggtagatcaaggagttacttacacagtgtggtttgagggacctcaaaaaattcacttcttccaaaatttgtctcccactggctgtaactatgtcttacatccaccattaaaagagttcctttgggttaaagtagatgataaggaggtttcctgcttgcctctgtgttcaccactccacccttctcattttgctttgcagttgcattgcagcctcttag

SEQ ID NO: 127169 - DNA, 553 bp, Homo sapiens
cttctacccactacaaagcactgcaacattcagctatgaactgcaggcagttcactttgttcagaacataggaccaaagccagctatgcctgtgagttgggtggaattcctgataaggagttgtaggagggacaggtattattgacatcactaggrtcggggaagaagcaggatatcacacgcctaggaaattgacctatgatctgggaagccttctcttgccattcacacgtgaatggtgtgtgttgggacctgctcacatttgggctgagagatgcatgaatgtggtaactaagcagccctcagagtctgtgtcagagcctggctattacgtaggtagatcaaggagttacttacacagtgtggtttgagggacctcaaaaaattcacttcttccaaaatttgtctcccactggctgtaactatgtcttacatccaccattaaaagagttcctttgggttaaagtagatgataaggaggtttcctgcttgcctctgtgttcaccactccacccttctcattttgctttgcagttgcattgcagcctcttag

SEQ ID NO: 127170 - DNA, 579 bp, Homo sapiens
aggaccaattccccagggagaggagcagtgccatctctgcatttgagtcaactcagctgttccagcctgccggctctggagagtccagacaatctggatgaagaagggtcctcracaaaggagcacagctgcactaccaagaagcagccaggctgcttctgtaagtgggtccctgattctgttccttctcacaagggaccaccccccagggttatgtagggacaggtttcccaccttgctgggaatcctggggccagagtatacaaaactcctgggtctccgtgtgtgcctgttttgctactctgtcaggactccacacagctctgtgtagagagacccaaggacctggtgatactggcttatgagaggatcacctgatctgctggttgcaatgattcatgggagaagtgtggtttcccagggtggaatcacacaatcacttcaccacttcccttgacttgagggcagggattcctttgggtccatgtggctcctgggcaggccatcaccccaccctgcctttcttcattctctatgggtggacctgtttgcctagtcagtcccagcgcgagaacctgg

SEQ ID NO: 127171 - DNA, 411 bp, Homo sapiens
gaattctctgcagccttcctacttcttccatagactcaccctagggaggagttgactccagacccggggaccccactggggagggctggactggttaaaattgggatcaaagtgagcatgagaaatgcaaagtctcattaacaaccagcccagacagccagcccaagagggtgagggcagcaggagtaaaggggtggagggtgggtgaagggaggctccagggtgcaaggagttgctgctgatccattatagggttaaagaaagaaaaacacatgttaacattggggccagggcctaaagtctgtgctgcctgttctgaggctgaggctatggcaagcacwgaggaggcttgggcttcatcagggcgttctgccaggcacggtcccggagccaaactgatctgtgaagtca

SEQ ID NO: 127172 - DNA, 547 bp, Homo sapiens
ccaagcttgagaaccacagatctaaaagatgagggaaattgggctcaagggcaatgattaaagagccaggtctggacactccagaggaaggaaggtgaaaagtgctcttcagtgtgttcaatcgactttcagttacccatactaattgaagagaagactgtcacagacaactgtaagatcttaaacttgaaagttcttttatagttgggaaagcatttgatcttatttaaacctcaccacaagcctgggcagtagaaaggtatctatgcttctctaatagataaggaacaggagcctcaagagagtgaatgatttgcaaagaygtaagtggcagaataatttcaccagaactataatccagaatgttcaatagcctcaaaattcaaacaattttatctagaccgttaaattccttttgttcccctgagtaagagcaaaatctgctcatgggttaaaaaaccaagccaaccaaccaaccaaacaacaacaaaaacaggaaactttttaagataagatggagtggcagagaaaaaacaaaaaaaacaaa

SEQ ID NO: 127173 - DNA, 568 bp, Homo sapiens
tgttgcccaggctggtcttgaactcctgagctcaagtgatccacccgcctaggcctcccaaagtgctaggattacaggcatgagccaccacattcagccaccatgcataaagttttgtgatcttctttattcacttaatagtttatatgattacttcacatctttaaataatcctttacaacattgtttttaatggctgagtatagttacattctattaatacatatatttatttaaccagatcccattttttgacatttagcttgtttctagtttctcacagctgtcaacatctttgtagttacatcacaaaatcattcaaaattattccttaagaataaatttctaaatagaattttgcacccaagggtatggagaattctaatgcttttgatacttacattgtcaaattgactcctcctgccctccagtattataccctctgagtatgagratgtgttgggctttctaccaccctctccagtgtgtagaggtgttatagacctgtgaaaacggctgagtagaagatgttggagatagttcatggaaatgtaggtcagtgacaatg

SEQ ID NO: 127174 - DNA, 576 bp, Homo sapiens
gttacattctattaatacatatatttatttaaccagatcccattttttgacatttagcttgtttctagtttctcacagctgtcaacatctttgtagttacatcacaaaatcattcaaaattattccttaagaataaatttctaaatagaattttgcacccaagggtatggagaattctaatgcttttgatacttacattgtcaaattgactcctcctgccctccagtattataccctctgagtatgaggatgtgttgggctttctaccaccctctccagtgtgtagaggtgttatagacctgtgaaaacggctgagtagaagatgttggagatagttcatggaaatgtaggtcagtgacaatgaggggctcaggcaaattcttgagctggatcagaagcagagtgaccttgcaattgtagtcatgttcagagccatgaacatttgcctgctgtcctgattaaaaatttcctgtgtctatgatgccatgtgawgtgctgggcagatgccagactgtttcctgcttgattcagctacattcatgagaccatgtagcaatcagaaataagagagcattt

SEQ ID NO: 127175 - DNA, 622 bp, Homo sapiens
tcttctctgctgacagataatgcattcagcagttctgccccagtttaaaaatcattcccaaatcacttcacttccagagcagaaccaaaytcctcctactgagtgacttttcagtctggtgcagattcaggaaaagataaatgtatttttcattatgtattcagtaggtacttagcaaaccagattctcctgaggtgtgattctcctgggaataaaatcctagaaataatctaccactccctcaagctcccaagtctctattcacactagccttcttgccatttcttgaacctgcgaagcccattcctgccccccaggaatggtgacctggggcacttgctgacctctgtctggaacatttcctccagatacccacacggctcactccctctttccattcacatctctagagactcaagtgtcatcagaacccagaagccttccgcaacagtctgtgcaaaagagcacccacccctataaactccatgcagacagggactttgttttgtagactgctgtatccccagagcctcaaaaagtattggctcaaaaagggaagtcaatttattttttcaaatgagtggggaaaaaaattaggtcctgctgtctgggcactgctctt

SEQ ID NO: 127176 - DNA, 622 bp, Homo sapiens
tcttctctgctgacagataatgcattcagcagttctgccccagtttaaaaatcattcccaaatcacttcacttccagagcagaaccaaactcctcctactgagtgacttttcagtctggtgcagattcaggaaaagataaatgtatttttcattatgtattcagtaggtacttagcaaaccagattctcctgaggtgtgattctcctgggaataaaatcctagaaataatctaccactccctcaagctcccaagtctctattcacactagccttcttgccatttcttgaacctgcgaagcccattcctgccccccaggaatggtgacctggggcacttgctgacctctgtctggaacatttcctccagatacccacacggctcactccctctttccattcacatctctagagactcaagtgtcatcagaacccagaagccttccgcaacagtctgtgcaaaagagcacccacccctataaactccatgcagacagggactttgttttgtagactgctgtatccccagagcctcaaaaagtattggctcaaaaagggaagtcaatttattttttcaaatgagtggrgaaaaaaattaggtcctgctgtctgggcactgctctt

SEQ ID NO: 127177 - DNA, 636 bp, Homo sapiens
tctttcctcttctctctcacttgctctgtcttctcttcctctcatatttctttcttcttctttcattccttctattcatattttctttatctctctactgcttcccttctcttagtgttcttgttctttctcatttctactgccctatccctctctcccagcttagtctctttcattctccctccaataacaatcttcctctcctctcttctaatcttctgctctcagatttcacaagttctgtttttttaatgctctgcccaatacccactaggtgcctgtacaaaaccacccaaggaatgcaattaactttgaattgtactagggccaatctttacctcaaatagatcccaaactttgcctcaagtattccaatttgacagatatttatagaataatctctaggtaccagacattatgcttgattttattattcataatttcrtagactcttcacaacaaccttgcaaagaaagaaagggctatgattcccattttacaaacaaagaaactgaactgagcggtgaggatcagagataaaagggggcatgagtaaaatcacatactaagaagatgcagaattaagttttgtgtctggctccaaagcctattaaattcttaatttatctgcctggg

SEQ ID NO: 127178 - DNA, 564 bp, Homo sapiens
ctgactccatgaaaataccacaggaagctctagaactagtgagggaaatagaaaaagaatagaaagatattgtccagagtgattagtgctaccatagggataaatatataacactgtgggagcactatattaagatgcrtgaagaatacatccagatgggaaggtgaaggtagtgtcaggaatatgacagtgaacaacaaacaaaaattgctgtcttcatgcagcttactttttagtataggaatttacacaataaatacaaaaatattatatactcatattaagtgatatggtggaaagtaaagcagataaaaggatgggatgtgggggcttgctggggctgtaattttaaataaggtacaatgactgagaaggtgacatttgaataaaaagctgaaaaaaattgcaaatgagccatgtgagtatctggagtagagagttccaggcagagggagtgatacgtacaagggtcccaaggtgggaacatacttcttatgttcaaggaataagttggaagactggtgtccctgaggcagagtgagcaaggatgagtagtaggacaca

SEQ ID NO: 127179 - DNA, 548 bp, Homo sapiens
tgtaagacaagtaagaagatataatcctggagccagaggaaaagagaaagaaaggacatggagaaagcaccctggtaacttccccaataagactgctgggttccctgacactgctcccatcttcccctccagcctattccaccacctacaaatgcagtctgggttgtacttgctgcccagatctagcttaccattaccatcaccttctatccctattcccctatgtgcccaggaaaccacagcttgaagagaagggtttaaaggattattgcatagtgcagagtgtctgcactgatgtcagaggcctgrtttccagtcccagctctaaccctgactaactctgtggccttgggcaagctcctcccctctcagtgccttgtctgtaacttaaagggcttgtaatgtttcttaacttttcatggaatcacagacttctgagaatctgacgaaatctgtggatgcagatgccacaatttagcatacaatttcaagtgactcatggacttgtaggctaagaatttctgcctgatagctaagggctctttcag

SEQ ID NO: 127180 - DNA, 313 bp, Homo sapiens
cactgtccaacaagccccagtgagatgaacccggtacctcagtcggaaatgcagaaatcactcatcttctgcgtcactcacgctgggagctgtagactggagctgttcctattcggccatcttatgaatcatgcatgttcaactatgagcaactatgtgtattcaatgggaaatggaataccataaaattrtcatatgttgagcccaaaatgataggatagaatttgatagtctgaggatggaaaggaccttcaaggccacttttaaaaaccccattcccatatgatgcttgaattcttaaccactgtgtgtc

SEQ ID NO: 127181 - DNA, 543 bp, Homo sapiens
tcaatttacaaatgaggaaactgaggcacagaagagttgagtgatttgcccaaagtcatacaaatagtcagtggctatgtgatgaatagttaccaacataaaagagtgagattactgctgtactaaaagtaggtacataatcccctgagcagacagtatgagagaatgatttattttacctggaaagtttaggaaggcttcacagaggagttaagggttgatctgggtcttgagggatggataagagtttgccagatacaaaaaggtaggaagagaacttcaggaggagggaacaggctgagcaaagacacggcgatgtgaaagtggraggcttgtttggggaacattatggaatctggaggttattgtggggaatctcatcagatgcagcaagctgtttgacaggccttcagttggctctttgtaccttgctccctccgcatgctgagctgtccatagctgccctaggctggtgtctgggattttcggaagaaggttactatccaggtagtgtaacaagatgcagtgcaaaagcaccagatt

SEQ ID NO: 127182 - DNA, 463 bp, Homo sapiens
cttaattttacagtcacatttcttcactgtacccttttatattctatgctccaagtaacactgtgctctctttttcccttaggctggttcctctctctgaaatgtttctcttacccactcttaacctgaagattatctttctggtttctgcttagtcacagatcttccttgacacatcaacccaacccctccagcaagcttccataacgtcctgttcttacttttctcaaaggcctttgcacttactgtgttccctattcaaagtactctttccatagcattcttgtttgtgtcattcaaggatcagctaaaaaataaccttttagtgagttcttgtctgaattttaaaactaacacagacacccaaayagccagttgttagtacatcaaaccagttttttaccttagttaaaaaacctaaaatttttagattttattttattattgaagactacctgaggca

SEQ ID NO: 127183 - DNA, 601 bp, Homo sapiens
gaattcactattgtccctttccatttgaaggatatctgaatgttctcactcctttctctcctgtgccaaagcaaatgcacagtggcaggtctgtgtttactctcctacttctaaagccatgactgatccacatgctttccagatcccaggaaaaacaacctggtggagatcatcttggatatcaacgtcagtcagctaactgagaggctgaaggggatgttcatccgccagattggggtcctcctgggggtgctggattccgacatcattgtgcaaaagattcagccgtacacggagcasaggtagctgggcaatgaatggggggagcaaaggaaagaccaggggcccccgggcttcttgaatgagctgagaaatagtgtggttagatagagaaaggtgggctttctgaccagaaacactcatgttgccttttcttcaatagacttctgtcttctagtgcaggtgacatgcgctgtactagacacttcagcagggctccagggtgtaggaggtcaactattttgacaaccacagtctagtagaggagataagtaaatatggaacattagtacggtgtgggtttggtacaacaagcggcatt

SEQ ID NO: 127184 - DNA, 608 bp, Homo sapiens
aactgattctattgttaaacagctttaatatttagaaggtgtacttttatattgagacaacttcttataatttctactaattggtcttatttctgttgttaggagtcagagagttcttttattttttctattactataacattcccactttgacaggactgctgcatgctataaactcttaagttttgttcacttttcaccatatgacgtgattttaaggtgaacactgataaacttcctagggttactctgtgttttttaatgaagatttcttaaagtgccaatcagaaaagcataatactaaaaatatggtcaatttataaaaaaaaaatgttcagatgtagtattttgtacatttatctaaaaagaagcatgacggcctccaatatttatttagcatatgtcatgttcaaggcattttcacatatattacttaatttttatagcaaaagaactcattattcycattttacaaatgaggaaactgagacacagagaaattatttatattgattaaattttctcagctactagtaatagagcctatgttttaatcctggtgtttctagtactaatgcccttcccatttcaatgccattgcatggctt

SEQ ID NO: 127185 - DNA, 608 bp, Homo sapiens
aactgattctattgttaaacagctttaatatttagaaggtgtacttttatattgagacaacttcttataatttctactaattggtcttatttctgttgttaggagtcagagagttcttttattttttctattactataacattcccactttgacaggactgctgcatgctataaactcttaagttttgttcacttttcaccatatgacgtgattttaaggtgaacactgataaacttcctagggttactctgtgttttttaatgaagatttcttaaagtgccaatcagaaaagcataatactaaaaatatggtcaatttataaaaaaaaaatgttcagatgtagtattttgtacatttatctaaaaagaagcatgacggcctccaatatttatttagcatatgtcatgttcaaggcattttcacatatattacttaatttttatagcaaaagaactcattattctcattttacaaatgaggaaactgagacacagagaaattatttrtattgattaaattttctcagctactagtaatagagcctatgttttaatcctggtgtttctagtactaatgcccttcccatttcaatgccattgcatggctt

SEQ ID NO: 127186 - DNA, 563 bp, Homo sapiens
tgtcattacccaaacatgacatacaaattccattcctctttgcctttttaccagcagtttcttctaccctaaaagcttttctgcccctcacttacctaaaataatcatactcatccttctaaattgagattaagcaaattaacattatctccatgaagccttccagaatactcagccaccaaagctggtcatgttctcctctctggaccacacagatctttgsattaggaacttaattctatttatttctacattctgtgtacctaacacagtgcttgatatataatagcactccaaggagtttttttaggtgaaataattatcaattaatgacttgataaaaaataattaagcctcccaaaagaagccaaagaaatgtcaatagaaagaaaatgaagcaatctttgtcttagtaagtctcatttgtataattcaccaaaatttttcatctacctaaaattgttttaaaaacaacaccttatctattctcaagaaaacaaactaacatgatgacataaactaatgtgcctattttttgaaagtatagatttcaatgagtacat

SEQ ID NO: 127187 - DNA, 623 bp, Homo sapiens
gcctaatgctatccctcccctccaccaccccacaacaggccccagtgtgtgatgttccccttcctgtgtycatgtgttctcattgttcaattcccacctatgagtgacaacatgaggtgtttggttttttgtccttgcgatagtttgctgagaatgatggtttctagcttcacccatgtccctacaaaggacatgaactcatcctttttttatggctgcatagtattccatggtgtatatgtgccacattttcttaatccagtctgtcattgatggatatttgtgttggttccaagtctttgctgttgtgaatagtgcagcagtaaacatacgtctgcatgtgtctttatagcagcatgatttataatcctttgggtatatactcagtaatgggatggctgggtcaaatggtatttctagttctagatctctgaggaattgccacactgtcttccacaatggttgaactagtttacagtcccaccgacagtgtaaaagagctcctgtttctccacatcctctccagcacctgttgtttcctgactttttaatgatcaccattctaactggtgtgagatggtatctcattgtggttttgatttgcattactctgatggccagtg

SEQ ID NO: 127188 - DNA, 573 bp, Homo sapiens
catgttctcatttgttttgcataactctgtaacgtaatgtgcttcatttgccctctttttaaccaatcacgaaatttgggtgcagaaatgttaagtgacatttccaaatgacttacagcctgtccaaatagccttaccccttctctaatgcttgttacatttttgccccaaatctaaaatgtattaaaacattatctttgaaatcttattgtaagatgacattttcttgttttatcattctctgttgtcttctattgatctttgttcttcacattcaatmaaaggccctgcttgctgttttcattctctaaaaggtgttctagaaaagtatttctctacaaatggtggggaaagggtggagagggggtgcagttttacttttaagcctaatgttgaatttactttgaatttcaaataccattaaaggagaggtaggatttatgtaattatgaaatgatggcctggattttaaaaagcttgagaaaggctattctaggtcagtttgtttgtttgtagctcacagttaccagagttcactatgtgccgaaatagtgtatgcagtgttgtttgttt

SEQ ID NO: 127189 - DNA, 468 bp, Homo sapiens
tgaagtgaatataccataatattttcagttattttccggtagatgtgtattcttttttaaagttctttactaatatagacaatacttcaataaacatctttgtatatgaacatatgtgtcttagtctgcaagggcttcygtaacaaaataccatggattgagttgcttttaaacaaaatagatttatttgtcactgttctggaggctgggaatcccagatgaaatatctgcaggtttggttgtgcctgaggcttctcttgcttgtagatggttgtcttcttgctatgtctttatatgccctcctcaacatgtgatcatagccctggtctctttcttttcttgtaagagcccagtcatattggattagggccccactcttatgaccacatttgcgttaattacctctttagaggccctacctccaaatatagtcacatgctggggattaggccttcagcataagaattc

SEQ ID NO: 127190 - DNA, 569 bp, Homo sapiens
ttcaacaattctggacaatgcgaagagatgtaaacttttaatatggtaatagcacaaacaccatcataaacaactgatacaaatcactatataaacttccacgttgagtagtacaccaagaatacaaatctccaagtgactcttttaggtctttaatatatcatattttttctactttgcagttcttatcattgttttgttcattctttatttagtggaggcataccatgcacctcagtatggcgataatatatgggtggcagcaaaaagttccagcccagcatggccagtgctatccctctatctttttwaaaaaaattgtgcacttttatttgtcatgctttctaaaaaggtatctatgccattgattttttattgatgcataatacatgtacatattttcaaggtacatatgataagttaatagattcacataatttgtaaagttcagtgtacttgggatagccaacaccttaagtatttgtcttttcattgcactataaacattctaattattctcttccagctgttttgaatgtgcagtagattactgtaaactctactcaccc

SEQ ID NO: 127191 - DNA, 573 bp, Homo sapiens
attttcattaatacacactaaggtaatatttagttttttgtgggttttggtggctattgatcatttttcactgagcttgagctaagagtcagctgtaattacttaatcttttctacatgcgatactgcttacccacatctctcctgttctttaagtgatcgttcacttttttttttttgatatgagagtcaagcaagacacttttcccatttaaagtccattttacygtagccagcccttgttaagatcctgctggatctgcaatgatacaacttaccaaagctccatcacagttccaagtttgttggtaggcctttcttgtagcacagagaaatactgaggcaaaaagtgagacccatggtataattgagacatagtgttgtcagcttatatctgtgtgcagctggttgctccagcaacaactggaatacaatgtaggtctgaaaacatggaaggtatctaatacataccttacttagctataaccttgaacaatcctctaagtatttaaatgctttgtgcttaattttcctcatgtatacagagagtacagtaatctgctctatcttgtag

SEQ ID NO: 127192 - DNA, 603 bp, Homo sapiens
agcacactctttacctttcaaagactataccagaagaacccactttaattttcagatctcagatagcactcggttatatgacaaacattagtaatattcaagccactaattactgtattccttttcaggattcacatactatcacttactgtatatatttatcttcctcacactctcaccttagttgatcaaccgcatatgtctgtttctgtcagacaagataccctaaaatcttcactgctttctcawatctggaatctcctagacctcaggacctcctgcatactctctcttgtctaatgaattggctgtattgttgctctgacactcaatacagcacatacacttccagtacatggccaggtctttgttaatcttgtattacagcatctagtatcagtttgcactttgggtttttttttttttctatgagcacagtaggaaaaactctttcctattcttggaaggaaacagtggtaaagcccaacaactcaaggtctgttacaatattagggcctttgggagaaacctgaagtgtgcctgttattgagagattcttgaatgctctcaaaatgaaatcttttaatgtttcccaatgaataa

SEQ ID NO: 127193 - DNA, 570 bp, Homo sapiens
ttgaccttggactcaattttgagctacacattcatttctctagaatgttggtaaaagttgcagaagtagagtcatctgtatatttctcttcaagtccttaaacttttagtaaaccattatttatggatctaacacacttgtaaacaatgccagcaacatattatttgtcctgcatgcttataaaattcttttttttttttttggtcatggttagrtgattcccggtaactacattttaattctaattctgagaagtaagtaacaaaaaaactataatccttaaaaaaatcagttgaattaacaaaggcacttgcttcacacaagattaaattaggccatatgaaaagttactttgcataatctcttcatgactttgcatctagttatttccaagctaatatatctagcctctaattcaaaaagaattgtagacatgactttattatcttccttatggaaaatttcttgataaaaattaggttgcttcactattgatttgaatctaattttagcagtggttagaagttccaacacagctttctacaaggatttgagatttgacatccatct

SEQ ID NO: 127194 - DNA, 488 bp, Homo sapiens
tttcttaccattcagactctggcctctctctctctcgtgtgaactggttaaatgaaagttgaaagtcaccgtttacctcctctgtaaaatttttattaataccaaaaagaattctgaggctaatcttaagctgtagtgaatctggtgtgctttgtgtatctttctgtattgttctgtcatacagaggggtactttaggatgaaatgtgtacctaggaccccataggtaccctatttaagacagcccagcaaactggtcagtcatgtccttggaagcttgaccttataaccatgtggccatgctttctcttttcacaayggtggcccaggtttatggtttaattcctggcttagggaatgagtcctttatcatctgcctgtctgtgtatttatatgtgttgtatatataatagaaaagaggtttaattaattgatttaataataagagcttaaagcaaatattttttcagaaaagtaaaaagtgtaatg

SEQ ID NO: 127195 - DNA, 580 bp, Homo sapiens
ctttgggaaataaagacagtgttaaagattattggtaaaataaaaatatcttcaaaatacaaacatktggtctaaattatgcaggtcagatattaggtttgttaaatgctttaagttcatatactacttctttgacttttaaaaattgttcagtttattttggagcaattgattctagataagaccaggggacatgtgaaattagccatgccccctagctatgcaaagaaggttataaagaaaaaatattttatataagaaagatcttgtacagtaaattcttgtcctaaagtaaaataactggatgtttcaaatgggaggtgtttaggacagccagaaagtccaagcatgttatagatggtctgtgtaagttgtgaaatcatttataaaagagaatttatgcaagaaatgttgtacaatttaaaggagattaggcctcctaaatgcttcataaaatgccactatgactcttaactgtccaccttgcctgctttacagctaagtaaggcctaggacacatggaattagatgctggaaagagatagaccttatctgaacttctctctgggccctaggctcc

SEQ ID NO: 127196 - DNA, 591 bp, Homo sapiens
gcagagaaaagggaatgcttatatgctattggtgggaatgtaaattagttcagcagtgtggaaagcagtttggagatttctcaaataacttaaaatagaattaccattcaacccagcaatcccattactgggtatatatccaaaggaaaaaaaatctttctaccaaaaatacacatgcacttgcatgttcgaaacagcactactcaaagtagcccattaacagtgggacagaacaaagaaaatgtggtacatatataccatggaatactatgcaaccataaaaaagaatgaaatcatgtccttacagcaaatggatgcagctggaggctagtaacctaagcaaaataatgcaggaacagaaaaccaaatactgcatcttcttatttataattgacagctaaacactgggcactcatggacgtaaagatggcaacaatagacaatgccarttactagatagaagagggaggaagggaatcaagggttgaaaaactaacttttgggtactatgctcacttcctgggtgatggattcaattgaaccccaacctcagtatcacacaacatacccttgtaacaaacctgcacatgt

SEQ ID NO: 127197 - DNA, 551 bp, Homo sapiens
tataccagtaccatgctgtttcagttactatagctttgtaatagaatttaaagtcaggtaacatgatgcttccagctttgttctttttgtttaagattgcattggctatttgtgctctttttggttccacacgaatttaagaattgtttttttttttctagttcygtgaaaaatgatgttgatattttgatagggattgcattaaatctgtcaattgctttgggcaatatggccattttaatgatattaattcctctgatctataagcatggaatgtttttccatttgtttttgttatccacaatttatttcatcagtgttttgtagttttctttgtagagatctttctttcaccttcttggtaaaatctattaggtatttgtagttattttaaatggaattgtctttttgatttctttcttacatagataattattggtgtatagaaatactactaatttttgtacattgattttgtatcttgcaactttaattcatgatcaaatctttttggtggagtcttaggtttctctagatataaagtcacatca

SEQ ID NO: 127198 - DNA, 472 bp, Homo sapiens
gaaaagaacagtctccaccataaagggtgttgggaaaactggatatccacatgcagaagaatataattagacccttatctcacattatatacaaaaatgaactcaaagtggattaaagacttaaacataagaactgaaaatgtaaaactactagatgttaacataggaaaaatcttcctcatattggtctggacaatgattgtttggctatggccccaaaagcacaggcaacaaaggcaaaaaatagacaggttgaattgcatcaaactaaaaggcttctgcaaagcaaggaaaacaatcaacagagtgaagggataacctacagaattcttatcttaaaaattcccaagagactagatcataaayattcttaccacacaaaaaaaatgatacctatgtaggatgatgaatatattaattacctcgattcaataattatttcacaacatatacatatatcaaaacatcattg

SEQ ID NO: 127199 - DNA, 567 bp, Homo sapiens
attgtgtcagtataaaaccattaaaatttaaaagttagcttagctttttaagtttagatttttaattcatcggaaatttctatgtcagatgaatggcaggtgtcataggtgagattattgttcatcaaaatattcattagtgtcttcatctccatgggagaatatatttctctaccctgtggatgtcaggtttggctacatgactgctttggccaatgggatattaacaaacataatgcaaagagaagcatatgatatttcctactcccctaaactgccctatgtaattttaatttctattaaaaacaaaagtcattattgaactaatatgactatgcaaatatggttatcaggtgaaccagatagaatatgctaatatatttattagtatgtaacttcttttttattcactgaattttctatatctatatctatatagatatagatatgtatcacttgttgattgatctggaagttttttgayagaactctaaagcttctcttaatctggtaaaaatacatttcaaaaattaataaattcatttccctttcaactgtttgctcaac

SEQ ID NO: 127200 - DNA, 460 bp, Homo sapiens
tatttttcccattctttctgctaatgataactagaaaccttggacattttatatgcaataartataaggagactctaaaagatagtgagaagaaagcagaccatctatgggacacagggcacaagaaatgacatggtggtaagctccttgggttttcttttggattcatatatctcagacttggagctgaagaagccagcaacccagaaatgccagtgagtaaagacaaaaaatagaaataaataaataaataaagcctcctctccttagcaaaaagaccaggaaaggggcaacctagtaagacagaaaacttgtatactgtaactgttctactccagctaaacaccacagaaagaactgtgtccccacctctgcctatgccagcataggctgagtggggtgccaccctcaccagcctctaacaagttaccctaactttcctgctggggtgttacagaga

SEQ ID NO: 127201 - DNA, 478 bp, Homo sapiens
tgggaagtatgatcgtgcttgaaacacagcttaaaggagaagccaacaaactgtgtggaggaatcagatgtgggatattaaagaaagagagaaaccaaatmcggctttgaatttatggcctgaccaactgggtgaatatgctgttaccacttactgagatggggaagaagtgtttttgtcgttttgtgaatttttgttttgttttgtgattattttgtttgtttgctttagcttaatttttttcttttgggtttcatgaagataaaaaaataaaaagttttgcctgggttatgttatgtttgaaaatcattttagctatctaaatacaaaagttaagggaagttcaagagaggagctagggctggagacaaaaatttagatgttgtaaacatctatctaaaatttaaagtcaagagattacatgagattttccaaggggtgaaaaaatatgtttaaggattgaatcctaggggactcc

SEQ ID NO: 127202 - DNA, 564 bp, Homo sapiens
attcctgcaaaatatatataaaattttatgactaaattatggtaaatataaatataaggaaatctacataataaaatcttcgataaaatacatgaagaaaaactattatcctaatataatcagtaaaacagactaaataattagaaggcaaagtacttgatttaaattkgaatacaatagttttgctgcaagtgtctactatgtacaatacagataagattttaactttcagaataatacgttctgtaaatagcagaaaaaatttatacaaaaaacaaatatttaaaatataaattatttatccatctattctaaaattaatgagaatcctggtttgaatcctgtgaactgctacaccacttaacattagtatattctagtgtatttgaagattttttagacaaaaatatttgaaatatcttagcttgctatcacgctagtgagaaaaaaataatactttgttatttccaagaatttctacaagagaaaatactctctctaatagttgaagcaccttgtggaatactgaggcaacctgcggtttaaaaagtatcttgcttgccc

SEQ ID NO: 127203 - DNA, 564 bp, Homo sapiens
attcctgcaaaatatatataaaattttatgactaaattatggtaaatataaatataaggaaatctacataataaaatcttcgataaaatacatgaagaaaaactattatcctaatataatcagtaaaacagactaaataattagaaggcaaagtacttgatttaaatttgaatacaatagttttgctgcaagtgtctactatgtacaatacagataagattttaactttcagaataatacgttctgtaaatagcagaaaaaatttatacaaaaaacaaatatttaaaatataaattatttatccatctattctaaaattaatgagaatcctggtttgaatcctgtgaactgctacaccacttaacattagtatattctagtgtatttgaagattttttagacaaaaatatttgaaatatcttagcttgctatcacgctagtgagaaaaaaataatactttgttatttccwagaatttctacaagagaaaatactctctctaatagttgaagcaccttgtggaatactgaggcaacctgcggtttaaaaagtatcttgcttgccc

SEQ ID NO: 127204 - DNA, 463 bp, Homo sapiens
tcatatgtgctacagagggtgagggataaaaatatggagattcagggcctgctgtatcagtaaagattttatgggtctakttgcctgtttcatgcctggacatttcctccaaagtaaaagaaaaatcatttcatgtcatatcttccaccactaagaagaaaagataacacttggtaggtctcttcaaattttagaggcagtatattccacacttatgaatgctgtcctggtctattcactgggtgattaaaaaaaaaaaaaaagggctgctagctttggatagggctcagagcaggatagggctcttcagtacatctaggctgtggagtaagcagctctgatgtttcagctatagtaaccagaagcccttatggtattagaatatcagtagtggcaaaaaaaaagtctgacttacacagaaagctttagttgaagaatctggagccatttgtgtaggaatgca

SEQ ID NO: 127205 - DNA, 595 bp, Homo sapiens
cctgcaggttcgctctataggtccccccccagcttcccctcagaccccaactaagacaataggagtcatacttgttgtgcacccatagtgggacactgccctgcccagggattctccacccttaagataccataccaccagattccccacaaacataccccacaacccactctgactttagcatgcacagtagattggcgggtccctggggacctgcgggacctctggagatctagccctctgcatgggctaaccctaagggaaggaggagcacagcctgccaaagtctctcttgggacaaaggaaaaataggcatggcaccaactgctgaaggagacagcaccaacatccaggaacagatatgaaaagtgggtcattgtattaatccattcttaaacttctataaagaaatacccgagactgggcaatatatgaagaaaaaaaggcttaaytggctcacaattccacaggctacacagtaagcatgatgctggcttctgaggaggcctcaggagacttttgctcatggaagaagcaaaagggaagccagcacttcacatggccatagcaggaggaagagagtgagtggggaggt

SEQ ID NO: 127206 - DNA, 582 bp, Homo sapiens
tgaatgcagtttgttttgttttgttgttgcttaagaaaacaacagatttcaagaagaataatttaagtaaaaggtaagccatagtaacttaaaggtatctcttcagtcaataatacacatccttcaaggttcgtcttctcgataaatccttccatgactacacaagccctcaaaaactatataagatgcaaaatgttagtttaatttaaatgtcaatagttgtaaataatttgttactaatgacaaaaatcaagaaaccttaacatgatacacttgaagaagaaaaaaaactatgggagatctgaatctatttctgtactgacaatgctcccatttgctcacatgataactttattattaaaaaaaaaaggtcgggccgggtggctcatcyctgtaatcctagcactttgggaggccaaagcgggtggatcacctaaggtcaggagttcaagaccagcctggccaacatggtgaaaccccgtctctactaaaatacaaaaattagccgggcatgaccggtgcccgtaatcccagctacctgggaggttgagacgggagaatcacttgaatccgggagatggt

SEQ ID NO: 127207 - DNA, 446 bp, Homo sapiens
tttaagtctgaggaattgccacactgtcttccacaatggttgaactaatttacactcccaccaacagtgtataataagtgttctttttctctgcaaccttgtcagcatgttttttgtttgtttgtttgttttgttttatttttttactttttgatactagtgatgatggtatctccttgtggttttgatttacatttccctaatgatttatgatgctgaacttttttttggtagtttaawaggaatagcatcaaatctatacattgctttggatagtatggccattttaatgatactgattcttcctatccatgagcatggaatgtttttccatttgtttatgtcatctctaatttatttgagcagtattttatagttctacttgtagagatcttttaccttcctggttggctgtgttcttaggggtgtgtgtgtgtgtgtgtgtg

SEQ ID NO: 127208 - DNA, 446 bp, Homo sapiens
tttaagtctgaggaattgccacactgtcttccacaatggttgaactaatttacactcccaccaacagtgtataataagtgttctttttctctgcaaccttgtcagcatgttttttgtttgtttgtttgttttgttttatttttttactttttgatactagtgatgatggtatctccttgtggttttgatttacatttccctaatgatttatgatgctgaacttttttttggtagtttaaaaggaatagcatcaaatctatacattgctttggatagtatggccattttaatgatactgattcttcctatccatgagcatggaatgtttttccatttgtttatgtcatctctaatttatttgagcagtattttatagttctacttgtagagatcttttacctycctggttggctgtgttcttaggggtgtgtgtgtgtgtgtgtgtg

SEQ ID NO: 127209 - DNA, 446 bp, Homo sapiens
tttaagtctgaggaattgccacactgtcttccacaatggttgaactaatttacactcccaccaacagtgtataataagtgttctttttctctgcaaccttgtcagcatgttttttgtttgtttgtttgttttgttttatttttttactttttgatactagtgatgatggtatctccttgtggttttgatttacatttccctaatgatttatgatgctgaacttttttttggtagtttaaaaggaatagcatcaaatctatacattgctttggatagtatggccattttaatgatactgattcttcctatccatgagcatggaatgtttttccatttgtttatgtcatctctaatttatttgagcagtattttatagttctacttgtagagatcttttaccttyctggttggctgtgttcttaggggtgtgtgtgtgtgtgtgtgtg

SEQ ID NO: 127210 - DNA, 665 bp, Homo sapiens
tttcacacttctacctaaccatctcctaccacttcctcgctctctgaaaataaaagcaaacataaaatggtcttgttaatataaaatcaatgagctgtcagcagatatataatagagaaactatcttgaacatgtgagcgatgaccatgccactctttttcccaargctgtgtggtcttggaaacgtgactaatccttggagtctctggtttttttccactataaaatgagggtgatgctgcctactttgaaaggtcattatgagtatagagacttcccaccaattatgaatcaataaatatatgttagacattattctaatggctgagaagcagtggtgcaaaagacaaaattattgtccctaagaagcctatattcttgtagggaagttggacaataaaaacataagcaaatacaaatttgagctcctaagagaagttctgcaggagataaacagtcatgtgatacagaacgatgaggactgtccctttagttaaatggttacagaaagcctttaagaagatgctatttgggttgagaaggtatagactctgtaaataacggagagaaggacattgttgggagaaggaataattagaaatgccagaaagtgggaagaaaatttggaatacttgagtttttgctagaaggaagagagtaaagaa

SEQ ID NO: 127211 - DNA, 585 bp, Homo sapiens
  misc_feature (1)...(585): n = A,T,C or G
aatgcgtttcatcccagtgggaaccagcagatgagggagaacacacacacaaaaatccttcgaatggtgaaatgtgcttaagacttttttcagaacgagggaggaaaaaagtgatcaacanatatgattcaagtttgttatagtttgaaaaaatgttgaagcttgacttctgcacatctacatgacttgtgtggatccagtagaaatgaagggacaaatggaagcagctgctgtggctgcatttttgcttaatataagagaagtaagcatatgnanctgtgtaagaagngagttagcttacaaggtggtgagatcccccatcaccagaggtattcaagtataggtctaacagccatttggtgnagnagtcatagagataatttaaacatgnagaggaagttgggtggatggcctctaaagacgtttctaggcttaggagtctatgattctctaaggtgaattcaaagaagaaaaagttcctgttgtcattatctagtaaaccacattgcagaatttaaaaaaaaattgattctttgaatgatgactyaaagtgcgattctgataaaattttctctaatcattcaa

SEQ ID NO: 127212 - DNA, 479 bp, Homo sapiens
caggaaagtcactcaacatcttttagccttggctctctcatttgtaagcatccctgtttcgtcaattgtccagggttgttagagatcccaatagtgcagatagaagtattttgtgaattaagtgtagtgtccctaattattacaagctcctgggtctcccrattataaagcctgggggagttccttacttgctactggatttctagtctctgaaagtggtacctggaggccagggcctagagtttctgaaagtgggacagtggtcccaatgtgccaggaccacagtgggtaggaccctgtacctgtgtattagtttattttcacactgctataaagaatacctgagactgggtaattgatgcaggaaagaggtttaattgactcatgatttcacatgactgggaagcctcaggaaactacagttgtggagaaggcaaaggggaagcaagcaccttcttcacagggtggcaggagagata

SEQ ID NO: 127213 - DNA, 558 bp, Homo sapiens
gagagaaggcatcccttaggctggaggactggagcaagccccaggtgcagcgaaaagagcaacctcagggagttacaggtattaccctccaggggttcacagtaaaagaacattctgtcaccctcttctgcccctggccctggacttatgctcttctcctgccataagcctagatatataaaagtagaatcatttctggattctggygcttctagaccagacttacttcaattaagaagagaaaagtccaccggtcatgcatggggctgcctcttagtccaggatataagaagaaaaggtcaagaccatcaaagtcatgtgtcctcagaagggatataactgaagcaataaacttttcacggttggcaaatgtggacaacatagtggtgaatctgtagggagaccaggggtaaggcaaagaactctatccacagaatcacaacctcctacaaggccccttgcaagcttggttccctgtggtgggcctggcagatgtggctggaggaaaggaaggcagatttccaaaactctcccaccttcttatatgcctctcccagc

SEQ ID NO: 127214 - DNA, 598 bp, Homo sapiens
cacattttataaagccaaaatttgagcacaagcttatttgatccgcgttgggatcagttaagcttgtgctcaaatcagttatttttacacctgagaattctctatcacatgccagttaaagacaaaactcctttgatctgtatttaagaccatacagaatctcggctccacctatcaatatagcytctcagtgcttccagatattaagcacagacttcaacaagtccttgcacctggccatgattttcttgcttttgttcttttaatcatgccacctggagtgcttacttgacttgtaggcattcctcaaagcccagattaattagtatcttctcctaaaaatcctcccaggggcccagagcacagtgatttctttctcttttgatcctataatgcttacctgtgctgctgtcacaattaacatgtcctagtcactgggtaaggcactggagaaacagcccaacctacaagagcagaaagaggtaagagcttggcagattatttgtgcatggaatggaggtggcttttcatatagcccaattctactcatcctttatcacttcctcagaaaaatccttgttctggcttcccaagaaag

SEQ ID NO: 127215 - DNA, 456 bp, Homo sapiens
agttaagtttttaaattctcactgtaatagtcagtagactttctgatggttacctataagttaacaggctaatkcttacttgtggtatttgaccaatatttcttcttcctgagatgtcctttccaccaacatggctttttctgcctccacaactcgaataaataagagtctttgcacccacaactccaaactgcatcttttcttccccattttaaattatccagtttgatgctagtcaatttacttccaccaaacaaacaaacaaacctttctagctattaaatacctgaacttaaaaaacaaaacagataaattagagaagttgtgatatggtttacgaaacattaattacaggcttatcataatcaggaacaaacctggagtgtttaaatactgtttataggctatacagttattgactatggcagaggatatgacagaattttaatacctata

SEQ ID NO: 127216 - DNA, 605 bp, Homo sapiens
catatgaaggaagttttagtggtctagatagaagatcaaaccagcgataactttcccttaagccaaagcctaatccagagccaggccctaactcttcaattctatgaagactgggaggagtgatgaagctaaagaaaaaaagtgtgaagctagcagaggttggttcatgaggtttaragaaagaagccacctctacaacatgaaagagtaaggtgaagcagcgagtgttgacatagaagctgcaacaagttatccaggtgatgaagttaagatcattggtaaaggaggctacactaaataacagatttagttatttatgtagctaaggtgacaagacatccttctattggaagaagatgctcatctaggacttttgtaactagagaggagaagtcaatgcctggcttcaaagcttcaaaggacaggttgactctcttcttaggggctaatgcagctggtgactttaagttgaagccaatgctcattaaccattctgaaaatcctaggtccattaataattatgttcaaactactctgcctgtggtgtataaatggaacaataaggcctggatgatagcacatctgtttacagtatggcttcctga

SEQ ID NO: 127217 - DNA, 552 bp, Homo sapiens
tccttcaggtactttggctgttggatttctttcttcctagtatgtcacaacccttggcttaaaaactcaatgttttattttcaaaataaaaatatattgaattgtgcagttttcagattaaggraaagaaagataaaagtaagcattaacttggagtatttgagccatttataaaaatttatttcatggattcagctaaaatttaatacataagtccacatgaagaattgtgtctacaaaaaatatttaaagagaagatgtcaggtcatgtaacagaaaagtccaagatgtatctcttcaggtgaggctagatccagcaacttgagtcatgctacagatgatttttctccttatccctctgttcttttttcaaatactgactacatcctcagacagagacctagtaggaaatctcaggacatcgcctcgtagttactaaacagtagctgtaggttcaaagctctcatcctccttccacacacccaagagaattagaatgagtcactgatttgattcttcagaaaagagaggtagtgtctccttcttaaatgt

SEQ ID NO: 127218 - DNA, 603 bp, Homo sapiens
tggcccactagtacaccactggccccatgaaagcagagatcttctttcctttttccctcttgcactgttagcaccaggttgcagttagtaagttgttggatgagcgcatgcatgactattattactttagacaactccttttttgtctcaaaaacaaaattcaaaggaaaattactcatttgctcaacaagaatgaggtgcttatgcttgaacaattaactatttaaaaaggtaccagaatcatgttataactcaatgctgggctacacttagctagctgtggtgatggaggcagcggtaccatttctagaaaaaggactgggtaaagaaaaggaaaaaaaaaaaaatgattgctgcacttatttcttccactgaatgargctcttcttgaggctgagatgattttgtattctactttgtggtccacctactcaccagcacgctctaagaatattatttatttaggttagaatgcaattatatattaccattataaagtcttatactagtatgccatggacacaaaaataaattcagaaaattattctaagacactccccactggccagcaagctctttaataataattatctgagaatagaa

SEQ ID NO: 127219 - DNA, 534 bp, Homo sapiens
aaatgccagacagtgactgaaccacagaacttacatggaaatgccctctatacagtttaccttctgatagggggatgagttcataccagccaataaccagcaaataaattaattacgcattttaaggaacgttcccagggaatctatcaagattctaaggtaaaaaaaaaaataatggggaagaggagggggatccacttgtatttagtaatcagggactgccactctggcaaggtgacttgagctatgacctgggagatgagatgccagccatggaatgaagttgaatatgagtgttttaggtcgagaaaactgtatatttggaccttgagatgaagaagagcttgacatattcaaggatttctttttttwaaaaaaataaaaacatatggaagagcatgatgaaccaggggttaaggagtaaaagaatgtgttaggtaactagtcaaaaggtgtgttagaaatacgatgtcttggattcatgtttgactcacttccttcaacccaaatgcaaagcagtagctaatgaagtag

SEQ ID NO: 127220 - DNA, 473 bp, Homo sapiens
gggactttttctagggtccccccaacctctcgagcttctttaaacatacatatcctcaactggaactcacgcagtgaacaaaaactcccttcaattcartaatcaggactcctcttccttagaaggcagtaggtggctttaagtaatcattttttccctgtcatatatatatttgtatattcaaagacaaaaatctaaaaaattatataacgcattgttctctccgggggataggatgctggagtacattcactttcagattgtattcatctatactgtctgaatattttataaaatgtgtcttctgctttttttccgttttaaggttttttattatacccaaaattcaaaagcatgttctcacttttaaaaatttatgtaatgcagatagagcaataggctcctgaaattccttctgctattttgatgcccctccccagaagtaaacactgatagtttttatctagagaccc

SEQ ID NO: 127221 - DNA, 595 bp, Homo sapiens
tgaatgaaacagtatttaaggtgatgtgtttccttacctrttgcccattaggcaccaccactcttttctaaagctaaagattatttttcccagaatcctcctccctgtatgtggttcctagttggagtgtgccaataacaggcgttcacgtgtgatttagcacaaagaagtgaaacagaagccattatttctgagaagcagttgcatcctgaagcttatgcagaggagagatttacagcatgtctcccggctcttgagaactatttacttcatcactgcaacctaagtagttggtaggacctccttagagaatcttggcaactgcagaaatttacaaactagctcctgagaaacagatttcactgcttcaatttgacaacgttggtgtgaaatcctctattgtggaagctctcttcactaccactctcttgatctttcagtggttttaaacccctaatattatcctaagcaccttttacttgattaaacagagtggcttctgactttttatatgattttttcactggcacaggtgcttcacagagtagtaataaactagttaattttaaacaggagccaaaggtgaaattatttt

SEQ ID NO: 127222 - DNA, 580 bp, Homo sapiens
actgaaaagatgccacacacataaagagaacacatttcgtagagataatacaaataggaaagatgttaaggtcagagagaaagtaattttacctgataataacaatctgaatatatattatttaggaagacttgaaaaccttcgacrgaattaatttaacttttgatgaactcattagtgaagcataggacttgataaattgtactgagtagttattactgctgtgttacaaattaccttaaaatttagtagcttaaaacagcaaacatatatgtctcacagtttttgagagttaggagtaacttagctgagtggttctggctcagactcttatgaggctgcggtcaagtcgttggtcagggctgcagacctagctgaaggcacacctgggaaggatttactaatgagctcactcaagtggttcctggcagttgtcagtttcttaatgattattagtcagaaacttcagttcctgggcacaaaagatctcgacagagctgttcataacatagcagcttgttcttccagagtgagtcatcaaatgggggaagagaacttaagctcccctaagacaaaagcg

SEQ ID NO: 127223 - DNA, 695 bp, Homo sapiens
taagtaatgtttttatttctgctcgtatttgacagattttgatttctcaatatcccattccattcttcataactaactcaattatcttcaaagatgaaaattagatcttttcacttcctctttgtaaaaaagaaaatacccttaacagcttggcactataaaaaggaayaattatgtatttttcaactatcatccatacaaattactgtgataatacaggcagtaaagaggatccatgctttgcattacacataactatgtgtttacatgctggaccactggaaggtacctgtggagagttatagcatgtggccattctagctgactcagaccaactttcgattgcagctttagagtcaggaaatccctttgattcatatcttttactaaggatatatttacatctaattgatttagaaataagtatctggcaagtataggatgaggatgattttgaataagatttccagctttacaactaggatagctagccagattcttgttcttttatttttcttgtcactcaatatttcaggaagccagaattcaaattgattcagtttttttttcctaagaggcagtctggatatgaccccagcaaacacttaacaaaattatagttggtcgtagagcttcaaaaaaatcccacctaaatgatcatcaccttgtctattagggtgttcatcctgatgttc

SEQ ID NO: 127224 - DNA, 592 bp, Homo sapiens
taaaaaaagttaaaagtataaagacagtaaaaatatcagtggtgacaggtggttaaggagaaaagagatagataaatagatggaaagtagggcatttttaaggcagtgaaattttatattgtagtggtagatgcaagaaataatgcatttgtcaaarcaaaaaatctgtacaatacagagtatttgtactgtacaaatacactaatataaatgatgaacttcagttaaactaatgtattgatattggttcatcaattgtaataaatatattacactgagaaaaaatgttaaaatagggcaaacggtgtggggtaggagttccagcctatggaagctctgcattttctgccatttttggtaaatcaaaaccttttccaagaaagactctgttaaaaacatttattcctctctgatattcctaacaaattgaggtcctgaatcattgcaaaggacacttgactctgtaatttatcctcatattttgtcatcaacaaaattccttcaataagaagaaaagtgttatggcttctatatagccataacaatattaaagttctttaacactttctagataaccttggtatgtttttaa

SEQ ID NO: 127225 - DNA, 592 bp, Homo sapiens
taaaaaaagttaaaagtataaagacagtaaaaatatcagtggtgacaggtggttaaggagaaaagagatagataaatagatggaaagtagggcatttttaaggcagtgaaattttatattgtagtggtagatgcaagaaataatgcatttgtcaaaacaaaaaatctgtacaatacagagtatttgtactgtacaaatacactaatataaatgatgaacttcagttaaactaatgtattgatattggttcatcaattgtaataaatatattacactgagaaaraatgttaaaatagggcaaacggtgtggggtaggagttccagcctatggaagctctgcattttctgccatttttggtaaatcaaaaccttttccaagaaagactctgttaaaaacatttattcctctctgatattcctaacaaattgaggtcctgaatcattgcaaaggacacttgactctgtaatttatcctcatattttgtcatcaacaaaattccttcaataagaagaaaagtgttatggcttctatatagccataacaatattaaagttctttaacactttctagataaccttggtatgtttttaa

SEQ ID NO: 127226 - DNA, 592 bp, Homo sapiens
taaaaaaagttaaaagtataaagacagtaaaaatatcagtggtgacaggtggttaaggagaaaagagatagataaatagatggaaagtagggcatttttaaggcagtgaaattttatattgtagtggtagatgcaagaaataatgcatttgtcaaaacaaaaaatctgtacaatacagagtatttgtactgtacaaatacactaatataaatgatgaacttcagttaaactaatgtattgatattggttcatcaattgtaataaatatattacactgagaaaaaatgttaaaatagggcaaacggtgtggggtaggagttccagcctatggaagctytgcattttctgccatttttggtaaatcaaaaccttttccaagaaagactctgttaaaaacatttattcctctctgatattcctaacaaattgaggtcctgaatcattgcaaaggacacttgactctgtaatttatcctcatattttgtcatcaacaaaattccttcaataagaagaaaagtgttatggcttctatatagccataacaatattaaagttctttaacactttctagataaccttggtatgtttttaa

SEQ ID NO: 127227 - DNA, 653 bp, Homo sapiens
agaaaatacattattttctgcagaggttcaggttaagcagttacagctgtctggacagattcagagaaagacacaaatcataaagccttcagatgagcaaggtaaatattaacaaatataatggaaatccgtcttactccatttcccttttagggtttttatcacttgaataaatgaaatgttaagagaatacaggtggtatgatctgacatttgagcaataaaacagcttaataagagtccattgagaggtactgaggaataaagcacacagcatagtattaatcacagacattaaaagagaagactgttgcattgtttggagcatgaatgcaattttggtttgttattgtttttgtttcatgaatagaataattttcaaaataaatgaagtttgttagtagtttcaacctccctccctacccaaactcagatattcagtttcatttttctaatgctccaaaattgtcttcattctttccattcatggtattactatagtattcaaatttttaaaaacactcaattgttgaatcttttcagtgtcaatatattaaaattargcacaagcaagcattaattacattttaaaatgatgaaattgaaactaagaatactcaagaaacttaattttgggcaacttaagccagaaac

SEQ ID NO: 127228 - DNA, 762 bp, Homo sapiens
aagatagatataagaatattatgtattccagttttgtatcatatggtgcaactcttcattataagattttgtgtataaataaatatggtgaaattcaatctcatttagattaagactaaagaatgtggagtctcctgactcatcttgaatcaaaattctgccttttactatttttgtgatcctagtaaatcatttaacatctcatcctcacacctcaatttctcatttataaaatgggaagaatgacaaggttgttacaaggattatgtgagtgaatacaaggaaatccttcaggacagtgacaggcagattgtgagtgcacaatttacattagctactatgttttattttttgttgttgctgttgcttttttattcattcctagtggaattaaccaaggaaatatactcttttcttttcttgagtattagagtattccaggtgaagattctttccaattaggatgttcmaatttccaaattaataaattatggtgtgagggtaacaagaagaatgaaatcaagtaatgctattgtgagattaattattcacccaataagacagtattgctctacattcaaagggaataataaatacaggtacattttggatcagtttatgtttaattcatttatgtgagaattagatcaatatctgaaaaaaatccttttattacaattggagacctaagcaaattgtatcctgggtttttaaagcttgtcatcagaaatcacatatatctgaaaaacaatgtataataaa

SEQ ID NO: 127229 - DNA, 762 bp, Homo sapiens
aagatagatataagaatattatgtattccagttttgtatcatatggtgcaactcttcattataagattttgtgtataaataaatatggtgaaattcaatctcatttagattaagactaaagaatgtggagtctcctgactcatcttgaatcaaaattctgccttttactatttttgtgatcctagtaaatcatttaacatctcatcctcacacctcaatttctcatttataaaatgggaagaatgacaaggttgttacaaggattatgtgagtgaatacaaggaaatccttcaggacagtgacaggcagattgtgagtgcacaatttacattagctactatgttttattttttgttgttgctgttgcttttttattcattcctagtggaattaaccaaggaaatatactcttttcttttcttgagtattagagtattccaggtgaagattctttccaattaggatgttcaaatttccaaattaataaattatrgtgtgagggtaacaagaagaatgaaatcaagtaatgctattgtgagattaattattcacccaataagacagtattgctctacattcaaagggaataataaatacaggtacattttggatcagtttatgtttaattcatttatgtgagaattagatcaatatctgaaaaaaatccttttattacaattggagacctaagcaaattgtatcctgggtttttaaagcttgtcatcagaaatcacatatatctgaaaaacaatgtataataaa

SEQ ID NO: 127230 - DNA, 559 bp, Homo sapiens
acgaaactttcatacataatacctggccattttctwaccaattgagtaatttgttgcacaaaaagctacttaacgtctttcagcaagaaatacattaaatctgaatagtaaagacattacataatgaattaggacacaattaaaatttgctttaaatatttctttgggggaaaggacaccacacttctactcaacgaagagaaacatttttacagtccagaggtcttttatttttttaacacctattatgcctgaattcatagggaagaggttccagcagctcaggctccttctcattggttctcacaaagtgtgcttctctgggtggagcaggctggcgctttggttgaacccaggtgcctttctctttgacttctttctttgtctgatcattttccttcacgcgtctcaggaagccatctcggctcttagagtgcttcctgtgctcaatatgcacattaattctcttggcaagaatcttgcccttaacttgtttgtttagaacaatgccaacggcatgctggggaacattgcagactcttccagttttgccatggtg

SEQ ID NO: 127231 - DNA, 536 bp, Homo sapiens
caaaaaaaaacacaaaaaaacaaaaaacctaatggaagggtattgattagctcacagaatatcttgaagactggacccagaaatcacgcaggcaccaaaggtagcagctggatagccaagaccacgatgaaaaccatgctgctggaacatctgggggacactgtggccatcaccaccatgtagccaggccccaggatgctgctgctgccaccacygccaggatgaatagttcactgtccttggcttcttgtatcactcactacaggctcaaagagctgggtggaagcatctgattggctaagcctccagtttccatttcatttctgtgctgactcggtcagtggaggattcctaggaattcccaggatgaggaaagatgctggaaattcagttgttctcaacctttactgtgttttgcaggttcccaaagccactgggggctgggtgggtatcttctctggcacatggcatttctgctgtaataaaggttcttttagttaaaagtcacaaaccccttatggtgtaagtgataaggt

SEQ ID NO: 127232 - DNA, 637 bp, Homo sapiens
cttttctcttgacttctgactgtcagatttacacctcttctgatccatgytatcctggcctgcagcagcagcctcacagccaaggacagggagcccaaacctgacagaagttgctggagagttaaaagctaacaaatgttttcttatgggatccactcaagagaaggcccaaaatagtattacagatgaggtttacaatggactactggatgaattatcaataaatcactgattgaaatccatgtttagtacttagaccaactttattgaagtacagaagaaggtatacacagaaaaaatcacacagacagatataccccagtgcctgtccaaggatgtaagatgagaggggtgaggccatgttggcaaagcatgaaggttatgcaacaagcaggcttatcatatgtaaggtattgtcataactgtcattacaacttctgtgctccaggaagatctacttagtaatcctactgaaaatgaattaatttcttagttcaaatccccccaaaggaagctcctttattgaaacacaaattatcctcccaacagagtattgaaatgcttcaagtgccctgactttaccagaaagacatgtgctaacaggaactgagtagctattctgtgcataaatggaata

SEQ ID NO: 127233 - DNA, 637 bp, Homo sapiens
cttttctcttgacttctgactgtcagatttacacctcttctgatccatgctatcctggcctgcagcagcagcctcacagccaaggacagggagcccaaacctgacagaagttgctggagagttaaaagctaacaaatgttttcttatgggatccactcaagagaaggcccaaaatagtrttacagatgaggtttacaatggactactggatgaattatcaataaatcactgattgaaatccatgtttagtacttagaccaactttattgaagtacagaagaaggtatacacagaaaaaatcacacagacagatataccccagtgcctgtccaaggatgtaagatgagaggggtgaggccatgttggcaaagcatgaaggttatgcaacaagcaggcttatcatatgtaaggtattgtcataactgtcattacaacttctgtgctccaggaagatctacttagtaatcctactgaaaatgaattaatttcttagttcaaatccccccaaaggaagctcctttattgaaacacaaattatcctcccaacagagtattgaaatgcttcaagtgccctgactttaccagaaagacatgtgctaacaggaactgagtagctattctgtgcataaatggaata

SEQ ID NO: 127234 - DNA, 637 bp, Homo sapiens
cttttctcttgacttctgactgtcagatttacacctcttctgatccatgctatcctggcctgcagcagcagcctcacagccaaggacagggagcccaaacctgacagaagttgctggagagttaaaagctaacaaatgttttcttatgggatccactcaagagaaggcccaaaatagtattacagatgaggtttacaatggactactggatgaattatcaataaatcactgattgaaatccatgtttartacttagaccaactttattgaagtacagaagaaggtatacacagaaaaaatcacacagacagatataccccagtgcctgtccaaggatgtaagatgagaggggtgaggccatgttggcaaagcatgaaggttatgcaacaagcaggcttatcatatgtaaggtattgtcataactgtcattacaacttctgtgctccaggaagatctacttagtaatcctactgaaaatgaattaatttcttagttcaaatccccccaaaggaagctcctttattgaaacacaaattatcctcccaacagagtattgaaatgcttcaagtgccctgactttaccagaaagacatgtgctaacaggaactgagtagctattctgtgcataaatggaata

SEQ ID NO: 127235 - DNA, 455 bp, Homo sapiens
aagaattgtggaaatgtgcaggtaaatctaaacaaagaccaattgtacagtataatttttaaakgcttaatcatagagtttgaaaagaagacaatacacaaagtatgtggttttttgtttgtttgatgtttgtttttgagacagagtctctcactctattgcccaggctggagtgcagtggtgcaatcctggctcactgcaacctctgcctactgggttcaggggatcctcctgcctcagccactcaagtagctgagattacaagtgtgtgccaccacgcctggctaatttttgtatttttagtagagacagggtttcatcatgttggccaggctggtctcgaactcctgacttcaaatgatccgcccaccttggcctcccaaagtgctgggattacatgcatgagccatcatgcccagccaaagacaatacacaaaagatgagaatgaaaaaga

SEQ ID NO: 127236 - DNA, 575 bp, Homo sapiens
ctgtgtggcgtgtgtgttagtttagcgatgggaactcagtgaaggtttgtgagcacatgtgtgtgacggaagcacaactctcttgcgagacgatgcttcagtgaaaacatgaatctgacatgaaggaggaagtagtacctgtgacggtttcattaaatggtcctggacccttaatgggaaaaccatcaatctcgatccattcacctcctaaattagggaaatgcaacttgatagttagaaacgaggactgttgggttttccacattacagtgcatccataatgtataattaaatgatcttttcaaccatcttcaaaaggatctgctcagcccatattagtgactggacacctcagctttacggacaatacatattttaggtcttttacacatggtttactcagtaagtattcaaaacrtctggatgaaatgctaataacctacattaaaactattttaaaagaaaggataagcctcttccacttttcaatctgtcagcttgctatacaagtctaaaaagttcttgttcaaaaattatttaataactctaaatttatatttactggaagaagcaag

SEQ ID NO: 127237 - DNA, 521 bp, Homo sapiens
ataacacaaaaacagtgatgtttcattagcattatagacttgttctggcatcagattttcatcaatgatgactctggcaaattcatcaatgaatttctctgttgctttgtgaccagcagatgctctatcaccacaaatcttcagaaatttaatgctgtgtcttttcttaaatttctgcagccagcctgttgaatatttataattcccttcaattttcagttcatcatgatagatctttgcttgttttatgatcagcaaacaattaagtggtgtgtattcactgcgatgctgatggatcctccctttcaatacacaatgaaaatcttcgcttttagttttatgcagtgttttcctatttttcattaacrtccattcatcactttcagcatagaactgcaatcgtttatctttctgtttcctcaggtcatttatggtcatctttttttcccttgggagcattgaataaaatgtgtgtcatgtgcctgcattttaactgcaactcgtcacatgaggtctagtgt

SEQ ID NO: 127238 - DNA, 500 bp, Homo sapiens
ttgctttcctgtttccccatcatctaaactttgaatgtatatttcttcagagaaggatggtctacatactggcagtacaattattatgattgagaaattaacatggatatattactaccatctaatcatcaaacccaatattcaagtttcaccaattgtctcaataatattttatagctgctgggtatggtggctcatgcctgtaaccccagcactttgggaagctgaggcagggagatcgctggagcccaggagtttgagaccagcctgggcaatgtggcraaaccccgtctccacaaaacaaacaaaaattagccaggtgtggtggtgcattcctgtagtcccagctactcgagaggctgaggcaagaggatcacttgagcccaggaggtagaggctgcagtgagccgagattgcaccactgcactccagcctgggcaacagagtgagacactgactcaaaaaacaaaattatagcaaaaacattcagctcagaatgc

SEQ ID NO: 127239 - DNA, 550 bp, Homo sapiens
ttcacccattctattctattccttcattaaaaaatgtagattttgacccaattaatagatgaccattgtgstttaaaaacactgctccagattgcggagctctcagagcccaataaccaggcatagtgttgtttggagggtccgggatgaacttcagcttggcgccgctcacccactaggtccagaattctcagggggttggggaggagctaggctgcctgcagggtgggagcctgtgaggtattattctggttttgctgttagaaggtttggtgtcaaatcttgcctctatcatacgtgacattggctaggtgattcaacctcttaaaccctcagcattctcatctgtaaaatgggataactacctacctcttagatttaggacagcgttaaattaaactagacaaggtcagtaacacacatggaatgtgtacatgctcaaaaaatattgtagcagttagtattacatctcccatctcagggaacagtgggcagatattaataacttgggggttgcctggtctggagagagagtcagctaccagcttct

SEQ ID NO: 127240 - DNA, 554 bp, Homo sapiens
aaacatcctcactggaaaaggtggattacagaagcaacaccacaagacacaaagaagcttgtctgccttagcttgggtttataaggaggggagaaaataagcccttaaaatktataaccaagggtctgtgcctcatatatatttgccactctttccaaaggacactacacatgggatctgagaatacctaaactagataattacataaaaattggttccaggcagatgacagatacctgagatacctggcagaaataaattcaaaatcaatctagagggatttgtcttcaacataatccccttaggatgcccacacataaagtctcactgaagatgaactcttgtggcttgttttcttgtatgttttctaattttgaattgtgatttcatcttcagggagaatcaatgaatactataagcagtagaattagaccaccaagaaatttcagataaaagaattatcagataaatattgtaaatttgggtgattatgaagtatcagtgtaggctcggcaattgtaacaaatgtaccactctggtgggggatattggtg

SEQ ID NO: 127241 - DNA, 554 bp, Homo sapiens
aaacatcctcactggaaaaggtggattacagaagcaacaccacaagacacaaagaagcttgtctgccttagcttgggtttataaggaggggagaaaataagcccttaaaatgtataaccaagggtctgtgcctcayatatatttgccactctttccaaaggacactacacatgggatctgagaatacctaaactagataattacataaaaattggttccaggcagatgacagatacctgagatacctggcagaaataaattcaaaatcaatctagagggatttgtcttcaacataatccccttaggatgcccacacataaagtctcactgaagatgaactcttgtggcttgttttcttgtatgttttctaattttgaattgtgatttcatcttcagggagaatcaatgaatactataagcagtagaattagaccaccaagaaatttcagataaaagaattatcagataaatattgtaaatttgggtgattatgaagtatcagtgtaggctcggcaattgtaacaaatgtaccactctggtgggggatattggtg

SEQ ID NO: 127242 - DNA, 611 bp, Homo sapiens
tgaaactacaccactgactttcctggatctccaacttgcagacagcagaacatgggacttctcagcctaaattattawgttagctagttccttataatatatctcttctgattctgtttctctagaaaatcaagggttttctgacaaatatatattttggtactgagactagttctggagggacagaattttaaggatgagttttctgaattggttctgagttttctgaaattggctctcagacctgattcaattaaagtaagctaatggctctgtctagttgacaagagagcactgacagtgcatggagtaaatttgtaggtaatagacatacataaatattcctaatcaaccacaaagaactgaataaatgtgtatcgaacactttcaaacatttttggaaaactaacaaaaataagactggctgattgctcctaatggccacattcaatgtggtgaaagaaaaggatgagatcagggatctgaatttcctgattaaaggtggcataaatgtcctaaagatttccatgtacgccttgaaggagacccttatttcctatagccaagggctgagagtgacctcttcactccaagtagtatcaccctgtcca

SEQ ID NO: 127243 - DNA, 563 bp, Homo sapiens
aatcataatcacctttatatagagcttactatatactgggtactttgctgaacactctagtatgaactattttatttaaatttcacaacagccttatgaaatagggtctgtcattcccattttactgacttaatagctgtgttataactgtgaatatttctgcattttcagtgacagctgttggcgacaccaactcctaatcatgtatgagaaagagagttgcaaaacatggagcactattgatttatttatttcagtggttatctacccatccctgacactcatccacatcygttgcctccagaaaccagtgtgctttcgtaagaatttcaacacctgctaaggaaatcatgggaaggttgtgtatgaaccagtgtgatgcagggattgcagaaaaggaggcagtttaggctccctgtgttggtgtgtgagtggcagtctgcttgcataggctccacctacgccctttcaccttggggttgttatcctggtccctgtagcatcataaaacacattcttattaaaattatcatgggtcttctttaattaccctaattggcaat

SEQ ID NO: 127244 - DNA, 563 bp, Homo sapiens
aatcataatcacctttatatagagcttactatatactgggtactttgctgaacactctagtatgaactattttatttaaatttcacaacagccttatgaaatagggtctgtcattcccattttactgacttaatagctgtgttataactgtgaatatttctgcattttcagtgacagctgttggcgacaccaactcctaatcatgtatgagaaagagagttgcaaaacatggagcactattgatttatttatttcagtggttatctacccatccctgacactcatccacatctgttgcctccagaaaccagtgtgctttcgtaagaatttcaacacctgctaaggaaatcatgggaaggttgtgtatgaaccagtgtgaygcagggattgcagaaaaggaggcagtttaggctccctgtgttggtgtgtgagtggcagtctgcttgcataggctccacctacgccctttcaccttggggttgttatcctggtccctgtagcatcataaaacacattcttattaaaattatcatgggtcttctttaattaccctaattggcaat

SEQ ID NO: 127245 - DNA, 607 bp, Homo sapiens
ttctgtgtcgtgaataagcatttttgctcctgctgtcctctttactcagaattacttttttccaccatcatgtcatcgattagcctggtgagacattatagcatttttaggactttaattccaatgacccttgcttttagagccatatctgcctctctacaaggcagaaataatcacagaatcctttktgtctttctctcctccatttccctctaagtatacttttctgacatcataaaaatatcttcttttacccatttatgacatactgtatctaccaatatggtgggcagaatcatggctccccaaagatgttcacatactcacccctggaacctttgactatgtttggttacatgtcattgaggtagtaagtatgctaatcagctgaccttaaaataagatgatcctggattagccaagtgaacccaatgcaatcacaagggtcctaaaagtagagaaagaaggtagaaaagttagagtcagagaagcagatgtaacaaagggagcaagactagagtgatacaatgggaggactaaatacacccttgctggctttgaaaatgaaagggggccgtgagcctgggaatgcaggcagccttgagga

SEQ ID NO: 127246 - DNA, 577 bp, Homo sapiens
tatgtttggcacagactcgatattgtgtaaatggaacctaacttctttcttccagggacttgctaaactctactcctggactctgtttcaacctttcctctggttcagctgttatttttcaagaagccttatccattcctcctattacacaccttctgatccgggaaatattgttggcctctctcacttgttagggtgaatagacaggctcatgttcttacttaacaattcctgcgacatatcactgaaataaacttaagctatggattataaagctttctggcacttcagtgatattcaaggccactcaaggagctttgctaatacaaggaggtatttaacagagaggtctcactcaattcaatgtctccagctgcacaggcctacctgtcccttgaaagaaagactttgctgtctacgctgcagagccattatctctttctttttgtacagtgacacgaaccaaatctgatcccctccatagcactttcygcaaacattatttaatgtgtgttaggttagatagaaatggcaagtatttaggtatgcatggtaaaaagttatgcatatgacctgc

SEQ ID NO: 127247 - DNA, 564 bp, Homo sapiens
aaatacaaaccaaaaataatttggagggtgtattaacaatatacaagatgaatagagttattaaaaataaagacagttgctacattacattaaataaaagattcagctcacctgaaaatacacctaacttgaacgtatttaataaaataacctcaaaatacgtaaggtaaaaaattgatgaaacaataaggagaagttgactagttcacaatcagtgttggagcttttaatacactgctttttaatgacagtgagataaatcagataagaatagttgaatatttaaatatagcataattgaatatttagacaataacattagtaaacttgatttcatgggcatatctaaaatctcacatgtaatagatgcaaaagacatagtctccttaaacgcgtacgaaatatgtaaaatagttaactaggtattaggccgtaaggcaaattttgacaaatataaaagaattagccrtaagaatcacagtctctgacaacaacgcaattaagttagaaatgaataacaaaaaaggcaagttaaacgctcctatgtttggaaattgcaaaaca

SEQ ID NO: 127248 - DNA, 564 bp, Homo sapiens
aaatacaaaccaaaaataatttggagggtgtattaacaatatacaagatgaatagagttattaaaaataaagacagttgctacattacattaaataaaagattcagctcacctgaaaatacacctaacttgaacgtatttaataaaataacctcaaaatacgtaaggtaaaaaattgatgaaacaataaggagaagttgactagttcacaatcagtgttggagcttttaatacactgctttttaatgacagtgagataaatcagataagaatagttgaatatttaaatatagcataattgaatatttagacaataacattagtaaacttgatttcatgggcatatctaaaatctcacatgtaatagatgcaaaagacatagtctccttaaacgcgtacgaaatatgtaaaatagttaactaggtattaggccgtaaggcaaattttgacaaatataaaagaattagccgtaagaatcacagtctctgacaacaacgcaattaagttagaaatgaataacaaaaaaggcaagttaaaygctcctatgtttggaaattgcaaaaca

SEQ ID NO: 127249 - DNA, 394 bp, Homo sapiens
tagtacaaatcatttaacatatatcagkaaactatttgtattatctttaaaatttattttaaaataataattgaacctctatcttatattaggtactattctagttacttgtgaatataaattaaaaaaataggaaaaaaaatatgccttcatgtaggttccattctaatgaacatcctcatagtctatgtcttggaaatttcattctgcaacaatgttttaacatgaagattctcctaagaattaagcctacattccttaaggcaccagcaaacataaccaattaatttttctatgcatttagaatgatactagttatgtaccatcattggggaaattggaaaaataacaatttccatcattttctgtgttctgtggtgcatatgaggaattc

SEQ ID NO: 127250 - DNA, 614 bp, Homo sapiens
ttgctgttataacctcctatgtctcctcctgcaccattccatttccccacaacccttgtaaacactggttccaggcaaggttaaggagttgtgaagaatctaggtactcctataattgttgttaatttttctaatgcaatctcgcaccattgcttatattacatgggaagtcttaaaattaaaagacttgtagagatcagattccagcacaaacttctaattaatttaccaatcctactattagcatctatacagatattcaaagagattctataacacatcccattgaagaaattttcccaattcatgcaatagcctattttggtattgaaaaattctaatgtaaagtcttcrtaatatgaaaccaaagtttgcctccctgtgtattctttttcgtcccagttatacccttgagtcaaaacgaacccatttctcttttactgagcttttaatatttgaagtcgatgatgtttcttatttttgttctcttcccagactaattacaggatctccacttcttccaatcaatcttaaagtctaaaaaataaaagatttggaaatcagaggtgcatttccttcatcatcaggtataagtattttcctatcataattgt

SEQ ID NO: 127251 - DNA, 674 bp, Homo sapiens
tttttgttctgcgttgttgttttttcatatgttagtcttgggcatataaattgctcttgaactggttttatcaagtgtgagccattatgaaatagtcactctccaagagtccttaatggaacttaaaagcacatgtaggcaggacccttgatgtgctttgattgccttagaggactatgcctgcagcgtgtgcctgtacatgtgcaagacatgcaagtatatgtgttaggagggtaatttgatgtgtgtgagcagcatacagcagagcacatgagtaactctcgtctattgctgctatcaagaaatacaaaaaacaatctctttccgtctcttaatatgaagcttaagcagatacagataccaaaattatcttaatattgagaacagaaataggagctgatctagaatgttttctattatgctttcttatatatccctaaaccactgagccaagcattagggttataatacaatgttttgggaggaaagaactctaataatgcaatcctcaaagggaagattcacractatggcagggcaagctatctggctgtcatttgttccccagccagcttttagctggattcacattaaagagtgccatgtgtattgctttcaagctccagggaattgaaattcctgccagtaccacccagttggcccccaaagaagca

SEQ ID NO: 127252 - DNA, 546 bp, Homo sapiens
tttccagatcaggctgaagaatgaccatgatggagaattgagaaacaagaccatctgcatcaacaggaatttggtaagattttagactatgtcgacctgacctagttgtttgttccaggaaaattttgtctgggagagataaaactataaaccaatatataaattcactgtttgtttcagaactttcctacagaccaatttattggacataatctggtgacctgggcatctggtgacctgggagaactgctcacttatcaaacaagggcttattttttaagatttgcttcragaccctcactgtgctatgtctactaatcctaaatgaatataccaaaaacttttatccaatcctaatcagttccctgtcttgaaagacctaccttaaatcacctgggttcatacctcaccatcttataacaatatcagtgctgatagccttcttttgagatactgctaaaactttctcaagatggtgttctcctttagtgcagaaattccaaataaagttggttttgctatattaacaagttgttgggtgacatt

SEQ ID NO: 127253 - DNA, 599 bp, Homo sapiens
tgtgtcatctctgattgccagcctcaatcactggcccctctcattataagagtccattagaattatacatgtcacttcatatttacaactctaccttctccagatggttctggccaccttgactgggcatttcaacatacagaaggcttcatcaaaacagcctgaagatttcaaggggcaagatcatggtccaagttggaaataagacataaaggcatgccttcagttttcagttrgtttggtttttgccaaagtattgtgagtactatatggtccagtgtttacacataagaacatgatatccaagcccgtgacaaaagaaaaaataataaccactcacctacagggagggagaaagcttgtgtgctgaagacttcattacatgcccttagaccaatagaggaaaataggccttctaacttaaggttggaggaggacacagggtcaaatcactttaaacagtggcacaaacatcctccataactaaatattatctaaaagcttcacccttctcagcaaaagggagaaactgctctagctgacacgtgtgtctgtaccaactaaaacaatcaatgtaatacagtatctgctgacagcct

SEQ ID NO: 127254 - DNA, 565 bp, Homo sapiens
ttaattgtggaggtggggaagggggggcggttgytacaaagatcaggggaattatctggctgtggttgatttgggttgtattaacttccagcacgtttcttccattcctcgctagttgcagtattagactgcactgctctaattaaaacggagtttacatccacttaaaaagtttttgaaaggtctggagaatgggtcaactaggaaaaaaagaacagcatgaagtgattattgttcgaagataaacatacctctaaactagagaaagtcctttcaacaatcacttaggtcaggaagaacctacagcacaaaactatagtgatactttgttttcaaaatattattccatgtctgagcttaatgcaaactattctttcctaactcattttgttttgtttccattgattgttgaattactgaaatgaaaaattacttgatcactgatttcattctattattctggagagaaggaatatattctactttaaatgtgcttgtctcactcagtaagaaacaatgaatacatgcatgaaaggaaggcaggacagagtctgctttattcaaa

SEQ ID NO: 127255 - DNA, 565 bp, Homo sapiens
ttaattgtggaggtggggaagggggggcggttgttacaaagatcaggggaattatctggctgtggttgatttgggttgtattaacttccagcacgtttcttccattcctcgctagttgcagtattagactgcactgctctaattaaaacggagtttacatccacttaaaaagtttttgaaaggtctggagaatgggtcaactaggaaaaaaagaacagcatgaagtgattattgttcgaagataaayatacctctaaactagagaaagtcctttcaacaatcacttaggtcaggaagaacctacagcacaaaactatagtgatactttgttttcaaaatattattccatgtctgagcttaatgcaaactattctttcctaactcattttgttttgtttccattgattgttgaattactgaaatgaaaaattacttgatcactgatttcattctattattctggagagaaggaatatattctactttaaatgtgcttgtctcactcagtaagaaacaatgaatacatgcatgaaaggaaggcaggacagagtctgctttattcaaa

SEQ ID NO: 127256 - DNA, 565 bp, Homo sapiens
ttaattgtggaggtggggaagggggggcggttgttacaaagatcaggggaattatctggctgtggttgatttgggttgtattaacttccagcacgtttcttccattcctcgctagttgcagtattagactgcactgctctaattaaaacggagtttacatccacttaaaaagtttttgaaaggtctggagaatgggtcaactaggaaaaaaagaacagcatgaagtgattattgttcgaagataaacatacctctaaactagagaaagtcctttcaacaatcacttaggtcaggaagaacctacagcacaaaactatagtgatactttgttttcaaaatattattccatgtctgagcttaatgcaaactattctttcctaactcattttgttttgtttccattgattgttgaattactgaaatgaaaaattacttgatcactgatttcattctattattctggagagaaggaatatattctactttaaatgtgcttgtctcactcagtaagaaacaatgaatacrtgcatgaaaggaaggcaggacagagtctgctttattcaaa

SEQ ID NO: 127257 - DNA, 612 bp, Homo sapiens
ctggtgataactaacacatcatgctaatgagagaatctaatgcacaatagaaaaatgtcactactaataatatttgcatgaagttaaataaagcaactgtaagagaatgtcagacagttgttctttaataagacacagtttcacaatgaaattatgttgttaattttgttacatcatcgggtgaatcctaaattactacataatgatgcagagagtcatttataatcctaacttagtatttcactcaagtatgaaaaaagaccttattaagggatctacattttatttgaaacaggttaaatatacctcaccaataataaaaggtaaatgtctctagtaacacattaaatgtgggctatagctatatacctttatggtttcctttctaaaaagatttttaaatagactggactattacatcccttgagatagctacaagaattttatttactatkctctcaaatgcacaaaatatttatacaaatagaagaattgcctcctcaagtgtgattaaaaaaaaaactttgaaaagcaagcctcattttttgcttttaacagtaccttgtgaaactaaaataggcaaaataaggttctttctccacctgtcactga

SEQ ID NO: 127258 - DNA, 580 bp, Homo sapiens
gaagtgcaatcccatttgatctcacttgaaagaaattgtaaatacttggtaaaggacagaaaccgtggctcaaagaaaaataccaaaaaaaaaaaaaaagtatgaaagaaaaaaaaaagcaaatgagacaaagtaataatcatttaaatgaactaactctttgtccctggagctaacattctcattatcaagggtatttaatatattccctatagaaaacaggctgctgtctatcagtcctcctcctctttctttggctgtttcagcaatagagaggaaaacatttcatctttttaatcttttatgtctatataaagaccattccatatgctccaaatcataaagttacctgctttttttttttttcagggtgagtactgatggaaacattattactagaaagaaccaaagggttaaaagttaatatttcttctcactgacttaraaaaccatattttgtggtgcccagttaaaaattctgcatttaattaaattgtaaatccaattttttgcagttaaagactaaagaatatgctgctatttagaaaggaagatgatgcactcagccatcttgagaagg

SEQ ID NO: 127259 - DNA, 584 bp, Homo sapiens
ataagggtctttgcagataatcaagttaagatgaagtaattagagtgggccctaatctaatatgactggtatcttttaaaaaagagagaatttggaccttgggacagatatactcagagggaagacaacatgaagacacaatgagaatgccatctacaagccatggaatctctgaggtgaggctaccagaagcttagagagaggcatggaacaaagattttyccatatatccctcagaggggatgaatcctgctgacaccttgatttcagacttctaacctccacaactgtgagacaatatatttatgttgtttaagctactcagtttgtggtacttttttacaacagccttcggaaacgaatacagtcactaatttgctttcatctctgtgtcacctctccaaatgtcagctccttgtttccaaaatgagggaactagataacatgatctccagctctaaacttccctgatctttctagaagtttgataagctggttctgcagctgtgcctctcttcccacttcgtctttgattccttgacctagacccttggtttggatggggtatgcctaggagtagctca

SEQ ID NO: 127260 - DNA, 608 bp, Homo sapiens
gtttgtgtagtcctttaaacatctggatatattttgaaactaattttttaaactgcctttggtttgagtctttgaaaatgaaaaatatattttatgaagcagtcactgttcagggagccaaaatacttgaattctaatctcaactttgtattttaccaaaccagattcctgaaacatcctaggctatttcttggttgtcaaatcaatgatggaatgatattgtaggttcaccatatcccgttccttcctgttcctctagtgtgcttcacttacttyggagaagtcactgaagaccaatttcaaattatttttggtgagaaaaagcctgagacctgtgagggatacttcagggaaatgttatcatctcagagctttaaaataatcatctcccctgggttctccgtggtttggaattcttatgaagcttaatgcgtgaaaaggacaacagttttcaaaatgttggcagtttcctacatttgaccttttaacatttagaaacattggtcaaggtatgtttaaattctttaaattgtagctgacctttggagaaataaacataaattaaggttattacctacatggaatgcttatatggaactattagcaaa

SEQ ID NO: 127261 - DNA, 532 bp, Homo sapiens
catatatttatctcaatatttccatcttctctttctcaaatccaaggttttcttactctactttcaaagaacaatatatatgatgttttaaatttgaatataaagaagccatttaaatgtattttctgaaatgtgcaacaggctgcaagggtttttttttttttttttttttttttgatgaatacataattgtcctaggcatttttaatttgttgcatggcagatttcctgaatcaaatagcagctgtttggggaaagtagcaagcacattttctgcaggcccattggttgctgttttgctttcatattctctcaccattaactatacagcagctagagcagaggagttgttaacaaaatatactttcactgctagccaaactatatacatgacttagwggtaatatttgattttatgtcatttacttatgtctctgtatgtcttacaccaagggactaacacccaatgggagaaagaaaaaaagggaaaattaactaagtatctgtgaaccatcaaataggctcagataaa

SEQ ID NO: 127262 - DNA, 636 bp, Homo sapiens
atataaaatatatatttattaaataaaaatttccttgggagacattttaaaaattacagagckaggaagctagaaagctctgtaatttttagtgtatcatcaatataaaggtcagaaactgttttacctacaaacatatatttcattgtattttttttattgccctgtccactgtagtaggcaccttaattatttttgatggcattcatgatgggaaatgttatatttattttgcgattttcttatagtttgattcttgttcattcacattctttctatcttatttcaagattccatgatctctcttgtcatattgtagtactttctaaatcattttatatctcaaaaagtcttttgtttccaatgcatcttacaagataaatgccatattaacttcacaaatgcaaatctgtcatgtcactgacttctttaaagactccaagcattcttcattttttttctaaatttacatcaaatctcaaaactgatattatcttttattgcttaggtgttacctgtttttcctctatagcacatattttctttatcaacttcacattctgggcaaatggaataacatcctgtttcataaacttactctcaagaatcattctaagtccagctataatgctgcca

SEQ ID NO: 127263 - DNA, 626 bp, Homo sapiens
agaaaactgtcatcttagaattaggttgctatttaaaaataaacagtttgcaaaaatgaaagcaatatcctttaacttgcatgtttagtcacagtgatcagtattgatatgtttgttaaaaacagttggtytacacgtgccatgatggtttgctgcacccatcaccccaacatctacattaggtatatctcctactgctatcacagaatataaagtactataataataataaaaataataaaaactgattagtaacataaaaaaagattggtcattttcttagtgccatgttttcaattcacatttattttatcttttcactgatgagtttgcattaattttgcaaaaattttgccatgtgtttttaattcatatttagtttatcttttcactgatgagtttgcattaattttgcaaagggaacaactaaattgattctgtgcaagaaaggtattttatttccctttacttctccaaaatatctagtgattctggcctggaaatgctttaacccaaattttatagcttaataaattaaaagagcatatatgatgatgatgtttttaaaattgagtataaatactttctgcagacaatttgtagaactgtgcctccttgaagatggc

SEQ ID NO: 127264 - DNA, 536 bp, Homo sapiens
gggcaattgtgcccatgaaaaagaaaggtattctcctctcctttttttcttcttttaacaagccttttrtagtgaagagaactgttaacttttaatataagcttggaaaaagaattgcgggcattttatggtttgatatagaggttatgtgagatatgatggcccttcctgaattaagaaataaaacaatgataaagctgtgagaatgattttcttagatgatgttttgaacctaaaaagttcaaggtaagtatgagaaagcagtacattttgcttgtgttgtatggagaataaggaattagatgataactacacaggagtctccagattcttgaaaatgtgaaactggttgaattttggtgtaagtctagaaagagcacaaaattattgattactaagatgcttctttaagatcatataggtcttatgagtcctttattattctgagatatattttatccatcaaacatgatttatgaactctcaggagagcaattatctcttcatggatcacatgcttatgaaatactatgtac

SEQ ID NO: 127265 - DNA, 548 bp, Homo sapiens
tttcgttatatttgatgcatagatgtttttcaaatattgaagctacatttagtaatattgcctttatttttactgcttgtgttttcaaacttagaaaggccttagcactttcatacaattgttttttaaagtaaaattttattaaagaatgatctatgtaaagtgcacacatgatacaagtaaagttctagtaataagtatccaagcactcagattaagaaacagatcatcaccagcatcccaaaagcacatcatgctctcttcttactgctattcccaccactaacattttttgaactttttgaacaatgaaatcatgcagcagtatwcttttgtgtctggcttctttcactcaatcatttgtttgtgagattcatctcatgttattgcatgtagttctttattgatgcaggtcttccatgttgttataaatattcttgcacatatgctttgatgaacttatgtacagatttctgtttatcagctatcccagagtgaaatttctgtgtcacagagtttgtatattttcagtggtagaagattcagac

SEQ ID NO: 127266 - DNA, 618 bp, Homo sapiens
aaataagtgttgatttttctttctataaatggaccattaaaatccaagggaggacttcaaaatacacatgcaaataatattaattttaaagtagaggcactrcacactgagaagaaaattgggaaatggctacttaaatgttagcaatttacaaccaagagggcctgcatactgattgggaaggcagacgcttgaatagtatcaagatataaatagaactgatcaaactgagataacaggaaaggtagtcacataattataatataaacagtataaataataccaactatttgaaggtaaaaagcatgtgcttaatcgtacttatttaaaagaaaataggtcaaccaaatgaaaagaaaaggcgaaaagtgactggatgagcaagcctcttcactccccagacctccatcatctcttctgcaaaattaagggatcaggtgaaatgatctgaatatcagagatttataacactttaatgattctaaaactgccttaagaactgcacagtaaattgtggaagaataatgattctgaatttcagatctggttaaatgccagtcttttgcaaatatgggacacttaactctctcttttgcaaaaaatacattgatgtgagaa

SEQ ID NO: 127267 - DNA, 618 bp, Homo sapiens
aaataagtgttgatttttctttctataaatggaccattaaaatccaagggaggacttcaaaatacacatgcaaataatattaattttaaagtagaggcactacacactgagaagaaaattgggaaatggctacttaaatgttagcaatttacaaccaagagggcctgcatactgattgggaaggcagacgcttgaatagtatcaagatataaatagaactgatcaaactgagataacaggaaaggtagtcacataattataatataaacagtataaataataccaactatttgaaggtaaaaagcatgtgcttaatcgtacttatttaaaagaaaataggtcaaccaaatgaaaagaaaaggcgaaaagtgactggatgagcaagcctcttcactccccagacctccatcatctcttctgcaaaatkaagggatcaggtgaaatgatctgaatatcagagatttataacactttaatgattctaaaactgccttaagaactgcacagtaaattgtggaagaataatgattctgaatttcagatctggttaaatgccagtcttttgcaaatatgggacacttaactctctcttttgcaaaaaatacattgatgtgagaa

SEQ ID NO: 127268 - DNA, 408 bp, Homo sapiens
ctcctaaccattgtagacttccagtcacaaagtggatcatttattttccgtccctgcccctttgctcaagctgcctaaaactttactgcctctgtttaaaaactcaatctgccatgtctgtgtccacttaaatcctttccattatttaagtcctcatttggatatcacctcctktctgaagatttctccaacactttcaagaagaagggaagcctgaatatcatgaagaaaatatctgatcttatgtgccgggtcactctctgtatgtctccctccaagcactaagcatcatctagtgtgtgctccaattaatagtgagtttctcaagggcaaggcttcatttcatttatttttatatgccagtatttggcacataggtggtttgcaataagcatatttttcaggaca

SEQ ID NO: 127269 - DNA, 408 bp, Homo sapiens
ctcctaaccattgtagacttccagtcacaaagtggatcatttattttccgtccctgcccctttgctcaagctgcctaaaactttactgcctctgtttaaaaactcaatctgccatgtctgtgtccacttaaatcctttccattatttaagtcctcatttggatatcacctcctttctgamgatttctccaacactttcaagaagaagggaagcctgaatatcatgaagaaaatatctgatcttatgtgccgggtcactctctgtatgtctccctccaagcactaagcatcatctagtgtgtgctccaattaatagtgagtttctcaagggcaaggcttcatttcatttatttttatatgccagtatttggcacataggtggtttgcaataagcatatttttcaggaca

SEQ ID NO: 127270 - DNA, 586 bp, Homo sapiens
cgtatgttcagtatagccatagtgacatgcaggagaatttaggtggtacagaaaaaaattatttaaaataacrttttgcagatatcaggaagaaataaagcttaagtcggccatttaactaatgattttatatttgggatgaggctaaatgtgcataggtgagtagtgttgatagaatagaatttaaagtcaatataaggaagaatactaagtaaacaaaatagtggtaaaggtatggaaaactggataaggtcaaagtcactaagctcttacgataatattgcttaaagtaggggtaatattttattagaaaatataattgcaacatttccagccaggaaagacatatgactaaacatctaattgggcaatatttcctgtgattcccttgtaagctcaccaatgtgctgatatattgagtgttgaaaaaataagaggaagataaaatccctactacctctcctcaagcagcatctattatggggacaaaataaaatccccagaaaaaaaattggcaaataatagtatgaatctcagaaagcctaatgatatatattcagagacataaggaaacagtgaggcatgg

SEQ ID NO: 127271 - DNA, 639 bp, Homo sapiens
aggagctaggcattccaagcatcaataattgcacgtgcaaaggcctatgtggaaagttaccagcagctgaaagaaacctcttttcgtggaactagagcaaaaagacttacaggaaatatgatgagataaggttacagaagaagggagacatgagatcatgcttgtaactccatgctatagggtctttattataagaattgtgggaaatccttgaaggagactaagcagaggggagacataatcagtttagatttcaaaatcaatgttctgggtttcaaaaccaatatggaaatttgtgaagaccatggtacaaaacaagaaaggcagtagaactgtatagtcagaagagggaaatattaagcaaatgactataataattttaataygggctcatttacttatctcttaatgtgtgccaaccatcatgctaaattgtcatttccaatcctaaaggaagagcccatttctaatcaattccacgtttatccttgccaacctgacctcttgttctggccttttggccttcagaggtattatcttttcagagaaaataacaatgaaaaagataatggagaaaaaggtcatcattatgttgccagagatttgaaagtgtgatgctcatgtcagtggtcattaatt

SEQ ID NO: 127272 - DNA, 437 bp, Homo sapiens
ctgaagctgggtaatttataaagtagaaaggtttatttagctcacagttctgtagactgtacaagaagcatgatgccagcatctgctttgggtgagggcttcagactgcttatactcacagcaaaaggctaagaggaactggtgtgtactgagatcacatggcaagggagagaggacgcaagagagaggsgaaaagggtgggggaggtgctgggctctttttaacaaccagctttcttggtaactaataaagtaagatgaagacattcatgagggatttgcctccataactcaaacaattctagttaggcccacctccaatactggggataaaatttccatataacatttggaggggtcgagcaagccaaatatagcatccaggcaggccctatgctatttatttacattttatagtttacttttcacgaagtgcac

SEQ ID NO: 127273 - DNA, 504 bp, Homo sapiens
tttagtacatttacatggttggggttattttcctaaaagttgcaagttggtctgctagagaaatctcataaaaatggtctaaagatgtttccttaaagagaagggcttttctttaaatgattttcatccagttatttattggaagaatagaattgaatactaactaaatgcagagttgcatttaattcatgacagccctctcgttcagcaaaacatatttttaaaaaatcactatacmagaaagtcactgaggttctaatcttcctgaatcttttatagctgaaatggaatcattgaacttccatttgggcttcacttatgccatcatgtgaaaggcgatgaaaaatatcatgatgtctattgcttaaaaattgatactttatgctagcttaaaactcatatttggagttatctgtcaaagtttccctgaagctcttaaatgcaaataatactagtcccagaagaaaaaaactggaaagctagtttgtgcccaaactacaaggt

SEQ ID NO: 127274 - DNA, 504 bp, Homo sapiens
tttagtacatttacatggttggggttattttcctaaaagttgcaagttggtctgctagagaaatctcataaaaatggtctaaagatgtttccttaaagagaagggcttttctttaaatgattttcatccagttatttattggaagaatagaattgaatactaactaaatgcagagttgcatttaattcatgacagccctctcgttcagcaaaacatatttttaaaaaatcactataccagaaagtcactgaggttctaatcttcctgaatcttttatagctgaaatggaatcattgaacttccatttgggcttcacttatgccatcatgtgaaaggcgatgaaaaatatcatgatgtctattgcttaaaaattgatactttatgctagcttaaaactcatatttggagttatctgtcaaagtttccytgaagctcttaaatgcaaataatactagtcccagaagaaaaaaactggaaagctagtttgtgcccaaactacaaggt

SEQ ID NO: 127275 - DNA, 604 bp, Homo sapiens
agcgctccataaatgctttagtttatgagtcaaatagtgatattttaatctcaagatgagatcttcaaaagccttataaatattattagctgtatagctgtaactgttatcattttagcacctaactcatacaattaacctttttttctttcaaaccatcagcatattaaaatactatagtgattactgattggtttaattctattctcaatctgttttgagtaaatgtgctaatcttaaaagaaaaaaatgatgccttgtatttcttatctttcagtaattaaaacaaataatctaatagttacatttttgcttcataatttgtttttttttttaatttgaaaacttacccctaaggggaraaaacattcttgcttcaacctttttactaagacctagccttcgagagagaattataggaaataggccattaggtgttttgaagattgcttaatgcagcagtacccagggtcttatgctcagatagtaagtacccaggggtagtattatggggtgggagaaagcatagttcatggtaaaaataggtttggaatagccttaagttaaacagagtactgtaggacttctcagggcctttaatggg

SEQ ID NO: 127276 - DNA, 437 bp, Homo sapiens
accactcctgtctccataattttcatgattttccctcatgaactagcttcattggggggagtggcttgttgccattttagcagacatggcatatgcttggtctggtcatttgcccttgttgatggattacttcttttgtcttagtattttatgttctcttggtatttcaaamccaaaccttccttaactggtgtacacaattttattcttactagattaaatcctattaaatattctacccattattttcttgaaaaaaaaaatctctttgggagatttctgacctgctacgtagcaaatgaatatgagttggcttttcctctaccgtcatcctgtggattcctttaacttccatcctgtaatggattccctatttcttagatttcttgtatttctccttcttggttactttttgttgttgtttaaattattggatt

SEQ ID NO: 127277 - DNA, 597 bp, Homo sapiens
aattcagctgccaaaaataacattaaagaagtagttcatgtcaggtaagatgagaatgccccataaatactgattctgaacctctagcagccatacatatgttaattcattattccacaaatattttgtgcacatattctgtgccaagcactgtgctaggtccgaagrataccaaaattaatcattacaaactcagagtccaaagaaaaaggcagactcacaaataaacagctgtaaaaatgtgtgttgctctatttggaggtattacgtagacattagggagagagcatctgtattagtccattttcacactgctgataaagacatatccgagactgggcaatttacaaaagaaagaggtttattggactcacagtgccacatggctgaggaggcctcacaatcatggcagaaggtaaaaggcaaggagaagcaagtcacatcttaacatgaatagcggcaggcaaaaagagcttgtgcggggaacctccaccttataaagccatcagatcttgggagacttattcactatcacgataatagcacaggaaagtcctgcccccatgattcaattacctaccaccaggtccctcccac

SEQ ID NO: 127278 - DNA, 467 bp, Homo sapiens
tcactttctaattttgccatttactttacattactgcccattattaccaactcccaccaatctcttactgtaaatgccaactgcactggacaattkactcttgtctgtcacactgggcaatgcatcattccctgaactataaatgcttggctgtttgttttaaatccttttttctccaaatatgaggccactttttttgttcctgaagtttaaccttgccttagtctacagtactattcctatatttagagataatttaaagcattttaaaccagaagattaaactacttctcaacacttttaaacagctgtactgacatgctattagatactgaattatttctgtagatgctgaatttatcaggataggctaggttaaactggagtagcaaaaaacacccaaatctgcatggcataatacaataaagtttatttttttcattttcttatattgcacaaagtgaatg

SEQ ID NO: 127279 - DNA, 506 bp, Homo sapiens
ctcagagcttactgatttaggaatatgaaagaaaaaacaaatatttgggccacaaagtggcccccaaaaaaggaaagaaagggttgagaccaaggaaagaaagtgctgcctctactgtgttagaaataagggtccagcttaaggagcaggttaaattgctaagcacttgctgaattggcctgtaggaaggaagagaagaacagggaaatgttagagaacccwttaggattaagaaaagacaatgtatttagtagcccatgacagaagattgggttttctctaagccattaggaggccaaaacttgaaaaacaacagaagcttcagtttaagactgcattgaggataattctccaactgaaagaaacctaaggatgttaagagaagtttccataggcagtatgtgacagtggactgactatgtatttatttatgtttttgctcaataggcaacaactccttgtttaactattcattgatccaaaccaaggtggtgaaaaaatcactg

SEQ ID NO: 127280 - DNA, 567 bp, Homo sapiens
catttcagaagtcaaattgtttgatctttcctactattttggtaagaatacatggaattagcagacactataggtaaattcgtgggtcatcgatgtgaggatcccaatactcaactgatttytgagaactggcaagtagaaatttaaaactttctttttcttaccaccaaatatctataacatttagggaagcttttcttaagtcacagaatgttcaactgactgctcataagaaaagacatttatttcatgaaacatcttacgttcctccattggaaataatgtcctcattctctgaatctgtataatgttatgtgtttacattttatgctgcttacccatttcttttctgtgttataattgttgttttgcatgttgtatctcttctctacgaatctgagtttcttaggataaaaaaaatcttaaatagttgttagaatctaagttcaacaatatacacatattaagtgctaaaatatgtgtcataaaggatatattaaaaaataacataacctcacatctttccattcacactccttgaaagtaacttgcaagctttcctacctg

SEQ ID NO: 127281 - DNA, 637 bp, Homo sapiens
ttatcaatagattttaagcaatatatttttctcctaatgaattatgaactaatttgtctaaatcatttattcctggaaacaaaaatttgataaccattaggtagtacatcaacatacctcaagcttaaataaaaccttggttcccttagaccgtattaccatgagcaccagccaaaatcttaatcttttactgcatcytcataaatctgattctggataatattcttctgccaaaaatttcccgaacaattttttaatgcatcctagctatacacttagtagcttgtttaatcatgacatctatggtatagacctgacacttattaaatgtcttaccttatgtagctaaagccaatattttagttagccagaattgtgcctgagatctcttacccagtaaaaaatctattcctcaaacatgtaatgaaaatatgttctcattcatagttagctaaactcctatttgatttctaaacattcttttaaaaatattaccccagaggtggttgcaatggaaagtcaagaacaaaagaataagtctatcacaaataggaagtttcatttaagagggttaagaacaagaaatgaaagttaaaataacaaaattgtcagaaaaacttagggacaaccaagtact

SEQ ID NO: 127282 - DNA, 541 bp, Homo sapiens
agagcccgcccctccccattcccttcgcgtctccatcctcagacactcactcggcggacttgtctctgagagctctggtcccggcccccagtcttcgagtacttccagctacaaccccacaaaagcaagttctttagtttggcctgggcggggacttttagggagggagccaagccacagccccctccccactcaggctttgggaacgttctgacccactcccccacattgataggttacagccctccagctcctgtggggtgccctgcctctccccactacccagcmctcatccgggcaaggcttcccggaaagaaggctgggtggctcagggtgaacagagaggagtaaaaaggagctgggttagaggctcccttttccattttgtgccaccctatctcagtgccccgggagacacaatgggatgggctgagctctgccagcttcaggcagcgactcaccttcaacctcatccacattcccccttctccccaaaggaggtacatttatgcaaaccggcaaccaaaacatacacagagat

SEQ ID NO: 127283 - DNA, 614 bp, Homo sapiens
atgtcctctaagcactaatactcaagagacagtatacagctttgtactttcttaggcaccaacacatcagccttcaagagaacttcagtttcaacactgctgttgattacatttttaaaaaatgtgctaaaataatgggcaattgaaacattctgaaattagatctaacacagtgaataattgctgtgcaagtcacactacattttacagactgtgttcttgcattaaacaagatgmagagattgcctttaaaaggtataattttctataatcttttttttgttgttggtggtgctcaaagcaattgctttccaatggaaaaataaagcaagagaacaatggtgcacatccccagacttcttaccaacatgtaaactttgaccgttcacagtatgcagttattgacagctggactaaaggacagtgtcgccattaacttaccgcaacctcatctgaaaaggagtgaagtgcctttggaacctgtttatagtacctaggtctgagggagcatgcagaggaagatttaattatcccatatgaggttaagttttaggccagtgccaactaggaagaagtattatagttagaaaagagactcaaggccaggtgtggtg

SEQ ID NO: 127284 - DNA, 474 bp, Homo sapiens
gagattgactggggtttttttcacattgcatgatgcccttaagacagattcaagttgctgtatgtatcagtagtttgttcatttgtacagctgagtaatgttctgtcatatggacacaccccagtttttttgttttttttgtttttaactattcacctattgtgagctattttgggtgttcccaatatttaaatattacaaataaggtaatatttggcaatgaacaattgcatacaggtttttgcttggacataagttttcacaactttgggatacgtaccgggaggcacaattactggacagtatgataagtatatgtttaatttttaaagatactaccaggctattttccagggtgacagtaccattttaaatttccaactgcaatatatgagaagccyggtttccctacattcatggctgcatttggtattgtcactgttttttattttaaccagtcaggtgtgtagtaat

SEQ ID NO: 127285 - DNA, 631 bp, Homo sapiens
ggcaagaactttgactgtctttttcaaagttctatctactggcaccactaggttctcaatagacgtttgtttaatagaagttttaaaggtcagagccagtattcagacatagatgtcttactccatttcccatgctgtttcattttcaatgtgaacttttttataatttcttaattttaatttttactatttcagtatcctttcaaatgtacaatgcataccatctattaaatatataatcaaatagatgtgtattatatatcctgcttatagtatcatatgctttgtattataaaattgttgataggagyctatgctatatgggaaaattttttaataacctaggtaagataaaaacagaccttaagtagctatattttacatagatgaagatgcttgccttcataattaagatccagttaagggattcgtagtgtacttgtattatactactacaagtctaattaaatatactgagaaacacccatctaagcacagtctctatcatagaaaaattttattttattttcaaaagcaactcttataatgtcccaatattacaagtgtgtaaaatcatatttctagtccctctactttaatctagcctaaagaaacattataggttcaccat

SEQ ID NO: 127286 - DNA, 516 bp, Homo sapiens
actaaataagttgtgtcctctgttactataaagtaagttctcttaatgcaattttataatcttctagagcaggggtttgcaaaccttttcttcaaagggccagatagtcaatattgtaggttttgcaggccatatgatctgtcytgcaactactaactctgctctagttgtagcgtgaaagcagccattgacagctggtaaaaaaaatgagcatggctttgttccagtaaatatttatcaaactgaaattggaatttcatatgattattgtaggtcatgaaatatcattcttcatttgattttcgtttccaaccatttaaaattgtaaaagtcaaaagccattcttagctcataggttgaatgaaaacagatagcaggccagataggcccactagccatagtttgctgatccctgtcttaaagtttcaactattgcttttagtctagcttctctcctgagttgtatatgatttttaaatattcactgagtaccatctcaaattaaatgacaaaaat

SEQ ID NO: 127287 - DNA, 579 bp, Homo sapiens
gactcatagttccacacggctggggaggactcacaaacctggtggaaggcgaaggtggagcaagggcacattttgcatgatggcaagcaagagagtgtgtgaggggaactgccctttataaaacaatcagatctcatgagacttatwcactatcatgagaacagcatgggaaaaacccacccccatgattcaatgacctcccactgggtccctcccatgacacatggggattatgggagctgcaattcaagatgagatttgagtaaggacacagccaaaccatatcacctagtaattgtgcaaacttacactagtaaatttttctctctgggtcccagtttcctgtaaattgggtttacagtaatatctctcttacagaattttaacaggaaatttatttgagagaccatgagttatgatctttcacattcagtatgaatcaatacatcaattaaaggaaaacaaatggtagtcccattctatttatttcattcttcacttatgagtaaaagttgtattaaactatccagtctttagggcacatacccagtgaggtacataagacagctggtctggaac

SEQ ID NO: 127288 - DNA, 543 bp, Homo sapiens
gctcatgcttgagcccactcgcccaattcctgagatcttattgggaagctgctgatcaccagcttcaggtgtttctatctattgggagacaacctttccctggcccccatggcaacaaattattactttagagagatggctaaaaaatgtgtgatcatcacctacctgattggttgggggggaacctcctctgccctgttcatgtctgcctcactacctacagtaacaactataccttccttcccttggaattcagtcatggctgaccagtattaacattaaaacagagaccttaagaatgacaaaacagactctatagcaattggataccaacatgacagattgtagactctgagagaaatcaaagtattttaccctaaaatwtattttttgacatattttgaaatggtcctgcaaagctatctcttgtggggaaaatctacattatgtagagaatccccttcccttcccaggtctttttcttgatccaggagaaaattaagaggttggcacctttttaagtctgaaaagaaatatttacca

SEQ ID NO: 127289 - DNA, 622 bp, Homo sapiens
atataacaggaaacacagaaaggcagaaaaaaaaaattctgtcctccaaagataacccaatgtttttttacatttcaaaaatataatcactggctcaggtcagcccaagggacaggttaagatgcccatcagcttttattttatccgagyccagttcacctatccccaggacctgtagatgactttgcctggctctttttcatcaaatacaactcatcctactatattggatcaccttgctgttagcctggcactgtccctccccatttcaatttgaccaaattgaaacagatgcccagaggccgtgaagatcaagactagtataacaaaatttggagccagtttccaagtttaaatcaatatttaacggtaagcctgcttttatttatttattttttggcaggcttttactggcaaatatcactttaaactgaaagccagaagccttaattataaaggatgccattcaggctacattttgaaaaacaataactcatttgacaagacaacctggtagtttaccggattgcactccccagaagaaggcaaggaggagggtggtgttgttttctatatccttcaaagatatatttaattacctcatcttcaagcatgcagagac

SEQ ID NO: 127290 - DNA, 593 bp, Homo sapiens
cacctgcagttggtaggtgctgtataatgttgactgccacctgcagttggtaggtgctgtataatgttgactgccacctgcagttggtaggtgctgtataatgttgactgccacctgcagttggtaggtgctgtataatgttgactgccacctgcagttggtaggtgctgtataatgttgactgccacctgcagttggtaggtgctgtataatgttgactgccacctgcagttggtaggtgctgtataatgttgactgccacctgcagttggtaggtgctgtataatgttgactgccaccttgaaagtcatctgtccaacaccctccccactgtgggagatttctccrtggacatttcctgactaaatgccacaaaatggcagccaactctgtggccgccaatctggcatggtctaaaaagtggcaaagaggctgctgctcccagttctcttccccttcagctgttagagctttgcctccacctatgacctctccagcatcagtcaccatatattaggtgaaaatagtgaggccaattctccataaccaccaggcttaagccccttagcatatcaagcatagctgtttgtaag

SEQ ID NO: 127291 - DNA, 593 bp, Homo sapiens
cacctgcagttggtaggtgctgtataatgttgactgccacctgcagttggtaggtgctgtataatgttgactgccacctgcagttggtaggtgctgtataatgttgactgccacctgcagttggtaggtgctgtataatgttgactgccacctgcagttggtaggtgctgtataatgttgactgccacctgcagttggtaggtgctgtataatgttgactgccacctgcagttggtaggtgctgtataatgttgactgccacctgcagttggtaggtgctgtataatgttgactgccaccttgaaagtcatctgtccaacaccctccccactgtgggagatttctccatggacatttcctgactaaatgccacaaaatggcagccaactctgtggccgccaatctggcatggtctaaaaagtggcaaagaggctgctgctcccagttctcttccccttcakctgttagagctttgcctccacctatgacctctccagcatcagtcaccatatattaggtgaaaatagtgaggccaattctccataaccaccaggcttaagccccttagcatatcaagcatagctgtttgtaag

SEQ ID NO: 127292 - DNA, 593 bp, Homo sapiens
cacctgcagttggtaggtgctgtataatgttgactgccacctgcagttggtaggtgctgtataatgttgactgccacctgcagttggtaggtgctgtataatgttgactgccacctgcagttggtaggtgctgtataatgttgactgccacctgcagttggtaggtgctgtataatgttgactgccacctgcagttggtaggtgctgtataatgttgactgccacctgcagttggtaggtgctgtataatgttgactgccacctgcagttggtaggtgctgtataatgttgactgccaccttgaaagtcatctgtccaacaccctccccactgtgggagatttctccatggacatttcctgactaaatgccacaaaatggcagccaactctgtggccgccaatctggcatggtctaaaaagtggcaaagaggctgctgctcccagttctcttccccttcagctgttagagctttgcctccacctatgacctctccagcatcagtcamcatatattaggtgaaaatagtgaggccaattctccataaccaccaggcttaagccccttagcatatcaagcatagctgtttgtaag

SEQ ID NO: 127293 - DNA, 429 bp, Homo sapiens
ctctggtctatgattgagaagagaaaaatcattggggtccaagtcaagttaggttagaaatgcagcaggagactgaagggtcccatatgttgtrgcgggtacaacaggatgagagtggaacccgagaagacgcaaccagggacaatgcaacacagtggttcacaggagttcaatcagacagatgatgtcctgaaccaaggccaggacggaataattggccacctctcctggtacccacagcactgacagcaattcgtaaccaatgcacatgattgccactactatatcttgcttacatatgccaaaggaagttatttaataagttgtgtacacatttaaaatttttttttttgtaatccacttgttttttcaagtcctaaaggtcttttgaattagaaattttaggcccaaccagctatacccaactag

SEQ ID NO: 127294 - DNA, 429 bp, Homo sapiens
ctctggtctatgattgagaagagaaaaatcattggggtccaagtcaagttaggttagaaatgcagcaggagactgaagggtcccatatgttgtggcgggtacaacaggatgagagtggaacccgagaagrcgcaaccagggacaatgcaacacagtggttcacaggagttcaatcagacagatgatgtcctgaaccaaggccaggacggaataattggccacctctcctggtacccacagcactgacagcaattcgtaaccaatgcacatgattgccactactatatcttgcttacatatgccaaaggaagttatttaataagttgtgtacacatttaaaatttttttttttgtaatccacttgttttttcaagtcctaaaggtcttttgaattagaaattttaggcccaaccagctatacccaactag

SEQ ID NO: 127295 - DNA, 312 bp, Homo sapiens
aatctaactctttcaaggtcatccagtgatactgatgaaatattccaccggagggagaatcatgaaatattccaccggagggagaatcaaatccctgtctagcctccttgcccgcaggaagttgacagaagagggattgacctgaaggatcaaggggtatgcagtccaagtgggaatgtaacatgcatgaggtaagggggtgaggaagggcttagggttgctactgatgcccccacaaccctcactgtcagggtctggacagarctgccccttcccataattgctgtcatttaaggcccaagataaagaaat

SEQ ID NO: 127296 - DNA, 573 bp, Homo sapiens
tgtcttaatctcttttccgttgctataacagaatacggcagactgagtaatttataatgaacaaaaatttatttagctcatgattctgtaggctgggaagtccaatatcaaggggctggcatctcgtgacggccttcagcctgcgtcatcccatggtggaaaggcagaagggcagaagggtaagcaagtgtgcaaaagagaaaagcactatgggcagggcttgctttataacaacccactatcgagataactaacctgctactgagaaaacattaagccattcgtgagggctctgaccttatgacccaatcatctcttattaggccccatctcccaccactgttgcattgggtattaagtttccaacacacaaacttttgggaggcacattcacaccacagcaggcaccatatggtaaactcctttttcggttgccatctcccttcccactttattgttaaccacataaatttgaggaaagggaagggaagaacatgaaattcctctttaaaccctttcttmtatctcacacctataacaaccacatgcatgtaccttactacttacagaaaa

SEQ ID NO: 127297 - DNA, 598 bp, Homo sapiens
ataatttgtttagttaatactgctgtcattagggaactacatacatgcccacacaaattacatttactgatcctggcaagcacagtgtatttacatccactcacatcacctccttttagaaatgaacaaataaacaaaacaaaaaaccccagcaacrgtttgctctcagtaaactgcttgaccaataatagtttcaagtacaaatgttttctggtctgcagatggagatccaaactagaaaattctagcagatagatgtatggtgaaatggtgtgactcagtattattctttattaatagatcattcaagactaaatagcataggtttatgccttaaatggtggttctttcatctggtcacttctcttccattttgtcctagcttctactacgagcagaacacattggcaactacttgtaatccctgaaaacaggaataatgttactaccagtccaataatagtaatagcagtcatcatttactcaacactgacaatgtcttctgtgttgaatgcttttttagacattatattatttaatcctaactgtaagcttgagaaactgataacattacccaatttaaagatgagacatcaga

SEQ ID NO: 127298 - DNA, 604 bp, Homo sapiens
atgagaaatctctaaaaaatcactagtatttttatagttatttacaacttacaaagcacttcccacacaattttaatgtttaatagagcatccctgtacacctggtgttattattatttatatttttctgatgatgaaactgaggcagcaaagtcccacaagttaagtagtagaagccatggagcaccgtgtagtggttacagtcctgccaacagtggctctcagaaacatcaggacttggagctgcatgctcagactaatgagaacctggagcattagatggggactggtttccaaagcctgggaaagagctggcctgagggttccagaccagatactctagggagatttgacacagggataagaagcccaactaaaatccaggcagaaggtgaatacagctgtcattctgagaaagccrcatgactaagcagagcaggggaggaggttacaggacaaaacctgtgcccccacaccaggatgcaagggtttagattaaagataaggagttggagcttggtgggaatctcttagtcattgagaaatagctgcaggtgctttgtgtagagtattgtagccttgaccatgggtagggtggagcagc

SEQ ID NO: 127299 - DNA, 563 bp, Homo sapiens
cataaggcgtgaattcctggtggctccaccccatccccccagtgcatgtgggcctccagtctgctgctggcaagtccaggcaagcccctgtgcaggttcccttatytgcaccggacgttttatctggtgtagacacttgtgggcctggagattctctggggacccttccatatctgcctaggcattttgctgtctcctgcttctatcagtatcagtactaaatttcttcttattgctgagtaatattccattgtatggatacattaaacattttatgtaaccattcatgaggtgatggacctttgggttctttccactttttgactcttattaataatgctgctgtaggccaggtgtgttggctcacacctgtaatcccagcactttgggaggccaaggcgggtggatcacgaggtcaggagttcgagagcatcctggccaacatggtgaaaccctgtctctactaaaaatacaaaaattagctgggcatggtggtgtgtgcctgtaatcccagctactcaggagactgaggcaggagaattgcttgaacccggacccaggag

SEQ ID NO: 127300 - DNA, 563 bp, Homo sapiens
cataaggcgtgaattcctggtggctccaccccatccccccagtgcatgtgggcctccagtctgctgctggcaagtccaggcaagcccctgtgcaggttcccttatctgcaccggacrttttatctggtgtagacacttgtgggcctggagattctctggggacccttccatatctgcctaggcattttgctgtctcctgcttctatcagtatcagtactaaatttcttcttattgctgagtaatattccattgtatggatacattaaacattttatgtaaccattcatgaggtgatggacctttgggttctttccactttttgactcttattaataatgctgctgtaggccaggtgtgttggctcacacctgtaatcccagcactttgggaggccaaggcgggtggatcacgaggtcaggagttcgagagcatcctggccaacatggtgaaaccctgtctctactaaaaatacaaaaattagctgggcatggtggtgtgtgcctgtaatcccagctactcaggagactgaggcaggagaattgcttgaacccggacccaggag

SEQ ID NO: 127301 - DNA, 563 bp, Homo sapiens
cataaggcgtgaattcctggtggctccaccccatccccccagtgcatgtgggcctccagtctgctgctggcaagtccaggcaagcccctgtgcaggttcccttatctgcaccggacgttttatctggtgtagacacttgtgggcctggagattctctggggacccttccatatctgcctaggcattttgctgtctcctgcttctatcagtatcagtactaaatttcttcttattgctgagtaatattccattgtatggatacawtaaacattttatgtaaccattcatgaggtgatggacctttgggttctttccactttttgactcttattaataatgctgctgtaggccaggtgtgttggctcacacctgtaatcccagcactttgggaggccaaggcgggtggatcacgaggtcaggagttcgagagcatcctggccaacatggtgaaaccctgtctctactaaaaatacaaaaattagctgggcatggtggtgtgtgcctgtaatcccagctactcaggagactgaggcaggagaattgcttgaacccggacccaggag

SEQ ID NO: 127302 - DNA, 563 bp, Homo sapiens
cataaggcgtgaattcctggtggctccaccccatccccccagtgcatgtgggcctccagtctgctgctggcaagtccaggcaagcccctgtgcaggttcccttatctgcaccggacgttttatctggtgtagacacttgtgggcctggagattctctggggacccttccatatctgcctaggcattttgctgtctcctgcttctatcagtatcagtactaaatttcttcttattgctgagtaatattccattgtatggatacattaaacattttatgtaaccattcatgaggtgatggacctttgggttctttccactttttgactcttattaataatgctgctgtaggccaggtgtgttggctcacacctgtaatcccagcactttgggaggccaaggygggtggatcacgaggtcaggagttcgagagcatcctggccaacatggtgaaaccctgtctctactaaaaatacaaaaattagctgggcatggtggtgtgtgcctgtaatcccagctactcaggagactgaggcaggagaattgcttgaacccggacccaggag

SEQ ID NO: 127303 - DNA, 560 bp, Homo sapiens
ttctttttttcctttgagtctcgctctattgcccaggctggagtgctgcggtggtgctatctcagctcactgcaacctctgcctctcaggttcaagcaattcttctgyctcagcctcctgagtagctgggattacaggcacatgccaccacgcctggctaatttttgtatttttagtagagacggggtttcaccatgttggccaggctggtcttgaactcctgacctcaagttatccacccgcctcagcctcccaaagtgctgggattacaggcgtgagccacagcgcccagctaatgtccacatttctatcaacagtctctttaaggcaatttaggccttttccaacatgcacctccaaactcttccagcccttactcactgtttagttccaaagccacgtctgctcaccagcaccctatttcttggtacccaaatctgtactggttgccagggctgctgtaacaaaggcccacaggctgggggacttaaaccacagccatttatcttctaacagttctggaagctggaagtctgagaccaatgcgttggcagaatggg

SEQ ID NO: 127304 - DNA, 552 bp, Homo sapiens
cagaacagaaaatacaatccaatacatgctttggtaatactgctaaaaatggtttgggtgctgctgcggtaaacaatgtctaaacmaagtgtcattttccctccgccctttcccccatttcttcttaacagaaaagcctttggttttgattgtgaaatacaaagattaatcccagaatttctcccagctttgtccacttcctttgccctagttcattgagatttacagttggtatttactaaaatttttgttcacacgatgctgacatggggtttgggtttttatgattatatctctactatttgaacaccatgtcttcaagtctgtatgtacttacatataacacatgtgggcccctgctcactcttcctatgtcatgtgtcacgaaggaatgtaacagttttgatttaccaaaccctgaaatactcttgtcctatcagtggctcctttaagacaaaagtaaccattaaaataattaatgagatttggccttagaccttagtatgagatctggtcttaatagtaagtgctgagaacagcactttttcagcc

SEQ ID NO: 127305 - DNA, 557 bp, Homo sapiens
ataccatggaccctacagaccaagtgactgggcccaacctgccttgtgccaatttccacagaaataggccagaaactataggtgctctgttatcctttgagcgatctctgtctccgcagttgggaaggccaagaacagtccagagaccttctacttgactgtgtatgctactgccactgttcctatggccacagtcaccatggctagggctgtgtggcacaaggtctgagatagctatgcagacaggcagttgggcagagacggatgstctgggtccctgcaagtgctgtgcctcattaaacccagggaccatgccctactgccattgcactgggagatgaatccccttcagagactgaggcctgaagcagaaaagtgaaaaacttccaaaaacagtgctggttttctctgcagggaatcaggatgatgttggaaacagcatgaaggcacgggaatgacagagacccagatgtgaacctcagcttggccacgctgagcctctgtttccttcccagtcaagtgagaataaaaaaacatatacctcactgggtgatttt

SEQ ID NO: 127306 - DNA, 596 bp, Homo sapiens
ccttcctcctaatataccatcgtaccaggtcatttctcctaatagagatacttaatgtataaaaagactgagagtccccagatagaaaatgaacagtcttagtaattcaggagatctataagctaaaccaccaggagatctcagaactcaagaccatggtttctgacaaacacaatccctgggtatttggctgcccttcatgagcagcaaataggtgggggtttccagagcctactctcctggactctgtgccacaagcttgaatccgatactagtcaaggatttgtgattctttattttggtttgtgcagctgaacttctgatcatacttgattaatacttgactcttcttctatcagaatgagactaagaagaatgccttgttccctttgtgcaggtttttaaaactcccaattaaaaaaaactggaaaaaaaaccccaaaaaacaaacaaacaaaaaatcctcccaattcctgtctagggctatgtgaatcyccaaaaggattttaaaaataagggacctgtgttatgattccttcttatatgaagacccaggatcagagtagagcctgggaatacacgaattaatctaaaac

SEQ ID NO: 127307 - DNA, 515 bp, Homo sapiens
gcctatatcaataatttaaacttacacattcatgagatgcactgtgtttattaggatgtacatgtgtccctaagaatctgagagttcctgagggacagagacggtrtcttactcatctgctctccccaggtcctggcttactatctggcacttattgggtaataaatgtctgttgaatgcatggaaaaagaaaggtaggaaaggtatgaaggagaagatggaggtcacgaccagtagaaatctcagctgttctgcctgggctccatgtcatctccctgctattaggcccatcagaatgtaagcacaaatgcctagagaatgacaagcttctttgggactctgctgactagacatgacataagactggacagctccctgggaacttccaagagctggctccaggcagtaactaatcctaggagctgctggcttggctgcctctctcccttcctatttccaagattggtcacctcctgctctgaatagcaattgatttcagacatgagttgatagag

SEQ ID NO: 127308 - DNA, 609 bp, Homo sapiens
ttattgggtaataaatgtctgttgaatgcatggaaaaagaaaggtaggaaaggtatgaaggagaagatggaggtcacgaccagtagaaatctcagctgttctgcctgggctccatgtcatctccctgctattaggcccatcagaatgtaagcacaaatgcctagagaatgacaagcttctttgggactctgctgactagacatgacataagactggacagctccctgggaacttccaagarctggctccaggcagtaactaatcctaggagctgctggcttggctgcctctctcccttcctatttccaagattggtcacctcctgctctgaatagcaattgatttcagacatgagttgatagagccatgattttctaatactgttccaaagggattaaagtacctctgagaagcaggggaggggaggatcaaactctccctaccttccactccactccctaccttgcccctccacctctgcccactttctatttcctcaggcacagcagcttctaccttatggattacaaattctggtcatccatctatggttgcattaggaaaagagtactgctactttcattttcttttctaaccactgccctagaa

SEQ ID NO: 127309 - DNA, 609 bp, Homo sapiens
ttattgggtaataaatgtctgttgaatgcatggaaaaagaaaggtaggaaaggtatgaaggagaagatggaggtcacgaccagtagaaatctcagctgttctgcctgggctccatgtcatctccctgctattaggcccatcagaatgtaagcacaaatgcctagagaatgacaagcttctttgggactctgctgactagacatgacataagactggacagctccctgggaacttccaagagctggctccaggcagtractaatcctaggagctgctggcttggctgcctctctcccttcctatttccaagattggtcacctcctgctctgaatagcaattgatttcagacatgagttgatagagccatgattttctaatactgttccaaagggattaaagtacctctgagaagcaggggaggggaggatcaaactctccctaccttccactccactccctaccttgcccctccacctctgcccactttctatttcctcaggcacagcagcttctaccttatggattacaaattctggtcatccatctatggttgcattaggaaaagagtactgctactttcattttcttttctaaccactgccctagaa

SEQ ID NO: 127310 - DNA, 609 bp, Homo sapiens
ttattgggtaataaatgtctgttgaatgcatggaaaaagaaaggtaggaaaggtatgaaggagaagatggaggtcacgaccagtagaaatctcagctgttctgcctgggctccatgtcatctccctgctattaggcccatcagaatgtaagcacaaatgcctagagaatgacaagcttctttgggactctgctgactagacatgacataagactggacagctccctgggaacttccaagagctggctccaggcagtaactaatcctaggagctgctggcttggctgcctctctcccttcctatttccaagattggtcacctcctgctctgaatagcaattgatttcagacatgagttgatagagccatgattttctaatactgttccaaagggattaaagtacctctgagragcaggggaggggaggatcaaactctccctaccttccactccactccctaccttgcccctccacctctgcccactttctatttcctcaggcacagcagcttctaccttatggattacaaattctggtcatccatctatggttgcattaggaaaagagtactgctactttcattttcttttctaaccactgccctagaa

SEQ ID NO: 127311 - DNA, 609 bp, Homo sapiens
ttattgggtaataaatgtctgttgaatgcatggaaaaagaaaggtaggaaaggtatgaaggagaagatggaggtcacgaccagtagaaatctcagctgttctgcctgggctccatgtcatctccctgctattaggcccatcagaatgtaagcacaaatgcctagagaatgacaagcttctttgggactctgctgactagacatgacataagactggacagctccctgggaacttccaagagctggctccaggcagtaactaatcctaggagctgctggcttggctgcctctctcccttcctatttccaagattggtcacctcctgctctgaatagcaattgatttcagacatgagttgatagagccatgattttctaatactgttccaaagggattaaagtacctctgagaagcaggggaggggaggatcaaactctccctaccttccactccactccctaccttgcccctccacctctgcccactttctatttcctcaggcacagcagcttctaccttatggattacaaattctggtcatccatctatggttgcattaggaaaagagtaytgctactttcattttcttttctaaccactgccctagaa

SEQ ID NO: 127312 - DNA, 607 bp, Homo sapiens
tagccaacaaatacagtagtattaaaaagtttagtatactgtgaacaatcaacattaatctgagtaatttgggwttggttttacatttgaaaatgaaccattgcattttaccataaaaagagaataaaagacaaaaactgttctcatttcaatagatgctaaaaaagcatataacaaaatttaacagataaaaaactctcagcaaactaaagaatataaggagacttcctcaacctaataaaaggcagctacaaaaggcctacagctaaataataaatatttgaatattgaaaaaggaagtgatgtacatttctaccacttctattctgcactgcactggagctcttctccaatgaaatcaggaaaggaaaacaatgaaaacagatagatagatttaaaaacaataaagatataaaaggaagaagtaaaccatttatatttgcaaacgtcatgattagttacatagcaaatcctgaggaatctacaacaaaactatggaactaatatatttatttaatgaggttgcatgatacaaggttaatatataccaccagcaaacaaaatgaagaaaaacaatgccatttaaaatactgtccttacacataaa

SEQ ID NO: 127313 - DNA, 477 bp, Homo sapiens
ccttggtatttgagaggagctctcattcatgcatcccaaaagacatcgattagctgaatttgtcatgatatttactaaacatatatatgcatttgcgctgacaggattgtgtccaaaacctattgacattgaggttgaaggaatactttctttgaatatatgtactaccattacaaaarttatcactaaaatcttatccattcagtagatatttgttgaatattagtaaatgaataattgaatcaatagatgaatggcacatgcgtaagcttttcatttttgttgcatttcctggcaaagctccctctgtctagaataacttctacctttttgtttctgtaaaaatattctgcaggcactaaagcctagttagtgcctagttagtgcctagtttgtgcctagttaaatccaatatgaccgtatccttgaaagtttccttcatttctccagatgtcccaagtataaatacaagcaaag

SEQ ID NO: 127314 - DNA, 601 bp, Homo sapiens
cataaacaaccacaattagcaaagcatgttcacagtcaaagttgcctttcgaaaggcaggtgtgtgtacatttccctaggagcagatggcaattgtgtggaatcgctgctccgtccttagttttggagatttataaggaggagtggggccatgtttaccaagcctgctgctttccccaccaaatcaattccttgtcagggtacaaccagacctctggaaagggttaagtaggagtccggggggaccacttgacatctgctccactcamgactttttgatcttgttgtttttggcttttgaagagcaggcccaccttgaagagtgtgtgtctgtgtgtgtgtgtgtgtgtgtgtgtgaaagagagagagagggagatgggtggcattggcatgggagagggagggaaaataaccccacaatgacagatcaaacgaaggcaacataaaatttttgtttaatttcagtgggattacatgctatgaaatgacaataacaggaacaggagggagaatgccagggtctcatgtgtgaaaccctttgtaaaaggaatgtaaactgtgtggctgttttgctgtcattaaccaacacttgaacatgggtg

SEQ ID NO: 127315 - DNA, 601 bp, Homo sapiens
cataaacaaccacaattagcaaagcatgttcacagtcaaagttgcctttcgaaaggcaggtgtgtgtacatttccctaggagcagatggcaattgtgtggaatcgctgctccgtccttagttttggagatttataaggaggagtggggccatgtttaccaagcctgctgctttccccaccaaatcaattccttgtcagggtacaaccagacctctggaaagggttaagtaggagtccggggggaccacttgacatctgctccactcaagactttttgatcttgttgtttttggcttttgaagagcaggcccaccttgaagagtgtgtgtstgtgtgtgtgtgtgtgtgtgtgtgtgaaagagagagagagggagatgggtggcattggcatgggagagggagggaaaataaccccacaatgacagatcaaacgaaggcaacataaaatttttgtttaatttcagtgggattacatgctatgaaatgacaataacaggaacaggagggagaatgccagggtctcatgtgtgaaaccctttgtaaaaggaatgtaaactgtgtggctgttttgctgtcattaaccaacacttgaacatgggtg

SEQ ID NO: 127316 - DNA, 560 bp, Homo sapiens
ttttaaagactacaactaatgaaaacacaattctccggaacaattttttatggtcttccctctaatagtcaccttttcttatttaagttaaatcaccttggagaaaaatgtattttagtttttttttcaaaaggagtctttcayagaatgacaaaagctgtccagagtagtagcattttacatagtgctcatttccagttgatattcccaaatttctggaaccctatatcagaaattataggaaagagcgtaatcatggatgatatccaacagatggaagtttttgtggttttgacttaaggtaaagatagtttgctatatgcttctcaattctatgcagattgagatgtttgaaacttttattttaacattaaagacatatatcctaagaaaattcatgtaaattattgataatgtttgaacttgcctattgcttttgtttatttcaagaaaatctaggatttttttttctttttatagaccatatgaagtatttggaccttctgctggagctgcgttagagtccttgggactaaaactttataaagtcctctggcact

SEQ ID NO: 127317 - DNA, 560 bp, Homo sapiens
ttttaaagactacaactaatgaaaacacaattctccggaacaattttttatggtcttccctctaatagtcaccttttcttatttaagttaaatcaccttggagaaaaatgtattttagtttttttttcaaaaggagtctttcatagaatgacaaaagctgtccagagtagtagcattttacatagtgctcatttccagttgatattcccaaatttctggaaccctatatcagaaattataggaaagagcgtaatcatggatgatatccaacagatggaagtttttgtggttttgacttaaggtaaagatagtttgctayatgcttctcaattctatgcagattgagatgtttgaaacttttattttaacattaaagacatatatcctaagaaaattcatgtaaattattgataatgtttgaacttgcctattgcttttgtttatttcaagaaaatctaggatttttttttctttttatagaccatatgaagtatttggaccttctgctggagctgcgttagagtccttgggactaaaactttataaagtcctctggcact

SEQ ID NO: 127318 - DNA, 538 bp, Homo sapiens
aaggattattgtcaaatatttaatgtgattaatgagactctactcataaaatacactggaattcaatttattttagaagtgtttcaggttctgcctgaaattcatctggattactttaaatataatgaaatagatacataagtaaaccgaagacagcgactgctcaaagcgtttcacataccctttgtttcttcaatattatackctgctagcactccatcagtcctacaaatgggaattttcaattgtctaattggatctaggattggaggcttatgacagaggagctgccgtatatgaattcacattccctgctgcctcaaccatagtagggtacttccatatgtaggtggtgcatatggtgaaaatccatatttatgcacatttataaaattgtggtaagattatgttttcatagtgagatggaattataaccttgattgaattatgccttctgatgaaatccaattactgatttatttgttctccataggttggacatagacatttcttcctagtctatgtaagaaaattttat

SEQ ID NO: 127319 - DNA, 538 bp, Homo sapiens
aaggattattgtcaaatatttaatgtgattaatgagactctactcataaaatacactggaattcaatttattttagaagtgtttcaggttctgcctgaaattcatctggattactttaaatataatgaaatagatacataagtaaaccgaagacagcgactgctcaaagcgtttcacataccctttgtttcttcaatattatactctgctagcactccatyagtcctacaaatgggaattttcaattgtctaattggatctaggattggaggcttatgacagaggagctgccgtatatgaattcacattccctgctgcctcaaccatagtagggtacttccatatgtaggtggtgcatatggtgaaaatccatatttatgcacatttataaaattgtggtaagattatgttttcatagtgagatggaattataaccttgattgaattatgccttctgatgaaatccaattactgatttatttgttctccataggttggacatagacatttcttcctagtctatgtaagaaaattttat

SEQ ID NO: 127320 - DNA, 539 bp, Homo sapiens
gggtagtaagagacgataaaagttttcagtttaayttcatgataatggttatgttataggttgaattcttccccatcccaaattgggatgttgcagtcctaacccccagcactcataatgtaatcttatttggaaataggattgctgcacatgtaatcagttaagatgagatcatactggattagagtgggctcctaatccaacatgactggtgtctttatgaggaaagatgatgtgaaggcactaggggaaaaccatatacaagccaaagtactcctgaggccactgctctcagaaggaaccaaccctgccaagaccttgatctcatacttctagccttcagaattctgagacaatgaatttctgttatgtaagccagccagtttgtggtactttgttatggcagccctagcaaaccaaaatagtttgtcacacatttcaatgttacaagttttgaggcccataagaaattattaatattcatttacatctccagcactttaagtggaaatcttggagtaccaggtataatctcagac

SEQ ID NO: 127321 - DNA, 570 bp, Homo sapiens
tattctttcaggtcctagtgcctgtcagttcttacttacctctggactttcttatgggctttttcctttatctggaatactctttcccctttatcttggataattcttcctcaaatattaagtccaaatgagaccacattttcttcattaactgccccttgcggtagatcttgccatgctagacaagggccactgctatgtacaccagcaatattctggacatgccttacaatagcatttaatagctttttcttgtatttttatcagttgctttcagtagcagctcaccataatgttgttagggcctcgcatcctacatttctggrtgactattaaatatttactaaatgaataaataaatgaaattcactgaatctgtaagcaagaaataccaatgatggttcactttgtcccagcacaattcccgtatgaagacaaatgatataaaacattaaaaaaattaagaaaaaattatcatgaaaaaatagggtaatagtaaataaatttggccttcagctaaacagagagagaaaattctatttaacacaaattgcatttcatagtgaaata

SEQ ID NO: 127322 - DNA, 606 bp, Homo sapiens
cactaatgatcagggaaatgcaaatcaaaaccacaatagatacgactttactcctgtaagaatgaccataataaaaaaaaaaatagatgttggtgtggatgtggtgaaaagggaagactcttacactgttggtgggaatataaagtagtacaaccactatggaaaacagtgtggagattccttaaataactataagtagatctaccatttgatccagcaatcctgctactggatagctacccagaggaaaagaagtcattacacaaaaaaagatacttgcaygcccatgtttatagcagcacaatttgcaattgtaaaaatatggaatcagcccaaatgcccatcaatcaatcagtaatgaaaatgttatctatatctatctatctatctatctatctatctatctatctatctatctatctatcactatcatctatccatccacccacccaccatggaatactactcagccataaaatggaaggaaataacagcattcacagcaacttggatggaactggagaccattattctaagtgaagtaagtcaggaatggaacaccaaacatcatatgttctctcttacaagtgggagctaagctataag

SEQ ID NO: 127323 - DNA, 564 bp, Homo sapiens
ctcctttcccagctccaaaaagccaaatcatactcatcttttaagacccacgaacctctcagttaccctctcttattttttccagagatatgcacctcccttaaagcatcaaccacctctgccttataatcagattatttgtttatatttgttatatgctgtttgaaggataaatctgttgcttatctgtttttgtgtgctggactctgtttagcatggtttttgccaggactcagtgacaacttactggcttcaacctcaaactcaacatgtctgagctcatgatctgtttcctccactcccaccgcaacctctccctcttgaatttcctgtcatgctgatggaaaccccctccacttcactgcccatgccagaaaatttcgtgttactctttctcctctgtacctcaatccccagcccccatgtgatcaatgacagtcctgtcaattttgcctctctgataactcttaaatttayaccccaatttacacccctgttgcttctagccacagacctatgactttagttctggccatcatcagccctggcctgtgtcacagcact

SEQ ID NO: 127324 - DNA, 523 bp, Homo sapiens
tggtcccataaaacaagagccaagcttagggtgaagctgggttgttgtagtacagaaaaggaacaaaggtcctttctgcctgcagcctgcaatccaaggtgataaatgagtaataaccataaggcagagaggagggaaatatagcaggagacatagtggggctggaaaaagcctagtctcctaggtgcctctgaaacattcctgatgaacaaagaggtcgttattcccatggagaagatgtggacagagcacagtaagagtgtatgctttggagccaggcttactcagtttgaatcccagcttggctatctattaactgagtgacttttccaaygtcagtcagggaaagtcacctaaattttctgtgcctcaattttcttatcagtaaaatgggaatgataataacttcaaaaccttttgtgaaaagtaagttaatttatgtgaagtgcttagaacagtgccttatatataataagtgctatgtagcctatggacaatagaaaaatgacacctcccacttacc

SEQ ID NO: 127325 - DNA, 572 bp, Homo sapiens
gaggtttgcggggactttgtgtaaaaggagcttttttttcttattcctctagaaggtgtgttgtgaacattggaagtctgcaatggctacagtcattttactctgaataaaaggatctgaaactaagagagtagttgaaggaagcgtaatgttgggtttgagaatggagtaaatgccatgcaaggcagaacaagactgactcctcggtaacatcatttttaaccactagatcaagcttcccttgagacgagtattaacttcaaatttttcaaataggtgagccaataaatgcttcatggtagagtatggtggttaagaggaagtttctggagctagactattcaaattatagctccatactcactaattgtgagatcttggaaataatgcyttcattccttaattttttcacatgtactatacaggtaagaatatgttgacctcataggattgttgtagaattagattaatacataggaatgtatgtatgtatctatctatctatctttcacattgctcaaaacataataagcactaaccaagagttattttattttattattatacctaat

SEQ ID NO: 127326 - DNA, 580 bp, Homo sapiens
acaagtgatgtgtcaacagttattaaattatgcgtgttctcagcctccatcctaacccaagatactaaagaagatcctggcttgaagtcctcagtctcctgtcaactgaattcaatccattctcctgaggtttgttatgcagaatcaggaagaaagctagagacagagaaagactgggaggccacaggctacggctagggaaatctttaaacagggaaaggtttgaagattataagtaaagtttagaatgaaaaaaaaaatgtaaaagcagttgtaatgagtaaagaaaatgcatgagagaaagaggaaaaatatttttaaattactgtgatacatgtatttttctttgtgctatttgaaagatacaaataaaggattttcattttaagattatcttgtgactggatgtgtttattctaagctaaataccacttactctaggcactatatgaatgtatggaattatwcttaataaatacaacatgctgagaatgttcatttcttgatggttcaagatctccactgtgttgggtcatacaaagatcatgaatctgcactgtataaggttatagatataaat

SEQ ID NO: 127327 - DNA, 587 bp, Homo sapiens
aataaggttggatatggctgcctttttgagatttggattagaataggaatacattaagaaaataaaatctctttgtgagatctaatatgatataaactttacattagtaaagttccacaataataccccaaagcaggtagctcgttaagaaaatattgtcccataaacaatttatccatataacttattatttttatgtaagtttcatatgatttctttaaaatatatttttcatactaaggaagttgagaaatttactcagacactaaaattaacaaattaccctggatttgcaattcaattaattgtcctttctttgtgtttcttggcaggcccagaatactttgtaaaatttagctytaactaatgttgacaaaatattttaggccactggaaatgtcagtaatgtcattttccaggccagtttcaaattgaaaacatgttcatactttgcacacagttttgtcacacaaattctcctcagtgaactcacggcaatttaaatatttttaaatacacatatttgtggatactatatggcaatttttgatcaaccaagtgaaaatagatttattcaaaaatgttta

SEQ ID NO: 127328 - DNA, 595 bp, Homo sapiens
aacctgcaaaatctacacttttgggcattcagtatccacacgcattttccaaactttattgaagcctccatacagaaaggacaacttcatgcatcttcctaacaagatgcacacgttcttcataaaaacaaaagctttctcatctcaaaaagagaagacacgaagttccatgagtgaccatacctatctctggacaatgttattcttcttctaattcactcatacccttgcctgaatattctgtaacacaaagactaagtttgccactgaaaacaactactacataagataataarggaaagattaataaaagggaaatttagttaatatatatgaagtatcatgaagaaaatatgcttagttgctacaggcttcaattccgcatctggtcccgacagcataggtgatattcataccttcttcgttcttcccccatcccgtgtcccctttgccctcagctagtcaggattctgtatctgttagagtgacatacaacttcatctgggaaggacttatctgcagctctgcttttgttgtgttgatcaagttttctgtcaaattttactaccaaaaaaaagtgaaacagttaagaggc

SEQ ID NO: 127329 - DNA, 602 bp, Homo sapiens
gagttgctttctggaagaagtttgacagcacacctaatgtctcgactatcccaactgttgcctgtgggccaggcttttaattaggctgtatctgggagctgatgaagcaatccatagtcctcttggagcctgaaatggcatctcacagctcctcctgctggaatgctccagtgatagaactaagcttccarctaagccacctgtctctaagagtgggtggaacttggtatccactggagtgacaaagagcaaagcaatggattgaaagagtgtgctgtctgaacaagagtacagacatttgccacagatactctgtccagtttagtgcagagcaagtgagagataaactctagcttccactgtttccttgaagagaagggaaactagacctcacatctagaacccaaaatttttcattttcttgaaggactggcttctatctcacctatttcaagacactattgagacttggcacaccctaatctcctgcgatccactaagaacaaaagcagtgatttttgacaggtacgaagatttgagaggtacccagtatttctagctaggctagctgatgaagtttaactcccacatgaggccaatct

SEQ ID NO: 127330 - DNA, 578 bp, Homo sapiens
ctgcagcattttttaagatctccttttcctttcacatctttcttttgcacccgtgaaggccccttaccttcactttcaaaattctcccaatgctggcccctgactctcacctttccaaatatcacccttttcttctactcactgccatcccctgttggctcccccttaattttaatatcgcatctcaaaagcccaccatgaaaaaaatgggtatggaaacagtcccaccttagatggagtagaggggaaacaccaagtagaaaaaactaaacatttcatatttttgacaaaaaaaaaaaaatcatcttttgtgccagcctggttgtcatttcagaaagctttgggtcttaagtaaataggaaatgatgggaaagttttattggggtagaggtgatactgagaatatgtggcaccacccaggaaggcaccccctgtagagtcacaaccacgcgtgctaccattgattcagagcctacaatatgtcatggagttttacataaattattttatttttcctcagcacaatatggtgggatagrttttattttttttattttatagaagaagaaatgtgggaa

SEQ ID NO: 127331 - DNA, 659 bp, Homo sapiens
aatatagttggttttataaattcataaagggggtagtaaactgagacaaatgtccttgggaaaacggctgccaggacttggccaaagagtgtttgaaaaacactgctgctggagatattataatgaacccagaatacatgcagtttttgtgtttttccttcttataattttgctgtacttattcccacagccaacttcaaatgaccccctccctggcccccccmcaagaaaaaaacagggcagctgaaaagtttgcttaaacttcttaatacttttaatccttacttgttataatttgattactgagacagactttctctgtgggcctcctattaaatcactttcaagttgaaacaaaccagaaatccttttaaataacagagctagtattcactataagctgctcagaatttatacagaaactgtagactgtctcttctaaaatgttgtaaatatgcccagaggctactgtgatgggtttatccttccaacctaaccaaaaataaaataagtaaatgaagttacttgatgttctgggttataaagtagaggacaatgttattcaggcttatatctgattttatttatttccatattattagatatcaacatagataaagttacttcaaattaacattgtacgtagttttttctctatg

SEQ ID NO: 127332 - DNA, 659 bp, Homo sapiens
aatatagttggttttataaattcataaagggggtagtaaactgagacaaatgtccttgggaaaacggctgccaggacttggccaaagagtgtttgaaaaacactgctgctggagatattataatgaacccagaatacatgcagtttttgtgtttttccttcttataattttgctgtacttattcccacagccaacttcaaatgaccccctccctggcccccccacaagaaaaaaacagggcagctgaaaagtttgcttaaacttcttaatacttttaatccttacttgttataatttgattactgagacagaytttctctgtgggcctcctattaaatcactttcaagttgaaacaaaccagaaatccttttaaataacagagctagtattcactataagctgctcagaatttatacagaaactgtagactgtctcttctaaaatgttgtaaatatgcccagaggctactgtgatgggtttatccttccaacctaaccaaaaataaaataagtaaatgaagttacttgatgttctgggttataaagtagaggacaatgttattcaggcttatatctgattttatttatttccatattattagatatcaacatagataaagttacttcaaattaacattgtacgtagttttttctctatg

SEQ ID NO: 127333 - DNA, 615 bp, Homo sapiens
gaaattgcagttttgtaggtgaaaaatgattgaatattaacaatttcctatgtttcaacttaatagctttttgcacttcccaagcacattgtatttgaaatttccacagtgcccagyaatgtctttcaagtaaaagtagttctttcaagtaaaagattcaatttctgtcaactccaactgttcagaagatgcatgagttttgtaaaccaaggtttaaagacactgatagttaaaagctctgtggattaaaaattgagttctgcttttatttgttttctaataaaaagtttcaagataagaccaaatggaaattggaatattttgctatatcttctatgttgtagttgttaaacaatatgtattaaatcactttcggcatttgttaaaatgtaaatgtgtaagactgacttactgaatcagaatcttggggtaaagctcctgaagtcataatttttactaagtattaaagatgaatcttatcataccaaatctggtgagaaacactgaattatacagcaacctttccatggatgagataattgaagtctgaagacattaagtgatatattctgatgtcatacaaccagtaagtactagagttggttgtctcattca

SEQ ID NO: 127334 - DNA, 469 bp, Homo sapiens
gaattcttgggtacaaatcccaggtgctccactatttggcagtgtgaccttggcaattaattaaccttttcttatcaaacagttttctcatgtctaaatgtgtataatcctgtctcaaaagatagttgtgggattaattgtgatactgaatataaagagcttagcatggtgtcagcacatcccgtgcagatggtggctcttatgtcatagagtggttactgctgctgcacttgcttactgagttaagccaggtacttctttgcctttgtaaaaaggaatgmattttttttcctctgttttctcaggattttttttttaacttataaactgagacctggaaaaaaaaatatttactctctcaggcccttttccacctaataatccttcccctaatatgttgcttttgcatttctttttcttctgctgacctcattaaaagaagatattatatgattatcagattgtttct

SEQ ID NO: 127335 - DNA, 491 bp, Homo sapiens
ttatgtatatgtagcctgtcaattagaggcattgcttatatctaggggactgcagagggaggcctccagtgaggagcatctttaaggaatccatggaatcattccatcagaggaagaatcagctctgggaatctgctccaagcctgggaaccaggacctgatgacatcactgctggtccagcagggtccgccctgtcccttacctcttctacctctcgtcattctcagcctgcaactcagtaagggcaaaggaaaggagaaggaaggcaggagattggaagcctctgtgacccagtgggtccaggctggggtcagggagaagttctaactttaaatgaagcttggaaatgtrttacattgaactgcacattttgtttactaaaatgggttgctctggtgactaaaaatgacttgagtcacagcaaaagctaagaattggtttgaaggggcagaggaatagccttgttttctgctcccacccagtggaattc

SEQ ID NO: 127336 - DNA, 517 bp, Homo sapiens
tccggaaacttacaatcatggtagaaggcaaaggggaaccaagcacrtcaaaccatgggagcacaggagagagggaaatgccacacactcttcaaccatcagatctcgtgagaactctctcattatcacaagaacagcaagggggaaatctgcctccatgatcccatcacctcccaccaggtccctccctcaacattgggaattacaattcaacatgagatttgggtggggacagagagccaaatcatatcaccttcactaaccaaaacttactgagattttgacttatagttggactctacattgatattcatgctcaacatattggaattccttcggaacagagaacacatacctatgaaacctgtcattaaactgggtagtaacaccaatataattgtatactttattaagatacatttaaattttggtaaaatatacttaatttaccattttaaccatttttagtgtactagctctatagcattacttacattcacattgtcatgcaaccatc

SEQ ID NO: 127337 - DNA, 517 bp, Homo sapiens
tccggaaacttacaatcatggtagaaggcaaaggggaaccaagcacatcaaaccatgggagcacaggagagagggaaatgccacacactcttcaaccatcagatctcgtgagaactctctcaytatcacaagaacagcaagggggaaatctgcctccatgatcccatcacctcccaccaggtccctccctcaacattgggaattacaattcaacatgagatttgggtggggacagagagccaaatcatatcaccttcactaaccaaaacttactgagattttgacttatagttggactctacattgatattcatgctcaacatattggaattccttcggaacagagaacacatacctatgaaacctgtcattaaactgggtagtaacaccaatataattgtatactttattaagatacatttaaattttggtaaaatatacttaatttaccattttaaccatttttagtgtactagctctatagcattacttacattcacattgtcatgcaaccatc

SEQ ID NO: 127338 - DNA, 434 bp, Homo sapiens
ggaggaagactggttagaccaggtgtgccatttgcatagggcgtgaatatctggtagcccccactctaatcttttattatggaggtaggttctctgcctgagttgcgccatttttttattaccgtacacatggtaacaaacaaatggaagacggagcctccatgttggacactcctggctcccaggtagctgttttctattggcacagctgctggcattctcctgtgaatgctggcatccagcttgcttatctatgtttgcagctcgatttttcaggctgctctttcttaggaaaaaaataatttcttgggctgctttttgttagaagggaagctctgccgaggactcttttgccctactatctgcctaaataatttctttytaccccctgtatcacttgtttttgttgaccttgacgattttgagaagtactc

SEQ ID NO: 127339 - DNA, 563 bp, Homo sapiens
ggctcctgggcatgaacagagagcccaacccagagggcttagctactttgagctgctttggtctggctgttggttttccaggtccgagcatcacatgtgaaaggcagtacggctgtcatcactcatagtcattttaccctaaatctgctataattcacagtgatcacttaatttgagcagttacataatttttagttatcttttttacwgttctgtattttaaaaaattccaaagggggaatttttattttagtagtcagaaaataagttattataataataaaaaataacctttatggatttagaaatgctttactgtttgcaagatactttgataactgccatcctcagtgactgtcacaaccacctctctgatctctgtaatgtgtctacttgcaggtggactttggttcttgtcttattgtcttctgcccaccagaagtcctgctccacggttctccagccccctcaaacccgggggccttcacctcaactccagttctgtcaccctcttctggggatacacacggccactgagtctcagtcagttatggctcagaaac

SEQ ID NO: 127340 - DNA, 554 bp, Homo sapiens
attagtcagtttttgctacataacaaccaaccacaaaatttcagtgccatacaacaaaacttttttattttttgcttataagcttcagtcygtgggtcaagttcaggattgctccatgcttctcattctaggactcagggtggagaatcaatggctcctgggaatttattcttctaatgtaggagtttggaagtacaagtgggccaggccaatctgtgcaagcttttttttttttttttttttttttttttagatggagtctctctctgtcacccaggctggagtgcagtggcgtgatctcagctcactgcaacctccgcctcccgggttcaagtgattctcttgcctcagcctcccaagtggctgggactacaggtgtgcaccaccatgcccagctaatttttgtatttttagtagagatggggtttcaccatgttggccaggatggtctcgatctcttgacctcatgatctgctggcctcggtcccccaaagtgttgagattataggcgtgagccaccacacccagcctgtgcaagcacattttaagcttct

SEQ ID NO: 127341 - DNA, 554 bp, Homo sapiens
attagtcagtttttgctacataacaaccaaccacaaaatttcagtgccatacaacaaaacttttttattttttgcttataagcttcagtccgtgggtcaagttcaggattgctccatgcttctcattctaggactcagggtggagaatcaatggctcctgggaatttattcttctaatgtaggagtttggaagtacaagygggccaggccaatctgtgcaagcttttttttttttttttttttttttttttagatggagtctctctctgtcacccaggctggagtgcagtggcgtgatctcagctcactgcaacctccgcctcccgggttcaagtgattctcttgcctcagcctcccaagtggctgggactacaggtgtgcaccaccatgcccagctaatttttgtatttttagtagagatggggtttcaccatgttggccaggatggtctcgatctcttgacctcatgatctgctggcctcggtcccccaaagtgttgagattataggcgtgagccaccacacccagcctgtgcaagcacattttaagcttct

SEQ ID NO: 127342 - DNA, 554 bp, Homo sapiens
attagtcagtttttgctacataacaaccaaccacaaaatttcagtgccatacaacaaaacttttttattttttgcttataagcttcagtccgtgggtcaagttcaggattgctccatgcttctcattctaggactcagggtggagaatcaatggctcctgggaatttattcttctaatgtaggagtttggaagtacaagtgggccaggccaatctgtgcaagcttttttttttttttttttttttttttttagatggagtctctctctgtcacccaggctggagtgcagtggcgtgatctcagctcactgcaacctccrcctcccgggttcaagtgattctcttgcctcagcctcccaagtggctgggactacaggtgtgcaccaccatgcccagctaatttttgtatttttagtagagatggggtttcaccatgttggccaggatggtctcgatctcttgacctcatgatctgctggcctcggtcccccaaagtgttgagattataggcgtgagccaccacacccagcctgtgcaagcacattttaagcttct

SEQ ID NO: 127343 - DNA, 554 bp, Homo sapiens
attagtcagtttttgctacataacaaccaaccacaaaatttcagtgccatacaacaaaacttttttattttttgcttataagcttcagtccgtgggtcaagttcaggattgctccatgcttctcattctaggactcagggtggagaatcaatggctcctgggaatttattcttctaatgtaggagtttggaagtacaagtgggccaggccaatctgtgcaagcttttttttttttttttttttttttttttagatggagtctctctctgtcacccaggctggagtgcagtggcgtgatctcagctcactgcaacctccgcctcccgggttcaagtgattctcttgcctcagcctcccragtggctgggactacaggtgtgcaccaccatgcccagctaatttttgtatttttagtagagatggggtttcaccatgttggccaggatggtctcgatctcttgacctcatgatctgctggcctcggtcccccaaagtgttgagattataggcgtgagccaccacacccagcctgtgcaagcacattttaagcttct

SEQ ID NO: 127344 - DNA, 280 bp, Homo sapiens
attttgagacattgtgcctttttgtctaaaatattctatttgatgaacrgttaaactaatagtctgtgagctcctttagggcaagaatcacttccaggtttcgtctcctcagtgctgagggttgtgctcaaaacagagtaggtagggaaggaatgattgccgaatgaatgaatgaatggagaaagagtggatctagttccatgggcctaagactgaggcccatagtctctaatgtgtttatgcaaaatgctgcatggtagctgctaatagaaagcaagtt

SEQ ID NO: 127345 - DNA, 280 bp, Homo sapiens
attttgagacattgtgcctttttgtctaaaatattctatttgatgaacagttaaactaatagtctgtgagctcctttagggcaagaatcacktccaggtttcgtctcctcagtgctgagggttgtgctcaaaacagagtaggtagggaaggaatgattgccgaatgaatgaatgaatggagaaagagtggatctagttccatgggcctaagactgaggcccatagtctctaatgtgtttatgcaaaatgctgcatggtagctgctaatagaaagcaagtt

SEQ ID NO: 127346 - DNA, 533 bp, Homo sapiens
tctttgctccttcttttgtttggcctgctaattctttctccatctgaggggtgagaaagacttctttttagctrtctctttcactgccaacctgctttgataatgttctgggggctttaccagaatgacattttagaccactctaactcagcttagccactgaagctgagcacagctgaagaaagcactcaattagcaactccaacttcaaaggctatattattctctcctcaatacacatgtgtaactcccattagcgttaatgggagctgtgggagcccacggctcagagaatatacctccaagtctgtttgcttgatgagcatgcaattaaaccttatggcccaaatttttcaaggagggcatagtaagtacaccaagcactcatgcaaaatcaagtgtgcttactttgagaaaaagtaagctatcgccactatttaaacatgaagaaagagcagtctaaattaggtctattttaatttcatttgtcctcttaggtgtggacaatggcctttcatggtgttttgaggaaa

SEQ ID NO: 127347 - DNA, 282 bp, Homo sapiens
gcttgttcctgaagaaaacatcccttaacacgcagtgtattatctgacactgccaattttgcacgtcctctggaatcaggtgtcagttggtaaaatacacctcctccatccccaaggaaatattatctaacatctataatgtagtggataattttcccatagctgatatcaaccgaaaaataaaggatccaagaaaacaacatttacatcttaggcaaagacaggctgctttaccttggtagtagagyagggctcccttttcacacgctttttggaagaatt

SEQ ID NO: 127348 - DNA, 587 bp, Homo sapiens
aactaatgaatgacattttagattaaaagtgaattttatttaacccaattattcttatcctatgcacacaaatttgaatttaagttagcttgatgtagatggtcaccccattccaaagcatgrgtccaaataccctaaggttccaggaggagccagctttcttcagaaggtggcaagtgcattgcaaagtactgaggaaaactttctttaaagtatcttttttcatcattccatattttgctccttataattgcaactgctctccttatacatgtctcttttgaaacttctcacttgtctaaggtgctattgttcctcctcatcttttttttttttttttaatagcatagtctctctccctccttgccatgctgaaaaggcttctgacttgctgttcttgccaggaaacatttctgcagggcgtattggagtggaactacttacagagtgtcagggcaagtccttacatttgtttatgcttaggacacaacacagaagataattttctaagttaaagattgtatgattttatcttgacttcagaaactggtcatacttttttactttagtttctaagaacctcagag

SEQ ID NO: 127349 - DNA, 587 bp, Homo sapiens
aactaatgaatgacattttagattaaaagtgaattttatttaacccaattattcttatcctatgcacacaaatttgaatttaagttagcttgatgtagatggtcaccccattccaaagcatgggtccaaataccctaaggttccagraggagccagctttcttcagaaggtggcaagtgcattgcaaagtactgaggaaaactttctttaaagtatcttttttcatcattccatattttgctccttataattgcaactgctctccttatacatgtctcttttgaaacttctcacttgtctaaggtgctattgttcctcctcatcttttttttttttttttaatagcatagtctctctccctccttgccatgctgaaaaggcttctgacttgctgttcttgccaggaaacatttctgcagggcgtattggagtggaactacttacagagtgtcagggcaagtccttacatttgtttatgcttaggacacaacacagaagataattttctaagttaaagattgtatgattttatcttgacttcagaaactggtcatacttttttactttagtttctaagaacctcagag

SEQ ID NO: 127350 - DNA, 587 bp, Homo sapiens
aactaatgaatgacattttagattaaaagtgaattttatttaacccaattattcttatcctatgcacacaaatttgaatttaagttagcttgatgtagatggtcaccccattccaaagcatgggtccaaataccctaaggttccaggaggagccagctttcttcagaaggtggcaagygcattgcaaagtactgaggaaaactttctttaaagtatcttttttcatcattccatattttgctccttataattgcaactgctctccttatacatgtctcttttgaaacttctcacttgtctaaggtgctattgttcctcctcatcttttttttttttttttaatagcatagtctctctccctccttgccatgctgaaaaggcttctgacttgctgttcttgccaggaaacatttctgcagggcgtattggagtggaactacttacagagtgtcagggcaagtccttacatttgtttatgcttaggacacaacacagaagataattttctaagttaaagattgtatgattttatcttgacttcagaaactggtcatacttttttactttagtttctaagaacctcagag

SEQ ID NO: 127351 - DNA, 587 bp, Homo sapiens
aactaatgaatgacattttagattaaaagtgaattttatttaacccaattattcttatcctatgcacacaaatttgaatttaagttagcttgatgtagatggtcaccccattccaaagcatgggtccaaataccctaaggttccaggaggagccagctttcttcagaaggtggcaagtgcattgcaaagtactgaggaaaactttctttaaagtatcttttttcatcattccatattttgctccttataattgcaactgctctccttatacatgtctcttttgaaacttctcacttgtctaaggtgctattgttcctcctcatcttttttttttttttttaatagcatagtctctctccctccttgccatgctgaaaaggcttctgacttgctgttcttgccaggaaayatttctgcagggcgtattggagtggaactacttacagagtgtcagggcaagtccttacatttgtttatgcttaggacacaacacagaagataattttctaagttaaagattgtatgattttatcttgacttcagaaactggtcatacttttttactttagtttctaagaacctcagag

SEQ ID NO: 127352 - DNA, 621 bp, Homo sapiens
aacaccttttttcttctatttactttatttcttgaactcagtgatgtaatatgtcttcatctgcctctgagaatacacttaaaactacagaagcaaattaacattttcccaattcacatgtagtgcaatatttaagatttcatctaattgaacacgtgttggatcaaatttataatactaaaagcactcttctacatactgcaatgtctagatggaagacaagctagtcaggtggcagagtgaacatcattctggtaggccttttcaagctgtcacttgcaagatgtttggactgctgagaatgttagccataattaattgcagagataggaggctgcaaatgggtgaggtaatgttcaaatgcatggaatgatgactagtcatagtaaaagataatagatgtggccacattgctttgagaaaatttagagaatattttgggtcacaatgatacatttctgcrttatttgtggaatgttttcaatgtaattacatcacacaggtagacttccagatcctgtgtctaacttactttccttggctctgtgggagaacacatattctaatgaagttcattttaaggcaaatatttcttgaaaacacaaaactgatagatatatg

SEQ ID NO: 127353 - DNA, 553 bp, Homo sapiens
gataaagaggaaactgtctgggcaaggtggtccacacctgtaatcccagcactttggggggttgaggcgggcagaccacccgaggtcaggagtttgagactagcctggccaacatggtgcactctgtccctactaaaaatataaaaagttagcggggcatggtggtgtgcgcctgtaatcccagctactcaggggctgaggcaggagaatcgcttgaacccaggaggcagaggttgcagtgagctaagatcatgccactgcactccagcctgggcaactgagtgaaactctgtctcagaaaaaaaaaaaaagaaagaaaagaaaaagaagaaactgtaatcccagcactttgggaggttgaggcgataggattgctttagaccatgagttcgagaccagcctgggcaacatagaaagaccctatctctacaaaaaagacaaaaaattgcccagtgtggtggttcttacctgtagtcccagctactcaggagactgaagtgggagsattgcttgagcccaggaggtcaaagctgcattgagccaagactgtgcc

SEQ ID NO: 127354 - DNA, 453 bp, Homo sapiens
ttttaaatgacatttaaaatcatcagatagaatgagataataagatcttctttggaatgagtattggtaatgcttctaggattaagccttggggtattccaaaatttaaagacaactgagatgaagaaccagtataagagactaacgagaaatggccaatatattaggagacaaccaggtaagtgtggtataaaccgacttaagagcatgtgtcgactattgctataagccaaggaatataaagtcaaataaatggtcaatgaatttagcatgtgaaaatctktggagatcatgattaaagcaatttcaaaagtggagaagaagcaaaaacctagttcaagagagaattagaagatggcaattggtgagaaaatgtagaacattattttaaagagtttgtcagtaaatggaacaaagcaaatggttcagtaattaaaggtcagatgaggtcaa

SEQ ID NO: 127355 - DNA, 621 bp, Homo sapiens
actgactgattcatagttatgagcaatgatttactgattgaagagtggcatctatggattgaggacattgaagatacactgtggtaataacaaataatttgcctcagatacctgggacctggttgagcaaataagactgtgaaatcagaagacatgagatctgctttctaagacctcctcactgttcctcaaaccctccaggcatcatcacacctcagggccctcacacttgctgttccctgctcctgcactgctcttgccgcagaaatatatgtggcacctccagtcattccattgagactttcactcaaaatgcaccttcttagtgactctttcccctgttacttgatataaaattttcatcatcctccccaccaccatttattaaggagctcctctctttaatttatcacagtrtactttacctatctgtttgtttgggtattgatgtggtttggctgggtcaccacccaaaattcatcttcaactatagttcccataatccccacatgttgtgggagggaccaggtagagataattgaatcacgggtacagttcccccatactgttcttatggtagtgaataagtctcatgagatctgatggttttataaggagttt

SEQ ID NO: 127356 - DNA, 605 bp, Homo sapiens
aacttacagtagcaaaatttgtgtcccagattatttagtaactatgtgagatcttaccctctacatttctgttttttttgttttgttttgttttgttttttctttttgagacggagtcttactctgtcacccaggctggagtgcagtggcacgatcttggctcactgcaacctctgcctccggtttcaagcaattctcccgcctcagcctcttgagtagctgtgactacaggcatgtgccaccatgcctggctaatttctgtatttttagtagagaccaggtttcaccatgttagccaarctggtctcgaactcctgaccttgagtgatccacccgcctcgacctcccaaagttctgtgattacaggcatgaaccactgcgcctggccttaccctctacatttctatgtcctatttcctctccgttttcatcctaatatcgtaccattgtttatttagcttgatttttaaatctttattatgtacatatttttaaataaggctaaattgtttatggaagacacacattcttcaacacatatattgactaatgaaactgtaaatcatatgaaaaactggctaaaattgaggaagtttgcattatta

SEQ ID NO: 127357 - DNA, 567 bp, Homo sapiens
tatttttaaataaggctaaattgtttatggaagacacacattcttcaacacatatattgactaatgaaactgtaaatcrtatgaaaaactggctaaaattgaggaagtttgcattattaagcagaggatatttaagcttcttctgttggtcagaatcatagatatttgaacatcactcagtaccttacatatatagagagtgagagagataccaaacatttctgaaatctttaaccggatgaataccctacagtgatggactaatatctaagtaatttagtggggtgaaatactaccaattttacaagagaaataatgcatggggatgtttttcttccagccgctaggcacggggtcaggtgtcattctcctgggcgttgggtcactatgtgaggtttggcccactggtggccgacctgtttgttttcagtggtgtaattggtcactccagagatgaatacttagaaagcattagattttagaccttcactgactcttccagcttgccagaacaattgtgagtgagacatctcttcaagaatgaaatcatttccccctgcccagctg

SEQ ID NO: 127358 - DNA, 583 bp, Homo sapiens
tgtccttaaatccaatttagccattacatgattactatggttttatgagggaaaatttcttttggctaagttggcaacattttaaaaataacacattgtacaaaaaagtacaggaaaaccccatactgtatgtgggaatatttatattttcctgaatactgagtaaatccaaaggagataagccactttattttgtttcccagatatcaaatgatgtgttctttattttaattaaaaggccacagcagcctactacagtgaaaacaaaatacttacgtttattacaagttattgaaaaactgaagaaagcttttattttaagaattctcatgggagagaagatttttcaagttaatataaataaattataattttttcacagaatgatgcaagaatcacacttctgttttcctgtttacaaatttaaaatttccatttaagtaagrgcatgaatccaatctatgttactctttattcttggtaaggtttattgctataccataacctcttgctctgggaatagcattacatctataggaatatattacctttacaaaattacaatattgcctcatagttttaa

SEQ ID NO: 127359 - DNA, 583 bp, Homo sapiens
tgtccttaaatccaatttagccattacatgattactatggttttatgagggaaaatttcttttggctaagttggcaacattttaaaaataacacattgtacaaaaaagtacaggaaaaccccatactgtatgtgggaatatttatattttcctgaatactgagtaaatccaaaggagataagccactttattttgtttcccagatatcaaatgatgtgttctttattttaattaaaaggccacagcagcctactacagtgaaaacaaaatacttacgtttattacaagttattgaaaaactgaagaaagcttttattttaagaattctcatgggagagaagatttttcaagttaatataaataaattataattttttcacagaatgatgcaagaatcacacttctgttttcctgtttacaaatttaaaatttccatttaagtaagggcatgaatccaatctatgttactctttattcttggtaaggtttattgctataccataacctcttgctctgggaatagmattacatctataggaatatattacctttacaaaattacaatattgcctcatagttttaa

SEQ ID NO: 127360 - DNA, 574 bp, Homo sapiens
aggaaacatgacatcactaaagaaatacaataaatttccagtaacaaatcccaaagaattggagatgtgcatatttcctgacaaagaattcaagataattgttctaaagaaactcaacaagctacaagagaacataaataattttatgaattcatagaagaataaaataagttcaacaaaaagatakgcaatttttaataaaagttttgaagatgaagaatacaatgacaactataaaatacaatagaaagcttcaacaatataataaccaaacacaagagagaataggcaaccttgaagagagatcattttgaattatctagttgaaagggaaaaaagaaaaaaataatgaaaaggaatgttttaagcctataggatttatgggacaccatcaagagacctaacatttacattataggggttccaaaagaagaaaaaaggatagaaagtttatttgaaaaaataatgcttgaaaacttcccaaatcttgggaaaaatatggatacccagatacatgaagctcagagatctctaataacattcaaccaaataatatttaatcaaggcacattat

SEQ ID NO: 127361 - DNA, 574 bp, Homo sapiens
aggaaacatgacatcactaaagaaatacaataaatttccagtaacaaatcccaaagaattggagatgtgcatatttcctgacaaagaattcaagataattgttctaaagaaactcaacaagctacaagagaacataaataattttatgaattcatagaagaataaaataagttcaacaaaaagatagrcaatttttaataaaagttttgaagatgaagaatacaatgacaactataaaatacaatagaaagcttcaacaatataataaccaaacacaagagagaataggcaaccttgaagagagatcattttgaattatctagttgaaagggaaaaaagaaaaaaataatgaaaaggaatgttttaagcctataggatttatgggacaccatcaagagacctaacatttacattataggggttccaaaagaagaaaaaaggatagaaagtttatttgaaaaaataatgcttgaaaacttcccaaatcttgggaaaaatatggatacccagatacatgaagctcagagatctctaataacattcaaccaaataatatttaatcaaggcacattat

SEQ ID NO: 127362 - DNA, 610 bp, Homo sapiens
acctcttctcttccaaaggatcacagcttcttgccagcaagggaacaaaactggatggggaatgagtttgacgaactgaaaaaagtagccttcagaaggtagataacaacaaactcctccgagataaagaagcatgttctaaccgaatgcaaggaagctaagaaccttgaataaagtttagaagaatcgctaactagaataaccactttagagaagaacwtaaatgaactgatggagctgaaaaacacagcatgagaactttgtgaagcatacacaagtatcaatagctgaattgatcaagtagaagaacggatatcacagactgaagatcaacttaactaaaataagcgtgaagacaagattagagaaaaaagaatgtaaaggaatgaacaaagccccaaagaaatatggtactatgtgaaaagagcaaacctacatttgattgttgtaccagaaagtgacggggagaatggaatcaagttggaaaacactcttcaaaatagtatacaccagaactttcctagactagcaagacaggccaacattgaaattcaagaaacacagaaaacactacaaagacaatcctcgagaagagcaactccaagacaca

SEQ ID NO: 127363 - DNA, 552 bp, Homo sapiens
cacttggttgagcacatgctcaccaaatccccctacagtgagtggctcacacaggccaatgtgggggctataatgggtctctataacttttataaaaatgtccagccttctgaacaaaggtcggggtgtgaytaggggacaattgagaaaaggtgaattgcacctactagaattggatgcaccagtttggaagcaggacaaaacaaacaacagcacctgagatgggagcactcagaccctgagagacacaaaagagagggggattcagatgatgtttgttttccagaaccacctccggagccttcctcatgaaggaaaactctgacgaggcttttccaaactgtcagaagggacttaaatggaactgcctgccgggtctgcaatcctctgccagatggttctgatcatgatttgactgccacttcctttaaacttactgagaagtctatcagaaacaacagtggatggccccagctcccacacctcccacaagaacacctgctaacacctccagatgtctttcctagccccttctcataactgtcactcagt

SEQ ID NO: 127364 - DNA, 519 bp, Homo sapiens
taaaataacttggacctctgtaatgtttttgtttcataataatttttgtttagaaaaaagacaatttaaaattattacagattcatatgttgaactataaggagatttttgaaaagctgtgatacttacaaaatttccactaatgggaaatattctaaatattaaattcatccttacataaaactgaagtctgagagattctgtcatattagacggtaaaatctgaacattaaaatcccactaggtgatggacaaactgtatgcttctaagtgtttgtacatctactctgatatattcatttttaaagcctttttgtaaagtcttctttaacttcaaatatgttagaatatttayatattctgtcatccattttcccattttgatctagttttgattaaattccttcctttgggaaatggccatatctttttgaagtaattgaacattttatagtatcctgcattagactaatttgtcttttccaccatagtattaggatgtctgaagaaaattaaatg

SEQ ID NO: 127365 - DNA, 580 bp, Homo sapiens
cagtaaactgtgctgtaaacagatgtgctatcattcaggctttgttgttgcatttatagagcacaggcagagtagatttagcatgattcttgaggtccttaggacttttgcaatggtaaataagtcttggcttcaacttgttaccagctgcattagcctctaacaggagagtcagcctatcatttgaagttttgaagccaggcattgacttctgtctagctatggaagttatatttggcatcttattctaatataaagctgttgtatctaattaaaaaatctgttgtttagggyagccaccttcatcaatgatcttagctagatcttctggatcactggctgcagcttctatatcagcacttgctgcttcattttacactttcatgttatagagatggcttcttgccttaaacctcatgaactaacttctgctggtttccagtttttcttctgcagcttcctcacctctctcagccttcatacaagtgaagagagctttggggaattttgtggctgttttgatctatcctgaccactcaatatctgcagtaaggatgtttctctttcttatcatttatat

SEQ ID NO: 127366 - DNA, 576 bp, Homo sapiens
tgttatagagatggcttcttgccttaaacctcatgaactaacttctgctggtttccagtttttcttctgcagcttcctcacctctctcagccttcatacaagtgaagagagctttggggaattttgtggctgttttgatctatcctgaccactcaatatctgcagtaaggatgtttctctttcttatcatttatatgtttattggagtagcatttttagtttccttcaagaacttttcctttgcattgacaacttggctaattgtttagggcaagaggcttagctttcatcctgttttgacttttggcatgccttcttcctccactaagctgaatcatttctagcttttgatttaaagcgagagacatttggctctacctttcacttgaatacttagaagccattgtagggttactaattggcctaatttcaatattgttgtgtatgaaagaatagggaggcyggaagaaagggagagagatgggggaatggccagtgaattgagcagtcagaacacatataacattattgattaagttctccatcttatatggatgtgaattgtggcacccccaa

SEQ ID NO: 127367 - DNA, 576 bp, Homo sapiens
tgttatagagatggcttcttgccttaaacctcatgaactaacttctgctggtttccagtttttcttctgcagcttcctcacctctctcagccttcatacaagtgaagagagctttggggaattttgtggctgttttgatctatcctgaccactcaatatctgcagtaaggatgtttctctttcttatcatttatatgtttattggagtagcatttttagtttccttcaagaacttttcctttgcattgacaacttggctaattgtttagggcaagaggcttagctttcatcctgttttgacttttggcatgccttcttcctccactaagctgaatcatttctagcttttgatttaaagcgagagacatttggctctacctttcacttgaatacttagaagccattgtagggttactaattggcctaatttcaatattgttgtgtatgaaagaatagggaggctggaagaaagggagagagatgggggaatggccagtgaattgagcagtcrgaacacatataacattattgattaagttctccatcttatatggatgtgaattgtggcacccccaa

SEQ ID NO: 127368 - DNA, 526 bp, Homo sapiens
caggtagctttaaaacataatttactaatttaacatgttgtatttgagtacctgataggtaccaggcactgtcttatttaatcctcacaacaagcargtgaggaacccatggcacaaagatattaagaaatgtaaggctacattgcaaataagcggcagagctaaaatttaaaatcaagtctaactccatagccatgtgttcttcagtgatgtcacactgatttctagttctaacagaaagatagtttttcatctaaaaggaaataggagacactgataatcattacatatttttgtaatgattacattactaattatttttatatggcaagtgtagaaggtataattcaaagattccttgttcccctagccaaatcatttgtcatgatcttagcatctctatgatgctgtcatcaccagagtagtggcttttcagagaactgggctctgtaaaagggcaggactttacaaacatgtaagtattctagtttctgagcacaaatacttgttttataacttttgtttt

SEQ ID NO: 127369 - DNA, 526 bp, Homo sapiens
caggtagctttaaaacataatttactaatttaacatgttgtatttgagtacctgataggtaccaggcactgtcttatttaatcctcacaacaagcaggtgaggaacccatggcacaaagatattaagaaatgtaaggctacattgcaaataagcggcagagctaaaatttaaaatcaagtctaactccatagccatgtgttcttcartgatgtcacactgatttctagttctaacagaaagatagtttttcatctaaaaggaaataggagacactgataatcattacatatttttgtaatgattacattactaattatttttatatggcaagtgtagaaggtataattcaaagattccttgttcccctagccaaatcatttgtcatgatcttagcatctctatgatgctgtcatcaccagagtagtggcttttcagagaactgggctctgtaaaagggcaggactttacaaacatgtaagtattctagtttctgagcacaaatacttgttttataacttttgtttt

SEQ ID NO: 127370 - DNA, 526 bp, Homo sapiens
caggtagctttaaaacataatttactaatttaacatgttgtatttgagtacctgataggtaccaggcactgtcttatttaatcctcacaacaagcaggtgaggaacccatggcacaaagatattaagaaatgtaaggctacattgcaaataagcggcagagctaaaatttaaaatcaagtctaactccatagccatgtgttcttcagtgatgtcacactgatttctagttctaacagaaagatagtttttcatctaaaaggaaataggagacactgataatcattacatatttttgtaatgattacattactaattatttttatatggcaagtgtagaaggtataattcaaagattccttgttcccctagccaaatcatttgtcatgatcttagcatctctatgatgctgtcatcaccagagtagtggcttttcagagaactggsctctgtaaaagggcaggactttacaaacatgtaagtattctagtttctgagcacaaatacttgttttataacttttgtttt

SEQ ID NO: 127371 - DNA, 537 bp, Homo sapiens
ggtgcctgccaccatgcccagttaatttttgtatttttagtagagacgggacttcactatgttggccaggctggtctcgaattcctgaccttgtgatccaccctcctcggcctccgaaagtgctgggattataggcataagccaccacgctcggtccaggaatgtattttgatgattttatcttaaatttaattttgctaagtttggcctattattttagccttctaaatctatcatcctgggtagtaggttggggtcatcctgattcaactatyaacatattacttttgtttcagccttgttttagctaccaattatagaaacctttggtctatatcttcttaaggtcattaataaaaatgtcagtagtttttagccaaggcagaagtttatccctgaagatcctggagataaactactgtcaaagaaaaatcagagcctacagtattaaagtggtaaaaccggattttggttcaagactattgcaatagggaaaaagagactggagtatagaactgggctcaactccaaatacag

SEQ ID NO: 127372 - DNA, 552 bp, Homo sapiens
ttttttaagattcaaaaagcaaaaactgtaaagaaaaagtataattaattagactacattgaaattagaatggtgaacttttgtttatcaaaagaaaccattgaacaaatgggtaagaaatacttgtaccaccaataattaatcagaaattagtatactaaatatatgaagagtttctatgaataaataagaataatacaaacaattctatagaaaaattgaaaaaagacattaacagktagttcacagaaaagtaaataaaaatacaaatgaaacattaaaaaaaggctaacccattaatcacctagaatatacaaattttaatcaaaacaggtgcagagtgagatttgtgaaaattaaggcctggtgaggatatggaacagaagaaatcattataagctgtgttttagtgaaaatagacacaaacgttttgcaaaacaatttgacattatcttgtagagttaatgatgtgcgtatccttgatcaaacaattccattcttaggcacataccctaaaataactcctacacatctgcaccaggagatatgttt

SEQ ID NO: 127373 - DNA, 552 bp, Homo sapiens
ttttttaagattcaaaaagcaaaaactgtaaagaaaaagtataattaattagactacattgaaattagaatggtgaacttttgtttatcaaaagaaaccattgaacaaatgggtaagaaatacttgtaccaccaataattaatcagaaattagtatactaaatatatgaagagtttctatgaataaataagaataatacaaacaattctatagaaaaattgaaaaaagacattaacagttagttcacagaraagtaaataaaaatacaaatgaaacattaaaaaaaggctaacccattaatcacctagaatatacaaattttaatcaaaacaggtgcagagtgagatttgtgaaaattaaggcctggtgaggatatggaacagaagaaatcattataagctgtgttttagtgaaaatagacacaaacgttttgcaaaacaatttgacattatcttgtagagttaatgatgtgcgtatccttgatcaaacaattccattcttaggcacataccctaaaataactcctacacatctgcaccaggagatatgttt

SEQ ID NO: 127374 - DNA, 552 bp, Homo sapiens
ttttttaagattcaaaaagcaaaaactgtaaagaaaaagtataattaattagactacattgaaattagaatggtgaacttttgtttatcaaaagaaaccattgaacaaatgggtaagaaatacttgtaccaccaataattaatcagaaattagtatactaaatatatgaagagtttctatgaataaataagaataatacaaacaattctatagaaaaattgaaaaaagacattaacagttagttcacagaaaagtaaataaaaatacaaatgaaacattaaaaaaaggctaacccattaatcacctagaatatacaaattttaatcaaaacaggtgcagagtgagatttgtgaaaattaaggcctggtgaggatatggaacagaagaaatcattataagctgtgttttagtgaaaatagacacaaacrttttgcaaaacaatttgacattatcttgtagagttaatgatgtgcgtatccttgatcaaacaattccattcttaggcacataccctaaaataactcctacacatctgcaccaggagatatgttt

SEQ ID NO: 127375 - DNA, 544 bp, Homo sapiens
tggagtatcctgcaactcctatgggcagccattcagccccttttgttttrctagcataattttgggtgcataggacagggatgcatctacctggcatctttggctactctttatttcactctccatggaaataacaaactgcctgaatctaaaaataactcattgtgtcttaactggctgaatcagaccttagctttgtccttatcttgtgtgcttgaaaatatctgctactactcttccccataaatatggatgaatctcataaacacaatgttgtgtgaaaagcaaattgcaaaaatatatttactttatatttctaggcatataaacttcaaacacacactaaactaagcagtatgattttaggggaagagtaaatacaatgatcagtacagggatcaatcctgagagataaggagaggatacatctggaatggaatgccaggaaactttgatagtactggcaatgtttaaatcttcagctaagctgtgggtgcaaatatattcaccttattagctttttgtatattaagatagttgtttg

SEQ ID NO: 127376 - DNA, 544 bp, Homo sapiens
tggagtatcctgcaactcctatgggcagccattcagccccttttgttttgctagcataattttgggtgcataggacagggatgcatctacctggcatctttggctactctttatttcactctccatggaaataacaaactgcctgaatctaaaaataactcattgtgtcttaactggctgaatcagaccttagctttgtccttatcttgtgtgcttgaaaatatctgctactactcttccccataaatatggatgaatctcataaacacaatgttgtgtgaaaagcaaattgcaaaaatatatttactktatatttctaggcatataaacttcaaacacacactaaactaagcagtatgattttaggggaagagtaaatacaatgatcagtacagggatcaatcctgagagataaggagaggatacatctggaatggaatgccaggaaactttgatagtactggcaatgtttaaatcttcagctaagctgtgggtgcaaatatattcaccttattagctttttgtatattaagatagttgtttg

SEQ ID NO: 127377 - DNA, 642 bp, Homo sapiens
gacaatatataaatgaatgtgcgtgtctgtgttccactaaaactttatttacaaaaacaaatgctggctgtagtttgttaactctcactcaatgggagtacagaatattctttgtttcagtgttttagtcttggtagtaattttcaatcaagaatcttccaggaggtggatgatgagtgcgttggggttccttagaggaacagaatgagtaagattatacacacacacacacacacacacacacactcagttgattcttgttattcactgtagttatgttctataaagtttctatgaacattgaatcagtgaataatgaacaattgctcctagggaaaatacagtgtagtttcctgaaagcctctggtcacaacatttttgtcaaccagtcaatatacattcttgttttatgtgtgttctcttcaaaggcacyttatttaatacctatgctgattcgttaacattgaactcacagccagcagcactgtaactcatgcccaaatgaacctcatctaatgcatgtattttttctgtaaggtacatcacaggcttcttgtgcttagcaacattagacaacactgcccctgtacttggaggccattttaaatagcaaaatcaccaatgaaatgcacaaaaatgtaa

SEQ ID NO: 127378 - DNA, 595 bp, Homo sapiens
atcaagtatatgaatatacctactgaggtcttaattttgataattatactttttagttctacaaattccagttttttctaagaattttaatttcttgrtaaatattttcatctcattatatatttaaaaaattatatttcatgaattgaccatgtttggcaacaaaacctatgtttgataacttcaatttatgcattacacatggtctgtttttatttttatttttatttttttgctttagatatttgatcttgtctcctggcatgcctggttattttgaactgaatgccatgtatttttttttttttaatgaaaaactgcagaggctcttcatgatcttgttttactccaggaaagatttattttggcagttagcattagggcaaagcaatagactgcaaacagagattagagagtttggcctgacactgagttttaacctttgtaaggcttctaactttggtttataaagtgtagcccatcaggggttacaatagaaagcttgacaaactgcatattcttctctttggtgagccctaaactataatgttgtctctccagtatcatcagacctacaaaacttctgcttgattct

SEQ ID NO: 127379 - DNA, 613 bp, Homo sapiens
ccaggttcctaattcccagctacataatttgaccaattttgtggtgtttgaaaaaccttcatttagcatctttgaaatttcatttgaatgctttttacaatctctcccagattattaattaaggcattctaagaggccagtcatctrgtctgacaatcaccactttccttcagactcagtagagggttatttatcagcaatcttggcgatcattcaactctttttcgagaagtttttaatccctagcaacttctaaacacaatgaaacctttaaaaacttcaaatagagaagcatttttatctcccttcaagcagactgttttaaattgccaaattttgtggtttaattgatctttttcatctttcctcagatatctctataaaacaagaatgagtattctgttactatcacactatgcatctaatggcaacagaagagaattttagctatagccccttagactgaacaggtttaaaatttaactggtatcccaaggtcaagttattcaaattgctcacaaatagtgtttcttttcagactttatttatcctaagatattgtcatattttaatgatctctatggtaagcatatgtttttaagatgacataata

SEQ ID NO: 127380 - DNA, 613 bp, Homo sapiens
ccaggttcctaattcccagctacataatttgaccaattttgtggtgtttgaaaaaccttcatttagcatctttgaaatttcatttgaatgctttttacaatctctcccagattattaattaaggcattctaagaggccagtcatctagtctsacaatcaccactttccttcagactcagtagagggttatttatcagcaatcttggcgatcattcaactctttttcgagaagtttttaatccctagcaacttctaaacacaatgaaacctttaaaaacttcaaatagagaagcatttttatctcccttcaagcagactgttttaaattgccaaattttgtggtttaattgatctttttcatctttcctcagatatctctataaaacaagaatgagtattctgttactatcacactatgcatctaatggcaacagaagagaattttagctatagccccttagactgaacaggtttaaaatttaactggtatcccaaggtcaagttattcaaattgctcacaaatagtgtttcttttcagactttatttatcctaagatattgtcatattttaatgatctctatggtaagcatatgtttttaagatgacataata

SEQ ID NO: 127381 - DNA, 613 bp, Homo sapiens
ccaggttcctaattcccagctacataatttgaccaattttgtggtgtttgaaaaaccttcatttagcatctttgaaatttcatttgaatgctttttacaatctctcccagattattaattaaggcattctaagaggccagtcatctagtctgacaatcaccactttccttcagactcagtagagggttatttatcagcaatcttggcgatcattcaacyctttttcgagaagtttttaatccctagcaacttctaaacacaatgaaacctttaaaaacttcaaatagagaagcatttttatctcccttcaagcagactgttttaaattgccaaattttgtggtttaattgatctttttcatctttcctcagatatctctataaaacaagaatgagtattctgttactatcacactatgcatctaatggcaacagaagagaattttagctatagccccttagactgaacaggtttaaaatttaactggtatcccaaggtcaagttattcaaattgctcacaaatagtgtttcttttcagactttatttatcctaagatattgtcatattttaatgatctctatggtaagcatatgtttttaagatgacataata

SEQ ID NO: 127382 - DNA, 613 bp, Homo sapiens
ccaggttcctaattcccagctacataatttgaccaattttgtggtgtttgaaaaaccttcatttagcatctttgaaatttcatttgaatgctttttacaatctctcccagattattaattaaggcattctaagaggccagtcatctagtctgacaatcaccactttccttcagactcagtagagggttatttatcagcaatcttggcgatcattcaactctttttcgagaagtttttaatccctagcaacttctaaacacaatgaaacctttaaaaacttcaaatagagaagcatttttatctcccttcaagcagactgttttaaattgccaaattttgtggtttaattgatctttttcatctttcctcagatatctctataaaacaagaatgagtattctgttactatcacactatgcatctaatggcaacagaagagaattttagctatagcccyttagactgaacaggtttaaaatttaactggtatcccaaggtcaagttattcaaattgctcacaaatagtgtttcttttcagactttatttatcctaagatattgtcatattttaatgatctctatggtaagcatatgtttttaagatgacataata

SEQ ID NO: 127383 - DNA, 624 bp, Homo sapiens
gctcaacccagtggatgggattagtctttgacaattgctttgtaaagtggtaarggctatggtggaaatagaagttctgagggagccaagaggactttagctaagtgggactcagtaatttgaagagaaaacaccagaggtgacaggtgagctggatctggagatacagtgggagggagaaccctggaagaggatcataatttaaaaaggaaagtaagtgagaatatcatcttcttgtatgatagctggtatttatattatagtcaaagtagacatttaagcaagcagtttgaggaaaagtcctcagtcagggtaaaatttgagttgtttgtccattttggctgggagccagtgtaatctaacctagataatttctactaaagcgaactgtgattctacttgtaaggaaagtcctatattgggaataaagatttttttccagatcatgttgttaagataaaatgatagaaagctcttaaaagcaatttcagtgatgtttaacacttttccttcatactgaaggaaaaaatgtggcagcaattcaggaagggcatgcttaaaattcagtgaaatgcagaaaaacactggaagttaaaagtgaaacaattctctgtagattttgtt

SEQ ID NO: 127384 - DNA, 624 bp, Homo sapiens
gctcaacccagtggatgggattagtctttgacaattgctttgtaaagtggtaaaggctatggtggaaatagaagttctgagggagccaagaggastttagctaagtgggactcagtaatttgaagagaaaacaccagaggtgacaggtgagctggatctggagatacagtgggagggagaaccctggaagaggatcataatttaaaaaggaaagtaagtgagaatatcatcttcttgtatgatagctggtatttatattatagtcaaagtagacatttaagcaagcagtttgaggaaaagtcctcagtcagggtaaaatttgagttgtttgtccattttggctgggagccagtgtaatctaacctagataatttctactaaagcgaactgtgattctacttgtaaggaaagtcctatattgggaataaagatttttttccagatcatgttgttaagataaaatgatagaaagctcttaaaagcaatttcagtgatgtttaacacttttccttcatactgaaggaaaaaatgtggcagcaattcaggaagggcatgcttaaaattcagtgaaatgcagaaaaacactggaagttaaaagtgaaacaattctctgtagattttgtt

SEQ ID NO: 127385 - DNA, 497 bp, Homo sapiens
taaaaacagactgcaacctcccttgggtatggaaatgtagaagaacaatatttcagaaaaagacagaaaaacactcctagtaacccttgctagtgatacaccaggatccatagccagaagaatctgaaatgcaaagcaaaggcttcaaggcctcatactttccctgggatattttgttcctgtggtcagaataggagccctaaaaaaagcaaagtagtggctcccacagcattcttgaccttttgtcctctagcagccttgggaactgtgaaggtggggcatgtggacaagacaatggctttctcaggtctgcccaagaccagcccttctggacacaattgtagtctaggtttttgctaaaaccattgtcacttttttaaggtgtgaccttgggmaactttatacttttctgggcctgtttccttttctataaattgagggtctcattttcatactccccaatatttttattcgttagttcaacaaaaaaggaccat

SEQ ID NO: 127386 - DNA, 497 bp, Homo sapiens
taaaaacagactgcaacctcccttgggtatggaaatgtagaagaacaatatttcagaaaaagacagaaaaacactcctagtaacccttgctagtgatacaccaggatccatagccagaagaatctgaaatgcaaagcaaaggcttcaaggcctcatactttccctgggatattttgttcctgtggtcagaataggagccctaaaaaaagcaaagtagtggctcccacagcattcttgaccttttgtcctctagcagccttgggaactgtgaaggtggggcatgtggacaagacaatggctttctcaggtctgcccaagaccagcccttctggacacaattgtagtctaggtttttgctaaaaccattgtcacttttttaaggtgtgaccttgggcaactttatacttttctgggcctgtttccttttctataaattgagggtctcattytcatactccccaatatttttattcgttagttcaacaaaaaaggaccat

SEQ ID NO: 127387 - DNA, 497 bp, Homo sapiens
taaaaacagactgcaacctcccttgggtatggaaatgtagaagaacaatatttcagaaaaagacagaaaaacactcctagtaacccttgctagtgatacaccaggatccatagccagaagaatctgaaatgcaaagcaaaggcttcaaggcctcatactttccctgggatattttgttcctgtggtcagaataggagccctaaaaaaagcaaagtagtggctcccacagcattcttgaccttttgtcctctagcagccttgggaactgtgaaggtggggcatgtggacaagacaatggctttctcaggtctgcccaagaccagcccttctggacacaattgtagtctaggtttttgctaaaaccattgtcacttttttaaggtgtgaccttgggcaactttatacttttctgggcctgtttccttttctataaattgagggtctcattttcatactccccaatatttttattcrttagttcaacaaaaaaggaccat

SEQ ID NO: 127388 - DNA, 548 bp, Homo sapiens
tgggtgtgctggccagcctcagtcctcaggatactcaagtggccttctggtctgagcagagttggaacagggaggttgtttgttgaaataattctgcacatgtcctgtgtgtttagatccagactcccacaaaatcgttcatgaacacacttccttcagcttccaccctaagtcctaattccccaaaggtagggaattcaaagctactcaacggcctgatgggaagggatgagggtgtggacaccacacctctgtgtttctgtacaacccacctccttgccagaggctcagatcaaacaacatcaaaagtgctctcttttcccttagccacaaaacagccccaattcctcccctgtggccctgtattgaatttaaacaaatgggatcattaacccaccagttctgcaaatagcaatacagtttgggttcagttaggacattccattctacaaggcgagatagcagacatagaccttccgcrgcagatgaagacatctacagatgtcttggaagatttacattcacgatgtctggagaaccatttccct

SEQ ID NO: 127389 - DNA, 591 bp, Homo sapiens
cttgtagttgtacattatttattgtttttgagaagtgccaaacaacagcatagaatatgtgtataaaaatgttaacatatctagtaaaaataggttcaaaaataacatcctgtatgatgcattccttaccaatggtgaatcaaacatcagctttgttaatagacaactcatttttattatttttataaccaaaagcaattctttacaatatcctttgcccatgcttccttagtaggaagaaaaagagaaggaaaataatggctagtaagtggataatagcaagttagaggatcctttgcaatcctggctggctctgtcctgtgcgcctcctttccttatccttaaaggtttgtgaacttcttgtcaccagcagacaattgagattcaaacatatgtcagtgtcattctgaacraaaaatggaagtgtgatccttaagaaaaatggctctgcatattatcatagcttcttagatttggaaaataaccctggtgtctggaaaaaattgagagaatcttactttcaggttaaatgccatatccctttcaactccaaatacattagtatttctaaagtaagaataaatgattctg

SEQ ID NO: 127390 - DNA, 584 bp, Homo sapiens
gggtaatgttgccaaatctcaaaccaatatagcaaagttacatagcttttcaagtgcaagcaataatttgttcaaaggcataattcaaaagcaagtatgaatcacatgaccaaaaaagtccccccaaaacaaggaacaattttatgactcaatgtgaaaaggcaaaatataaaatatcaaatttacctgaagattataaaatcttagcaattagaaagacatatcatgtggtaccgaggataatatggcacaatgtcaaatcttcatgaagaaatataacagtttaatacttttaatcaaaatctsataaaatttcttttgaaagtattaaagagcattttctggaaaaataacaggcaaaaatagccaagacttaaaaagctaaaacaaaaaccaaaaacgctggctatggcccctccttgcagatatgagatgtaacaggagtcatagtaacagtagctactatttataattgatctgtggcaaacactgttctctgtctttggtgagttttcccatttctcctcttccaacaaccttattcagaagaagctgtagctacctgtttttggcagaggccagag

SEQ ID NO: 127391 - DNA, 433 bp, Homo sapiens
cgaccccccagtggagacgactgaacaggcccctcatgcatacagcatgccaccagtattgcccagaaatactgtttgtagaaaatckgaaaggtagccgggcccggcattaatgctagggtgtctgagatgagtcgaaggaacagctattctttttccctttgttatgtttcttccatttccaagtggatgaagctctaactcaacctttcatttgtttcaagagggaggtatcagaaccacaacaaatggaatgaaacctaccactaccacctgcctggcacaaagaaataatttacaattcacggggaatttcctgtgtttcattttgtctgaagaactgtaaccggacttgaatgaactaagtgtctaattgttgcattatttttcttgtggagattttagtgttttattactttctccagtttacttc

SEQ ID NO: 127392 - DNA, 433 bp, Homo sapiens
cgaccccccagtggagacgactgaacaggcccctcatgcatacagcatgccaccagtattgcccagaaatactgtttgtagaaaatctgaaaggtagccgggcccggcattaatgctagggtgtctgagatgagtcgaaggaacagctattctttttccctttgttatgtttcttccatttccaagtggatgaagctctaactcaacctttcatttgtttcaagagggaggtatcagaaccacaacaaatggaatgaaacctaccactaccacctgcctggcacaaagaaataatttacaattcacggggaatttcctgtgtttcattttgtctgaagaactgtaacyggacttgaatgaactaagtgtctaattgttgcattatttttcttgtggagattttagtgttttattactttctccagtttacttc

SEQ ID NO: 127393 - DNA, 493 bp, Homo sapiens
tatgtaggtgagtgttcttctggatgagggaaagacctsatgattccccaaatggtttgaaaagtgagaagaaaattgtgctggacatctgctgagccaaccttaatggggagttttgtactggctatttggcaggacctggtgtctgccttgtttagctatattttcactctattaatcatactctgttcattcactccaaaggcaatcaatgaatgtcaactctgtgccaggatgctgatccattcactgagattggcagcacaggacagccagttcgggaggacaacaggaattcaactttaagcatactcagtctgaggcctcctcacctttccccactccctatatctaactgctacaaaatcttgtcacttctacatcctgaatattttaaaaaatccatccacttctctttgccccatgactactccaaatttcaagccagcaatattcttttttaattgatttaaaaatttttattttaaaagac

SEQ ID NO: 127394 - DNA, 622 bp, Homo sapiens
tcggttacccagccatgtaaataagccaccttggatgtacagcccagtaaagtctgtgggtgatgcagccctagccaacatgtaactgcaaccatataaaagaccctaagtgaaacascaaagttgacctcttcccaaattcctgacccttaaaatcatgaatatgttctatgccaccaagttctggtataatatgctatgtagcaaaagtaactgaaacactatgatatcaagttctggtataatatgctatgtagcaaaagtaactgaaacactatgataactagatcatcagtgggcctgtttctatcatttgttttttctcttggttttcagtttggtcatgtttgcaatatgccatgtaatttttgttgaagggcagatatcatacatgaaaagttgtgggagcactgtgtgatgctatcttcttccaaaaagtatttaatgttggtggatttccttgatccagctgatggccatcaatttcttctttgctcttattcatatgacctagccctgtgtttttcaccagggtctcacctccttggcaggattacttttttctctctctctctggaaaccttgatcctgccaaaagctcctcttgccttttgagcctctt

SEQ ID NO: 127395 - DNA, 622 bp, Homo sapiens
tcggttacccagccatgtaaataagccaccttggatgtacagcccagtaaagtctgtgggtgatgcagccctagccaacatgtaactgcaaccatataaaagaccctaagtgaaacaccaaagttgacctcttcccaaattcctgacccttaaaatyatgaatatgttctatgccaccaagttctggtataatatgctatgtagcaaaagtaactgaaacactatgatatcaagttctggtataatatgctatgtagcaaaagtaactgaaacactatgataactagatcatcagtgggcctgtttctatcatttgttttttctcttggttttcagtttggtcatgtttgcaatatgccatgtaatttttgttgaagggcagatatcatacatgaaaagttgtgggagcactgtgtgatgctatcttcttccaaaaagtatttaatgttggtggatttccttgatccagctgatggccatcaatttcttctttgctcttattcatatgacctagccctgtgtttttcaccagggtctcacctccttggcaggattacttttttctctctctctctggaaaccttgatcctgccaaaagctcctcttgccttttgagcctctt

SEQ ID NO: 127396 - DNA, 508 bp, Homo sapiens
ccaatatctcatgctgcatttatacaacaaatttacattattctaataaccctaggatcccatacttgtttcatcttaaagataatcacatgctactttctaaaaccttgcaccatggtttcacagatttgtaaggttaaaaggaacatgcaraaatgtccattccactttctacaagcaagatctatctttaaaaatattccagatagatatatatccaggtggaatagacagctgtccaccaattcatgctctcccttccacagcatgaagtagtacttgggaactcagggactatgcttcccagcacccttgtttctacgggcagagttctgttttgtgtatagtagtgctatgtggcatttcccaaacaaggattttaagaagctcaccctccctccatcttctcaggtccctggagatcagttttcactcattaggaacacttatttggactgctaaaaaggttaaaaaatacacttatattaagccactcattttaattttt

SEQ ID NO: 127397 - DNA, 493 bp, Homo sapiens
tggaaccctttcttcattctccacacaagtccaaaaacacaaacacacacgcacacacatacacctatacacatgcatccttttaaccaaaggtaatactcactggtgttaaaactaacagctctactggacaatggcttcatggacattttagaggcagtcttaagtctgstgtgggcacaggcatgtcggatatgatttccctgcagggatgccctctcggtggctgtgggggatgcttgcggcccctcgcctgccagcgctgagctcagcctcacagtgagccgagatgaacaggtgctctcttctctggcggcggcggcacgtgaggtcggctccttgcagaacagcgtctcagtgggagacctttaacttcacggcctttccttctgaccacccagcaggaaaaatatacgaaagcgtttttttctgccagttttgtcgatgagacaaaatacaaaaacaaaaaaacacacagcattaaaactttgta

SEQ ID NO: 127398 - DNA, 493 bp, Homo sapiens
tggaaccctttcttcattctccacacaagtccaaaaacacaaacacacacgcacacacatacacctatacacatgcatccttttaaccaaaggtaatactcactggtgttaaaactaacagctctactggacaatggcttcatggacattttagaggcagtcttaagtctggtgtgggcacaggcatgtcggatatgatttccctgcagggatgccctctcggtggctgtgggggatgcttgcggcccctcgcctgccagcgctgagctcagcctcacagtgagccgagatgaacaggtgctctcttctctggcggcggcggcacgtgaggtcggctccttgcagaacagcgtctcagtgggagacctttarcttcacggcctttccttctgaccacccagcaggaaaaatatacgaaagcgtttttttctgccagttttgtcgatgagacaaaatacaaaaacaaaaaaacacacagcattaaaactttgta

SEQ ID NO: 127399 - DNA, 621 bp, Homo sapiens
gtggctggccactcctctcatacatatccctgtttttcttgacttgaaaatgtctcaagtatatttattaaatatgtgttcattatttaacaatgagaactatgtatcttttctgcgtttttcctaccatgtcacagaactcaaaaagcacatgataccagggagggaaacaggttcgttttagagaaatatgaaaacagttgttctgttacataactggggtaataacagtattatggcaattccctttaaaatagcatttgatacacttcaacagagggagtgtcaggcattctgttttgtacaacttccggctgcaycagcaccagttgtgtcaaacatgttgatataacatggtgtttataaaagtcgagttagctgttcaaatgtactttatttttcttttccagaaattctacaagacagagatgtggattcacagtcaaacacagaaaggatacttagttctcaatgaagccggggggagggggtagtttatgagagcttccttctaaaaggagctgtctgttccctgaagaaatgacaattccttgtcccaagcatcactcaaagttcaaaagaagcatctgcagcccagcacaagaaagtgttttgctacca

SEQ ID NO: 127400 - DNA, 567 bp, Homo sapiens
agagagagaaagagttaagctactgaccccgaaggcaatggagaaccggccgtgcagctgtgcatgggagttggctggaccaagcagctgagacagagcaaactgtaagagagctgctgctgagagagctgctgaataaagccatatttcacctacctatgccaccccacctccctagtgttctttcagctatctgccattcatctacccactgccctcagacctcagcataggctggaacctggacttaaacctgacagtttctgttcaaatatcgactgctaaacaatcaattaacaacagacagaactgcagggatgccattactgttttcaataattaattgtaaaatctaccgcactccacttatcagtggtagagaatccttcccaattcataaatgttcccagtsaaatactatatatgcgaaacacctgggcacaggtgatagtgaatacaattaggagtcatgtattcttaattacaacaaaacaaatagaaaaggaacttggcattgaaagagatgtacacttagaaagaatattgtctgtgcttaaagaagtcatc

SEQ ID NO: 127401 - DNA, 503 bp, Homo sapiens
agagttaagtgacttgataaattaacatatattttaaattattataatatatcacacatataaagggtatatataatatacatgtgttattgaaagggcaataatgaaataaatttctgtatactccacttttaaaaatatgtactcaacattttttttaatgacatcttcatgtgtttctccccaaaactatgyttctctctatttcccagagttggccactatcgtgacttttcggctaaccattaatatcttctctatatgcttagcacacacatatgaaagtatccctaagcaacatattgcttaacctgtttgtgacattcatagaaatgaaatcctatcgtatagattcttgcgggccttgttttcatggcttaccgcgaaatttttgagtcatcagacttgatgggtttaaccaaggctcattcttttggctgcatggaatagtattgtacaaatatatcacaattgatccacctttctcccagtgagtattcaag

SEQ ID NO: 127402 - DNA, 658 bp, Homo sapiens
atataatatacatgtgttattgaaagggcaataatgaaataaatttctgtatactccacttttaaaaatatgtactcaacattttttttaatgacatcttcatgtgtttctccccaaaactatgtttctctctatttcccagagttggccactatcgtgacttttcggctaaccattaatatcttctctatatgcttagcacacacatatgaaagtatccctaagcaacatattgcttaayctgtttgtgacattcatagaaatgaaatcctatcgtatagattcttgcgggccttgttttcatggcttaccgcgaaatttttgagtcatcagacttgatgggtttaaccaaggctcattcttttggctgcatggaatagtattgtacaaatatatcacaattgatccacctttctcccagtgagtattcaagccatttgcagtcatttatttgtttttacaaataatgttcccataagtattctcatttatatctcttggtgcacacatacaatactttcttcaggatatatgtacttagaaatgaaattgctgggatatcagtttggacagcatcaaagtgactagatagtgctaatatatttttttccaagagattgctcagatttacactcctactcctaacaaggctttctgc

SEQ ID NO: 127403 - DNA, 583 bp, Homo sapiens
tgaaataaatttctgtatactccacttttaaaaatatgtactcaacattttttttaatgacatcttcatgtgtttctccccaaaactatgtttctctctatttcccagagttggccactatcgtgacttttcggctaaccattaatatcttctctatatgcttagcacacacatatgaaagtatccctaagcaacatattgcttaacctgtttgtgacattcatagaaatgaaatcctatcgtatagattcttgcgkgccttgttttcatggcttaccgcgaaatttttgagtcatcagacttgatgggtttaaccaaggctcattcttttggctgcatggaatagtattgtacaaatatatcacaattgatccacctttctcccagtgagtattcaagccatttgcagtcatttatttgtttttacaaataatgttcccataagtattctcatttatatctcttggtgcacacatacaatactttcttcaggatatatgtacttagaaatgaaattgctgggatatcagtttggacagcatcaaagtgactagatagtgctaatatatttttttccaagaga

SEQ ID NO: 127404 - DNA, 499 bp, Homo sapiens
tggggtgggtggggggcgctacttcatgcccattctagcgtaaacttaaacggtaaacttaatttcttttaatttttcaagtttagtattacatatatttcatcccattctgtggcttgcctcgtcatattctaaaaaaatgtcttttgatgagcagaaagacacttttatttattttcttttaagtacaatatctgtacctatttttatctactcaaagttcatcataatattatactatagtttcttctgaaagctttataattttaacttttatatttgtggtacatttcaagtgagtttttgtgaatgccatgtaaaggcccggacggtccagcaccatttgtttttcagcaacatttktggagaagaccattttttcttattgaattgccttgagactttcataggaaatcaactggcttgttatgttcatttgtagccactatattttaggttccattgatctactggtgtacccttgctgtattacctaaca

SEQ ID NO: 127405 - DNA, 615 bp, Homo sapiens
ctatagtttcttctgaaagctttataattttaacttttatatttgtggtacatttcaagtgagtttttgtgaatgccatgtaaaggcccggacggtccagcaccatttgtttttcagcaacatttttggagaagaccattttttcttattgaattgccttgagactttcataggaaatcaactggcttgttatgttcatttgtagccactatattttaggttccattgatctactggtgtacccttgctgtattacctaacaactttatgtgtatagatttatagcaagttttgaaatcttacaagtggaagacttatagtaagtcttgaaaatagtctgtgtcttattccttcaagaacattttgtctattataggtactttgcattccataatttttaggatgaattttccaatttctataaaaaakactgccaggctttaggttgggattgttttaaataggtagctactatattagtttgacatgctttaacaaatcaccacaaggttcgtggcttaaacaataaaaatgtattgccttacaattctgtaggtcagaagtctgacacaggtatcactgggctgacaccagggctctggttacatgttcctt

SEQ ID NO: 127406 - DNA, 610 bp, Homo sapiens
ttcacatccttatagcttagctcccacttgtaagagagaacatatgatgtttggtgttccattcctgacttacttcacttagaataatggtctccagttccatccaagttgctgtgaatgctgttatttccttccattttatggctgagtagtattccatggtgggtgggtggatggatagatgatagatwgatagatagatagatagatagatagatagatagatagatagatagatatagataacattttcattactgattgattgatgggcatttgggctgattccatatttttacaattgcaaattgtgctgctataaacatgggcatgcaagtatctttttttgtgtaatgacttcttttcctctgggtagctatccagtagcaggattgctggatcaaatggtagatctacttatagttatttaaggaatctccacactgttttccatagtggttgtactactttatattcccaccaacagtgtaagagtcttcccttttcaccacatccacaccaacatctatttttttttttattatggtcattcttacaggagtaaagtcgtatctattgtggttttgatttgcatttccctgatcattag

SEQ ID NO: 127407 - DNA, 587 bp, Homo sapiens
tatattaggctttgacagatagtatattggccagatacatgtatatcaaataatcaggctagtctctgtctacttagatcaggagtttgtgtcttcagaatgcattcaaagtacatagatacttcttcctccgtttatctaagaattgagggatggtgtagtaaaaagagacagataatataagctgtaggactaaaatttagaaaatctctccacctctcctggtttaatttctctctttctttctttytttttttttttttttacttgaagagagaagggactgaagacgggggacttcacagtatttttcttaatctctggaagggtactattccagagtttgaacttgcctctgtgtgtgcacaggcctgtacccttatgtgtgattgagtttgctgtgcagaaaggtgaaaccaaatggggctggataaaagaaagacaaatcaatgagtggcatcaaggggtgggatacaaatttcatgggtatttttatagtggactttctgtctcctgcacttcaggaaatcatacagggtaataaagtagtaataatcaactgccaatttacgttgtaataatgaaat

SEQ ID NO: 127408 - DNA, 573 bp, Homo sapiens
tacaggtgtgtccctgggctttggtattgggttcaagaatagattttctgtgcaataatgagggaggcagagaaaggagtgtgctaagtactcagtggggaagtagcaggagagaagacagagcaggcaggcagagaaccaggaagagacgtgactactgaacgctctttctctcaatccccaaagaaatttattcagtagctcctgctggatcttgctctgaagtatatttcaaatatgatcttttccccatttccacttatcctaccaaaaycaatagcaacttaagcagtagaaactaagaataagagtagccttgttcttacatgaacctagagtaaaagcaacaaatgctcccttctgagggaacaagcactagaattgcattggggccaccataatgaccattttacttgttgagttacagttatatcttgaatgttgataagcaatgctctaattctctgggctgcctggaaggtagcttctcaaagtgcatcctttctccttaattcatgatatttccatagaatgtatctctatctattgagaggtagcctagtgtgcctgact

SEQ ID NO: 127409 - DNA, 573 bp, Homo sapiens
tacaggtgtgtccctgggctttggtattgggttcaagaatagattttctgtgcaataatgagggaggcagagaaaggagtgtgctaagtactcagtggggaagtagcaggagagaagacagagcaggcaggcagagaaccaggaagagacgtgactactgaacgctctttctctcaatccccaaagaaatttattcagtagctcctgctggatcttgctctgaagtatatttcaaatatgatcttttccccatttccacttatcctaccaaaatcaatagcaacttaagcagtagaaactaagaataagagtagccttgttcttacatgaacctagagtaaaagcaacaaatgctcccttctgagggaacaagcactagaattgcattggggccaccataatgaccattttacttgttgagttacagttrtatcttgaatgttgataagcaatgctctaattctctgggctgcctggaaggtagcttctcaaagtgcatcctttctccttaattcatgatatttccatagaatgtatctctatctattgagaggtagcctagtgtgcctgact

SEQ ID NO: 127410 - DNA, 552 bp, Homo sapiens
tggcagttcctggtacacagaagcatggttgttcatgacagaagcagagagagccttgatcccagtccttttggctttctctgttgactagctggtgtcgacatccaactcacagttgttctcatggttgtaatgcaagaaaacagccaaaagacaagkcttccaagtttgtagcagggtcatgagattcactggaaaacatatttaatgaacatctacaatgtgccaggcactcttctagatgtggggttgcatcagtaaacatgagaaagatccctacattcataatgcttcaaatccagcagagcaagagacaataaatagaataagtaaattacacagcatctgagaaaatgatgaaaaagctataaaaaaaaaagagaacaagataagggattgggagcatgagggatggggtaaattgtgacagcttttacactggtgttcagagagttttactcaactggcattattaatatcacctcagagataatagctctgagctgaatctgcaaatgtctaaagccactttgtgtgaaaagaaattgaaat

SEQ ID NO: 127411 - DNA, 568 bp, Homo sapiens
ctaaactattttgcccaaacatctttaataacctcttaattaatttctctactctcccttgtcttccttcctaattaatttctccacatattcaggccagagtaatcttcagaccataactgattacatcagatcccaaccccctccctcattaaacacttcaatggattcccatgctcttargataaaatcatgcatatgtgctagaaaattccgcatgatcttgctcaactccgcagactcacattaagcctccttttttcttggtggtctctatgttctggcctcaatcgtattctatgcgaatccctttgtctggaatgctccttcctcctctaccttcacccaactcacatctgctcattccttagatttcatagaagtcttttcttactctctcaggcaaggtcaggtgcacttgctcaatgctatcatagtatgatgacgtatcttctccagagcacttatccagtttaagtttgcatatatttgggttatttactctagctctcattcccccagatgttgacagcacacttgttctgctcactattttatctccagtctc

SEQ ID NO: 127412 - DNA, 568 bp, Homo sapiens
ctaaactattttgcccaaacatctttaataacctcttaattaatttctctactctcccttgtcttccttcctaattaatttctccacatattcaggccagagtaatcttcagaccataactgattacatcagatcccaaccccctccctcattaaacacttcaatggattcccatgctcttaggataaaatcatgcatatgtgctagaaaattccgcatgatcttgctcaactcygcagactcacattaagcctccttttttcttggtggtctctatgttctggcctcaatcgtattctatgcgaatccctttgtctggaatgctccttcctcctctaccttcacccaactcacatctgctcattccttagatttcatagaagtcttttcttactctctcaggcaaggtcaggtgcacttgctcaatgctatcatagtatgatgacgtatcttctccagagcacttatccagtttaagtttgcatatatttgggttatttactctagctctcattcccccagatgttgacagcacacttgttctgctcactattttatctccagtctc

SEQ ID NO: 127413 - DNA, 568 bp, Homo sapiens
ctaaactattttgcccaaacatctttaataacctcttaattaatttctctactctcccttgtcttccttcctaattaatttctccacatattcaggccagagtaatcttcagaccataactgattacatcagatcccaaccccctccctcattaaacacttcaatggattcccatgctcttaggataaaatcatgcatatgtgctagaaaattccgcatgatcttgctcaactccgcagactcacattaagcctccttttttcttggtggtctctatgttctggcctcaatcgtattctatgcgaatccctttgtctggaatgctccttcctcctctaccttcrcccaactcacatctgctcattccttagatttcatagaagtcttttcttactctctcaggcaaggtcaggtgcacttgctcaatgctatcatagtatgatgacgtatcttctccagagcacttatccagtttaagtttgcatatatttgggttatttactctagctctcattcccccagatgttgacagcacacttgttctgctcactattttatctccagtctc

SEQ ID NO: 127414 - DNA, 526 bp, Homo sapiens
ttaattatgagacaacttctttggcttcaaacaagtcaggagatctggcaaaccacatcaaagaagagaaattctagggaggcagatgggactacacacaaaccaagagcacttatagaactggcccccaaggagaggtcaccacagaggggccacctagtgtgtccacaggctgagaaagttcacaagcaaaagtcacagatgggcagtctctgagccacagccacccacgggtgtgttctcttctgtgcacacagtaatgtgtatattttgtgtgatttatagactttttcttgttgttgttgagacgaagtcttgcgctgtcacctaggttagagtgcagtggcacgatctcagctcaytgcaacctccgcctcccaggttcaagcagttctcccgcttcagcccccagagtagctgggattacaggcctgcacgaccacatccagctaatttttgtgtttttggtagagacaaggtttcaccatgttggccaggctggtcttgaactcctgacctcaagtga

SEQ ID NO: 127415 - DNA, 632 bp, Homo sapiens
caaccacagccaaaatagctgtcctatgtctttcgtcctttgtcttcccatattggattttcacactcacaatctatagattattgttttaagccactgagtcttggtgtggttcatttaagaacactattatggcacgagattgtcaatacagggatatttaatttctttcatttgatatgtgggaaatgaagcatattctttaattaggcaaagtctgcaataagatgctcttgcacacagctttcaaaatgctgctctctgtccccctccctcatacctttttggagtcagactctctgaatcccttctgtatttgttctgtcctttcacaaaactaaaagaaaaagccacacttgtaggcagtcattgagaaggggactgtgccccttgctttcctgttgttttgtctcaatgtcctcaggtggccacttytaagttgagattgtcagttgaattatgccaacctctggagccagccaaagtgagccagttagctctcaacattaaacaaataataataatgataacctccccaaacagatggcctttcctgtcagcatgaagacttccagcctcagctggaaacaaggagtatcaaaaaaaaaaaaaaaaaaaagaaaaaaaaaaaa

SEQ ID NO: 127416 - DNA, 632 bp, Homo sapiens
caaccacagccaaaatagctgtcctatgtctttcgtcctttgtcttcccatattggattttcacactcacaatctatagattattgttttaagccactgagtcttggtgtggttcatttaagaacactattatggcacgagattgtcaatacagggatatttaatttctttcatttgatatgtgggaaatgaagcatattctttaattaggcaaagtctgcaataagatgctcttgcacacagctttcaaaatgctgctctctgtccccctccctcatacctttttggagtcagactctctgaatcccttctgtatttgttctgtcctttcacaaaactaaaagaaaaagccacacttgtaggcagtcattgagaaggggactgtgccccttgctttcctgttgttttgtctcaatgtcctcaggtggccacttctaagttgagattgtcagttgaattatgccaacctctggagccagccaaagtgagccagttagctytcaacattaaacaaataataataatgataacctccccaaacagatggcctttcctgtcagcatgaagacttccagcctcagctggaaacaaggagtatcaaaaaaaaaaaaaaaaaaaagaaaaaaaaaaaa

SEQ ID NO: 127417 - DNA, 517 bp, Homo sapiens
tccaatacaaaaaatgttcaactagttgttgagtagacacgaactatcgttgtgaaggtatttgtctgcactgggcctaggaaacctccccagagagaaaagctctctctctctctacaagctggtgattcttgggtaccaaccgtatttgctgtctggatttgcccacctttattcatttccagtaccttctcaccttctcatgttgccttgtttctacacacacacacacctcatcctctcgacttttttaatttttaatttttgtgggtacatagtaggtatatatataagtatatatatatgtgtatataaatgtgtatatatgtgtgtatataaatgtgtatatatgtgtgtgtatatatatgtgtgtatacgtgtgtgtgtgtgtgtgtgtgtgtgtgtgtgtgtgtatggggtatatgagatgatttgatacaggcatgcaaagtgaaataagcacaccatagagaatgaggtatccatycatcccctcaggcatttattctttgagtta

SEQ ID NO: 127418 - DNA, 609 bp, Homo sapiens
actcttctgaccctgtggctggataatgtttataatagcctctactattacacagtttccatttatatatttcatctttgcatctctatttataaaaaaaacccacaaatgtatttgtttcacaggtggcttacaattggatgatgagataaacctaaatatracatagtggcagataaccataaaacagtcatcacccccagattcactttgctctttatgtataccagtaatacaacaacaacaacaaaaagtttggaacaaaagtttctccgtgatccaagtggagaatagaagaagctgtctaatggtattacagagaatgcctagagtgagaaaattgaggcaataaaacatgaagttatttatctggcgttaacacaaggttatttatactaaagtagtagttaaacaagagctggaaaacttgggaacatggtggaagtaactttggatgacacattgaagtcaaccagtttacatattatttcttcttttatgttctttattctgcttttttgtaaagcagcaattcattgtctgatgccaccatattgcacttagtttagcactgttaactttattaaacttagtttagatcttcgttta

SEQ ID NO: 127419 - DNA, 609 bp, Homo sapiens
actcttctgaccctgtggctggataatgtttataatagcctctactattacacagtttccatttatatatttcatctttgcatctctatttataaaaaaaacccacaaatgtatttgtttcacaggtggcttacaattggatgatgagataaacctaaatataacatagtggcagataaccataaaacagtcatcacccccagattcactttgctctttatgtataccagtaatacaacaacaacaacaaaaagtttggaacaaaagtttctccgtgatccaagtggagaatagaagaagctgtctaatggtattacagagaatgcctagagtgagaaaattgaggcaataaaacatgaagttatttatctggcgttaacacaaggttatttatactaaagtagtagttaaacaagagctggaaaacttgggaacatggtggaagtaactttggatgacacattgaagtcaaccagtttacatattatttcttcttttatgttctttattctgcttttttgtaaagcagcaattcattgtctgatgccaccatattgcacttagtttagcactgttaactktattaaacttagtttagatcttcgttta

SEQ ID NO: 127420 - DNA, 603 bp, Homo sapiens
aaaccaacaattaaagttacccaatgccaggactctttaaagactaaagggctttacagtacctatcacagcagctcataaccaacttgtaccattattgcttctataagtgtgctgggaggattaatttcttgaaacttatttagtgttacagaaatagtaatttgcagagccaaaaggtcattctttgccaaatcagtacattcaaagtagtaaatttcaatgaaaaactaaaagtatcattgaatatttgaatattttgtatgtattctctaatcatcctagcctcttctctcatctatgtgacatcaattaagagttattaaatttaaaacttgaaccgaagtagcataaaagccaattgttttatgaatactgagcccttaataactttcactttgtgcacacacacacacacacacacacacacacacacagagaaagaaccaccccctccctccctcaagaarcactgctattcagattaaggtatatcagagcaattctgttgttccatgatatagaactctcaaaaggtatacaatcatgactgccccaaaacataggagcagtggcttcagggaaacataaggaagtatcaac

SEQ ID NO: 127421 - DNA, 628 bp, Homo sapiens
tgagttcacttggttcaacacaataataatgagtgcttattatgtccccagccctaggcgaggcactgtaaatagagagaggaattaaaggcagccaaccctaatccttcctatcttagtctgttttgtgctgctataacagaatagctgagacagtgtaatttataaagaaaggaaattcacttcttattcttctagaggttgggaagtccaagagcatggcagcagcattggttggctactgctgagggccttcttgctgtatcataaccctggtggagggcatcacatgacaagagggcaagagtgtgcttgttagctcaggtctctctttctcttcttataagccaccagccccatcatggggggccctacccttataatcttatctaatcctaattatcttccaaagaaccctttgccaatcaacataggaatttgggaattaaatttccaacacatgaaaattkgggatacatatcaaaccatagtattctgcctctgacccccaaattcatgtatttctcacacataaaatacattcatttcatccccacagactcaaagtcttaattcattccagcatcaactcaaaagtccaaagtccaaagtctcatctgtgagcttg

SEQ ID NO: 127422 - DNA, 645 bp, Homo sapiens
tagacatgaggttgggggagaaagaaagaagagtcaaagatttaagatgaccactagtttgggagactggtcagatgagttcatggcacagaatttaggaggaggatcaattttcaatgtgttgaaattaaggtatcgccacatggactatcaaggtggagatattcagcaggggtatgtgtacagtcccaggccacrtaacagcctttctgtccacaacggaccacatatacagcagtggtcctttaagattataatggagctgatacagtcctatcactcagtacttaccaaactttttgtagttattttagactgtactcctatttttttttttttttaaagctaactggggccaggcatggtggctcatgcctgtaatccgagcactttatggagaatgagactggaggatcgcttgagcccaggagtttgagaccagcctgggcaacatagcaagacccttcctctacagtaaataaataaaataaaaagctaactgtaaaacagcctcaggcagttccttcagaaggtcttccagagacattgttgtcataggagatgtcagctcctctgtgtgtgtttattgcccccaaagaccttccagtgggataagatgtggacacggaagacaatggtattgat

SEQ ID NO: 127423 - DNA, 601 bp, Homo sapiens
atcaagtgagtttttttgtttgtttgtttgtttgtttgtttctatttttctcctttactagtttggaatctttatactctgtttctgctctagtggtaacaacagaaattacrttatgcctatttaacacataatctaagttaatcaatatatttcatgttctccccaacatcagtctctcagatcactttgcttttaaatctctcatcttatgaaattttactgggtaatataattttattttttataatctaaacatatattattactttttatacagtcagcagccaatagccataggatgtactcacatatttaacatatactttgcccttgattacatcttttacttctgactttttaacaaaaatcttgtttgcctcaatatacatatgctcctatgtaaaatatctggctttcaacaagtaattataagatttgctaaagaacaaaacaaacaaaaacaaacacagtctgaaaagatgaaaaaaaatatactataaccagaattgagtatgatataaattttaaaaaaagaaagttatttaaaagactgagaatttgaaatatctatttttagtgtgttaaagaccaatagtaa

SEQ ID NO: 127424 - DNA, 488 bp, Homo sapiens
aacagcgatctcttatctggcactaatttgtcgtttgtgtatcaaaaatttatcctaaatcccacttgggccttgatttctggcctttgttttctcccacccaaatgactaaaatgttctcttaactagtctttgttcttctactttccacctcaaagtgtctaaaacagtctttctttcattttttmattcttcattgtaagaaaaaaaattattccactaaatctacattgctttcagtctagatttatacatagtcaggctattcatgtttctccatgaataagcctacgcgtgtaggattcattttttgttgttccccccaccaaacctgtgttatgtttaatacacaaggcatattgggttccttgcattcaaacaataatttaggcacctactccactttatgactttggacatgaagctatttatttcaagaaaatatctgtctcacatctttttaattcacatccataatcactaatagg

SEQ ID NO: 127425 - DNA, 488 bp, Homo sapiens
aacagcgatctcttatctggcactaatttgtcgtttgtgtatcaaaaatttatcctaaatcccacttgggccttgatttctggcctttgttttctcccacccaaatgactaaaatgttctcttaactagtctttgttcttctactttccacctcaaagtgtctaaaacagtctttctttcattttttaattcttcattgtaagaaaaaaaattattccactaaatctacattgctttcagtctagatytatacatagtcaggctattcatgtttctccatgaataagcctacgcgtgtaggattcattttttgttgttccccccaccaaacctgtgttatgtttaatacacaaggcatattgggttccttgcattcaaacaataatttaggcacctactccactttatgactttggacatgaagctatttatttcaagaaaatatctgtctcacatctttttaattcacatccataatcactaatagg

SEQ ID NO: 127426 - DNA, 535 bp, Homo sapiens
gtctttctgtagttagtttctccatcggtaaaatgggaaataacacagactttactgtgttgtaaggatttaatgacttaattcctgtaaatcacagggyaggttcttaagatatttcaggtatcatttatgactataaaattgaaaataattgctcaatatgcttttgtgagaaaacacacacacatataccattgaagttgtttataaaataaatataagttgttattcataaaactggtaaacatttgtacctcaataaattctacttctataaataagttttattattacagaatataaaaccaatctccactcatacatgttttagttacacagaaatttaaactagaatgtgcatatgaccaagtatccaaacaaagaggagagttgcacaggttggggcagcctcactgtttctttgagcctgtgcatgagaaagcagaatcagagcaacagcaaacaccaaggcatgcagaacagaaggcaagtccagccgcagacttgatgacaagggagaaaaagaggctggaaa

SEQ ID NO: 127427 - DNA, 575 bp, Homo sapiens
attcaaatgattgttggtaatttttgacttgtatcaatacagtctcagctgttttccttaaaaactcacagaagacctgtagttcacctttctttggaggtgagggagagagagtagcaatgggaggaggatgacaattcgttttcgttattaagttttagtttattaaaatatgatatcaattgtttaataatctgtgaaagtgaatgccaggtgttacgcattgggtagagycaggttagtatttgggagatgattggccagaattcagttcataggctcttctgttaaaaagtagataatgtcaagaggtacaatgaagtttgattaattcctgagtcctaagcagagcctgcctgttagcacatttttaaagtggaagcttagagggcttctagatgccgctggtttgacatttctttgggatgggaagatgtgattagattcacgtaatataaccctgtttgaaaggtgtagcaacatgacatagcggaaaaaatgtgggctcttgctctgattttatgatataatgaatgaatcccaccttctatcttctctttgtaaaatgaatatac

SEQ ID NO: 127428 - DNA, 575 bp, Homo sapiens
attcaaatgattgttggtaatttttgacttgtatcaatacagtctcagctgttttccttaaaaactcacagaagacctgtagttcacctttctttggaggtgagggagagagagtagcaatgggaggaggatgacaattcgttttcgttattaagttttagtttattaaaatatgatatcaattgtttaataatctgtgaaagtgaatgccaggtgttacgcattgggtagagtcaggttagtatttgggagatgattggccagaattcagttcataggctcttctgttaaaaagtagataatgtcaagaggtacaatgaagtttgattaattcctgagtcctaagcagagcctgcctgttagcacatttttaaagtggaagcttagagggcttctagatgccgctggtttgacatttctttgggatgggaagatgtgattagattcacrtaatataaccctgtttgaaaggtgtagcaacatgacatagcggaaaaaatgtgggctcttgctctgattttatgatataatgaatgaatcccaccttctatcttctctttgtaaaatgaatatac

SEQ ID NO: 127429 - DNA, 624 bp, Homo sapiens
cttctttggcttgtagttcactaacatttgctgagctatagagctgtgtgtctggggttgtggctgcctagtgtgcatgtcccagatgccactgaaggtaggtttgggccatgtgactaagttccagtcagtggaagktaactggaaatgatgtgcggaactctcaggctcaggccttaaaatattacacacgtccctttcttgctctttttcccgtgaactggaacattgataagctgataaccagctttgaccacacaggtgaagacaacaccctccggaatgcaaacgattgagaagggcttggaccattagtgatcacatttagtagaacaacttcgcctctctgctctgggctgtgacatgaggaggacatatgcctctctgttatttaagccactgtattattggttgtcttttagagtagctaaggcttttattttcttgttataaaagttggtacctgaagcaaaatgctgttgtaataaaaatctaaaatatatgtcattgagtctgggaatggtataacagatatgcagtctgtaaaaacaatacacaagtgtcatgaattattattaggggatactaagaactccttcaacatcctgactaatcagataaagg

SEQ ID NO: 127430 - DNA, 641 bp, Homo sapiens
gatgagaataaaataagagattcctctgggtctattcttcttgttaactgatttgaaaggtacraggacattgagacactgaaaatttaagagacagagaatccattccagaaataggtattgagtttggattatgtgccaaaccctggaaattgaataatgatgaaaataaaggtgtggtccttatccccttggcacatacagtgaaagagataaatgcatagtaataccctgaccttgtttattgctctcttgccttgagtaaatagtagctctgaagaagtatgctacctccttccacctaagggattggaatagattcagcagagaggattaagggctggatatcatagggttttctagcttttgtttccaacctctctcaaatttaattgcctgctgaaggaggtactagaatggcacccacaactggctttgagagaggaaaaatgaagtggtcgcttcagatcaatgtttacctctgtcagctcagtacacaagagcccttaagcatgaaggtcggggcttgacttctatctggaaagtggccccgagatcatcactttggtttcaattggttttgaagtgtcgctgaaagaattcttttgtttttactttaggctcgtgggtttgcactgtaa

SEQ ID NO: 127431 - DNA, 641 bp, Homo sapiens
gatgagaataaaataagagattcctctgggtctattcttcttgttaactgatttgaaaggtacaaggacattgagacactgaaaatttaagagacagagaatccattccagaaataggtattgagtttggattatgtgccaaaccctggaaattgaataatgatgaaaataaaggtgtggtccttatccccttggcacatacagtgaaagagataaatgcatagtaataccctgaccttgtttattgctctcttgccttgagtaaatagtagctctgaagaagtatgctacctccttccacctaagggattggaatagattcagcagagaggattaagggctggatatcatagggttttctagcttttgtttccaacctctctcaaatttaattgcctgctgaaggaggtactagaatggcacccacaactggctttgagagaggaaaaatgaagtggtcgcttcagatcaatgtttacctctgtcagctcagtacacaagagcccttaagcatgaaggtcggggcttgacttctatctggaaagtggcccygagatcatcactttggtttcaattggttttgaagtgtcgctgaaagaattcttttgtttttactttaggctcgtgggtttgcactgtaa

SEQ ID NO: 127432 - DNA, 552 bp, Homo sapiens
cccttagctattcagattccaagtatttgttatgcctagacacagcacttctaattattttgtttcggatctgttcatttgaggctttcagttgataaataacattgtcaccctcactccacaggacaacagggttaaaacagttggccctaaaccctgtctgtcctcacatacccccacactgacacctgtaagccaacccaagtcagctagcaaggacctgggagaaaatgtttttcaaaaaagtctgtggatggaaaggaatctgggttaagttttcatggcaatttgtggctggrtgtggggctgcctcttcttctggccgacagctttctcttctgcttggtgatgtgagaagtgatcacaggtgcaatgtaatcttgagaaaggaagatgacagaactggcagttaccagtggaggggggagatacctagggaaattctaattcagttcagtactattttgactctgtaagtcttttgtagattgccaaacctgagaaattcctaaactatcacaaacaccaatgcaaactatcacaaacaccaat

SEQ ID NO: 127433 - DNA, 552 bp, Homo sapiens
cccttagctattcagattccaagtatttgttatgcctagacacagcacttctaattattttgtttcggatctgttcatttgaggctttcagttgataaataacattgtcaccctcactccacaggacaacagggttaaaacagttggccctaaaccctgtctgtcctcacatacccccacactgacacctgtaagccaacccaagtcagctagcaaggacctgggagaaaatgtttttcaaaaaagtctgtggatggaaaggaatctgggttaagttttcatggcaatttgtggctggatgtggggctgcctcttcttctggccgacagctttctcttctgcttggtgatgtgagaagtgatcacaggtgcaatgtaatcttgagaaaggaagatgacagaactggcagttaccagtggaggggggagatacctagggaaattctaattcagttcagtaytattttgactctgtaagtcttttgtagattgccaaacctgagaaattcctaaactatcacaaacaccaatgcaaactatcacaaacaccaat

SEQ ID NO: 127434 - DNA, 629 bp, Homo sapiens
tctttgtgttagggtgatatttaggttttgatatcttcgatttgtctattttccccaattgtatattcagtctgtaaaatttattttactcttttccaattacagtggccacatcttcttatttaattttcaccttactttgtacatcattttagggtaggtcttattgccaccttatgatgaaaaaaataaggctacattttcccaaagatcatcattggacagtgagtccatattcagaagccaattctgatttttgtttatgttctttggattagacctctgggccttgagcttgatctggctctctaaatttcattgatttggttaacattcaaaaactaaatatctaatgactacctttgtcccacagttaggatcaacaaatgtgattagatgcctgtcttcaaaggagttcatgaartaaccagtcggcaagaggcaaagtttgggaatagtttcttctacccttcatacacataaccatctctttctagattgatggagagggttccagtgtccaagcaggaatgaccaggcttcatgaaacttttgagtggctttaactaaaatgttgggccatgaggtgaggcccaaccttgtagatttagtggggcctcttgaggagc

SEQ ID NO: 127435 - DNA, 585 bp, Homo sapiens
gtagctgggttgctggtgatcccatcaaatgagaggacactgcaataggaagttatttaggccaaggatacaaagatgagttcaacttgctctgattgaggtatccaagagttagttgtataaatgaatttgaagcttgcaagacaagcgtggatgaaatatgacaatctgggactcatcagttgcaagagatgagaatgattcgccctggtgagtattccagggtgaaaagcagggagctacagacagaaacctcaggacacaccacatttaaagaacaatggaggagtgagagagttgcaaacacagtggagaagaagtgatgtgagaaatgacatgcaaaacgcagcaagggggccgggcacagtggcccacaactgtaatccyagcactttgggaggacatggcaggaggaaagcttgaatccaggagttcgagaccagcctaggcaacatagtgagtccccatctctacaaaaaattttaaaattagccgagtgtggtaatacacacctgtagtcccagctactcaggagagtgttgtaggaggatggcttgagcccaagagttgaggctgcagtgagcc

SEQ ID NO: 127436 - DNA, 547 bp, Homo sapiens
gcctccccgacgagcgccaccccctgctccacggcacccagtcccatcgaccacccaggggttgaggagtgtaggcgcagggcgcgggactggcaggcagctccacctgcagcccmagtacgggatccactgggtgaagccagctgggctcctgagtctgctggggacgtggagaacctttatgtctagctcagggattgtaatacaccaatcggcgctctgtatctagctcaaggtttgtaaacacaccaatcagcaccctgtgtctagctcagggtttgtgaatgcaccaattgacactctgtatctagctactctggtggggccttggagaacctttgtgtctagctaagggattgtaaacgccccaatcagcgccctgtcaaaacagaccactcggctctaccaatcagcaggatgagggtggggccagataagaggagaaaagcaggctgctggagccagcagtggtaatccactccggtctgcttccacactgtggaagctttgttcttttgctctttgcaataaatcttgctacttgctc

SEQ ID NO: 127437 - DNA, 547 bp, Homo sapiens
gcctccccgacgagcgccaccccctgctccacggcacccagtcccatcgaccacccaggggttgaggagtgtaggcgcagggcgcgggactggcaggcagctccacctgcagccccagtacgggatccactgggtgaagccagctgggctcctgagtctgctggggacgtggagaacctttatgtctagctcagggattgtaatacaccaatcggcgctctgtatctagctcaaggtttgtaaacacaccaatcagcaccctgtgtctagctcagggtttgtgaatgcaccaattgacactctgtatctagctactctggtggggccttggagaacctttgtgtctagctaagggattgtaaacgcmccaatcagcgccctgtcaaaacagaccactcggctctaccaatcagcaggatgagggtggggccagataagaggagaaaagcaggctgctggagccagcagtggtaatccactccggtctgcttccacactgtggaagctttgttcttttgctctttgcaataaatcttgctacttgctc

SEQ ID NO: 127438 - DNA, 448 bp, Homo sapiens
ttgttttcctgcaactggatggtcccacctgagcgtgatgggagaaagtgacagatcaataggtattagattctcataaggacagcgcaacctagatccctcacatgcacagttcacaacagggtgcgttctcctatgagaatctaatgctgctgctgatctgagaaggtggagctcaggcgggaatgtgagcaaaggggagtggctgtaaatacagacgaagcttccctcactccctcactcgacaccactcacctcctgctgtgtggctccttgyggctccatggctcaggggttggggacccctgctcaagtgcatccgaaacgacccttcccacaccagtcttcacagtggtcaagtgcagcaaccacttagctcccaaggcatgtgcctcagctggcatttcgtcacaatcaacagtaagtggtagcttgagtcactgtgagg

SEQ ID NO: 127439 - DNA, 548 bp, Homo sapiens
tccagcagctctaatcagggaatgaatctggtgtgtaataggatctcaaggcttgactcctagtctaagaccatttctggagtttgctgacttgatccccatscttcatcattagcactttgcagggaaggagctgagcgtggatcttgactccgaattggctggggcaggcaaaatcgggggcacgcttggtgttgcccaggctccgctctgcctagacacacgtgagggccaagatctggtttgtgtttcatgagctctcccaggatgaagacccagccaggctgtctgaagaaggggtgttcttgagtaggagggaaggtctgctccaatacgaaaaatctaacaatagcatagtccttaagagcttgagctttgaagagggagaacagacccatttaaggcacgaaaaataaaggaaactcttgagtccctccaaggaaaattccagccacctggctagcctcaagaagtagatgagcaccctgataagtaagaaggtaataatagcttaaaacaatagtcaagaaaattagagccacgaacta

SEQ ID NO: 127440 - DNA, 548 bp, Homo sapiens
tccagcagctctaatcagggaatgaatctggtgtgtaataggatctcaaggcttgactcctagtctaagaccatttctggagtttgctgacttgatccccatgcttcatcattagcactttgcagggaaggagctgagcrtggatcttgactccgaattggctggggcaggcaaaatcgggggcacgcttggtgttgcccaggctccgctctgcctagacacacgtgagggccaagatctggtttgtgtttcatgagctctcccaggatgaagacccagccaggctgtctgaagaaggggtgttcttgagtaggagggaaggtctgctccaatacgaaaaatctaacaatagcatagtccttaagagcttgagctttgaagagggagaacagacccatttaaggcacgaaaaataaaggaaactcttgagtccctccaaggaaaattccagccacctggctagcctcaagaagtagatgagcaccctgataagtaagaaggtaataatagcttaaaacaatagtcaagaaaattagagccacgaacta

SEQ ID NO: 127441 - DNA, 548 bp, Homo sapiens
tccagcagctctaatcagggaatgaatctggtgtgtaataggatctcaaggcttgactcctagtctaagaccatttctggagtttgctgacttgatccccatgcttcatcattagcactttgcagggaaggagctgagcgtggatcttgactccgaattggctggggcakgcaaaatcgggggcacgcttggtgttgcccaggctccgctctgcctagacacacgtgagggccaagatctggtttgtgtttcatgagctctcccaggatgaagacccagccaggctgtctgaagaaggggtgttcttgagtaggagggaaggtctgctccaatacgaaaaatctaacaatagcatagtccttaagagcttgagctttgaagagggagaacagacccatttaaggcacgaaaaataaaggaaactcttgagtccctccaaggaaaattccagccacctggctagcctcaagaagtagatgagcaccctgataagtaagaaggtaataatagcttaaaacaatagtcaagaaaattagagccacgaacta

SEQ ID NO: 127442 - DNA, 548 bp, Homo sapiens
tccagcagctctaatcagggaatgaatctggtgtgtaataggatctcaaggcttgactcctagtctaagaccatttctggagtttgctgacttgatccccatgcttcatcattagcactttgcagggaaggagctgagcgtggatcttgactccgaattggctggggcaggcaaaatcgggggmacgcttggtgttgcccaggctccgctctgcctagacacacgtgagggccaagatctggtttgtgtttcatgagctctcccaggatgaagacccagccaggctgtctgaagaaggggtgttcttgagtaggagggaaggtctgctccaatacgaaaaatctaacaatagcatagtccttaagagcttgagctttgaagagggagaacagacccatttaaggcacgaaaaataaaggaaactcttgagtccctccaaggaaaattccagccacctggctagcctcaagaagtagatgagcaccctgataagtaagaaggtaataatagcttaaaacaatagtcaagaaaattagagccacgaacta

SEQ ID NO: 127443 - DNA, 607 bp, Homo sapiens
aatgtgaggtgttattcttctagggcagtggttagaaaagaaaatgaaagtagcagtactcttttcctaattcaaccatagatggatgaccagaatttgtaatccataaggtagaagctgctgtgcctgaggaaatagaaagtgggcagaggtggaggggcaaggtagggagtggagtggaaggtagggagagtttgatcctagcctgcactgctcctcagaggtactttagcccctttggaacagtattagaaaatcatggctctatcaactcatgtctgaaaatcaattgctatttcagagcaggaggtgaccaatcttggaaataaggaagggagagaggcagccaagccagcagctcctggagccagctcttggaagttccccagragctgtccagtcttatgtcatgtctagtcagcagagtcccaaagaagcttgtcattctctaggcatttgtgcttacattctgatgggcctgatagcagggagatgacatggagcccaggcagaacagctgagatttctactggtcatgacctccatcttctccttcatacctttcctacctttctttttccatgcattcaacagacatttattaccc

SEQ ID NO: 127444 - DNA, 607 bp, Homo sapiens
aatgtgaggtgttattcttctagggcagtggttagaaaagaaaatgaaagtagcagtactcttttcctaattcaaccatagatggatgaccagaatttgtaatccataaggtagaagctgctgtgcctgaggaaatagaaagtgggcagaggtggaggggcaaggtagggagtggagtggaaggtagggagagtttgatcctagcctgcactgctcctcagaggtactttagcccctttggaacagtattagaaaatcatggctctatcaactcatgtctgaaaatcaattgctatttcagagcaggaggtgaccaatcttggaaataaggaagggagagaggcagccaagccagcagctcctggagccagctcttggaagttccccaggagctgtccagtcttatgtcatgtctagtcagcagagtcccaaagaagcttgtcattctctaggcatttgtgcttacattctgatgggcctratagcagggagatgacatggagcccaggcagaacagctgagatttctactggtcatgacctccatcttctccttcatacctttcctacctttctttttccatgcattcaacagacatttattaccc

SEQ ID NO: 127445 - DNA, 607 bp, Homo sapiens
aatgtgaggtgttattcttctagggcagtggttagaaaagaaaatgaaagtagcagtactcttttcctaattcaaccatagatggatgaccagaatttgtaatccataaggtagaagctgctgtgcctgaggaaatagaaagtgggcagaggtggaggggcaaggtagggagtggagtggaaggtagggagagtttgatcctagcctgcactgctcctcagaggtactttagcccctttggaacagtattagaaaatcatggctctatcaactcatgtctgaaaatcaattgctatttcagagcaggaggtgaccaatcttggaaataaggaagggagagaggcagccaagccagcagctcctggagccagctcttggaagttccccaggagctgtccagtcttatgtcatgtctagtcagcagagtcccaaagaagcttgtcattctctaggcatttgtgcttacattctgatgggcctgatagcagggagatgacatggagcccaggcagaacagctgagatttctactggtcrtgacctccatcttctccttcatacctttcctacctttctttttccatgcattcaacagacatttattaccc

SEQ ID NO: 127446 - DNA, 415 bp, Homo sapiens
  misc_feature (1)...(415): n = A,T,C or G
atatgatggagtgtttcagggaragcctaaatgggctcctcacctgatgaaagagtcatggctcttgagcaaggaccacataggattcacctgggaagggaatagggttagcctanaanatgttgagtgggtagagtgtacgtcagttgaatgactctccagcatccattccttgcttcccccttccacccagaaccatgaatttgcaagccttgggtgcattcagattgccctcaccctcaactccagtatggtcttatatttatttaacatagtctgcattcatcttgcccacaataattgattctttcaagaataggcacacgaacaaagtcagccaatcagggcgaatgaaatctatttccagtatttaatttaagctatcttgaaacagattctctctttaatattgaat

SEQ ID NO: 127447 - DNA, 638 bp, Homo sapiens
tataactttacaacaatatattaaaatctagataaaatagcttttcaggaaagcatacacagtataattaaataaaatttagctaacatgagcagaacaataactgtgaaaggaattgttgaaattttctaagaaatactttcaaaaggcctcaggcccataccgtgttactggcaaggtgtttcaactttgaaggtattaataactcttttgtcatttaaacttttccagacacagaaataacaattctttttcataaaattaggataatagaataatcttgatattaaaaactataagtagtgtaccttaaaagaaaaaatatgcagtccaatccttaatattaatataaactctaaattctaaatatgaaatattagtaattgaggtgcatttatagaataatataccatgattaatacataatcatccaagaaatagtagactgtttctcaatgaaacaaatctattaatctttctayactaacagcacaaaaacaaatgatatgtagagtagaaaacttgaaaaattgttaagtataaaaagtaaaatttaacactcatccttaatttaaaaaataaaaacctcttattaagtcaaatcaatttaaattttgttttaattgggaactacatac

SEQ ID NO: 127448 - DNA, 619 bp, Homo sapiens
ttttacaatatcatttgctatatgctatgtatgaaaagaaatattatcacctcgatcagattccagcatgattagcaactcttatttttatgccacgtacatacacacatgatctctgggactagaacttcaaaaggaaatctacggggcatggaaaacagtggtcttctcagctaatctcccaaaatacagagcagagcaaaaaaaaaaaaaaaaaaaaaacaaaaaaaaactgtttctcgtggaaaaaaaaaattatatttaaagaaagtgtagttcatatcattgtcatctggtgacgctgacgtttgagaaaattgttttgtttttacctgattaaatactacagctttgccaaataagaggatttagccaaagatccaagatatgaaaaatttggagcacctgtttcccagctgaatatgagagaaattgattcaatattttaaaaaataactttatataacaaagtattatttccatctataaggatgcacttattgcaagtaaagaactagcttttaacacaayggtagagttgtgcaactatcacgaacatcaagttttagaacatttccattaccccccaaaatttattctgcccatttgaagtgaattc

SEQ ID NO: 127449 - DNA, 565 bp, Homo sapiens
aatatgaggcaaatctggcagaatttaaagaagaaatagctaattgaacagtaatattttgatacttcagtaactcactctcagtaatacagaaaataaatataattcagaaaggaaacagacactttggcaacactatcaaccaacttgacctaatgtcattgcacccaacaacagcagaatgaacattctgttaaagttttcagaaaatactttttgagaatagtccatttttagggttctaagacaagtttcaatgcatgtaaatgagttaaaagtcatttaaaaattgtttttgctacaaccaaatcaaattagagatcamcaacaaaaaaaacttacataatcttcagatattcacatattaaataaaatgcttttaaatgacccataaacccagagaattcataagagaggttagaaaatatttttatcttagtgaaaataaacatatcaaaatgtaaagaatgtagttaaatcagtgctcagcaggaaagttttgctttaaacaccttatctttgtccttttgtgctgctataactaaatatctgatagtgggtaatt

SEQ ID NO: 127450 - DNA, 565 bp, Homo sapiens
aatatgaggcaaatctggcagaatttaaagaagaaatagctaattgaacagtaatattttgatacttcagtaactcactctcagtaatacagaaaataaatataattcagaaaggaaacagacactttggcaacactatcaaccaacttgacctaatgtcattgcacccaacaacagcagaatgaacattctgttaaagttttcagaaaatactttttgagaatagtccatttttagggttctaagacaagtttcaatgcatgtaaatgagttaaaagtcatttaaaaattgtttttgctacaaccaaatcaaattagagatcaacamcaaaaaaaacttacataatcttcagatattcacatattaaataaaatgcttttaaatgacccataaacccagagaattcataagagaggttagaaaatatttttatcttagtgaaaataaacatatcaaaatgtaaagaatgtagttaaatcagtgctcagcaggaaagttttgctttaaacaccttatctttgtccttttgtgctgctataactaaatatctgatagtgggtaatt

SEQ ID NO: 127451 - DNA, 609 bp, Homo sapiens
ctctagataatatctttttgcggaaaatatttagcttttattaggaaaattttgccaaataaaattgggtgctatcttttttaactttaagaaataattcacttaataaaatatatagtattacctaacacaagaatgattaaaaccaaytataaaatccataactttcttaaatactactgtcattgatctttccacttttagtcttattttaatttagtgtggtttatattgtttgctaaaattcttgattgtgcttttgctttccttcaggatatatctaagtcacttaaacttaaattatctttatttctgcccctcagatgcttagttgaaaagtgataatactagtgtactcttcatagatttgtcacaaaataagtaaaatattacaaagaaaggacaatgcctaacacacaagaactgtttagtagcttcttacttccatgctttatagttttctatttatcagtagtttctgacttccatgctttatatttttctatttatcagtagtttctgacttccatgctttatatttttctatttatcctctatttcaacaaattatttatctatcagcctacctatatctgtttgtgtgtgtgt

SEQ ID NO: 127452 - DNA, 580 bp, Homo sapiens
gataaagtattctaattttgttgttcttgttcaaaagtgttttagctattctagctattttgtaaattttaaaattaatttgtaaatttactcaaaaatacttttagggtttcatattttattttttcaagaaatttgtccataatctggagyaaccaatttattggcatagatttgtgttccatattgagtgggacccacattatccttctaattttgaatggcctataataacaacacttctttcatgtctgatagaggtaactgatgtttctttctgtctatttttcctatctttagatatttaataatgttagtgatttttttagaaaaaagaattatcttctgattatattaatttgtttgttgcttttctttttactatttcagtaatttctgcataggcctttactatttctgtctttctgtttgctgagggttttcatctagtttttttctagtttaagtgcacttcataaaatttgaaaaccttctcttctaacacagaatttaaagctataacatttcccactatgtacaaatttggttatgttgaattttttttatcatttagttcaaa

SEQ ID NO: 127453 - DNA, 592 bp, Homo sapiens
tagcatcatgatgacagaattgatcaaatccatgtataacaatactaaccttaaatgcaaatgagctaaatgccccaattaaaagacacaaagtggcaatctggataaagaaccaaggcccattggtwtgctgtcttcaagagacccatctcacatgcaataacacacatgggctcaaaataaaagggatgggattctgggaaagatggcaaataggagacagtgctgatctgaagctcccactaggagagacagaacagtgcatggagactcacatcatggacttttccttgaggaaacactacaggagtataccaagaaaatggaaagaaataacagattctttgaaagaactggcaggctgctgcaaattccacgagacaggcaaaaactctggtgctctctcagaagtgccacctcctggacagggaccaaccaacttaggacattacagcagctcatgacagaacaactctgctccaaggaagaagaatactatagccaattccactgcctgcaacatcttggataaccagtggtcctgtgtctgtctacatgaaaacttcactgctagcataatcagcattcaaga

SEQ ID NO: 127454 - DNA, 584 bp, Homo sapiens
ataccctgtcagcattccctagtaaaactttctggacacttataggctttttcttgggcttttgacctatattagcatataatgttacattgaaacttatattaaattaaacaacttttttttaatgacacttccctttaaaagtgaacaatgtaatggctttgggcttccaagctgtctttttcttttgctctagtttttaagtgcagtcaatatttttgaaaatgcctcagagcactgaatgcatttccagcatrtgatgtagccccagtttcattttcggtgttgaatttctgccgtattcaatctgaactacaattttagaaattacaaattttagcagttaaaagtgagccagggcccaaagttagttatgtagcacatggtaccatgtcagtcagctctcctgccctgctagaggctttgtgaacaaggtattgggaccttggctgaacatggggacatcgtatttcatgcctgtgaaaagcaaggttcatgcctataaggttacatgtcgataccaagaagaataatttatacgtagttataaagttcaaatgggataaagaaaccatggggagcca

SEQ ID NO: 127455 - DNA, 587 bp, Homo sapiens
tctttctattatctaatgaagctaacttcatatagttttattttgataaatggaaatgactttcagattaagtatagccagttcttaatcagcagtttgctgtaaattttagtaaggttaatggtaacatgagttttgtggccatgggggaacctgcaaaacaactctgggcctcagttttctcagtgtgcagtggggataataactgtgcttatctcagtaagctgmtttgaagattaatgactgaatgtgaggaaggtgctctgtccttttatttgtagaattattagcattatttttcaggatttctcttttgtaatgaacttctatctattcattttatgtttttaaaaaataaataaatgttagtagtggaaagagcactgggcatagagccagaagaactatgttccttttactagtcctgaatatttaattaaggttgcttgagaattttcacttcctcacttcaggtttttttactttccttagtttttaaaaaatgaaggagctaaaccagagtaataatttcaaggcatttggaaatcaacctgtaaattaaaaatcatataaaggacaacatgatc

SEQ ID NO: 127456 - DNA, 587 bp, Homo sapiens
tctttctattatctaatgaagctaacttcatatagttttattttgataaatggaaatgactttcagattaagtatagccagttcttaatcagcagtttgctgtaaattttagtaaggttaatggtaacatgagttttgtggccatgggggaacctgcaaaacaactctgggcctcagttttctcagtgtgcagtggggataataactgtgcttatctcagtaagctgatttgaagattaatgactgaatgtgaggaaggtgctctgtccttttatttgtagaattattagcattatttttcaggatttctcttttgtaatgaacttctatctattcattttatrtttttaaaaaataaataaatgttagtagtggaaagagcactgggcatagagccagaagaactatgttccttttactagtcctgaatatttaattaaggttgcttgagaattttcacttcctcacttcaggtttttttactttccttagtttttaaaaaatgaaggagctaaaccagagtaataatttcaaggcatttggaaatcaacctgtaaattaaaaatcatataaaggacaacatgatc

SEQ ID NO: 127457 - DNA, 587 bp, Homo sapiens
tctttctattatctaatgaagctaacttcatatagttttattttgataaatggaaatgactttcagattaagtatagccagttcttaatcagcagtttgctgtaaattttagtaaggttaatggtaacatgagttttgtggccatgggggaacctgcaaaacaactctgggcctcagttttctcagtgtgcagtggggataataactgtgcttatctcagtaagctgatttgaagattaatgactgaatgtgaggaaggtgctctgtccttttatttgtagaattattagcattatttttcaggatttctcttttgtaatgaacttctatctattcattttatgtttttaaaaaataaataaatgttagtagtggaaagagcactgggcatagagccagaagaactatgttccttttactagtcctgaatatttaattaaggttrcttgagaattttcacttcctcacttcaggtttttttactttccttagtttttaaaaaatgaaggagctaaaccagagtaataatttcaaggcatttggaaatcaacctgtaaattaaaaatcatataaaggacaacatgatc

SEQ ID NO: 127458 - DNA, 585 bp, Homo sapiens
ccccaaaagtctatacaattatccagctggctcaaaattcaaaacctcatgatcaaaaaaaaaaaaaaaaaaaaaaaaaaggccaggtctaaatgtgactcctgttgattcagagaagtactaactaatatagacaagtaatctgctctttatatactcattgttcaatgatgtaacagggattgcctaacaatattttttaattaaaaagttaggagaatgagaggaatataaaaggaactggtttataacaattcagatctcttcttgggcaaacagtagcaggtcctcccaccctgggataggcctagttttgcttcctaggtgtaagtccccattctgatgttctctttgcaaccgtcattatcattatccctacttattcacatctgaaagggacaagagaaaatatattttctctggtaacagtacagtttttctagtctgctttctgcctggccaaarttgggggctacttgtctttttcagtcttcacagtcacaatttctttttaatccagaatggtagtagagctctgtaaaaaactgtattttagtatttgaaaacacaatttaatttcaacca

SEQ ID NO: 127459 - DNA, 577 bp, Homo sapiens
ccaatgcagctatgttttaaggcaactgtaaatgagctaatgagactcataagcaattcgctggtcattcttgctaagctcctcacaagcattagacagtcatacatcctgtatcttgaaaactcactttgggacaagtttttcaaggtagacagaagaacacaccattcaagcttcaaacgatcttctcatgttgaccagacacagattttcaatacataaatcacttttcttctgcatggacattcctgaaacataactgaccccttagctgaactcaaactttaagacagatgtgtgtgtgtgtgtgtgtatgtktgtgtatgtatcttttttaagagatgggatctcgctatgttgaccaggttgctctcaaactcctggcctcaagtaagtgatccacctgcctccacctcccaaagtgctgggattataggtgtgagccaccatgcctggctcagatatgtatttttaatgttcatagtaagatatgtattttgaatgactattaggaattagaaactatttcaatatctaatatgtttactacattgttttaattgtggacaaatactac

SEQ ID NO: 127460 - DNA, 577 bp, Homo sapiens
ccaatgcagctatgttttaaggcaactgtaaatgagctaatgagactcataagcaattcgctggtcattcttgctaagctcctcacaagcattagacagtcatacatcctgtatcttgaaaactcactttgggacaagtttttcaaggtagacagaagaacacaccattcaagcttcaaacgatcttctcatgttgaccagacacagattttcaatacataaatcacttttcttctgcatggacattcctgaaacataactgaccccttagctgaactcaaactttaagacagatgtgtgtgtgtgtgtgtgtatgtgtgtgtatgtatcttttttaagagatgggatctcgctatgttgaccaggttgctctcaaactcctggcctcaagtaagtgatccacctgcctccacctcccaaagtgctgggattataggtgtgagccaccatgcctggctcagatatgtatttttaatgttcatagtaagatatgtattttgaatgactattaggaattagaaactatttcaatawctaatatgtttactacattgttttaattgtggacaaatactac

SEQ ID NO: 127461 - DNA, 584 bp, Homo sapiens
ctagtttatgtttattttcacctagttatcctcagctcagtactgaagtgacacttgggattaaattttctttcccaaatcttcctttatagtttcctctgtgactttttatcattttgtaaatcttttttttagattaaaaattgctttttgttatatgatttctgtttgtttgattactagggaattagaaaattgccgtatatatttattggccacttacttgtatttattcttttgtggaatgttcttttcccattttaatattggtgtgtttgtgttttcttaattgatttgtaagaactcagtggtaaaattaaattgggcrcccttgatttggctcgagttggacaacattatgctttttcttaagattatgagtgaaactagttttcttttacagaattcaattctacatgtccaattaaaaatttttaatcaaccatagtagtgttccaaaatttgtcaaaattgatgtattctttcaaaaatatactatgaaataaacagatcagttgcattaaaaagcaaggtgttgatctcatttgtttagtttgtctttgcaagtcacattttagaaaaat

SEQ ID NO: 127462 - DNA, 606 bp, Homo sapiens
tgcccaggctggtctcaaacttctgggctcaagcaatcctcctgcctcagcctcccaatgtgccaggactgcaggtgtgaggtatcatgcccatccagtttattgtaataataatgtggaatctgaaacattaccagtgaacattttctactctgttacattaagatttcttattctaatgttgcactttgaatggatctttttacacatgcatgatcttgtaacatcaagcactggtcatctggaaatgttcactgatttacgcattccaaatgttgaccctttcactatgaaacttttaaaacatcagatgttaaaataaccaccratctcatcagaaaattatttaagaataaagctttcaagtttacagtggcatcatgttttccaaaattcaaattttcactaaaaagttgaaattttaccactgacaacaaatactatcacttgttttccctgcagtgagaggttcactttattctttttcaagaaaatgtctaacaaataacaaagtctcaacaaccacagtttgtctgtcaatcattctttcaagtaaaataatggtgtttcataaaaataagtggccagttcagctggcaaccaaaa

SEQ ID NO: 127463 - DNA, 587 bp, Homo sapiens
atatcaacatcttatgtatgtatcagtttgtctgcggtgagaacatttaatcaaatcttagcaatgtttaaatatacaaagcattattattaactataatcaccatgttgtacatagatctccaaacttgttcattctaactgaaactctgcaatctttgaacatctccctatcctcctccagtcccagtctctattctttgcttctgtgagttcaaattttataaatggtatttatgaaaagcccacaattaacatcatattcagtgatgaaagactgaaagcattcttcctaaaatcagaaacatgacaagaatgtttcaacactgctgttcaacattgtactgtaagttttaaacagaactattagaaatagaaataaagaaaaaagaaatagaaagcatccaaactggaaaggaagaaagaaaactatatttataagtgacctaatcccaaatattcaaaacttcaaataatctacaataaagctactagagyaataattatgtattttgtacaattaatttataaaaaattctttaaagttgcaggatacaagatcaacacacaaaaatcagttgtttttaa

SEQ ID NO: 127464 - DNA, 606 bp, Homo sapiens
gcttacttattttatgtaaactttagcataataatgcaatattcacaaaatctttaaaaagaacaggccactctggttttataggcatgctgttgttttatacacagtttgttacagagcataaacatgctatattcaaaataagaataccagcagcagaaaacagcagaatgtcatgaccacttcaattaagaagtatagatatttgttagattaattaaaactccaggctttgattcagaaaaatattaactgcaattcagcctcarctagattccaaactggcaaaaagcaaacgtattaatatgtggtcaataatgactgacagccttagcaaaatctggtaaaaaatcaagaaatgattttctgggtataaagtttaagcatactataatccatttttcatctgctcataccctgtcagtggtattattatattgcctatggaactcaaattacaaagcaatctttctttgcttatgttataccatgccaagtaggcccaataattcagaaatataaaaccactaccactgcccattttcaatagaaagcaaataattggctaggtttttatttgaatagtagccttgctttccacagatc

SEQ ID NO: 127465 - DNA, 409 bp, Homo sapiens
gaattctgacagcttctggtttayacataccttctcccacttatacactcaaactctaatataagtactgctgtgaagggatttttttcagatataattaaggaccagaatcatttgagtttaatatagggagattatctgggggagtctaacctaatcacagagccctttaaatattaacctagatgtcagtggcagagaagccaaggtgattccaaagcacccttgatccttaaagaaggaagaggctgcatggcaaggaatgtggggacctctagcagttttgaatatcccttagctgacagcaagcaaggaaatagggacctcaggcctacaatctcaaggaattgaataccaataaaagtgagttccaaacagctgggggtttttcttcctcccacccttttct

SEQ ID NO: 127466 - DNA, 569 bp, Homo sapiens
aaaacatgaaaatacctagagatgatttttttttactataagaaaaaagtgtttgggaagctatcaaggatttttgttttgcttttttttttgctgttttttggtcattttatttgttttcttctattttaacaattctaaccttgatttatcttgggctgataaaagttagatattaaagacttcacttcccattatgggtgactgacaccaagagtccaatgactcacagggttgtgtctgaacattacctgaatttttcttcagtgcctcacagtcaacatgtccaaaagaaacaagtctccttcctaaaatttatttcttctactcaatttcccagccacagaatgcaaccaccattccctcaagttttctgagttaaaggtacatgatccacccttggcttctctatatttcctggtttactrggtgatatggcttggctctgtgtccccacccaaatatcatctgaaattgtaatccccatgtgtcgagggaagaactcaatgagagatgattggatcatggggacagttcccccatgctgttctcatgatagtgaaaaagtt

SEQ ID NO: 127467 - DNA, 548 bp, Homo sapiens
tttagggagaagaagaatgctttgtgacaatttaccttttaagttaccaatgacacttttgtatgacattaaaagtgttgctcctattattaatacttcatttgaattaaattcccaactcttattctggccttgttataggagaaataattcacatacacaaatagcagcagttgtgtacttaaaggcaagccaaatgcatatcatgcatcagaaatggaagtaccacctctgagaattcaggagtgttcacataatcggcacaggtttttacccaattgattaaattacattcctctgctttaactgagggggagtaattctaaaggttatgaaatcaatgcaagctgctcytggattgtattatttacttgaatttaggatccagattcttctcatcacctgaaagacaaatcatatttttctcctggagtccttcagaaattcccagagtaggctcaagtattacatgaataattcattttactcactacacattacagcacttaacaaaggctgcggccagagtctcctccttggggaagcta

SEQ ID NO: 127468 - DNA, 516 bp, Homo sapiens
gataatcagcatagtatggttccttgatttaattaaagattagagtcctttatgtagcaatagtaaaaaccctaataacactttaagaataacttacccagtggttctcaagcttggctgcatatgaaaatcatgggggaactttaaaagataataatgcctgaggtttcacccaaatacatcgctgtttaattgctctgtgcttgcagtgtatgaaatttttgtgtttttttttcattttttaaaaagttctccagcatgtagccaggcttgagaaatattgctctcaaaataccaaataaggcactgctttcaagttcctccagaactgcttgacactatgacattttattttcctaaaaaggtggcaatgatacatacaaagatatgtttgctcaatgcttaagtcagtcttaggcatcaaaaattgaagtgccttcaagcaaaaaytaaataatgcaaagtctgtttttattggagagcaagttagggggattctatctcaatgtgtttatt

SEQ ID NO: 127469 - DNA, 559 bp, Homo sapiens
tataaatattggtaaaataaatatagaataataattttttaagaatttattttttaaagcagttttaatttcacagcaaaattcagaggaaggtgcagggatttcccatatgtccttcagctccacccctggatagtctcattgacaaatcatcaaccaaatcartaccattttctgaaaagacttttcttcaatgtattgcctttgttgtttgtcaaagatcagttgatgatatttacgtaggtctatttctgggctctctattctgttccattgacctgtttatctactctttttccaatatcacatcatccaaagtccatagtttgcattaggtttcactcttggtgtagtatattgtatgagtttggacaagtgtataacaaaatgtatccattattatagtatcatacagagtattttcactgctctaacaatcccctatgtcacacctattcatcacatcctttccccatttcctggaaactgctcatcattttactgtgtctgtagttttacattttccagaatgccacatggttggaatcatatggtatgt

SEQ ID NO: 127470 - DNA, 378 bp, Homo sapiens
gaaggtgtcacaggaggatatttctgctggcactgctgaggtgggcagggctgtggacactttggtggtgggcagggctcagggcacttcgggggtggacatggctctgggcactttggcgtggggcacacaggaggtggctggcagggctgcttgcactgctgctgttgataagacatcctgctggagtctcaggatctgaaagaaatgatacracagtgttcgtgggaagggaatcctccagagagagaagccaaagcttatgtaataccatggcatattatttctccaatctccaaaaatttatttaaactcttagctctcttttcatgacttcctgtcttctcctttccactttagcaagtggcttcatcagcc

SEQ ID NO: 127471 - DNA, 557 bp, Homo sapiens
tgccatgcaaaattgaagaatttgctgccagatgagatcactgtgtgagataacacagtctgagtcacaccctgcgacaccccttctgagaacaccgcattcmaacaggaggcttatcacaccagtgcaggcactagaatggcagcagccctagtgccccccgcatctcagacaggctcactttacaagttgaggtggtgaacttgaaactcagagttccacacagagcagccacatgaggaacggccacaatatgaagaggggcagctaacagtcacagcttccccaagttaggacatccaggccttgatacatggagcgaggcatacttcacacatgcacacacacacacacatacacacgcactccatgggtctttatttatctatcatctatcttcatgtctaaagagcttagctttatgtttcttaacagtctgatagccttagattcattcctattatttctacttcctaattttgtaagggatcattaagtacgaattattagttcataaaaatgacaggaaagaacaaaaacttttatttggtgtaata

SEQ ID NO: 127472 - DNA, 608 bp, Homo sapiens
cctgtgtgggagtgtgggaagtgaaatatgtgtttgtgggtatggtgtgagtgttcaagtccttggctccatgtattgggggcatcagaaaaggaagatgagtgcagaacagatcactaggctggactatgcacaagcactgtttctttggaataatttttaaaaaggaatcaactaaacaaagatgatgatggcttgaagcgggcaccatctacactcacatgtgactcactgcaagtcattaagatataaacattaaggtaaaagaaaaaagccttgctctagctctgcctacccaaagtaacagattgggttggtggccctgaacatactcccacttccagcccaggagtgtcctgtgtgtacagcagccatacacattcacacacattctcagtgtcaggatcggccaccttctgactacagacctcacaaccagccttcacagtgttagttcctacttcacgctgagaaggcaacagaggttgaatcaaccagtgacgcacagccagatgtggagttaaaagttatttattgaaggaagactagggatggttcacttgatccytccccaaatccatcctcaaatgcacccgagcaacaagaag

SEQ ID NO: 127473 - DNA, 648 bp, Homo sapiens
ctggtgggtagggttgctacacaggatatgcacaggatagcctcccacaacaaagcatgatccaatacaaaatagcaatagtgctgaggtggagaaaccctgtattagacaaaagcttcctaaggccccaaaacacatctgcgctcatcagtgtacccctaacacctagtrgagtgccttacacaactttcctctagacacaggcccacaatcaccttgcaatttattattggggtccatgtttacatagaaagccattttctctggttccagacactttgaagctagtgtagtcttgtctcacagcaggatgaagtctcaactatatgcaagactttagccagaggtctttagagctcctgatcttagtgaattttcttctccaagctgttgaaaagaattctgtggtttgagtgatctacgagaaaggaagacaagttgctcacttcactgagctgattctggtgatccatatctgtataaaagcataggtgagtctccattgcctgggtgccttggagacatcagggatttaaaaggtcctgaggattaggaagggccttcaagacagactgttgagagtagggacttttaattctcatgtgttttgtcaccctagcttctcccaagagactgctggtagggtag

SEQ ID NO: 127474 - DNA, 631 bp, Homo sapiens
atttcatttcttaagtttattatgatagatttgtacctttcatatattttaaatactgtataacacattaaaaggtctgttacatccamattattacaaacaagtaaaactttattagcagtcattatcttcttcctagccatcatttatcatttcccataattacttttatcatttttcagaagcataatcttcctaaaaatatagttgtttacatttcaaatgggtagaggcagactatgttgtagaaaaacttgattgaaagagggtctttatttctttacattgaatggcaacaaaatgcaacagataaatctttcacatgacagaccaaagaaatttttccttaataagaatgaccataattaatcatctaaatgggaacacttttgagaaagaaatagagaaatattaagttaaattaaattaaatggagaaataataaatggggcaaatgaagtggaaagaggcactgtccgagacaaacttactcttagttgatcatttcactaaccaatgccctttgcttccgtcactgattgctaacctgggctttcttcttagcacacaaaagtacctgaataaacaatatattttgtgtccctgtcatagttttccctttataagggct

SEQ ID NO: 127475 - DNA, 631 bp, Homo sapiens
atttcatttcttaagtttattatgatagatttgtacctttcatatattttaaatactgtataacacattaaaaggtctgttacatccaaattattacaaacaagtaaaactttattagcagtcattatcttcttcctagccatcatttatcatttcccataattacttttatcatttttcagaagcataatcttcctaaaaatatagttgtttacatttcaaatgggtagaggcagactatgttgtagaaaaacttgattgaaagagggtctttatttctttacattgaatggcaacaaaatgcaacagataaatctttcacatgacagaccaaagaaatttttccttaataagaatgaccataattaatcatctaaatgggaacacttttgagaaagaaatagagaaatattaagttaaattaaattaaatggagaaataataaatggggcaaatgaagtggaaagaggcactgtccgagacaaacttactcttagttgatcatttcactaaccaatgccctttgcttccgtcactgattgctaacctgggctttcttcttagcacacaraagtacctgaataaacaatatattttgtgtccctgtcatagttttccctttataagggct

SEQ ID NO: 127476 - DNA, 466 bp, Homo sapiens
tgtctaggtagtttaaactaaattgatttcttgcaatcaaattgctcttgaccaacacaagtacactttatggttactgagtagaacagcaaaacaaacacagagtgttttttacttgcttattgtctgtctccctacaatagaatgaatataaagtgttgaactgctttatatacatgattttatttaatactctccttgctgtgaggtcggtgtattgatcaaagaggtctgcttcagcattcatttctaccccttcacaactcctgcacacacatgcatgctcaaacactgtgttcccacagtyacttaagctctttccctgcctctaacagtgaccaggtgggcagacttcatatttgtttttaaggaactagtttattcctaataccaaagaagaaaggacctctgcatgccagactgaaatgacatctaatttgtgagtgatacttccaaagaagcagaa

SEQ ID NO: 127477 - DNA, 466 bp, Homo sapiens
tgtctaggtagtttaaactaaattgatttcttgcaatcaaattgctcttgaccaacacaagtacactttatggttactgagtagaacagcaaaacaaacacagagtgttttttacttgcttattgtctgtctccctacaatagaatgaatataaagtgttgaactgctttatatacatgattttatttaatactctccttgctgtgaggtcggtgtattgatcaaagaggtctgcttcagcattcatttctaccccttcacaactcctgcacacacatgcatgctcaaacactgtgttcccacagttacttaagctctttccctgcctctaacagtgaccaggtgggcagacttcatayttgtttttaaggaactagtttattcctaataccaaagaagaaaggacctctgcatgccagactgaaatgacatctaatttgtgagtgatacttccaaagaagcagaa

SEQ ID NO: 127478 - DNA, 598 bp, Homo sapiens
tgtaaagcaatattctacgtgttttacaatagtaacaaagttaatctttaaaataaccctaggggctctgatgtaaccggcccaatgaacttctgttacttgcccagatcacaggctgggatgtggggagcttaactgtgggctctggyagggtgtctccagcacccaacttctttttgttttgtgtgtatgtttcataacctgcttatatttgcttacacattctttaaatatatgtgtacacaaagccacatgggtattttcagaggagcacatggaacattatacacatgtaagtaacacagtcattgcctcaggggcttttttctcaggtggcaaatctgttgcctctcagaggctctcagttaccctctcactaccttttcccagataaaaagtgtaccctgaagtgaaccaggctctggaatgttcctgaacctccttcctcacctcagaaagaactgccctcttaagggtctaatttattggaaaaataatacatcctaaaatgttaataatttcttataagttagtatcataaccttcccagataacatatctttaaatccataatatgcaaccttaatgaagagaaatt

SEQ ID NO: 127479 - DNA, 588 bp, Homo sapiens
caaagaagcgctgctacatccttagctggggagaaaaaaaaaaaaggactgtaaaatgcaaataaattgaggaggataccaaatgaggtatgattgcatgtactggatcgtggaaataagtgggagattagtggaaaaactgtcgaaatctgaataaatattgtagtctaattaatagtaatgtactaaggttaattttttagwtttgacaaatatatcatggttatgtgggatgttaaaatgaggagaagctgggtatagaatacacaggaattctctgtactaactttgcaatttttctgtaaatctaaagttattctaaaataaaacattcatactccaaaaaattagaggtgcaaaagatgacagagacttacagagagtgagagtttcagggagagagagagagagtgcaaaaagagggtattaggtgaagaagggaaggacacagacagccagagaagtgggactatattatagagaattttagctcatggttggtttctatttacttcctttgcagtcttgttagtctgtgcctttaaggaagttggatacaagtattcaaccattttctgctaaaatggt

SEQ ID NO: 127480 - DNA, 473 bp, Homo sapiens
acacacacacacacacacayatgtttcctatatatcttaatactacggtcctcacatggcctgttttgtgtgcacgcacatccctggtgtgtgtctcactctatatatcctagtctctccttataaggacaccaatcagattggattaaggcccaccttaacagcctcttttcaattaactctttaaaaaaccaatatccaaatatagtcacattctaaggttctggaggttaagccttcaaaatacaaatttttgggaaacacaattccatccataatagatggttttgttgaattcttatgtagttttgctgattttctgtcaattgttgagcagatggtgctgaaactttcaactgtaactttatgtgaacttgtctttttctcctttcaattccatcagttttcgcatcccatattttccagcttcattgtttgttgcatgcacatttaagattgctgtaccttcttgg

SEQ ID NO: 127481 - DNA, 622 bp, Homo sapiens
acaactcaaatggccacccaatgggtgagcagttcaacaaattgtggtatatccttataatggaaatgatattcatcaataagaaggaatgaactattgattcacatatggaatgraggaatctcaaaataattatgctgtatgaaaaaagccagtcccttctcctcctccaaaaaagtatatattgtattattttatttatgtaaaattttaggaaatgcaaactgatctatattaatagaaagcaggtgagtggttgctgggagatgagtggggcagttcagaaagtgtagagggagaattacaaagggatctatgcaaacatttgggagtgatgcatgtatttattatcttgattgtggtgatggtttcatgaatatatgtatttgtcaagaactaacaaatgtgtactataaaaacctgttgctagttatatttcaattatatctcaaaagtttatttttttaaaaagtgtaacaaaatcctttcctattatgcatgcatatttgaccttcagttaactttctagctgtgttcctctagcagttgcatagggtagaatgatacctatgttgccaggcaacactggttacggcaaaaatgatccctaattagaaaactg

SEQ ID NO: 127482 - DNA, 622 bp, Homo sapiens
acaactcaaatggccacccaatgggtgagcagttcaacaaattgtggtatatccttataatggaaatgatattcatcaataagaaggaatgaactattgattcacatatggaatgaaggaatctcaaaataattatgctgtatgaaaaaagccagtcccttctcctcctccaaaaaagtatatattgtattattttatttatgtaaaattttaggaaatgcaaactgatctatattaatagaaagcaggtgagtggttgctgggagatgagtggggcagttcagaaagtgtagagggagaattacaaagggatctatgcaaacatttgggagtgatgcatgtatttattatcttgattgtggtgatggtttcatgaatatatgtatttgtcaagaactaacaaatgtgtactataaaaacctgttgctagttatatttcaattatatctcaaaagtttatttttttaaaaagtktaacaaaatcctttcctattatgcatgcatatttgaccttcagttaactttctagctgtgttcctctagcagttgcatagggtagaatgatacctatgttgccaggcaacactggttacggcaaaaatgatccctaattagaaaactg

SEQ ID NO: 127483 - DNA, 606 bp, Homo sapiens
atttatatatgagccaggagcttatttgaaccagcctcactgatgagctgttaaattcaaacaattatagggtatgaatcaaaaataaatgtaattttcatcactgctgtcttctctcagggggcactcacaagagattcacttaygaccaccaattctactcatttccccaattcactcatcaccaaaaacctacaggcaaaacatttaatattcttttgtttccatagccccactttctctaagctctgaactgtgtgagtaaatctgacctctctgggcttcttttaagttcacttgcttcactcattgttctaattctctacaaaatgcatgctcaaggatttaatggaacaagaatgtgaattggaaacggggaaattctgaagatgcacattaagaacttttctccactgcatatttatatttttgtctgttacatacatatcacagtgtttcagtggtgcaatcacaatgtttttgttgaggaaaatatcaaagagctgtctaaaatatcaatggaatgtcaagagaactgatttaaactttattttgctgaaaaatacacgaacaacaaaatggaagaaggcgctgacaaatacgaaa

SEQ ID NO: 127484 - DNA, 668 bp, Homo sapiens
agttgtttccgcaaaggtcagttgaaatttgcatttggatttttcttcctggggtgcttttaatgataggatcaggtcctcaggctcttgtagtaaaatatgccctccaaatttgtcaattatgttaaggtaaaatctgggttgaagaaatgttaagaaaaaaatgtacacagaatatttaccacacacatagagagtagctgtaagatawctcaatgagaattgtgacattaatctacccttgcaattaccctgttaattggaaactcgattatcaaaattagagttcattaaaggtaaaatgtttcttctgtaaatttcacatcctgtacaagataatagaaaatatgatgctcagtggggagactattttatccacttgattctttttatggcttacatttctgaatactaaattgtgattatctgtctcattcattctttttaaagaactcatcatcaccattgtttttatttatataaagttagattgctttcataaactatctaatcccaactctctgcactgtgcagtgtttgagtacacttaatttacttcacatttttcactttttattgcttaaggaaataaagcagaatttcaagattattaaaagccaatttagatctatataccattccattattgacccaatttaataatattt

SEQ ID NO: 127485 - DNA, 668 bp, Homo sapiens
agttgtttccgcaaaggtcagttgaaatttgcatttggatttttcttcctggggtgcttttaatgataggatcaggtcctcaggctcttgtagtaaaatatgccctccaaatttgtcaattatgttaaggtaaaatctgggttgaagaaatgttaagaaaaaaatgtacacagaatatttaccacacacatagagagtagctgtaagataactcaatgagaattgtgacattaatctacccttgcaattaccctgttaattggaaactcgattatcaaaattagagttcattaaaggtaaaatgtttcttctgtaaatttcacatcctgtacaagataatagaaaatatgatgctcagtggggagactattttatccacttgattctttttatggcttayatttctgaatactaaattgtgattatctgtctcattcattctttttaaagaactcatcatcaccattgtttttatttatataaagttagattgctttcataaactatctaatcccaactctctgcactgtgcagtgtttgagtacacttaatttacttcacatttttcactttttattgcttaaggaaataaagcagaatttcaagattattaaaagccaatttagatctatataccattccattattgacccaatttaataatattt

SEQ ID NO: 127486 - DNA, 542 bp, Homo sapiens
gaattccagattttgcatttctctttrccttttatttttgtctaaaaaagaaaggaactttctaactgccttcttctaatgctggcattgagcaagtctttaaattcctctgaaaacatgaaattacaacttctagtataactcatatcaccatttcttaaatcgcattctctttgacacatttattattttatggttgcattgctagatatctccattactgcactaattatctcaagtctagcagaactttttaatctaaagaaaggtgtgcttgctgtctcacagatgatttcatggaggccagaacaaggaattgtatttgctggaagtatgctagttagtcatttatttagcttaaaggatgatgtagctttagaaataaaagcaattcctgcactcatttctcagcattcactggtgccagaaaataggtgggaaacttggctgttaggatagctggtattttcctggacaatttccaaaatttggatgagttgttattaaaagcaaagtctgtctggtttacatagacataaaag

SEQ ID NO: 127487 - DNA, 525 bp, Homo sapiens
acattaaattaacacaacagagtgtgcagctaaggttgtatgaattcttcctccctaaattcaaagctcatggcttagtgagggtgccacatttaaaaaattattactttaagaaaatttatgatacatagataaatgtctacatctgtatctgtacctcttgtgtacctgatctttctcccaatttccctgtttcaacagaaaagataacattcatacagctaacttcatcatttgctgagtaatatttctattaacccacttggcctaggttatgaggaagtagatatratctaatataaatcctattttgtcctctttcactccagtctcaggcaggttttgacacagaagcacttccaaacatttagcgtttcagtgaaacacttttggaggtgctggtgccacgtggatgtcaggagaggaacgactattgtctgtacattcgtcctcaatagatgtgctttttgacagaaagcatggaaggcttttgatggagggaattagtcatagtctggtgtttca

SEQ ID NO: 127488 - DNA, 630 bp, Homo sapiens
cacacactgggccccatttcattaaagatagtggctacagactcccacatagaagtggatggccaacccaggattttcctcttcacccatcccattgtcttggcactcatggggatttcctcaacctcatactgggcttgccaattgtcgtacagacccctattaacttcagtagggatagcaccatgttcaagaggcygaggaaaagacctggctccagcaaaggacatatgggtgggggactgggggacttatatcagggatggtctagtgctggacaagagaaacagttccatttgtaaaaagcatacagtttacatagatcacgtgtgtctgtgttctcagggaatgcttaagttattgctatcaggtgcatctcccaaaaagctataaatagaaggaggtagtgtggtctgtcaaacaattcaggaatgatttttttggctaatataagcaccacatgaaaaccctcagaaggttcgatctggtttccccaagtctcaatgagtaaggttgaagatggtgaaaactgatgcaagttctaaaacatgctatttgaaaaactttagtaaattcttctatcatagtacagcaaaaagctcatggcagtgctaatagagagtgaaaagg

SEQ ID NO: 127489 - DNA, 627 bp, Homo sapiens
ttttcacactgctataaagagctacctaagactgggtaatttataaagaaaataggttttattgacacgtacttgaacgtggctggggaggcctcaggaaacttacaatcatggcagaaggcaaagaggaagcaaggcatatcttacatggtggcaggagagagagagagygagggagaagtgacacatttttaaatcatcagatattgtgagaactcactcactgtcactagaacagcatggaagaaatctgctctcatgatccaatcacctcccaccagatccttcttctgaccccacatgaggattacaatttgagatgagatttgggtaggcccacagagccacccaacattggcaacaactatagatattttgtgtacacaggttgtgagggattttctgatgatgtaaaatctttttaacattaaactattgaaattatttaagtataaataaatttcaataaatactgtagatcaatatacatttgaaagataaaaacaaatacaagaaactatttgacgggaggtgccacctgctaattcattctataggtgaagaaggagaaagcatttctaattattctttataaacacatataaatgaatgacagaagctaatggc

SEQ ID NO: 127490 - DNA, 451 bp, Homo sapiens
ggcattgctgctgggaagctggtgggagtcatggcagctggaatgagtcaaatactgttcatctagtgagtmctccaggacttcatccatttcttcctcctggacttccctcttgagccaggtgaagtaggcaagacaagggattaaaccagggcagcctggaaccacatagctagttctgatctgaagctcatggaagaggcaccaaaaccaaagggaccatcacatcaaagaggaagtatacagtccacttttgactgggagtaaagtgtgcctagagttagtatagaagtgaaaaaagcaagtgatcagtgcattgacctcataacacacagataaggcagcagactcaacaactactctacaatacgctcacggcacacaggacacacagtgacccatactgtcggcttcaaaatgctgtttaaattttatttaatatgatgtggag

SEQ ID NO: 127491 - DNA, 595 bp, Homo sapiens
ttgttaaacatctcaaataagatgtatcccaggtatttgtgtcaaatttggattattttggttttgtctttgcagaatataaaaaactaacgtgaggtaarcactaaggtctggagatggctgtgcaagagatgacaaagtccaacaccacgctggagagtgtccaatcatctcttctggggcagcatatttttctacaatactgaatttggaaaacaacagcaacaacaacaacatcaaaagcaaacaaataaacaaacaaaaacctacaagattcatgaaactggacaactgtctttataacattaccagtgataaaaccagtaaggaaggctggtttgcagtcatctgagaagcctctttcatttcataaatatggtttctctctgacattgaacggcttccaatttcaagcggaatgctacatgacaaggataaggatgtgaagagaaccggtttcttttgtaatcctaaacgttctcgtctgagaattaaaagccattatttgaagaacggtgcccaggctccaggtggccactgaaaggttgctccgcagcgcaggctaaggaccagcttcttcgggcgagaacagatg

SEQ ID NO: 127492 - DNA, 608 bp, Homo sapiens
tgtctttgcagaatataaaaaactaacgtgaggtaaacactaaggtctggagatggctgtgcaagagatgacaaagtccaacaccacgctggagagtgtccaatcatctcttctggggcagcatatttttctacaatactgaatttggaaaacaacagcaacaacaacaacatcaaaagcaaacaaataaacaaacaaaaacctacaagattcatgaaactggacaactgtctttataacattaccagtgataaaaccagtaaggaaggctggtttgcagtcatctgagaagcctctttcatttcataaatatggtttctctctgacattgaacggcttccaatttcaagcggaatgctacatgacaaggataaggatgtgaagagaaccggtttcttttgtaatcctaaacgttctcgtctgagaattaaaagccattatttgaagaacggtgcccaggctccagstggccactgaaaggttgctccgcagcgcaggctaaggaccagcttcttcgggcgagaacagatgccggggcgggagggaaaaaagggagagacagacatcacttccccctgccggctccggcagcgggttggtaggctgag

SEQ ID NO: 127493 - DNA, 571 bp, Homo sapiens
gaactttccatagttccaacattagttgctacttgaaacaaacaaaaacacacacacacatacaacgaaacaataatctttggtgaggtcttgctgatacctaactgaggctagagtgagagctaagtggtgatacaggccaggtgtaaactgagtgcagctaartggataatctctggtagtgaactacagtctagaagaagatagtaataatagattgaaaagaaagtctcctgaaatgaactagctggcctgtggtgtaggacacaggaccccagccaccttatggttctaaaagccttgctcaaagccgctgcagatgagttagctaggtctctaccacctccataatactcctctggagagaaataaaggtctttcacacctcccaggaagtgatttgcttagcctcaaatgtgcacattcagaaatagcttgtcataagaaagagaggatagtttgcagagaaataacccttctaagtccacatcctattccttttaaataagagagtggtgccaagggaagagccctagaatgtcaaagccaacagggtgctcagataccaccc

SEQ ID NO: 127494 - DNA, 616 bp, Homo sapiens
gtacatgttaatgattacatgtatttgtagaaatggcattctattgttaatagtctgagatgcatgacctctaattaggcatgaaacaaacaacagtaaactttacacatttttcataatcatattaggggtttattgccatataaattgcttaygtaaaatctatatgatttattacataatcccattagatacattttattgctttcctgtggttttgtgctttgccttaatattatgtttgagcaccccttggagtttatattagagcatttaaaaatcatcagtactaaataaccaagcagaacgcctagtacaagagagaaacaaagctacattgccatctttagatcaaatcttccttacctgattatctggatattctgatgagaattaactgagctcaaggttgtgctgacaccttgtgtctaaatatatttgagagaaattttgcaaagttgaaagaattcaaatataaaactgaatgtgtagctctatctacttcaccattcctatggtttaaattattttcttgattatgctcgatcacccatttcactttccatttgctaccatactatgtgctattgtttggtgttgcaatataaaaaaaatt

SEQ ID NO: 127495 - DNA, 616 bp, Homo sapiens
gtacatgttaatgattacatgtatttgtagaaatggcattctattgttaatagtctgagatgcatgacctctaattaggcatgaaacaaacaacagtaaactttacacatttttcataatcatattaggggtttattgccatataaattgcttatgtaaaatctatatgatttattacataatcccattagatacattttattgctttcctgtggttttgtgctttgccttaatattatgtttgagcaccccttggagtttatattagagsatttaaaaatcatcagtactaaataaccaagcagaacgcctagtacaagagagaaacaaagctacattgccatctttagatcaaatcttccttacctgattatctggatattctgatgagaattaactgagctcaaggttgtgctgacaccttgtgtctaaatatatttgagagaaattttgcaaagttgaaagaattcaaatataaaactgaatgtgtagctctatctacttcaccattcctatggtttaaattattttcttgattatgctcgatcacccatttcactttccatttgctaccatactatgtgctattgtttggtgttgcaatataaaaaaaatt

SEQ ID NO: 127496 - DNA, 609 bp, Homo sapiens
ttattttcaagaaagaagaaattcatttgaccctggctctgtagagtgcagcttacgggggactcttctttctccaaatactatctggtaagcttattccagagttattgttttgcaaaaatgtaattatttcaaggctacactttgaaatcccatgaacagagagtaraaataaaatgcatatggtaagaggaggattttttttctttgaggctgtatgtatgaggaagggtatgacccagtgaaatacgacagttatttgctctgtctttattccttccagtaaacaaatggctttaggtcctcacacccctaaagagcagtctttcatgggtaactaggaggagggaagatgaattgaaattgcaacagaaaaacttaccctactagacaagtcacatacaagaggaggtgtcccaagaggacatgaggaatatagtctctgagcagctgcttgcctttctgaattttgttctgtcctgcacaaaattcacttgaatgtgtcttctccgacatctgattagcttggtacctaagtgccttccccaactaagagtccacttagcagtgcaattgaatggccaggaaatgaaaaagaaatatgtcatg

SEQ ID NO: 127497 - DNA, 609 bp, Homo sapiens
ttattttcaagaaagaagaaattcatttgaccctggctctgtagagtgcagcttacgggggactcttctttctccaaatactatctggtaagcttattccagagttattgttttgcaaaaatgtaattatttcaaggctacactttgaaatcccatgaacagagagtagaaataaaatgcatatggtaagaggaggattttttttctttgaggctgtatgtatgaggaagggtatgacccagtgaaatacgacagttatttgctctgtctttattccttccagtaaacaaatggctttaggtcctcacacccctaaagagcagyctttcatgggtaactaggaggagggaagatgaattgaaattgcaacagaaaaacttaccctactagacaagtcacatacaagaggaggtgtcccaagaggacatgaggaatatagtctctgagcagctgcttgcctttctgaattttgttctgtcctgcacaaaattcacttgaatgtgtcttctccgacatctgattagcttggtacctaagtgccttccccaactaagagtccacttagcagtgcaattgaatggccaggaaatgaaaaagaaatatgtcatg

SEQ ID NO: 127498 - DNA, 536 bp, Homo sapiens
tgcttcagttcatttttgccatttatcaactcccgttttagaaaatcatttgacatgggagcccagctcctcctgtgggcagcatgagtggcctgtcatttaatagacagtttttcttgtcctcaggtcaaaaggtgtttggttttgactcagaagctgctggaataaatgcagtctttagtaggaaaagtatttattaatctgttgaatccaaagccacctgtgttttgaattcccataraagtatttatgttcaacctaaagccacctgtgttttgaagtcccatttgccagcctaagggaggtgacagtctagcttgtccctcagcgtgaagggaagtcagagccatttttagttttccttgtggagttgcagggaacactgagcagggagaatcccccttgagggacacttattaactgatctcgtgctgggattggatcctggagtgaattcatatacattgggaatgagtggcaagaagcagtttgggaatagtactcttcaaatggaaatgaggtttgaaaggggaacc

SEQ ID NO: 127499 - DNA, 487 bp, Homo sapiens
acaataatctataaagcattatttcaaaaaaatttaaaccccactctgaacaaacctctggatttaactaccaactcataagaaataaaggggacagaggaacatgttcaatgataccacagagatgcagtaagcaaaattcaaaatataaaaaattctgcaggacagcctagtgtattcaacaaataaattataagggaggaaggaaaaaaggacagagaaaggtaactatagattaaaagtgacttaaggaacaaatcaattaaatgcaatatatggaccttgattagatcttgattcaagcaaatcaattgtaaaaraaaaaatcctttatgagacaatgggaaaaacatgaatactaagtggatatttaattatatcaaaattaaattttaagttaaattttaaatgtgagaggtaataatagtattttagtaaaacaacaaaaatatgccatcttttagagatacatacatatgcatataca

SEQ ID NO: 127500 - DNA, 487 bp, Homo sapiens
acaataatctataaagcattatttcaaaaaaatttaaaccccactctgaacaaacctctggatttaactaccaactcataagaaataaaggggacagaggaacatgttcaatgataccacagagatgcagtaagcaaaattcaaaatataaaaaattctgcaggacagcctagtgtattcaacaaataaattataagggaggaaggaaaaaaggacagagaaaggtaactatagattaaaagtgacttaaggaacaaatcaattaaatgcaatatatggaccttgattagatcttgattcaagcaaatcaattgtaaaagaaaaaatcctttatgagacaatgggaaaaacatgaatactaartggatatttaattatatcaaaattaaattttaagttaaattttaaatgtgagaggtaataatagtattttagtaaaacaacaaaaatatgccatcttttagagatacatacatatgcatataca

SEQ ID NO: 127501 - DNA, 644 bp, Homo sapiens
gcctggcttctcgtcctgacactgccacttactagctgggtgattttggactttttaattaaaaatatgtgtataataacagctgtctggaggctctagggagaatctgttttcttcctttttgcagctgctagaggccacctgcattccttggcttattggccctttcctccatattcaaagctaacaatattacccttctctgaccctgcttttgtcgtcacatctgtctgatctgatccagggcaggttttccagttttaaggattcctcatttrattagattgggcccacttggataatccagattgatctctgcacctcaaggtcctcacatctgtgaagtcccttttggcataggagttaacatattcataggttccagggattaggatgtaaacatctttgggtggccattattctgccaaccacagatttgaggagacaaaagaaggtgaatgtggctgagtccttggcagggaggagatgggactggagagggagccagggagagaggattctgtaggtcatcataagttttgaagttcctcccaacagtaagaggaagttatggtcagatttattgccccaaatctgaaatcagctgtttctccaaggagccctggttagctgttttaaagtga

SEQ ID NO: 127502 - DNA, 551 bp, Homo sapiens
attccattccattgcattccattccattccattcgatgccattcgattccattccrtgccaaatcattgcattcctttccattccgttcctatcaattccattccattcgatttagttcgattctattcacttccattccattcgattccattccattggagtcaattcctttcgacacccagcctttccagtcaatgattttggattccatttttttgcattccattacattctatgacattcgattccgtttcattgcattccattccatacatttttattccattcgagaccgtagcattccactttattccaggcctgtccattacactacattcccttgcattccaatgaattccattccattccaatccattcctttcctttcgcttgcattccattctattctcttctactgcatacaatttcactccattcgtttccattctattcaattccattccattcaattccattccatttgtttccattctcttcgattccatttctttatattccatgccattcgattccattctattggattgca

SEQ ID NO: 127503 - DNA, 390 bp, Homo sapiens
tgattttggattccattttkttgcattccattacattctatgacattcgattccgtttcattgcattccattccatacatttttattccattcgagaccgtagcattccactttattccaggcctgtccattacactacattcccttgcattccaatgaattccattccattccaatccattcctttcctttcgcttgcattccattctattctcttctactgcatacaatttcactccattcgtttccattctattcaattccattccattcaattccattccatttgtttccattctcttcgattccatttctttatattccatgccattcgattccattctattggattgcattacattcgtgttcattccattccagaccattcca

SEQ ID NO: 127504 - DNA, 551 bp, Homo sapiens
attccattccattgcattccattccattccattcgatgccattcgattccattccatgccaaatcattgcattcctttccattccgttcctatcaattccattccattcgatttagttcgattctattcacttccattccattcgattccattccattggagtcaattcctttcgacacccagcctttccagtcaatgattttggattccatttttttgcattccattacattctatgacattcgattccgtttcattgcattccattccatacatttttattccattcgagaccgtagcattccactttattccaggcctgtccattacactacattcccttscattccaatgaattccattccattccaatccattcctttcctttcgcttgcattccattctattctcttctactgcatacaatttcactccattcgtttccattctattcaattccattccattcaattccattccatttgtttccattctcttcgattccatttctttatattccatgccattcgattccattctattggattgca

SEQ ID NO: 127505 - DNA, 390 bp, Homo sapiens
tgattttggattccatttttttgcattccattacattctatgacattcgattccgtttcattgcattccattccatacatttttattccattcgagaccgtagcattccactttattccaggcctgtccattacactacattcccttgcattccaatgaattccattccattccaatccattcctttcctttcgcttgcattccattctattctcttctactgcatamaatttcactccattcgtttccattctattcaattccattccattcaattccattccatttgtttccattctcttcgattccatttctttatattccatgccattcgattccattctattggattgcattacattcgtgttcattccattccagaccattcca

SEQ ID NO: 127506 - DNA, 504 bp, Homo sapiens
gaattccattccattccaatccattcctttcctttcgcttgcattccattctattctcttctactgcatacaatttcactccattcgtttccattctattcaattccattccattcaattccattccatttktttccattctcttcgattccatttctttatattccatgccattcgattccattctattggattgcattacattcgtgttcattccattccagaccattccatttgactccattcctttcgagccctttcaatttgagtccattcctttccagtccatttcactccaggccattactatccattccataccattccatcccattccattccattccattccattccattccattccattccattgcattccattccattccattccattgcactgcactccattccattacattctactctatctgagtcgattttattgcattagattctattccattggattactttccattcgattacattccattcatg

SEQ ID NO: 127507 - DNA, 551 bp, Homo sapiens
attccattccattgcattccattccattccattcgatgccattcgattccattccatgccaaatcattgcattcctttccattccgttcctatcaattccattccattcgatttagttcgattctattcacttccattccattcgattccattccattggagtcaattcctttcgacacccagcctttccagtcaatgattttggattccatttttttgcattccattacattctatgacattcgattccgtttcattgcattccattccatacatttttattccattcgagaccgtagcattccactttattccaggcctgtccattacactacattcccttgcattccaatgaattccattccattccaatccattcctttcctttcgcttgcattccattctattctcttctactgcatacaatttcactccattcgtttccattctattcaattccattccattcaattccattccatttgtttccattctcttcgattccatttcwttatattccatgccattcgattccattctattggattgca

SEQ ID NO: 127508 - DNA, 571 bp, Homo sapiens
cccttgcattccaatgaattccattccattccaatccattcctttcctttcgcttgcattccattctattctcttctactgcatacaatttcactccattcgtttccattctattcaattccattccattcaattccattccatttgtttccattctcttcgattccatttctttatattccatgccattcgattccattctattggattgcattacattcgtgttcattccattccagaccattccatttgactccattcctttcgagccctttcaatttgagtccattcctttccagtccatttcactccaggccattactatccattccatacmattccatcccattccattccattccattccattccattccattccattccattgcattccattccattccattccattgcactgcactccattccattacattctactctatctgagtcgattttattgcattagattctattccattggattactttccattcgattacattccattcatgtacattccattccagtcaattacattcgagttcattacattacattgcagta

SEQ ID NO: 127509 - DNA, 555 bp, Homo sapiens
gcattccaatgaattccattccattccaatccattcctttcctttcgcttgcattccattctattctcttctactgcatacaatttcactccattcgtttccattctattcaattccattccattcaattccattccatttgtttccattctcttcgattccatttctttatattccatgccattcgattccattctattggattgcattacattcgtgttcattccattccagaccattccatttgactccattcctttcgagccctttcaatttgagtccattcctttccagtccatttcactccaggccattactatccattccataccattccatcccattccattccattccattccattccattccattccattccattgcattccattccattccattccattgcactgcactccattccattacattctactctatctgagtcgattttrttgcattagattctattccattggattactttccattcgattacattccattcatgtacattccattccagtcaattacattcgagttcattacatt

SEQ ID NO: 127510 - DNA, 530 bp, Homo sapiens
gaattccattccattccaatccattcctttcctttcgcttgcattccattctattctcttctactgcatacaatttcactccattcgtttccattctattcaattccattccattcaattccattccatttgtttccattctcttcgattccatttctttatattccatgccattcgattccattctattggattgcattacattcgtgttcattccattccagaccattccatttgactccattcctttcgagccctttcaatttgagtccattcctttccagtccatttcactccaggccattactatccattccataccattccatcccattccattccattccattccattccattccattccattccattgcattccattccattccattccattgcactgcactccattccattacattctactctatctgagtcgattttattgcattagattctattccattgkattactttccattcgattacattccattcatgtacattccattccagtcaattacatt

SEQ ID NO: 127511 - DNA, 541 bp, Homo sapiens
tggattaaagagacatgagacctactggctagtcacaatgtatgaaatatgctggaacctttttaaacattttattttatttacttttaattgacaaatgaaaattgtatatgttggctgggcacagtgcctcatgcctatgatcccagcactttgagaatctgaagtggaawgattgcttggggccaggagttcaggaccagcctggaccacatagggagatcccatctctacagaaaacttaaaaattagccaggcatggtggtacctggatatagtcccagctgccctagaggctgaggcaggaggattgcttgagccgaagagttcgaggctacagtaagctatgatggtactactgcactccagtctgcgtgacacagcaagaccccatctctatttttttaaaacgtatacatttattgtgtacaacatgatgttttgaaatatgtatacattgtagaatagctcagttgagctaattgacatatgttgaacagtaactggatatttgtgagtgttaggtaatgactatgaattc

SEQ ID NO: 127512 - DNA, 541 bp, Homo sapiens
tggattaaagagacatgagacctactggctagtcacaatgtatgaaatatgctggaacctttttaaacattttattttatttacttttaattgacaaatgaaaattgtatatgttggctgggcacagtgcctcatgcctatgatcccagcactttgagaatctgaagtggaatgattgcttggggccaggagttcaggaccagcctggaccacatagggagatcccatctctacagaaaacttaaaaattagccaggcatggtggtacctggatatagtcccarctgccctagaggctgaggcaggaggattgcttgagccgaagagttcgaggctacagtaagctatgatggtactactgcactccagtctgcgtgacacagcaagaccccatctctatttttttaaaacgtatacatttattgtgtacaacatgatgttttgaaatatgtatacattgtagaatagctcagttgagctaattgacatatgttgaacagtaactggatatttgtgagtgttaggtaatgactatgaattc

SEQ ID NO: 127513 - DNA, 420 bp, Homo sapiens
cagcaattggagtagaaatcggctgcagctttgtcccatgtccagaattcctggggtccctagaactactaaatacarggtagtgctctgctttcgctggactggggttggtctgggaagcccatgtgaaaacactccccaaggagtgcttgcctcagctcgttcctgtcattccacacatactctctgactcagacagtctttgggtcctgccctgctccatggcgtgagaacacatgtcctgcctacagttgtgccctggggttaggtatagaaaacctgttgcaggcaatgataggcaaaggaaagggaactaatcattacagcatgctctaacagacccaaactgagattcactcaaatttcgtccaccatttccatcttcaccaccagctctagtctcatccaccatctcccata

SEQ ID NO: 127514 - DNA, 586 bp, Homo sapiens
tgggatcacatcaagttaaaaagcttctgcacagcaaagaatacaaacagcaaagtgaagagacaacccacagaatgggagaaaatatttacaaactgcccctctgataagggattaataaccagaatatataaggagcttcaaacaactctataggaaaatatctaataatctgatcaaaatatgggcaaaagattgaatagacatttttcaaaagaagacttacaaatggcagactggcatatgaaaatgtgctcaacatcattgatcatcagagaaatgcagatcaaaactacaatgtgattattgtctcaccgtagttaaaatggcttttatccaaaagacaagaaataacaaatgctggtraggatgtggagaagagggaacccttgcacactgtttctgggaatgtaaattagtacaaccactgtggagaacagtgtggaggttcctcagaaaactaaaaataagagttaccatatgatccagcaatcccactgctgagtatatacccaaaagaaaggctaacagtatgtcaaagagatatctacacttctacatttgttgcagcactgtttacagtagc

SEQ ID NO: 127515 - DNA, 580 bp, Homo sapiens
tttttcatttagtcttgcctatgtgtttcttacttcatatggggaattacgttttatttccttatgtaggatattcatacaaattatttacttcaggttattccaagaaagacaagggttttgttgtacaatgctgtgcattcctgtttgccttgaaccaaagtttcacttatgttctaggaacatgagagagccagagaggtacagcctmacaactagatagtgggaaggaatattgataaaggagaaagagggaaggctataaatcgtgtgccaagaaaggagaatagcagaccaatgtgagctgaaaatgcagagggatgtaggatagaaggaagctgaaaccaacagacactcagggcacaccatgaaatccaattggcacagtgagctcagtcaagtagaattttcttaaaaagtcaagcttatgcatcaccacttgacatagaatgcattttagtggccatcttcctatatactaattcaaatgtgtttatccatatgcagtagtgttgacatgcacttacaggcagatcattgctgtatcttacttctttcaccctcaaaatgaaaggttatt

SEQ ID NO: 127516 - DNA, 543 bp, Homo sapiens
tgagtgttgttttgataagttgagyatgtggttatgttcaggtgaaggtgaaaagtaagaagtcagaagtactggcctgaagtttgtaaagtaaatccgagctacagatacagtattggaagccagtgtgtatggtggtccacaggtgtggataatataaattaagtcttgggtttaaaccaaaaagaagagttctaaatggaaccttgaggaaccattatttaaggtaataggtgtggaaaagaccgtgagctcagtgaaaagcattgaataagtttaggaatgagtaaccagagatgaagaaaaaaaaaaaaagcagacagcggtgctatgtttcattgttttttaattttataattggtaatttccacttttattccttatttgctgctgtgaaatgtcacacaattatttaggattctgaaaatagtggaattttctacttctacttaatttttctcatatcctttttgaattatatgctcatgaatgtttttacattgtaaataagtcagtaaatacacacacatatacatagatggg

SEQ ID NO: 127517 - DNA, 635 bp, Homo sapiens
  misc_feature (1)...(635): n = A,T,C or G
tggcgattcaaatatggtggtcaatgtgacatttgaacatagacttacagaaggtaacagagttcactatacagataggtagggaaaaacattccaggctaaagcatcatctatttcaaaggcctgaagcaagaatttccttgcctgttggagaaggggagagggcgccaccatgtctggagccaatcgacaattggagagagtcctgngagataaaacagagaggtcaatgggctcatactatgtaggatttgtgggccattgtctggaccacatttttgctgtaattaaaatgggaacactggaaagttttgtaatgggcagtgacatgaactgactctggcttakatttcaagaggaccactggggctgctgccttaagaatagcctgtagtgacacaaggtcctaagcaggaatccaaattgagagtctggtgcattactgcaggcaacagccaaggtgcctaggatcagacatagagttagtaacaagtattcggatcctatttaaattgaagcttccatccttgcattattgcagaatgtcccccaccagttcttctctccagtcctccacccattcctcttcccacatatccttcttgatgccgtctgcatgatctatccaaaccata

SEQ ID NO: 127518 - DNA, 608 bp, Homo sapiens
gactgttttacccactgacatatccctagcactgagcttgtggcacattttaggtacacaataaatatttattgcatattgccatattagaattactgatgaagacccaggaggctgtctttaaaggaagggattttttaaaatgaaaatgttagaaaaggtttcgaagaacaagttgcatttgaattgaggttagattaaatgataggtaatatttgagtgtgtggatgagggaaaggtacctgtggtggtgattactgagtgtgaaaagccaacgatcctcgaaaataagacatctaccaagaacacygtctttcaatttgggtggaatttggaaggcttgaaaagaagatatgttcaagttactgggaggtaacttgggatgtataagataagcagaaagcctatttgggtcactgaggttaagcaatgaatttcttccctttcttgagcaaacaggcagatccttgatatgttacatttagatatgtgcagtagctttaatatcttcttccagaattcttccagtgacagtctttctgcttatcaagctggctaagggaaatcaaatcaacaaacctcatttcttattgaggtgggccagatac

SEQ ID NO: 127519 - DNA, 635 bp, Homo sapiens
  misc_feature (1)...(635): n = A,T,C or G
tggcgattcaaatatggtggtcaatgtgacatttgaacatagacttacagaaggtaacagagttcactatacagataggtagggaaaaacattccaggctaaagcatcatctatttcaaaggcctgaagcaagaatttccttgcctgttggagaaggggagagggcgccaccatgtctggagccaatcgacaattggagagagtcctgngagataaaacagagaggtcaatgggctcatactatgtaggatttgtgggccattgtctggaccacatttttgctgtaattaaaatgggaacactggaaagttttgtaatgggcagtgacatgaactgactctggcttatatttcaagaggaccactggggctgctgccttaagaatagcctgtagtgacacaaggtcctaagcaggaatccaaattgagagtctggtgcattactgcaggcaacagccaaggtgcctaggatcagacatagagttagtaacaagtattcggatcctatttaaattgaagcttccatccttgyattattgcagaatgtcccccaccagttcttctctccagtcctccacccattcctcttcccacatatccttcttgatgccgtctgcatgatctatccaaaccata

SEQ ID NO: 127520 - DNA, 222 bp, Homo sapiens
gatgtgtttcctttttgtttttgtctgtgtacattttacataatggagatttcgacttgtatacaatttaaaaatcatatgtttatttagtctttgtcacaaaaatatccccattattaaaattcctcataaatatmatttagaaagaattttattaatgtttcctctattattagatatttatgaggctcaattttcattattaaaaagaatgctgaggta

SEQ ID NO: 127521 - DNA, 597 bp, Homo sapiens
tgccataatgatacaatttttttttctcttcctctctgttgagccactcctgcatggttgccaagggaaaccagataagtattaagtataatattaatttgaatattttatgtctacataaagtgcatgacttgtatgacctctattttaaactagcttcaggtttttcctgtatttaccttacttgggcttttttgtttgagtttttgtttttttgagttttctttttggttctctaagataactgagtggacccaggtgatgaggcttaggaattcagctgactggccctgtacctggctctcatggtaacttgtatttaacacttgtcatatggttatgaaataattatttgagtaatttttaaatgtttgtttatcagactgggctgctttttaaggtcagggactatgtctrtattgttctttcctgtctttccactgtgctatagcacagtacctggtgcacaggtattaattattatttttttttggtcaaatgagaaacaagaggaaaaaagataagacgcaaagaccacaaagaacatgatccaacatacccctgtttagaagttacctactgatctagatgcccagg

SEQ ID NO: 127522 - DNA, 527 bp, Homo sapiens
gctgcttaaaaatacagtctggccatgttttcataacgcagcggtgctgtgctggggatccacctaagctctccattgccatggacaccccaaaacctgaaggctggaatggctaagtcacccaaacagcaaagatggtggcctgctcctccccttgggagctccaacacagggaggtttgaaacctctgtcaggcagaaaacactggtgagggtagctggagaccccagttgggaggccccacctggtgatgaggaatgggatcaaggacccactttaaaaagcagtctggcaatgcttttgcagagcagctgtgctgtgctggggtaccacttccacccctgatsggcttgggctttccaaagctggaaggctggaaccactaagttgcccaaacagcaaaggtggcagcccaccccttcctctgggatgtccatcccagggaagtttcaagtatctgttggccagagaatactgtctagggtggctggagacaccagttgggaggtcctgcccaatgaggagga

SEQ ID NO: 127523 - DNA, 568 bp, Homo sapiens
tactttttgttagacttttagaagtgtccagaatttaatatattttacttctcttccttccaatatacctgcaaggtaagtattctttcttagcttctatttacccatgagaaatgtgagcattaaggagatttgctcacttgcccaaagttaaacgtacaatatacaaaaatctaaactcaagactctagttcaagagaaaaaataacaacaacaaaagcagtgctaattattttgccccttgttttagagaaataaaagccataacacagagctatgaacaccaagtaaaatagatggtaccccaaaaaggactattccttgagacatgagatctatttctcttttttttaaaatttattttgctattttttttgtatctgtttatggattgatgccctacctccactcatttcaaaaatcttactgtgcattcaaaattcttcagctctcatctctctcttactcagcgctataattgctcccccaaacacaacaatttttcaaaastaaactgccagaacttcaagtcaaagttttaattttaaactggacaggtcttgccttt

SEQ ID NO: 127524 - DNA, 426 bp, Homo sapiens
tgttatgagctcagagataatcaaatatgaagccagtatattctggaccatggtgtgctaaggcttagttggaataagaataagaargaagaaaactagttccaaagtatcagtatttctttgggagggaagagaggttgtggtatcaatagttcccagctatttaccagaatctacctaaagaggtagcatctcaccagccttttgattaagcattagtgtgatggttaatttttggtgtcattttgactggattaagaaataacctagatagatgaaaaaccattatttctgggtgtatttgtgagggtgtttccgaggagattggcatgtgcctcagtggactgattggaaagattcaccctcaaggtgatcagaaacatccagtaggctgggggtccctgtggaacaaaaaggcaaataaaa

SEQ ID NO: 127525 - DNA, 426 bp, Homo sapiens
tgttatgagctcagagataatcaaatatgaagccagtatattctggaccatggtgtgctaaggcttagttggaataagaataagaaggaagaaaactagttccaaagtatcagtatttctttgggagggaagagaggttgtggtatcaatagttcccagctatttaccagaatctacctaaagaggtagcatctcaccagccttttgattaagcattagtgtgatggttaatttttggtgtcattttgactggattaagaaataacctagatagatgraaaaccattatttctgggtgtatttgtgagggtgtttccgaggagattggcatgtgcctcagtggactgattggaaagattcaccctcaaggtgatcagaaacatccagtaggctgggggtccctgtggaacaaaaaggcaaataaaa

SEQ ID NO: 127526 - DNA, 546 bp, Homo sapiens
acattcacctaaagtgaaacaatgaagttttgttgaaggcccactgtgtagttggcattgagctaggctctgaaataagatggcactgacctcccttgtaagtacagagacaatgtggagctttggggctggtcagaatctgtcacttattatctatgtggattggaaaagttatttaacttcctagtattttctctcaactttaaaatggtgatagagatatttgtgtgatagtacagagacagtgtggagctttggggctggtcagaatctgtcacttaytatctatgtggattggaaaagttatttaacttcctagtattttctctcaactttaaaatggtgatagagatatttgtgtgatagtacagagacagtgtggagctttggggctggtcagaatctgtcacttattatctatgtggattggaaaagttatttaacttcctagtattttctctcaactttaaaatggtgatagagatatttgtgtgatggaattgtaagaactaagagaaataatgcacatgaaagtgaccagtgcat

SEQ ID NO: 127527 - DNA, 541 bp, Homo sapiens
gctcaggcatcagcatttttcaaaagccccctgggagattccaaagtggggccgaggttgagaacgactgctgtaggattctgtgacgtgcttgataaagtggtatcaaatcctcctttattaatgacttcgaactactgaatagtctacaccctattctctagttcagttttaatggtttccaaatgttagtccatggactggtttcatcagaatcactgggggtcaggggagtgcttaaaataaagattcttgggccctgcttcagtaggtctcagccttgtgcatttttaagagctccccaggtgcttctaaaagcaaggccgggtttgatctataactgtgagaactgggaaggaactaataaaagaacacagagaaaaaaatmaacattaggactgagccacagagcaaaacacaaacctgccgcagtaagggaccttttgtttgctgcactcttgcttctcatttactcctccaggtgaatgggttgcagggtggggtggtggcaagggatacaaaggccaccagaagcacggaa

SEQ ID NO: 127528 - DNA, 541 bp, Homo sapiens
gctcaggcatcagcatttttcaaaagccccctgggagattccaaagtggggccgaggttgagaacgactgctgtaggattctgtgacgtgcttgataaagtggtatcaaatcctcctttattaatgacttcgaactactgaatagtctacaccctattctctagttcagttttaatggtttccaaatgttagtccatggactggtttcatcagaatcactgggggtcaggggagtgcttaaaataaagattcttgggccctgcttcagtaggtctcagccttgtgcatttttaagagctccccaggtgcttctaaaagcaaggccgggtttgatctataactgtgagaactgggaaggaactaataaaagaacacagagaaaaaaatcaacattaggactgagccacagagcaaaacacaaacctgccgcagtaagggaccttttgtttgctgcactsttgcttctcatttactcctccaggtgaatgggttgcagggtggggtggtggcaagggatacaaaggccaccagaagcacggaa

SEQ ID NO: 127529 - DNA, 561 bp, Homo sapiens
tccagctgctagaaattgatgtcagacatcattccagcctgaaacagcagtcatctgactagatgttattttatttccaatttaaaataaaatcacgtttgttcaagcatgtgttacccttagactatctaaaaytaatgtcagtatgaagggtacctggccagacccatttagttcaaataggtttgagtggccttggtcaattcgaactcaaggtcaagttgcctcacatatgtgagctgaagtgatagtatttgactgcatgagtttattatacctagaacaattaatctcatattgctccaggacttaagagagcacacagagtagaaacaacactgtaacaaaaatgttgatccaaatggatctttcacttggggtcagggagaatttaggaatttaggattttacgacatgcagaggaagttaagtaagcttgggaacaaaataaccttgtctatgggaaggtggcatgagttactagaaaagaacacgagcattggaggcaaaaagatatcagtttggatcctgcctctacaatttactacacgacctgtgggg

SEQ ID NO: 127530 - DNA, 541 bp, Homo sapiens
accaacggtttttggttttgttcgctcaaagtagagtaagtactttacaaagcttcacttcactaggtgtcatgtacctaaaacctttttcaaactgcaactaaataaaaaagaaactcaactgctctgccattcctttttttttttttttttttttgagacagagtctcactctgttacccaggctggagtgcagtggcgagatctcagctcactgcaacctccacttcctgggttcaagcaattttcctgcctcagcctcctgagtagctgggattacaagcacatgccaccacacctggctaatttttgtatttttagtagagatggggtttcaccatgttggtcaggttgatctcraactcctgacctcgtgatctgcccgcctcagcctcccaaagtgctgggatcataggcgtgagccactgcacctggcctgatctgccattcttaaacccacttttgcctcactgaaaaataattcctacatgtcccatgcacccgcctgaagtgtccagtggatacttgactccatattttt

SEQ ID NO: 127531 - DNA, 599 bp, Homo sapiens
tgttatctcctctagagatcatcaatagccatagagccttcctgactctatcattcctggcagtaagtctaccayagacttgagatgaggaatctaatatctcactcattactcattcaataaacatttttttttaagatggagtctcactctgtcacccagactggagtgcagtggtgcgatcttggctcactgcaacctccacctctgaccgtcccacctcagcctcctgagtagctaggattacaggcatgcaccaccaggcctggcaaattttttggaatttttagtagagacagggtttccccatattgcagactgctctgaaactcctgacctcaagtgatctgcttgcttcagcctcccaaagtgctgggattacaggcctgagccaccgcacctggcctcaacaaatgtttaatgagcactcactgtatgccaggcactgtcctaggagcctgagatacattaatgagcagagtaaacaaagatctctgctcttgaggagctctagctggggagacaggcattgaataataagcataagaaaacaagaaataacatgctttgtttaaaggtgataagtacgaaggggaaaa

SEQ ID NO: 127532 - DNA, 599 bp, Homo sapiens
tgttatctcctctagagatcatcaatagccatagagccttcctgactctatcattcctggcagtaagtctaccatagacttgagatgaggaatctaatatctcactcattactcattcaataaacatttttttttaagatggagtctcactctgtcacccagactggagtgcagtggtgcgatcttggctcactgcaacctccacctctgaccgtcccacctcagcctcctgagtagctaggattacaggcatgcaccaccaggcctggcaaatttttkggaatttttagtagagacagggtttccccatattgcagactgctctgaaactcctgacctcaagtgatctgcttgcttcagcctcccaaagtgctgggattacaggcctgagccaccgcacctggcctcaacaaatgtttaatgagcactcactgtatgccaggcactgtcctaggagcctgagatacattaatgagcagagtaaacaaagatctctgctcttgaggagctctagctggggagacaggcattgaataataagcataagaaaacaagaaataacatgctttgtttaaaggtgataagtacgaaggggaaaa

SEQ ID NO: 127533 - DNA, 508 bp, Homo sapiens
agttggttttatccccacatttataagatgagaagacctaggtggcgagaggttatgtaatttgactgagataaggcaactacaaaatagtaaagcttggattcaaattcaattcttggtatgtgacaaaacaaataaaaatatttttgaaagagaatattatttttaatttccatgcttcctcctggaggatggatcccaarggaatgtgttctttgctcaacagagatgacaagtgtgagaaggtaaactagagactctatattactcagcagaataataagggggatatagagattcaggaagaatgttagctggggacctgcagtgctggaggggtgatactgtgagagggtgaagggatggccagctggcaggcgaggagctggctggggacagagatacctgatgaagatttagggaagagcaaagtgctgtgctctgcgtaaggctgacgctctcctccattccctaactccctcctgaaatcaccagtgaaaccctttct

SEQ ID NO: 127534 - DNA, 375 bp, Homo sapiens
tcatggcatcgacaacactggttgcctaaaagattggtactgctactgaaacaaatacacaaaatkagacaggaagtagccataatttttcctgcttgcctattttattgtggtaatcacggaaaaaatggagactgtctagagcacaaaaactaagatagcagctgaaagcagtataaactataagaaaaagaaatatttgcatataaatcaaagcaagcaataaggtttacatcacggtacataatataaagttattttattacagaagctactgcttgcatactagcttcgattattacattttctaaaatttggcataggcaatattaaaagaaaatttactagcaattacctatatagtattgacaaggg

SEQ ID NO: 127535 - DNA, 589 bp, Homo sapiens
ttcttattcagcatctcagctgcacaggtttccacacagaaatgagcaggtaaaaatggttagagcttcataatgagtcaacattaacataattactttccatttcatctattacrgtacactgtttgactctctcatttcttttcatttcaatcattcctttagaacacccacaaggccctgttaaagaaatgagactttagaggctgcattatagaaactgaggtgaactaaacagttttgtaattttcccttagaaataaaatgatcaaacattccacactaacataaatggtgtaattttgtactaatacagtatttctttacatttcttaaaacaatgtatacaattagataatgacatgaaagtatttattttggcatcatgaaaatgttactataaaataactattctgttttgttttataacaaacagaagttaatcttcctaatgtgtattgactatcacagttatctcaggggccacatgcttactatagttctgctgccactgctgaaaacattgctgaatatccctgttttgattctgaagaaattaccttcagggacagtttaccacccaaataat

SEQ ID NO: 127536 - DNA, 569 bp, Homo sapiens
gtttgtttcaaactatgactccatcactcctgtccccaggtttgagaattttctagaatggctcattcctcaggaaagcgctttacttacagtcacagtttatcttaaaggatrcagtttaagagcagccaaatggaagagatgtacagggtaaggggtggggtggggatggaggttccctgtcttctctgggggcactagcacctcaatgtattcaccatcctggaagctcagcctcgctgtttcaggagttttactgaagtttcattacataggcatgattgatggcaattggtggtgattggactcaatctccagcccttgtcccctccctgcagatcagggggtagggctgagagttcagccctctattcatgtggtcggttgccctggccaccagctcccatctagaagctatgtaagggccatctagtcacctcttagcattaactcaggtaagatcaaaaggggctgtttatgaataatggaagaaactcctatcactcaggaaattccaagaatttcaggtgcctttttgccaggaatcaagggcaaagaccaaatagata

SEQ ID NO: 127537 - DNA, 569 bp, Homo sapiens
gtttgtttcaaactatgactccatcactcctgtccccaggtttgagaattttctagaatggctcattcctcaggaaagcgctttacttacagtcacagtttatcttaaaggatgcagtttaagagcagccaaatggaagagatgtacagggtaaggggtggggtggggatggaggttccctgtcttctctgggggcactagcacctcaatgtattcaccatcctggaagctcagcctcgctgtttcaggagttttactgaagtttcattacataggcatgattgatggcaattggtggtgattggactcaatctccagcccttgtcccctccctgcagatcagggggtagggctgagagttcagccctctattcatgtggtcggttgccctggccaccagcwcccatctagaagctatgtaagggccatctagtcacctcttagcattaactcaggtaagatcaaaaggggctgtttatgaataatggaagaaactcctatcactcaggaaattccaagaatttcaggtgcctttttgccaggaatcaagggcaaagaccaaatagata

SEQ ID NO: 127538 - DNA, 589 bp, Homo sapiens
tagtacaatacctggcatatactaagaactccagaaatagaagttatttttaaaagtctccttactaaaacaactacatataaatatttggtagttactaattactttgaaaaagatgatacaccatttagagcaattttggagacagttaatatttggatacaatcagatascttaactgtttcaaccactgcttagtctagctttgttttgctacttctgatttataaccagcaacattttttcataattttcatggccatatttatatttcaataaatggaaatatacaggctcatcttgaatacacaaaaagcttcccactctatgaaggtaccaacagttctttcaaggtttttcaacctcggaactgttgacatttaggactggataattttttgttgaaggaggctgtcctgtgtattgtaggatgtttcacagcatccctgacctttacccataagatgcctgtagcactcccttcaccccagttgtggcaaccaaaaatgtctccagacactgctgaatgcctcctgaggggaaaaatcacacacacactcacatctgacaaccactgctttgtcatttc

SEQ ID NO: 127539 - DNA, 589 bp, Homo sapiens
tagtacaatacctggcatatactaagaactccagaaatagaagttatttttaaaagtctccttactaaaacaactacatataaatatttggtagttactaattactttgaaaaagatgatacaccatttagagcaattttggagacagttaatatttggatacaatcagataccttaactgtttcaaccactgcttagtctrgctttgttttgctacttctgatttataaccagcaacattttttcataattttcatggccatatttatatttcaataaatggaaatatacaggctcatcttgaatacacaaaaagcttcccactctatgaaggtaccaacagttctttcaaggtttttcaacctcggaactgttgacatttaggactggataattttttgttgaaggaggctgtcctgtgtattgtaggatgtttcacagcatccctgacctttacccataagatgcctgtagcactcccttcaccccagttgtggcaaccaaaaatgtctccagacactgctgaatgcctcctgaggggaaaaatcacacacacactcacatctgacaaccactgctttgtcatttc

SEQ ID NO: 127540 - DNA, 345 bp, Homo sapiens
acacaaaaagcttcccactctatgaaggtaccaacagttctttcaaggtttttcaacctcggaactgttgacatttaggactggataattttttgttgaaggaggctgtcctgtgtattgtaggatgtttcrcagcatccctgacctttacccataagatgcctgtagcactcccttcaccccagttgtggcaaccaaaaatgtctccagacactgctgaatgcctcctgaggggaaaaatcacacacacactcacatctgacaaccactgctttgtcatttccctacagatggatacttaagttgctatgcattctccctatcacaaacaattccatgatataa

SEQ ID NO: 127541 - DNA, 589 bp, Homo sapiens
tagtacaatacctggcatatactaagaactccagaaatagaagttatttttaaaagtctccttactaaaacaactacatataaatatttggtagttactaattactttgaaaaagatgatacaccatttagagcaattttggagacagttaatatttggatacaatcagataccttaactgtttcaaccactgcttagtctagctttgttttgctacttctgatttataaccagcaacattttttcataattttcatggccatatttatatttcaataaatggaaatatacaggctcatcttgaatacacaaaaagcttcccactctatgaaggtaccaacagttctttcaaggtttttcaacctcggaactgttgacatttaggactggataattttttgttgaaggaggctgtcctgtgtattgtaggatgtttcacagcatccctgacctttacccataagatgcctgtagcactcccttcaccccagttgtggcaacyaaaaatgtctccagacactgctgaatgcctcctgaggggaaaaatcacacacacactcacatctgacaaccactgctttgtcatttc

SEQ ID NO: 127542 - DNA, 541 bp, Homo sapiens
cacattattttccatataaaagatggtatattggtgagtatactagttatttttcttcttttttggaatctgagtatttatatattaatgatgttaatcctttgtttaccacccatattgaaagtrtttctagttgctaattgtctcttgagcttatgattgctgttgctgtactgaaaatgttatttttaactcataaaatcttatcactttttggtttctggacttggtgtctgcttagaaaagttttttcctaccccaagattatcaaatggtcagccatttgtgcaaacacaatattttgtctattgattcaaaatgccaactttattatatactacattctgtgtctggatttcctaatcttttccactgatctgtccattttgttctatgccaacatcatattcttattaacttggctttaaaatatcttttaatatctggtggtaaaatctctttatattacttttgtttttaaaattgtcttggatagtctcacatagtagccatcattacattctttcagaataacatttct

SEQ ID NO: 127543 - DNA, 578 bp, Homo sapiens
ggggtggaatgcaagaatttgcaagttcccaagtgatggcccatgctgttgatccagttaacacttgagtagacaatatcaggaaatctgtctcactatataaagaaagtaaatcccatgccttacacaagggtgaaatttagttggatgacagatgtaaaaatgaaaggaaaaaggacaaaactaatagaagaaaatgcaggtggtgttgactgaattctgcctgctaaaatgataggttgaattcctaagccttggttcttgtgaatgtgactttatttggaaataagatctttgcagatataattaagccaaaacgaggtctaacttgattagaatgagccctaccccaatagaacaggtgtccttataagagtaaaaacagagagaaagacacagacacatgaggagggcacaccatggcaccggaggcaaagactgaagtgatgcgtctacracaaaaaacactcagattgctcacaacatcggaacccaagaggagggcttggaactgagtctcccctaaaatcttcagagagagcaagtccccaccaacaccttgacttctagcttctaga

SEQ ID NO: 127544 - DNA, 416 bp, Homo sapiens
gaattcatcacatatttattgagcatttaccatatgccaagcactgccctaagcactgcaagatacaaagtctatgatgtcagtggaggagaaggacagttaaagatatagtgccgcgtgctgagtgcatggcagaagtaggtagaaagttccatgggagtacacagcaggggcaaccaaatgagattaggaggtcagaggaggcttcctagggaagataaacttttaagcaataaaataaattagctaaatttggaggcagggtagggagggcttagctgactgtaagaacaatttatgtaaaggcacagatgtaggacagctacttaggggttttgatgactcaagaaaagggtgtcagaaacaagagaaaacgagttcrtatgtttatttctcaaaaccctaatgtcaccaaa

SEQ ID NO: 127545 - DNA, 583 bp, Homo sapiens
aatatttcaaataaccggcagcatcattaaaacrtcaaattaaatgaaaagaaaacagattctagtttccttatataatcagatattcttcattaagggctctcaagtggattgtaataccagcaatgccagctgtagcttcccagttaagtacttgtcttactgctccccaccagaaaaaacaaaaaatgaagggaagggaaaaaaatctcagccccaacagacatccaaatggtttatccaaggttttataagatctctgaagttgcaaatgtagattttcaatccaaatcctaaatcagggcttcatgagcacagtcaacaaccatcaatattttctggcttcttctaagagaagtgcttcccattcagtgtctagagttcagagactcatctagttgcccgtggtctcaatggccttcttggcatttttggtgggatagttcatgtgtgcatgcctgaatctttattattcctgacactttattctcctcctgtaccgtgaatgaatgtcagtgactgtgtcaaacaaaaatgcctccagattatttccaaattatctcatggagtaggaggtacaacc

SEQ ID NO: 127546 - DNA, 625 bp, Homo sapiens
gaagtcctctagtaaatttttcttttcagttattgcactttcgagctcaataatttatggctggtaccttatcatttctgtctttttattgatatccgcgttttgttttttcttgcttccttttgttatttgtccaagttttattttagttctctgagcatatttaagacagttattttaaagtatttgcctagtaaatccagtgtctggacttcttcagagatagatgttttggtttttttaataagccttttgattttttggttgttgaaactaggcatttgaatattttaatgtagtaactgaaatcagagttttctccctttcagagtatgcttttgattttatttattttaaaaacattgttgaaggctattgcagtctgctcagtgacttttaccaattttttttaacagtctgtgacctttgtcatgtgtggcacaaaacactgtttcttagcatgtattcatttttggtttctaaactattactttatttgtattttctatttgataagacactttcacatgctccttttcttctttaagtatgactactatctcctggagtgactcatttatagctagggataatgtggagaaaraaaaaaaaaagtaaagaaaag

SEQ ID NO: 127547 - DNA, 608 bp, Homo sapiens
tagtaatgaagttataaatcactgaaagacaagaaagattctcaaactgtgagatagaatattcattgctaagaatatcatgaattttagaagaggagatcatccaaatgtctctgctatacagtattctgtacactcttttatgtaatacagtagttcccccttattcatacaggatatgtttcaaaacccccactagatgcctgaaaccacaaaaagtaccaaatcatgtaaatgatatgtattttcctatacatacatactgtgtagagtgatacacagtatgtatgctgggcagagcgatggttcagatcccaggcaggaaggagatggatagcaaaagaktttatcacactactcagaattgtgcttaatttaaaacttttaaaatattcatatctggaatttttcatttaatatttctgaaccatggttggccacaggcagctgaaactgcaaaaaagatgagaggaaactacagtacttacatctgcttttcaaatttatttttatttttattatattttatttatttttttatgttatttaatttttttttttttgagactgagttttgctcctgtttcccaggctggagtgcagaggca

SEQ ID NO: 127548 - DNA, 555 bp, Homo sapiens
cataatactgacataaaaatagacacataaaccaatggaagagaatagagaacccagaaaataaatccatatatctacagtgatctcatttttgacaaagtttccaagcaatactttggggaaaagtcagtcttctcaataaatgatgttggaaaaactgggcatccatatgcagaagaatgaaactagatccctatctcttgtcatagaagagatataaaaatagattaaagacttaaatctcagacatcaaactatgtaactcatacaagtaaacattggggaaactctccaaggcattggtctggacaaagatttcttgaataataccacacaagcacaggcaaccaaagcaaaaattggtgaatgagaccacatcatgttaaaaagcatctgcacaagaaagcaaacaatcaacgtagtgaagagataatggactgggagaaaattatttgcaaactatccatctgacaaagcattaataaccagaacagataagaaactcaaacaactgtagaggaaaaatawctgataatacgattaaaaatgggcaaa

SEQ ID NO: 127549 - DNA, 541 bp, Homo sapiens
atataggaggagtgagaaagaatttcgagaaaagaaagaagtatcaacaagagaaatgacacagtctctaaggacatttatagcaggagcaaatggtcctataaacttcagcaataagagattcactatataataacctagtcatagtgactgaggctaagtcatcaagaaaggggtgttctrtaaactctcttttctaaagcaggaagcatctgatatattttggaactatttcccaggagaaaaacagttacattttttttcacactgttttagctcttaaggtagtaattttctgaaaaaatgttatttgtctacaactccttgtttcctgggaatgagaaatatatgagatatcactgcaggtgctgaagccacctatagatacttatcagagaaaaatggcaatcttttaatgataataaattaccataaaatttgttttaagtgactcaattactaaatatgatgtggggaagaaaacagcatgagggatttgatctggtgatttagactatgcaacaaagaatttgattcttac

SEQ ID NO: 127550 - DNA, 561 bp, Homo sapiens
tttatgtaaaatttctcaatttttaaatggcatcaagttattttttcaatatctagcacttacgtacttactaacaacataccacctgttggcaacctctggcttgcagcctgaagtctgaagccccactcccctagtcacagaacagacttgtagctaccacatgctgttaccatgactacaaataatcccagagataggtcaggaaaccttatcttatttatggagcacctccaggctrggaaacctgcgtgtccactcagctatgtgctagagtcacccttttatttgccacagatattagtttaccacaaggctactcttgtaagatcccccggaacctccaggtcaaattctcagcccatcccaagattccagccactcaccggtgatattatttatggtatcaattactaatgctcctgagattaagaacccggtaaaacagatgccagagaagctgttgctaaaattgcctatgtatggttagagacaaggagaaccccacccctgccctggacatttgtggaaaagacgaggaggttattggggccagcatcc

SEQ ID NO: 127551 - DNA, 561 bp, Homo sapiens
tttatgtaaaatttctcaatttttaaatggcatcaagttattttttcaatatctagcacttacgtacttactaacaacataccacctgttggcaacctctggcttgcagcctgaagtctgaagccccactcccctagtcacagaacagacttgtagctaccacatgctgttaccatgactacaaataatcccagagataggtcaggaaaccttatcttatttatggagcacctccaggctaggaaacctgcgtgtccactcagctatgtgctagagtcacccttttatttgccacagatattagtttaccacaaggctactcttgtaagatcccccggaacctccaggtcaaattctcagcccatcccaagattccagccactcaccggtgatattatttatggtatcaattactaatgctcctgagattaagaacccggtaaaacagatgccagagaagctgttgctaaaattgcctatgtatggttagagrcaaggagaaccccacccctgccctggacatttgtggaaaagacgaggaggttattggggccagcatcc

SEQ ID NO: 127552 - DNA, 511 bp, Homo sapiens
tgataagacgtatgtacccctcaacctctgtttcaactttttatctatcgtcttcccaccctccactgaaacgcaagcatgcctttgtctcagatatagactgggagcccaagagataatctttaccaatctcagcatctccagttttctctgttaagctacatggtaaagatgtccctgagagactaagtctgrggaatttttgtataccagaggtttgaccagaaaactgagatttttccaactctggatcctttggcttttgccctgattattttactagggccttactcttctctaattcttaacagttaataaaaagtctttctgttgccatggttgagaacaatgagcccttgtcaggataagatttggagagctttaatgagaagatgtatgtaagcccatgttgcaaagagacaaaacaagaatacagaaaaaaggctctgttgatgaagcaaaaaccctcctgagaccagcacactctggaaatggaaaatggaaccagtgg

SEQ ID NO: 127553 - DNA, 651 bp, Homo sapiens
agaaaggcatttcagatgctcaggaacactcagtagtgttcaactgcaatcaaagacataaaactgtttctattaatttattcatgcaaagttgattatttccacaaattgaagagagtcttacattgccctattcttacagcccaggttattttaggagtgcttatcaaataataaggactgtagctttccctttagagatgtttaaaattcttatatattacataattattgatgtgattactctattttaaaaactgtccctccaagtgctttgaagataggaattctttcttagcagagacttataagtaatgcaaagtaatttcaaagcattttagaataaaactaactccatatatccattaacaaatgttagagtttatttgcctcatcaaaattgccaacttttctttcttataaacattaatatatttttcattctagaatatactttttaaggcctctttagatggggagcctacattctttcctcataacaccctgctgatcctgatgtgagcaccttgttgtttacacaggtctgtggaaaaaggacggtatcagtttttcctyacctttgatttctcagtgcctggcacacaaaagagtttcaaaaattattttttgaaggaataaattaatgaatga

SEQ ID NO: 127554 - DNA, 619 bp, Homo sapiens
gatgatatactacaatatttaccccatcctctcatttgttgtcaacagctctgttttactatataacttttttcaaatgacataattgtctttcccagattgttgtaatgtctccaaatcagggggtgtgtctcccctctttggcattcacataatacactgaaccagggttttcagagttaatgttaacttttgaagtgccagtactgaatatgtcctggatgtttctatagaaatgctactaaaatataaacgcagattatatggaacataaaatgttttcttcttgccagtttatctaatgttgtctggtcctgacactagtcactgtcagtgtcagcattattttttcatastgctaattgttatttaaaattatttattatttaacttgattatcacctatctccttcactagagtctaagctccgtgaggacagggacttttctgcattattcatggctgtatccccaatgactagaactatgtctgtctataggaggtgctttgaaaatgccaattttcccttatccactccgtttagagttggtattgtattaagattagcttcatagtgttagaagggcattgtgttagaagggcattgagagttcattt

SEQ ID NO: 127555 - DNA, 657 bp, Homo sapiens
tttcttttacttctctcctgtgtcatttcttttctctacaaccatatccttcaaattctgttttgcagagagcctatcactctgtgttgggcacaggcaaccctagatcagggaaaatggatgagatgctgagatcccaggtagaaagctctcaataaaaaacaagagtcagaaacattaaaacatttttcctttccttgatggcttcaaatctattcccaccccaccccagtatgtctccctttccccagttccaataggataaaagatttaattttatttttaaccaatatatatgtgaaaaaaaatctccattttctgattgctacttattttagggttgtaagcattagtaaayaatatataattgtttaaatattgtaaacaattgtttaaatattagtaaataatacataattatttaaataaaacaatatataagttttttaaatatatggcctggttttttaaaagaagcaagcaaatatggcttttgctggcattgtttaaaaatgaatagaatgttctcagtaaacttttacattactccgcaacatgttttgttagaaaagcctgtcgtagtatctaaaattgtgtaaatcatcagtttttaatctggcaggaagtagatagtggcccattaaactttcgtaatta

SEQ ID NO: 127556 - DNA, 604 bp, Homo sapiens
attaataaacaggaaacatatcatacttttaaaagaagaagcgattatatatttttgaagtctaagcaatgagttctactttccccaaataactaaatttttacttgggaagaagtctcaggcttatcaagccagtggtatgctttgtaccatgggcatttaaagcatttaatcttgtatccatgaatgcttaacttagaatacatggtgttctacacagagataaatccccagctgcaatttatctctactaagaagataaggaaatggaggaaatggatttaaataawagaataaagaaaaataggttaggcaacttgagtttctatatggattttctactcaatgcaattacttaaagagactttgtagaaaccttttttttttggaaggatttaaaaatgaaatctgttttctctccctgggaccatctcaagagggccttccctaatgttaggagtgagaacaaactttatttttgtattaatgtattaatgaagtatttggaaattggtatagagtttgaattcatattggtgattaagtttcaaattctaatgatttttaagaaggccaagatcaccaatgtgtctgtttttaacca

SEQ ID NO: 127557 - DNA, 582 bp, Homo sapiens
gaattctgtctctttgcattgatatgctcagtttcccagagaacctgcccctccttgctctccttcctgagtcagtggcactgggaattggggactaggcccctgtgacctcacagcactggggagatggggtttctggaatctatgggtggaaggctttggaaagcgaatacaggttctgcatttcttctgtttgcttccttccagartaaccatggggatgctgggtgggggttacaggtgggctgcttgcctccctccacaatctggaaggatacccaagcaaagcaccacacggagctcttaacatgctctagttccctgaccctcccccccaccacctctcctttcttcttcatccccaactcccctgtgctaggaagggtgggcttttcttttagttttcccaggtcaaatggcccaccaatcattgagcagaaagcctcgcggccttgctgcatagccagtacaactgtttctactctgtgagtcgaggcctccaggcagggtttttgatgggtaaaaattgagaaataaaagagtttagaacatcttagacaataggttgggtaaaagtctact

SEQ ID NO: 127558 - DNA, 608 bp, Homo sapiens
gaattctgtctctttgcattgatatgctcagtttcccagagaacctgcccctccttgctctccttcctgagtcagtggcactgggaattggggactaggcccctgtgacctcacagcactggggagatggggtttctggaatctatgggtggaaggctttggaaagcgaatacaggttctgcatttcttctgtttgcttccttccagagtaaccatggggatgctgggtgggggttacaggtgggctgcttgcctccctccacaatctggaaggatacccaagcaaagcaccacacggagctcttaacatgctctagttccctgaccctcccccccaccacctctcctttcttcttcatccccaactcccctgtgctaggaagggtgggcttttcttttagttttcccaggtcaaatrgcccaccaatcattgagcagaaagcctcgcggccttgctgcatagccagtacaactgtttctactctgtgagtcgaggcctccaggcagggtttttgatgggtaaaaattgagaaataaaagagtttagaacatcttagacaataggttgggtaaaagtctactgtcttgttgaaaatgctattttgaag

SEQ ID NO: 127559 - DNA, 608 bp, Homo sapiens
gaattctgtctctttgcattgatatgctcagtttcccagagaacctgcccctccttgctctccttcctgagtcagtggcactgggaattggggactaggcccctgtgacctcacagcactggggagatggggtttctggaatctatgggtggaaggctttggaaagcgaatacaggttctgcatttcttctgtttgcttccttccagagtaaccatggggatgctgggtgggggttacaggtgggctgcttgcctccctccacaatctggaaggatacccaagcaaagcaccacacggagctcttaacatgctctagttccctgaccctcccccccaccacctctcctttcttcttcatccccaactcccctgtgctaggaagggtgggcttttcttttagttttcccaggtcaaatggcccaycaatcattgagcagaaagcctcgcggccttgctgcatagccagtacaactgtttctactctgtgagtcgaggcctccaggcagggtttttgatgggtaaaaattgagaaataaaagagtttagaacatcttagacaataggttgggtaaaagtctactgtcttgttgaaaatgctattttgaag

SEQ ID NO: 127560 - DNA, 598 bp, Homo sapiens
tgtgagcacaggagggcagatcctttccaggtcaagacaaatggggtttctgccagactccgacctctggcaggctcagtgcagctgcagccactggcagagggggaatgacctggggagaaagctaaaggccagtctcagtctatgaggcttgggttctgaatacagagggtcagtacctagggtccaaggctctccccttcccaggtagcagcatgactcttctgcccccatggctagaactgctctgtagcctggaagtgctgatgtgcaggattctgtctgcctttctaggctgcatttgacatccatttgaatcttgtttcactcttgtcaaaatgttgggaggaggaagagacacacaacaggattgactctgacattaagtactctccccacccccacygatgctttccaggtggtgttttaggagaacattgtctcctttcctgattgtcatcactaagacctgagacacccttttccagcttctctgacaattagcctcagcatcctgtggaagctgtagagctctataaatattctcattcctgatattatctctgtaaaaaaggtgatatcattttggctaggaaaa

SEQ ID NO: 127561 - DNA, 495 bp, Homo sapiens
aaatgggggaagaacagccatttcaacaaatgatggcaggacaactaratatgcatgtttaaaaaaaatagacttggactcctacacatcagaccatgccctaaacatcactcaaaatatataagacacctaaatataagagttaaaattataaagctctccagaaaaatgtatgaataaaacgttgtgaccttgagttaggtaattgttttagtactaggagcacacaaaaaacaaaaatataaattggactggatcagtctttaaaaatattgtgctacaaatgataccatcaaaaaaataagaggacaataaagaatggaataaaatttttgcaatttgtatttcttatttgtatccagaatataaagaactcttctattaaataataaaaacatggcctggcacggtgacttgcacctgtaatcccagcactttggaaggccgaggcgggcggatcacctgaggtcaggagtttgagaccagcctggccaa

SEQ ID NO: 127562 - DNA, 616 bp, Homo sapiens
ctctgatattccccgtcaagccatccctctgaagtcaagctgcttctctccaatgtctggctgcttcttctcttctctccttttctgcagcacctctgccagtggagcctgtggtttttatgggtacagaatcaggsgagtggggtgggccagggcgattttggaaaaggcaacattcgagcagaaatatggtgatagaaatttctccctttgggctactgttccaggcttgagggtggggccctcccagggactgccctcttctacccagtgtttccctgcctcctgtccatatgagtatcatagaataatatggggaggggtcccttctcctcaactttttggaatagtttccgtaggaatagtaccagctcttctttgtacacttggttgaattcatctgtgaattcatcaggacctatgcttgttgttgttgttgttgttgttgttgttgttgttgttgttgttggttggcacgctattacattggagcaaaagtaattgcagtttttgccattacattcaactgcaaaaataagtctagcttgcaacatatcttattaatattttcaaaaaaccaactcctagatttgtttatcttttaaatgtttttttt

SEQ ID NO: 127563 - DNA, 616 bp, Homo sapiens
ctctgatattccccgtcaagccatccctctgaagtcaagctgcttctctccaatgtctggctgcttcttctcttctctccttttctgcagcacctctgccagtggagcctgtggtttttatgggtacagaatcaggcgagtggggtgggccagggcgattttggaaaaggcaacattcgagcagaaatatggtgatagaaatttctccctttgggctactgttccaggcttgagggtggggccctcccagggactgccctcttctacccagtgtttccctgcctcctgtccatatgagtatcatagaataatatggggaggggtcccttctcctcaactttttggaatagtttccgtaggaatagtaccagctcttctttgtacacttggttgaattcatctgtgaattcatcaggacctatgcttgttgttgttgttgttgttgttgttgttgttgttgttgttgttggttggcacgctattacattggagcaaaagtaattgcagtttttgccattacwttcaactgcaaaaataagtctagcttgcaacatatcttattaatattttcaaaaaaccaactcctagatttgtttatcttttaaatgtttttttt

SEQ ID NO: 127564 - DNA, 491 bp, Homo sapiens
ttgtattttagtctgtgcccttcttaatgttcagaagtttaccatttttctgtggtcaggtctgttatcatttcccatgggatttcttacatgacaaactcacagtgctcttcaacagcagtgattaaataaatattcagctatttttggcatgtatacagttttatttctttgcctatgtgtgtgtgtgtgcrcgtgtggtgtgtgtgtgtgcatgtgcgtgtacttgtgtatgtgcatttatgtgcacatgtacttgagtctcatccactgataatttaatttgtcatttggcaggaggggagggttttcttttgctaaaggtactgaccaattgtcttaccatgatttgtagattttttgtttcccaatgatctcaggtgtctcttttcacagactttgagaaggcacagtaccttcttctgcttccatgcttctccccactcactcccctggctctgtgtgcctctgttcagcagcaacttcactga

SEQ ID NO: 127565 - DNA, 464 bp, Homo sapiens
aacaaattggcatcagtaatataatgtttggaaactttaatgttgaggtgatgtttaaagacttaggacccaataagattattactgagggagtatgcaaaagaagaagtctgaagactcagctaggatgcttcaactttcagaagttcagaagaaggtagaatagaataatcagtgttacaggctgaatgttgtyctcccaaaatatatgttgaaatctgaagcttcagtacctgtgcatgtgatcttctttagaaataagatcttttaaatgtaatcaaattcaaaggaggtcattagaatagggatccaatatgactggtgtccttataagaagaagggatagaaacacacagaagagaatgccatgtgaagacatggatgcatgaggtgagaatgacatgatattggaggcagagattgaagtgctgctgctacaagtagaggaatgacaaagattgctg

SEQ ID NO: 127566 - DNA, 553 bp, Homo sapiens
caaggagaaactctgttaaaacctgccactcctctcaccgagaggctctacgcttatcttccattgtgtttcctttactacaacaagattaaagaccctaccttttttttttctttcctgtatataagtggttggtggattttaacacaccagttattcctcctgtgaatscctcagagatggtggaaactgaggctgatgggggaacaactttagctagggaaggagggtattggttctcacatttgacccacactcctcctgcccggggttgttcctctctgcctcccttccctacactgctgctgtcctctttttgacatttctatttatttatttttctgccctctcagatcagcaggagagcacctaggtctcagggccagctctctatggcaggcctctgcagcagcacttgtgaagtgctagtgattcacttccttctctattgctcacccttctctttcttggcaggcagtccagggactggaggagggtggagtatagcagggaaagccaggcactgcctcacattttcactggaagcactgct

SEQ ID NO: 127567 - DNA, 603 bp, Homo sapiens
ggcttatctctcttttgatgcaagggactcaatcatgttttcataagccacataattacttgaacatactagttgctcaagagatgctaatagaaggagtgaataagtaattatatattgtcttgagagaacaatttttcccaaatgatttcatgaagttttcatttcagctattggctatgacataacttaatgatccaaagtctttggcctgttcagtgtgacttcatggagcaactratgttatgtctgtgggcatcagtttatcacctgtggaaagtgaagatgctgacatgaacaactcccaaatatcataagctgatctttgtgccttcttatcatgcaactcaatccaagctctctgattctatatgcttttactcccacctggaatctctcatgtgcattaacagacgcacacaatcatgtgaaattaatgtgtctaatttccctagaatttcctctctcttttgaagcagaaattaggtggaagcaagtgtgtgtgtgtgtgtgtgtgtgtgtgtaagtagaaatggaaaaaacatttgtaaaaatagacattctttatctgtatgtggactgatttcttcttctttaaccaga

SEQ ID NO: 127568 - DNA, 519 bp, Homo sapiens
aaacaaagaaacaacagaaaggcccaacaaagggaccactgttctttcctgaaccttaggaaagccatcagataactgtccgattctgttcttagtcctcttgccaagtctattttcctctccccacgctgttcacaagaagagcatatagagaacctgcatatataaagctgtgtgggttggattctttgttgcttatacctccaatggccaaatacattttctttcgtcacaggaactaaaggaaagagatggtctgagcacagagaatgaatctaggaragaggtgactggtttgggctgcatcaggaaaatgcgaaggctaaagaccagagcaagagaccaaaatgcagggagtacaggtggaaaaggtcaagtggaacggaggtgcccagggcaggagagcagggcttcctggcaagcttaggacgcgtgctccccctgcaaggagagaaggaaaaagtaagagttttcttatttgcatgcatcaagtattttccattgccaagaagagaattc

SEQ ID NO: 127569 - DNA, 493 bp, Homo sapiens
agaatgttgtaatttatgaagagcatagtccctggtataacatagtgctcaataaatagggtatattttatcgagaaagatcaactgtcaccatcatcatagtatttctgtttattcgtatgtttcaaaaactgcataaggaaaaaawgtccagggcttgtattattcctctgcatctgccactgtgtttagcacagtatttgggatatggtcagcattcaattattgttaaagaagtaaatgaataaatgagcaacagtaataccaaataaatgacacaagtattatttccatttttgctcatcagcaagctgcaactacaaggggttgtgacttgcccaactgctatgagtaagttgtcaaagcaaaatctcacacctacatcttttgattttaaggtaagtgcttgttagcagtatatcctgtgataatcgataactgttttattcccccaaatttaagagaattagtgagtttctaaagatttgtcagt

SEQ ID NO: 127570 - DNA, 493 bp, Homo sapiens
agaatgttgtaatttatgaagagcatagtccctggtataacatagtgctcaataaatagggtatattttatcgagaaagatcaactgtcaccatcatcatagtatttctgtttattcgtatgtttcaaaaactgcataaggaaaaaaagtccagggcttgtattattcctctgcatctgccactgtgtttagcacagtatttgggatatggtcagcattcaattattrttaaagaagtaaatgaataaatgagcaacagtaataccaaataaatgacacaagtattatttccatttttgctcatcagcaagctgcaactacaaggggttgtgacttgcccaactgctatgagtaagttgtcaaagcaaaatctcacacctacatcttttgattttaaggtaagtgcttgttagcagtatatcctgtgataatcgataactgttttattcccccaaatttaagagaattagtgagtttctaaagatttgtcagt

SEQ ID NO: 127571 - DNA, 554 bp, Homo sapiens
ttaaacatactcttgttgataactgtttagaggctccctgagaaatggagaggttcatcaattaatcaatcaatcaagtatctgttgagctagcattttgtggaaatgaccactaagtgttgtgaagggacatgagtaaaacagtttctgacttttttagaaagagtcctgttgacttgaggaaataagatataaacagcaccaaattaaattgcagtatacaacacagcacttaatgagtgcagtgccactgtggcatgtgttactagttagtagaaatgtgttcattttacagatgtaggaatagaagcttcgagaagggtggaacctgcagggaagtggagtgtaattgtgttcctggaacagcccaaggctgtagaattggaggtcattgcaagtctttggtattggcycctttagctgtccattaagggaatttgaaaatctgagacccagcattttcaaatggcagtgctgtagtaataaggcaatcatagattaattggagaccatcagggtttttagagatgtttagccaggggtggatcattccg

SEQ ID NO: 127572 - DNA, 648 bp, Homo sapiens
ggatgcagggatctgctaaccagataatctgtaaagaagggcctactgccccagctgctgggagtgctgtcaggctttggctattagcaccttgaagaattgtctcagcttcataaagcttccttgcccacatccatggccttctggggaagctcacttctggtgacaaattcaggtgtgggtttggaggcccagttacttgggtttgacccgggaccaccctgaaggccactttaggttctgttcttctcatggagttgacagaggctttcagatcacattacaaactaacttctctctcttctcaatcctgcttcttcttctttcatagcaaagatgttgatcataatggcctccctcaaaaatatcctgaacactaaatttggcttccagactgtttcctgggttttccaaacagtgaaagtttctgtttggagtatccccagaaagcaggtgaaaagttgttgtcttggagctggatcagcaggcccttggctggcaatgaggaactcattatggtggtgggtcaaacacagttamccttggcataaggtatttctacacttgttcaaattttaatggttaattaggattatataatggtggaaaaatagctatctcactagataattcacatatttgaaaaac

SEQ ID NO: 127573 - DNA, 578 bp, Homo sapiens
ggcccataaatctgatttgcttaggtatatgaggaatgttcattagtagatacatgtttatagaaccctctatcctttggatatttaggataaggatgtgacccaggtttcataacacccctctttgaatactacggaaatgacccaattctcttggcctactgacagggtaattatgatatcttgtcaggaaaagattttagacctgttttaaaaaattgtaagtgcattatgaataatttctaatgataacagtacttgattataactatggctgaattaaaggatcagttagcttctaacatatgcactgaagcatgcacgaaatgtccccaccttgagcacaatgcttttagttatatttttccccttccttctcttgtaaaacatagagaatgaaaggatctttmtgacatttgtcccttaacaaatgacatgtttactaagatctctcctcacttataggagatgaatttagaatccagtgcgacaattccgcccatactagatgtcttattctgcagcattcagaagcatttgttgcttcccaaccagaacagaggcagttaatgatgtcc

SEQ ID NO: 127574 - DNA, 497 bp, Homo sapiens
ccacatcactaggaaaagggggagagcgctacataaagggagcaccctgtgggacaaaagaatctgaaaggcagccttgagccccaaatcttttctctaacatagtctactcaaatgagaaggaaccaggaaaacaattctagtaatatgataaaacaaggtttttttaacacctcttaaagtggtgaacttttggcaatgttaaagaaccttgttttttcatattgctcaccagcaacggatccaaaacaagaaatccctgaattgccagaaagagaattgagaaggttgattattaagctaatcagggaggcacccagggaaatagatagcataaaaataaacaatcacagtttctggaaataayggaaaaactgagggaaaatgcaaaatgcactggaatgtctcagcaataaaatcaaacaagcagaagaaataacttcggagctcaaagacaaggttttagaattaacccaatcgaacaaagacaaagaaaa

SEQ ID NO: 127575 - DNA, 565 bp, Homo sapiens
aacaaaataaaaagattattaagtagagtatttatatatgtattttaatatatgttataatggcttccataatttcaggaagatataaacataattataaagttagattgagtatttgtgctgttttacaatacctatcttttcagaataatcaaggttgttaatgaatttttgaagtttaaataatgaaatacatttatacccatattccttaaagatctttctaaatcattggaacaataaaaatcagttaattttgacaaactttaaggagtattgattcttatggaagaaagcaacatgaaaatcttaagggaaacaaacatatttttgcatgaaaattcagtatcttaagggacaagaggaggactaattaattttgggtttattatrtacttagatgagattctatgccaatttatttacccaatttatttcacgtaatagtcgcaaacaccctaccaggtcagaatattttttctgtttttcagatgaagaaactgaagtgcaaaaagataaggttacttgttcaaggtccaacagctaaaaagcactagagttcatg

SEQ ID NO: 127576 - DNA, 565 bp, Homo sapiens
aacaaaataaaaagattattaagtagagtatttatatatgtattttaatatatgttataatggcttccataatttcaggaagatataaacataattataaagttagattgagtatttgtgctgttttacaatacctatcttttcagaataatcaaggttgttaatgaatttttgaagtttaaataatgaaatacatttatacccatattccttaaagatctttctaaatcattggaacaataaaaatcagttaattttgacaaactttaaggagtattgattcttatggaagaaagcaacatgaaaatcttaagggaaacaaacatatttttgcatgaaaattcagtatcttaagggacaagaggaggactaattaattttgggtttattatgtacttagatgagattctatgccaatttattyacccaatttatttcacgtaatagtcgcaaacaccctaccaggtcagaatattttttctgtttttcagatgaagaaactgaagtgcaaaaagataaggttacttgttcaaggtccaacagctaaaaagcactagagttcatg

SEQ ID NO: 127577 - DNA, 512 bp, Homo sapiens
aaggaaagcccatagatgatttagctgtaagaagactgatacccattaatttagtgttgttttgggtatattattctattttgctaagattaatctcccaacctgtgtagccattgtgccaactatttatttgataaaaggtggtacagtttgtgaacctgaatttattcttcctttttatatccttattatggtcaacatattaaataatacaaatgtgtacatgaatatatattcaacattctagtgggaattatacataaataagagraaaacatatttgccttgggaaggagacaagattttaggtggtaaaagatattgaatgtttatgctggatgtggttataataatcaacttgtcccttctattctccagtctttttacctctattgagaattgtgtttatgtctccttgacagacaacacaatgtaggagaattaactgaaaggaatcaagttctttctgatatctaaataatatcctattctcttaaacataccagaatatc

SEQ ID NO: 127578 - DNA, 395 bp, Homo sapiens
ttatttaacttgatattgaaattttatttaacttgataaattgataaattgaactttatcaaaataaaaaaaaacttgtgtttcgacagacattattttcctttagcttttattttaagttcagggatacttgtgcaggtttgttatataggtaaacttgtgtcatgcaggtttgttatacaaattatttcatcacccaggtattaagcctcrtacccattacttatttttcctgatcctcacccacctcccaacctctaccctctgagggtcccccgtgtgcgttgttcccctctatgtgtctgtgtgttctcataatttagctcccatttataagcaagaacatgcagtatttcgttttctgttgctgtgttaattcgttaaggataatggcc

SEQ ID NO: 127579 - DNA, 484 bp, Homo sapiens
ttattgaggagaaatctggaatttagggacataagtaaggttaaaccccaggtcacccacttggcatgcggcagaggtgcgattcgaacccaggtagcctggtttccaaagacacttccctactcccaaacacccgttgcagggtgctggactgaggattcccctactaagacaggatgatttgccccagccacctgaggggttctcgggaagtctggtccaatgctagctcagctttggtttgtgcttgcattcacctgtttcaggtaggagtaagggagcttccaacctggatcccaggccacttacacagcctgtgtcccctgcgcctggatggactgcctagccctggaccactattgcctcatctttgattcccacatagtgctcratgcatagaaggtgctggagaaatccggctaaatgaatcaccattggcttgttaagagcatgccattggagggaaaattatttattataaaac

SEQ ID NO: 127580 - DNA, 599 bp, Homo sapiens
agaagccaattgttcaggatatgcattaggctcagtcttgaaaggagaattttcctaaatgtcctttaggtctcggcttaagtgtctcttctccagacatgcactttcttctcatagagtcttaactagacacctgcattaatcctctctcagctctatattattttcttcataccagatcagagcctataattatcttatttgtccttttaattgtttcctgctctaccatgcaagaaagttctatgaaaataggaactgcaggcagccttgttcataattttatccccagtkcctagcagaatgtacttgctgtatacagtagtaggtgaccaataaatacttgctgaattagtgatcatgatgagacagacataaaaagagtggctctgtaatagtgtgttaaactctggaaagaagaactgaaaagggaaagataccagataaactgatttctaagataaagattagatcagttcaccaataagaggtaaaacttaaatataatatatttatttcaatatgattatttagaatataggaatagacgtgggagtaaaatcctcatattatctctttgggtggcatatgtagcgtta

SEQ ID NO: 127581 - DNA, 599 bp, Homo sapiens
agaagccaattgttcaggatatgcattaggctcagtcttgaaaggagaattttcctaaatgtcctttaggtctcggcttaagtgtctcttctccagacatgcactttcttctcatagagtcttaactagacacctgcattaatcctctctcagctctatattattttcttcataccagatcagagcctataattatcttatttgtccttttaattgtttcctgctctaccatgcaagaaagttctatgaaaataggaactgcaggcagccttgttcataattttatccccagtgcctagcagaatgtacttgctgtatacagtagtaggtgaccaataaatacttgctgaattagtgatcatgatgagayagacataaaaagagtggctctgtaatagtgtgttaaactctggaaagaagaactgaaaagggaaagataccagataaactgatttctaagataaagattagatcagttcaccaataagaggtaaaacttaaatataatatatttatttcaatatgattatttagaatataggaatagacgtgggagtaaaatcctcatattatctctttgggtggcatatgtagcgtta

SEQ ID NO: 127582 - DNA, 599 bp, Homo sapiens
agaagccaattgttcaggatatgcattaggctcagtcttgaaaggagaattttcctaaatgtcctttaggtctcggcttaagtgtctcttctccagacatgcactttcttctcatagagtcttaactagacacctgcattaatcctctctcagctctatattattttcttcataccagatcagagcctataattatcttatttgtccttttaattgtttcctgctctaccatgcaagaaagttctatgaaaataggaactgcaggcagccttgttcataattttatccccagtgcctagcagaatgtacttgctgtatacagtagtaggtgaccaataaatacttgctgaattagtgatcatgatgagacagacataaaaagagtggctctgtaatagtgtgttraactctggaaagaagaactgaaaagggaaagataccagataaactgatttctaagataaagattagatcagttcaccaataagaggtaaaacttaaatataatatatttatttcaatatgattatttagaatataggaatagacgtgggagtaaaatcctcatattatctctttgggtggcatatgtagcgtta

SEQ ID NO: 127583 - DNA, 599 bp, Homo sapiens
agaagccaattgttcaggatatgcattaggctcagtcttgaaaggagaattttcctaaatgtcctttaggtctcggcttaagtgtctcttctccagacatgcactttcttctcatagagtcttaactagacacctgcattaatcctctctcagctctatattattttcttcataccagatcagagcctataattatcttatttgtccttttaattgtttcctgctctaccatgcaagaaagttctatgaaaataggaactgcaggcagccttgttcataattttatccccagtgcctagcagaatgtacttgctgtatacagtagtaggtgaccaataaatacttgctgaattagtgatcatgatgagacagacataaaaagagtggctctgtaatagtgtgttaaactctggaaagaagaactgaaaagggaaagataccagataaactgatttctaagataaagattagatcagttcaccaataagaggtaaaacttaartataatatatttatttcaatatgattatttagaatataggaatagacgtgggagtaaaatcctcatattatctctttgggtggcatatgtagcgtta

SEQ ID NO: 127584 - DNA, 547 bp, Homo sapiens
ttgaccactaaactagcaaaacaatgaatgaaattcaatgaggaaaaacatgaaattgcattagaatacacaaggaatggttcagggagcccaatgaagaatagtcaatggccatagaatgaaatacaaaaaaagagggcaaggtcccccaaaattagtattagttggatatttttaagtttgtttaataaatacttgaaagaagatatgttttatttatttatttatttatttatagagacagagtctcactctgtcacccaggctggagtgcagtgctgtgatcatagctcgctgcagcctccaactcttgggctcatgcagtcctcctgcctgagactcccaagtagctaggactacaagcacatgccaacatgcctgastaattttttaaatttttgtagaaattaagtctttctatgttgtccaggttagtctcaacctcctggcctcaagtgatcctcccacttcagcctcccaaagttctgagattacaggtgtgaaccactgtgcctggccataagacatgctttaataaatccttcaa

SEQ ID NO: 127585 - DNA, 480 bp, Homo sapiens
actgagattaatcatgtcctacctcctggcatcttaagtatcatagattttttgttgctgttttgagactttattctttgtctatctgagtagatcttaaactcctggggagcagcaactattttaaatgtcttcttgaaagagcatgttatccacaaatacatatagactagaattatactcctggaataggcattagagatcatctggtccaaagcctttattcaatataaaagtgaagtaggcctgaggatgcaaggaccaaggaagtttacagcctactaaaccttttgaaggaagttcctgaagatgtttttcaacaaagtaagggagtaaaccaagaaaggagatatgagattcaggaaacagtgaatcctatacagagtagccatgaaaagcmaccctgggatgaaattgttcaacagaatgagagagtagttacttttcattagagtggaaggaaagaggtctccgaaggtg

SEQ ID NO: 127586 - DNA, 593 bp, Homo sapiens
ttgttctaatgctccctctccccttgccccccactcctgacaggtcccagtgtrtgatgttccccttcttctgcccacatgttctcaatgttcaactcccacctatgagtgagaacatgtggtgtttggttttctgttcctgtgttagtttgctgagaatgatggtttccagcttcatccatgtccctggaaaggacatgaactcattcttttttatggctgcatagtattccacggtgtatatgtgtcacattttctttaaccagtctatcactgatgggcaaaaaagtgccattatttgttattgttatttttatccttagaaatatcaggatgatagatatgtctttaaaatttgaaatagataaggggatttatggagaagtatacaacatagagagaatggtaattattcctcatttagatcttgatgggagcaaatttatcattatttatgtttcacctcagcagttatttttctctggtaatattttacatacattcttttttatcatgttggtccctctgggtagaattgtctggaaaactcctttgaggtatattcttttaaaaattgtccagttatcccttac

SEQ ID NO: 127587 - DNA, 593 bp, Homo sapiens
ttgttctaatgctccctctccccttgccccccactcctgacaggtcccagtgtgtgatgttccccttcttctgcccacatgttctcaatgttcaactcccacctatgagtgagaacatgtggtgtttggttttctgttcctgtgttagtttgctgagaatgatggtttccagcttcatccatgtccctggaaaggacatgaactcattcttttttatggctgcatagtattccacggtgtatatgtgtcacattttctttaaccagtctatcaytgatgggcaaaaaagtgccattatttgttattgttatttttatccttagaaatatcaggatgatagatatgtctttaaaatttgaaatagataaggggatttatggagaagtatacaacatagagagaatggtaattattcctcatttagatcttgatgggagcaaatttatcattatttatgtttcacctcagcagttatttttctctggtaatattttacatacattcttttttatcatgttggtccctctgggtagaattgtctggaaaactcctttgaggtatattcttttaaaaattgtccagttatcccttac

SEQ ID NO: 127588 - DNA, 527 bp, Homo sapiens
aagtgctgaataagaaggtacaatattaatagtaacacctgctcttcttaattctaggctaatggtgcagatttctgagttttatgaaatatgtcatcatgtgatggtatgtatcagaaaaatactcagaggtagaaagtgctaaacaaatatttgatgagtaaatgaattaaaattgaacatattaaaacttagtatcctcctttgctcagagtatattataggggtaataataattgacaaggtataaaaatcttagctcaagatgtaatgttctatgatttgaggcaaaaaaaaattataccttgtaagactcagcctccttttytgcaaaatgaatataacacatgtgattactgttatttaggatactataacattaaattattattcaccatttttttgggaaaaatgctgtcagcagttagatatgtttgaactgataacacgtgattactattatttaggatactataacattaaattattattcaccagctttttgggaaaaatgctgtcagcagtta

SEQ ID NO: 127589 - DNA, 525 bp, Homo sapiens
caattagagttttttatcttgctttgagtaagcctgtactcaagatgagtagctttatggtcacatacacacacacacacacacaaatcccttcctggctgtgaaaaactcagaactggaagattttaatttatcagaatcatcttttgtcagtcagcttttaattaagtgaatcctcaagcttccaatggagactaatcrcagcactgtgttgctcaatgcacattatacacccattcacgcattcaatcaatgtttattgaacgtttaccacatgctattaggcactgttatgggtgataggaatttggtggtgatctccatgaagttgggattctgttgagcaagatagccattaataaattcatcatccaaataaacttaaaaatataccgatgataaggctgtgagttatagatcctatggacatgtaaaataggtgatctgacataatttggggatggctatggcagaattgagtgtggaccaaaaacttgctgattatttggagctaacaagaaaagt

SEQ ID NO: 127590 - DNA, 525 bp, Homo sapiens
gcctttctccagtatgagttctctgatgataagtgaagtctggcttttgtgagaatgttttcccacattcgttacattmatagggtcttacacctatgtgtatcctttgatgtactatgaggaatgaattgtaaacaaaggtttttccacattctttaccctcatgggatttctcccctgtgtgagttctctgatgtacttggagatatgacttctcacagaattttttcccacattcactacactcattgggtttatcacctgtgtgtgttctctgatgtactgatgtactgtaaggactgacttatatctaaaggcttcccttcagatataagtcacataacctaatgacactttgcatttgtatgtatcgaatgtgcatgacacattcaatacattcttagggtttttgccctgtgtgtatctgccaatgaactgtaaggcctgacctatttgtgaaggttttctcacattcagtacattcataaagtttctcccctgtgtatatcctattatgtactatga

SEQ ID NO: 127591 - DNA, 525 bp, Homo sapiens
gcctttctccagtatgagttctctgatgataagtgaagtctggcttttgtgagaatgttttcccacattcgttacattaatagggtcttacacctatgtgtatcctttgatgtactatgaggaatgaattgtaaacaaaggtttttccacattctttaccctcatgggatttctcccctgtgtgagttctctgatgtacttggagataygacttctcacagaattttttcccacattcactacactcattgggtttatcacctgtgtgtgttctctgatgtactgatgtactgtaaggactgacttatatctaaaggcttcccttcagatataagtcacataacctaatgacactttgcatttgtatgtatcgaatgtgcatgacacattcaatacattcttagggtttttgccctgtgtgtatctgccaatgaactgtaaggcctgacctatttgtgaaggttttctcacattcagtacattcataaagtttctcccctgtgtatatcctattatgtactatga

SEQ ID NO: 127592 - DNA, 200 bp, Homo sapiens
gaattcatcttttcctacaasagaaacttctgaagtgtagaaaagtttctcagaaatcattatgagaggagccctgctggcaggcccctgctcaggctaggtggaactgtgggggttggaggcaatctagcagcacagccacgccagtgatagccacacagccggaaagcgggtctccaggtggaggttctcagaatttt

SEQ ID NO: 127593 - DNA, 440 bp, Homo sapiens
ccttatctcatggttaacaggaaggccacagcagccccaagtccccgactctcaccccacatcattgaagggaagagggggaacatctcttcctaggtaggtcaacggcccctccctgtctcactgctgtgggcatggccaccttggagccacttgcatatccagaggggtgggacatttccttgcgacccacgtgactcaccaaagcaacatctaagcattgtgaatgggatgagggaacctgacactgaggagatacccttgacatcttttatgttgcctcacttcccaaagcccaggggctgcctcttctattgcccaccaaacagcaatggtggtcatgkataggacatgctgcctgatgactcatggaatgctcttatgcacagtgtctctgtggatgctcagaagagctctaattttgatgacctctaattcac

SEQ ID NO: 127594 - DNA, 440 bp, Homo sapiens
ccttatctcatggttaacaggaaggccacagcagccccaagtccccgactctcaccccacatcattgaagggaagagggggaacatctcttcctaggtaggtcaacggcccctccctgtctcactgctgtgggcatggccaccttggagccacttgcatatccagaggggtgggacatttccttgcgacccacgtgactcaccaaagcaacatctaagcattgtgaatgggatgagggaacctgacactgaggagatacccttgacatcttttatgttgcctcacttcccaaagcccaggggctgcctcttctattgcccaccaaacagcaatggtggtcatgtataggacatgctgcctgatgactcatggaatgctcttmtgcacagtgtctctgtggatgctcagaagagctctaattttgatgacctctaattcac

SEQ ID NO: 127595 - DNA, 416 bp, Homo sapiens
aggaagtcattagataacacttgcattaggcagagtccaatcaggagacggaaaaaccctgtatttaagcaaagagaatttagcataattttttactagtttatgaagttgttagccatgtaattaactgaaagagtcaaaagcaaattgtrtgatatcatggaagtagaaaatagaggatgtagctatccccgtggagccgatgaaacaaaaggaagaggctgaatgattaaaacttcaatgctttgaggagagtgccttaactgaaactcagccctctgaagaagagggcatctctgctagtggtggtattcatgaactcaatgtaggctttgtggcagctgtgaaagtggaccaatcaaatctcccttgaagagagtacttactaatgggagcactgttagctggcaggccct

SEQ ID NO: 127596 - DNA, 587 bp, Homo sapiens
gctatgtgtttttgttttcttttggttccacatgaatgttaggattgttttttctatacatgcgacaaaggactaatatccacaatctacaaggaactcaaacatattagtaagaaaataacaaacaatcccatcaaaaagtggcctaaggacatgaatagacaattctcaaaagaagatatacaaatggccaacaaacatatgaaaaaatgttcaacattactaatgatcagggaatgcaaatcaaaaccacaatgcaatatcaccttactcytgcaagaatggccataatcaaaaaaccaaaaagtaatagttgttggtgcagatgcagtgaaaagggaccgcttctacatttctggtgggaatgtaaactattacaagcactatagaaaacagtgtggagattccttaaagaactaaaagtagaactaccatttgatccaccaatcccactactgggtatctatccagaggcaagaagtcattatatgaaaaatatatttccacacgcatgtttatagaagcacaatttgcaattgcaacaatatgcaactacccaaaatgcccatcaatcaatgagtggatag

SEQ ID NO: 127597 - DNA, 587 bp, Homo sapiens
gctatgtgtttttgttttcttttggttccacatgaatgttaggattgttttttctatacatgcgacaaaggactaatatccacaatctacaaggaactcaaacatattagtaagaaaataacaaacaatcccatcaaaaagtggcctaaggacatgaatagacaattctcaaaagaagatatacaaatggccaacaaacatatgaaaaaatgttcaacattactaatgatcagggaatgcaaatcaaaaccacaatgcaatatcaccttactcttgcaagaatggccataatcaaaaaaccaaaaagtaatagttgttggtgcagatgcagtgaaaagggaccrcttctacatttctggtgggaatgtaaactattacaagcactatagaaaacagtgtggagattccttaaagaactaaaagtagaactaccatttgatccaccaatcccactactgggtatctatccagaggcaagaagtcattatatgaaaaatatatttccacacgcatgtttatagaagcacaatttgcaattgcaacaatatgcaactacccaaaatgcccatcaatcaatgagtggatag

SEQ ID NO: 127598 - DNA, 536 bp, Homo sapiens
aataaacagtcagaccatagcgatatcttcttcatctttcagttgcacaagtaacacctctcttccttccgtaccatccgctttctaacatggataatttttcccttctgaatttgtttttcaacacaattttaaatgtgagcctaatatttacatgtatttacctaatttaaactaattataaatgaaccagtaaaaacaggttagaaatctggtagtaagtgcatctataagaaataaattcaatcaggcaaaattgaagcagaaattgagctgagagctgtgcttgggagatttaaagatgctactccagcctgtgaacagtaacttgaaaaaaaagtaccgccatttatcatgtttctaaatgagaagtataactacacttagattctctttacaaaactacccagaaaatgtcaaaaataattataaatacatttgtacaatttcacagtttgcaaggttctttcagaggaattattccatttggtttccraaataatcctgtgtgagatatactgccagtgaaagatatg

SEQ ID NO: 127599 - DNA, 493 bp, Homo sapiens
ttgtgaagattaaatgggctgatacatgtgaagtactatgaatagtgcctggcacacagtaagtgcagaataaagttagttatcattgttaccatgattttttttctcttctgtgagccagttcctgctgcagggttctctctgctgcytgttcagagccccctgttgggtaagcagtgctgaggaagatacaaaactacccaggaagagatggcccagctgggtgggtgtgcatctctgctggcttcacaaaccctgccctgccaacctgtcatttcaaattatcctccttcccctccgtgttctttgcactacatattttctttaaaagttccaggtaaaggagcttttgtaagtcaaagtacttaaaaccaaaaaacctgtgctagccacagatactttatcttagtttctaattaaacctctaggcagaatgaatcttgagcttgtccttaagattttctgaatcttctgtatattccaatcctgtacc

SEQ ID NO: 127600 - DNA, 529 bp, Homo sapiens
tttgttctgaattggcatcacaataaattccaatgtattgtttaaaattcatattaaagaagaatttatgtatcatattctttgttatgtttcagtataacttgaaaacctagtgaagagatattattattattattatgtattgtcttcrcttctatctggtgtacaactcccttggtattttctaaataatcagttctaattccacactagatttcatattgttaggttttttcactagatttgatcacgttcatactttgtgggaacgatttttctaaacgcctttattttgaaaatttttacatttataccaaagcggaaataatagactaatgaactcctacctacccaaaacccagctttaaccatttcaacccatggtgatatagtttggatattggttcctgcctaaatctcatgcttaactgaaatccccgttgctggagttggggcctggtgagaggtgactggatcatggcggaagatccctcccttatggctcggtgctctctttgtgagagtgagt

SEQ ID NO: 127601 - DNA, 529 bp, Homo sapiens
tttgttctgaattggcatcacaataaattccaatgtattgtttaaaattcatattaaagaagaatttatgtatcatattctttgttatgtttcagtataacttgaaaacctagtgaagagatattattattattattatgtattgtcttcacttctatctggtgtacaactcccttggtattttctaaataatcagttctaattccacactagatttcatattgttaggttttttcactagatttgatcacgttcatactttgtgggaacgatttttctaaacgcctttaytttgaaaatttttacatttataccaaagcggaaataatagactaatgaactcctacctacccaaaacccagctttaaccatttcaacccatggtgatatagtttggatattggttcctgcctaaatctcatgcttaactgaaatccccgttgctggagttggggcctggtgagaggtgactggatcatggcggaagatccctcccttatggctcggtgctctctttgtgagagtgagt

SEQ ID NO: 127602 - DNA, 529 bp, Homo sapiens
tttgttctgaattggcatcacaataaattccaatgtattgtttaaaattcatattaaagaagaatttatgtatcatattctttgttatgtttcagtataacttgaaaacctagtgaagagatattattattattattatgtattgtcttcacttctatctggtgtacaactcccttggtattttctaaataatcagttctaattccacactagatttcatattgttaggttttttcactagatttgatcacgttcatactttgtgggaacgatttttctaaacgcctttattttgaaaatttttacatttataccaaagcggaaataatagactaatgaactcctacctacccaaaacccagctttaaccatttcaacccatggtgatatagtttggatattggttcctgcctaaatctcatgcttaactgaaatccccrttgctggagttggggcctggtgagaggtgactggatcatggcggaagatccctcccttatggctcggtgctctctttgtgagagtgagt

SEQ ID NO: 127603 - DNA, 620 bp, Homo sapiens
tgcaggtttgattcttctatagggttagacttttagattcacatattcatattccttgtttaaagctaacagtaggcaaaacatatartgagggttttgcagttaattatgccagaaattgaataagaacaacaaaaaatagtttggcattttgtagacaaatatataaccctaattgttgatgggctctaaccatgctatgatttgataataaagccttggataaattttagtgctttcctactagtgacccttaaatcacaagacatcttaaagggaactgtctgttgtggctcttgaagatatatttttatttgtagagaatttaaagatcagccgtgtgctgatctttttgactccatgtctcaaaaagaggccaatgtgggttaggcattttaacggcaccactcactccataatcaactggaaactgatcattgatctatacaattcaattttcaatgtaaaataaataagattttttctagctgtaaatgagcatctttgggtagaacactcctttcctggcttggcataaatataataaagttatggttagaaatcagtctcaaatactaactgatatagctgactatattgcaaaggctatggctgcccag

SEQ ID NO: 127604 - DNA, 620 bp, Homo sapiens
tgcaggtttgattcttctatagggttagacttttagattcacatattcatattccttgtttaaagctaacagtaggcaaaacatataatgagggttttgcagttaattatgccagaaattgaataagaacaacaaaaaatagtttggcattttgtagacaaatatataaccctaattgttgatgggctctaaccatgctatgatttgataataaagccttggataaattttagtgctttcctactagtgacccttaaatcacaagacatcttaaagggaactgtctgttgtggctcttgaagatatatttttatttgtagagaatttaaagatcagccgtgtgctgatctttttgactccatgtctcaaaaagaggccaatgtgggttaggcattttaacggcaccactcactccataatcaactggaaactgatcattgatctatacaattcaattttcaatgtaaaataaataagattttttctagctgtaaatgagcatctttgggtagaacactcctttcctggcttggcataaatataataaagttatggttagaaatcagtctcaaataytaactgatatagctgactatattgcaaaggctatggctgcccag

SEQ ID NO: 127605 - DNA, 620 bp, Homo sapiens
tgcaggtttgattcttctatagggttagacttttagattcacatattcatattccttgtttaaagctaacagtaggcaaaacatataatgagggttttgcagttaattatgccagaaattgaataagaacaacaaaaaatagtttggcattttgtagacaaatatataaccctaattgttgatgggctctaaccatgctatgatttgataataaagccttggataaattttagtgctttcctactagtgacccttaaatcacaagacatcttaaagggaactgtctgttgtggctcttgaagatatatttttatttgtagagaatttaaagatcagccgtgtgctgatctttttgactccatgtctcaaaaagaggccaatgtgggttaggcattttaacggcaccactcactccataatcaactggaaactgatcattgatctatacaattcaattttcaatgtaaaataaataagattttttctagctgtaaatgagcatctttgggtagaacactcctttcctggcttggcataaatataataaagttatggttagaaatcagtctcaaatactaactgrtatagctgactatattgcaaaggctatggctgcccag

SEQ ID NO: 127606 - DNA, 585 bp, Homo sapiens
cagctgggcttgggggcaaatcacagctcctgcttccccaacaggaggacacaggccaagctccctgaagggcgctcctagaaaacagtcctcaggaaagtgtgggagatcactaactagcaccagtaaagtagtcaggcccacggggaaagcctttggaaccatctggagygatcggagtgagagagagagatgggaccactgttgtaagaatagcagaaggagccactcatgtcggagaagcctccccgtgtggaaacgacccttgtgtgggtaactcagggtcccttgggggccctctttctgggaagaggctgtattaccttcagttttctgctgctgggtctctgtttccatgatctttgccattagagaaattttactttccatcagggaccatctcatcgtgacccccccacgtgctaacttctctgagcccagtttcctgatgaggcatgggggccacaggacacaggcctggaagcagtgagaagcagtttcaagagggagtgcatccaggtgcagagatctgggaccgagatctctttctttgcctcccccacttcacctgggtacccctgtgat

SEQ ID NO: 127607 - DNA, 585 bp, Homo sapiens
cagctgggcttgggggcaaatcacagctcctgcttccccaacaggaggacacaggccaagctccctgaagggcgctcctagaaaacagtcctcaggaaagtgtgggagatcactaactagcaccagtaaagtagtcaggcccacggggaaagcctttggaaccatctggagcgatcggagtgagagagagagatgggaccactgttgtaagaatagcagaaggagccactcatgtcggagaagcctccccgtgtggaaacgacccttgtgtgggtaactcagggtcccttgggggccctctttctgggaagaggctgtattaccttcagttttctgctgctgggtctctgtttccatgatctttgccattagagaaattttactttccatcagggaccatctcatcgtgacccccccacgtgctaacytctctgagcccagtttcctgatgaggcatgggggccacaggacacaggcctggaagcagtgagaagcagtttcaagagggagtgcatccaggtgcagagatctgggaccgagatctctttctttgcctcccccacttcacctgggtacccctgtgat

SEQ ID NO: 127608 - DNA, 587 bp, Homo sapiens
ggtggggccaccacagagatcctccactagagtgatgtccagtggacccacaggggcagagctagagctgccccttagactrcaggccagtagagccaccagcaggtaattctaccttgggagaaccacatacatgtgattccaacccattagggctgcagtgtgggctgtgcttagcacagccatgggagcacggccacccaaagccacgtgagccaacccctaccacagtttgtccagaagtaggacaacaagtctaagacattatttgcaggctttaagatttaatgttgttttccctgttgggttttggacttacttgggaccagttacctctttcttcttacttctcttttttgtaatggacatgtctatcctatgcctgtcccactgttgcattttgaaagcacataaattgtttaatttcacaggttcacagctggaaagcaatttgcttcaggatggaggtaccttaagtctcagccatatctgatttagatgatatttagataagactctggactttagacttctgagctgatgctgaaatgagttattgtttgtggggctactgggatggaatgaat

SEQ ID NO: 127609 - DNA, 587 bp, Homo sapiens
ggtggggccaccacagagatcctccactagagtgatgtccagtggacccacaggggcagagctagagctgccccttagactacaggccagtagagccaccagmaggtaattctaccttgggagaaccacatacatgtgattccaacccattagggctgcagtgtgggctgtgcttagcacagccatgggagcacggccacccaaagccacgtgagccaacccctaccacagtttgtccagaagtaggacaacaagtctaagacattatttgcaggctttaagatttaatgttgttttccctgttgggttttggacttacttgggaccagttacctctttcttcttacttctcttttttgtaatggacatgtctatcctatgcctgtcccactgttgcattttgaaagcacataaattgtttaatttcacaggttcacagctggaaagcaatttgcttcaggatggaggtaccttaagtctcagccatatctgatttagatgatatttagataagactctggactttagacttctgagctgatgctgaaatgagttattgtttgtggggctactgggatggaatgaat

SEQ ID NO: 127610 - DNA, 556 bp, Homo sapiens
ggaattcattttccattctgttctcttttgtactgttagacttatttatcacatgcatgtattaaccagtgaaaataaaattaattacaaatgatatagaaatctatttttgtcaaaagataataaagtttggatggctgtctataaagtgtgagccagagttattggtggagggaactcccacctgtctctacactttggcccctcttcccaccctctcctctcctccacctcataagcgaggaggagtttaaytgagagtggtccaagcctaggatatttgggggccaccttcactagggggcaaggtcactgcactgaacagccactagtgaagcacttcttccacccctgtcccaggctgcagaaggcaggtcggtcctgccccaaagaggctgccggctttgatttcgtgggaaaggggtagaaagcccctcaaaggcttcaggcctgggccatattctccatcctatcccttaccagggttccacattcattcataaatctactcatagagtagcaattggaatctcatccggccactgtttcttgtata

SEQ ID NO: 127611 - DNA, 555 bp, Homo sapiens
gaattcattttccattctgttctcttttgtactgttagacttatttatcacatgcatgtattaaccagtgaaaataaaattaattacaaatgatatagaaatctatttttgtcaaaagataataaagtttggatggctgtctataaagtgtgagccagagttattggtggagggaactcccacctgtctctacactttggcccctcttcccaccctctcctctcctccacctcataagcgaggaggagtttaactgagagtggtccaagcctaggatatttgggggccaccttcactagggggcaaggtcactgcactgaacagccactagtgaagcacttcttccacccctgtcccagkctgcagaaggcaggtcggtcctgccccaaagaggctgccggctttgatttcgtgggaaaggggtagaaagcccctcaaaggcttcaggcctgggccatattctccatcctatcccttaccagggttccacattcattcataaatctactcatagagtagcaattggaatctcatccggccactgtttcttgtata

SEQ ID NO: 127612 - DNA, 629 bp, Homo sapiens
gttgaattttttaatctctagagatactatatatctcagtgaacgagtgttcatcattacaaaatgtttctctattactagtaatactccttttcttaaatcctgctttatttgacatggatataggcataccaggttgcttargcttcgtgttttcaactttttatctctttacttggcatcatttccctgtctttcatgtttcttcagcttgaaactacctgcctttaaattttgagtgtttaatccacttacatttatagcactttttggtatttttaggttagattcttttttttttttttttgtctctctgttcttttagatttcatgtcatttgtgtcactccagtcttttctttatataccatgctctctcctctataggcttgttatccgtaattctttctggtgtcattcatttttcattgttgctccagagattagagtaggcagttttaaattatcacaggttacttgaaattaaaattgtgcctacatatgagtgtcattgtaattactatttcatagtatttgctgagcttcctggacctatggtttgattattgtgttcaaatttcagttatgccctaatttacagactgaattccttagtccttggacagagcc

SEQ ID NO: 127613 - DNA, 629 bp, Homo sapiens
gttgaattttttaatctctagagatactatatatctcagtgaacgagtgttcatcattacaaaatgtttctctattactagtaatactccttttcttaaatcctgctttatttgacatggatataggcataccaggttgcttaggcttcgtgttttcaactttttatctctttacttggcatcatttccctgtctttcatgtttcttcagcttgaaactacctgcctttaaattttgagtgtttaatccacttacatttatagcactttttggtatttttaggttagattcttttttttttttttttgtctctctgttcttttaratttcatgtcatttgtgtcactccagtcttttctttatataccatgctctctcctctataggcttgttatccgtaattctttctggtgtcattcatttttcattgttgctccagagattagagtaggcagttttaaattatcacaggttacttgaaattaaaattgtgcctacatatgagtgtcattgtaattactatttcatagtatttgctgagcttcctggacctatggtttgattattgtgttcaaatttcagttatgccctaatttacagactgaattccttagtccttggacagagcc

SEQ ID NO: 127614 - DNA, 629 bp, Homo sapiens
gttgaattttttaatctctagagatactatatatctcagtgaacgagtgttcatcattacaaaatgtttctctattactagtaatactccttttcttaaatcctgctttatttgacatggatataggcataccaggttgcttaggcttcgtgttttcaactttttatctctttacttggcatcatttccctgtctttcatgtttcttcagcttgaaactacctgcctttaaattttgagtgtttaatccacttacatttatagcactttttggtatttttaggttagattcttttttttttttttttgtctctctgttcttttagatttcatgtcatttgtgtcactccagtcttttctttatataccatgctctctcctctataggcttgttatccgtaattctttctggtgtcattcatttttcattgttgctccagagattagagtaggcagttttaaattatcacaggttacttgaaattaaaattgtgcctacatatgagtgtcattgtaattactatttcatagtatttgctgagcttcctggacctatggtttgattattgtgttcaaatttyagttatgccctaatttacagactgaattccttagtccttggacagagcc

SEQ ID NO: 127615 - DNA, 534 bp, Homo sapiens
tttggttctagggagctctagcagtggtaaaggacggggcaatgggcaatggatggcctttaggcttccatcacatggccatgtcatcatctrttaagatgtcctcttttaggttgcagcactgttgcaacacactgaacctaaatgcaagccctttcctggtgtttttgttttgttttgttttgttttgtttttgttgttgttgttgttgttgttttccctctcagctaccaacttaccactccctggcacttgggaaacatttgctctttctaaaacaacctggaatcatgaggtaacaggtaaaacttaaggatttttgtcccatgtgtgccacatgctaggaacgagaaaaattgggcattttaaaacattttcccaggatcccattgggaacacagcacagaattctctgctcttcaatattcccaaggttatctgagatttccttgtacaacccactgagactatcttagagaaaggtggaaaggctataaattaattgaaatttccttggggtgaccaagataaaac

SEQ ID NO: 127616 - DNA, 618 bp, Homo sapiens
ccctgctgctgttttgctgataaggaaatggaagctgagttcagttaattgatgtgtccgtggcctcagttgacttctttcttccattcttctcaaacattagagctagaatcatatcttakcaacaggtggtcccagcagttggcagaggacacaggcagaacccagaccattcctcctttctgctatggaacctggcctccatgcaacacaatgcttagcacttgtgttcttcatatcaggtcttatattttatactcagcttctacactctctgactttttccacttgtgtttcaggttctcactttctctgataagtaagttcaaccagaaaatgtgaaagcattaataaatgagagaaaaataaacaaagtacctgattgcctttctcttgacatcatacttctttcttttcctcctcctcttttggaataaagttgggacaataaaactacacccattctctctgtctctgtgtctctgcctctctcctctctctctctttgtctcatagtatctttctcactagaaataaccccttgcatacacacagatatatgtactactttttcatcaaactcttctcattcccctttcaggtttgaaattttccctt

SEQ ID NO: 127617 - DNA, 564 bp, Homo sapiens
aagcaagcatatcttaccatggtgaagcaggagtgagacagcaaagggagaagtgctacacaatttcaaacaaccacatcttatgagaactcactcactatttcaagaacagcagggggaaaatccaccccatgatccaaacacctctcaccaggtccctcctccaacattgagaattacaattcaacatgagatttgggcrggggacacaaaatcaaaccatatcactcccattgatgaactcagtggttgcttacaaagtatccaataaagttactacaatatgtttgatgtgctttatgttttatattgagctgtgacatacatttatcacatataattttcaaaacaacaactcctcatttacatgaataactcacacttaagggagccacatttttttttccttttttggtcattcacaaaaaattgaagaaccagaattgaaactcaagtttttatctgccttcagagcctctgcagttttcattacattatcttatcttaaaaaattattctatctgatagtctcaaaagtttttagaagtactggaagaaagataa

SEQ ID NO: 127618 - DNA, 576 bp, Homo sapiens
ctaattgtattccatttttatagtaactcatacattaaatgatttgtaatacttttaaatatattaagacttgttttatgtcctatagtatttggtctaccctggagaatgttctatgtgtatttaaaagaaagattattttgctgtttttgggtggagtgttttgtaaatatcagttaagtcaagttgactgatattattcaagtcttcatccatgatgattttccaagttgttgttataccgattattgagaaggagatattgatgtctctaacagcaattgttgaaatatctatttgtctttagggttttgttttgctacatgtattatggtgctccttttaaggtgcatatacatttataagtattgyacaataaatcttcacttaaagttgtccatatgttcttggaaattgtaattttaaatgaaattatgtacagcaggtcctccaaattatgttgttttattcaacattgtttctttgtaacattgataaaaaaaactggtttgttacatgtcattttgctcaaagtcatagtttccaaaaacctgtcaatgatgttgaggacttact

SEQ ID NO: 127619 - DNA, 594 bp, Homo sapiens
gtgagaatttaaggttcaatgacttatctaactttttcttgtaaaaagaacaatcactttcagaaaacctatgcccgcatggaatgaygcatccacttcctcctaaacatagatcacattatcagtgttgccaaatatatcaacaacagcctgactgttgaacaccatgtttatctaatggaccataacagacagcgagaacaagcacagttggagacagcaatctctaaaagtatttccaaaccagcatcattctttattttttttctttcctttttcaattaagggaaagggagttattaagcaagacatacaaaagcactgttaggatagctccactgaaaccatttctttctgctaaaatgtaaaataattctggagggtcacatttttatgtattcacatgagaactaggacagagaagaaggagggccgtggagtcaagtttacactggacacctaatcaaatctgttgtgaattgcatagagaaaattcctaaggactccagagataaattctcaacttttcccctgtgcagagtgaaacagttcaaagctgaggatcaggatgggactgagagggattttatttaa

SEQ ID NO: 127620 - DNA, 504 bp, Homo sapiens
ttagaaaataccaaacttttaacctaccactgcatttagaataactttatccacaataaaataaacctaaaatatttacttatcggttaattagtaaaccaattgcattagtctccttaagctgctgtaacaaataccacaygctgggtggcttaagcaacaggcatttattttctcacagttctggaggctggaaagtccaagaccaagttggcagaagggttggtttctgatgaggtctctttccttggtttgcagaaggccatcttctcattgtatctttataagtcctgctctgtgtgtgtgtggagagagagagagatactgtgtctgtttttattgggacactaatcctaccagattacacatcgttatgacttcatttaaccttagttacctccctaaagtccatttctctgaatataggcacactggggaggagtgcttcaacttgtgtttgacggggggacacaacagagacacaattcactccttaacatcatt

SEQ ID NO: 127621 - DNA, 601 bp, Homo sapiens
gtgacttcaattttagatagctgttctttgataatgcactttttacaacgttctttgcttggagacaagtgatacttccctgcygttggattcttacactttacatagggaaaattcacatttctgagtggaattagctgcccctgcctggtctgtttctctctcctgagccatcatgactaccttggattctaggaagaaacacctagattaatgccacctggattttctttaaaatgagtcagactctgccttcattgtctgtgtacaaagaccactggcatgtatctgcagctttttgtttctttgcaggaaatacagggaaaatgaggaatagacgaagaaagcttagaaggggtattgtttatcccatcccattcttccaccaatacaagcaacaaatacccttaaaaacttcagaaggactgcatgcctatcacaaaacaagaaaggagggagaacatttgaaaataaagggtctgtttaataaatgaaaatacaaaaaaaaaaaagagtagagaagaggacaactactagaaaataaaactaacagagaattttagttaggatgcagctacacgggatagatgaaaatgaaaac

SEQ ID NO: 127622 - DNA, 594 bp, Homo sapiens
taaactgggagcatatttttacatatatcatatcattcttacaacaattcacaagataggttttataatattattcacattgaacaatgaggaaacgaatgatcagagaggttgaataatttgctcaagatgatacagctagtcagcataattgttaacatttggatgaagtcctaactgagtttaaaacttttatcttctcctttagaccataagattctacaaaaagcaatgggaaatgaacaactggaggctgcatgggtgctctgaacgctaggcctcaggaagatagtagaaaggaatcaacttttactaggtgcttattatttaccaaacccttttgttagaaaatgcacacacattacctcatttaatcctcacaacaataccaagaattaaatattgtcattaaaggcaagmaaccttagttcagaaagagatattacatttacccttgaactagtgtagccatgtgattaagtcctggccaatgaaatataagcagaagttgttgggaagaaactctaagatgttttaggaagaccacgtacagcgagagaaaaccctcatttgcctttctgcttttactcctta

SEQ ID NO: 127623 - DNA, 463 bp, Homo sapiens
aacaaaacccctcatactactatggacactaaggtctattttctgttaatagggtaaaatattagacagaaaacaaaattacatgaaaaagaaggtttatttcctgttcatagagttccaaatacccagatcactccagaacacattcccccagctgccaggaatgttatgtgctaatggctggcaggtgttcctctccaggagctgcctcagtcaaatggggccttctctcccaaggttatccctccacaggggtagcgcatgtctaataaakggtcaaggtggagttacaaggattgccccttgccttaatttcagacaaccctaaagggccattctttctccagagttccctgtgggatcagcaaggcctctgttgtaactgcatcacatatcatagatcaactttgccctctgcccaattctcacagttgtcattcatgaaatcaccccccaaggggtg

SEQ ID NO: 127624 - DNA, 622 bp, Homo sapiens
actaaacagagaagtatctgtgcagctgctggcacttgttgcccatggaggaatacatcacatcagacattacagagattcagttgtaggagattaatgaagagactgcttagttaaagtgagtagactatctagctcattttttaatgtatttgattttaggtggtttggtttatggagmcctggctaaggagcatactccaaacttttggtattatcctcctgatagtcataatagtagtctccctggtgcactgtattctctcaaaagttttaaatgtttgcatgcagccgtctgtagaatgtcaagtggtctctcttcaactggaatgacaagacctgaaagaaatgtgtgaccatgagggcaccataatctgtaaatgacgtgctaagaccagaaacccaaaatgatggtaactgagagaggtgctaaggccctaaattttggtcatactctcacctaagtgagaacctgaccaaaaggggggaattattaaacaaaattatgagaggccattgttttggactaagctcatgcagtaggccctaacagaccagaccaaaccaaaatggagtcacttgtgctaaatatgactaatcaaactaagagtttaaagaaaca

SEQ ID NO: 127625 - DNA, 569 bp, Homo sapiens
taataatttcttatggtctcttgtttctttctcacattttcaagttcccctgttatctttaaaactttgttgatataattattttattttcagtgcctgataattatattaccggtggtctttgcagaccttttctgggatctactttttgtttcttgctcatagtgcctttttttcctttgtgtgttttgtaatatttttattgtggactcttcattttctttggaactctgagttctggattgaagttgagttcctctagataggattagcattggcttttgccagttgcttagtggaactaccaaccttgagcaacttcgaattgtattttgattgaggactcacacaggtggtrtgaattggggctgcaaacttacgtgagaactagcttgttactaattctcagggatatttttctctccacctagtgtcaaggtaaagacaggcaagattttgctgtttgtttttgttcagtgagattcatttctcatcttggacctaggactcctagcttttatatgtagtttaaaaaaagctggtttactcattttgaggaaatcacaggc

SEQ ID NO: 127626 - DNA, 620 bp, Homo sapiens
atagcatagtgtgcagataacacaggctctctagccagacatacctgggtttaaatttcattactattgtctactagtgggaaacattaggcaaaattatataagattgtgtttatttatttaccttatttatttctcctctgaaaaagaggactgaaacatctctggataatgggtacctcttgttgatgccttcgcattatcttccccacgtcttttggtaaaagcaccttagtctctcctggggcatcatattccttactttctgtccatgtggtttagtaaagttgattctagcccgaggtctatctatgggcattttacctaatcagagcccataagatttaatgctaggagtttttctggaacaagcaagaagtccttttctttaacattggagtgaattgggaagatagaagcttctagaggccactgcaaagagatattttgcccaagtgaagctaaaacagaggaaaggagagtggaatgatggggasagatcaagctcttatgcctttaagaagcctatggatacagtggagtctaataaagttccttctgactttccagacccataagccaatatctctttaaaatttttttcttcctaaaacaggatg

SEQ ID NO: 127627 - DNA, 585 bp, Homo sapiens
tttaaacaaaggaatggttacaaatttttaagtgtaataatagtgctgcagtgaacatgggagtgctaatatcccttcgagatcctgctttcagttctcttggataaatayccagtagtggctggataacatggtagtcttatgtttaattttttgaggaagtgccatactgttttctctattgagcactatcatcagagacggtctgccccctggctagcctgagactcatgaacaggaaaaccagagtggaactagatgatcacagacctctccagactctgagcttctagggttctcaagtcctgtttttcaactggtgaaaataaaagaaaatcaagcaggtgcctgggaatcagcctggccaaggaagtatttctgtggattctattgaaagaagccatggaccccaaaactcatatcacataaagttctggccctaagtttcctccactctcagccaaagactttgggaaatagatcctttaataggaaggggaggacatgtgctcctagcatcccaagttggaaactttgatgtatttttccacagatatggttatatgtggtggctagagtctaata

SEQ ID NO: 127628 - DNA, 585 bp, Homo sapiens
tttaaacaaaggaatggttacaaatttttaagtgtaataatagtgctgcagtgaacatgggagtgctaatatcccttcgagatcctgctttcagttctcttggataaatacccagtagtggctggataacatggtagtcttatgtttaattttttgaggaagtgccatactgttttctctattgagcactatcatcagagacggtctgccccctggstagcctgagactcatgaacaggaaaaccagagtggaactagatgatcacagacctctccagactctgagcttctagggttctcaagtcctgtttttcaactggtgaaaataaaagaaaatcaagcaggtgcctgggaatcagcctggccaaggaagtatttctgtggattctattgaaagaagccatggaccccaaaactcatatcacataaagttctggccctaagtttcctccactctcagccaaagactttgggaaatagatcctttaataggaaggggaggacatgtgctcctagcatcccaagttggaaactttgatgtatttttccacagatatggttatatgtggtggctagagtctaata

SEQ ID NO: 127629 - DNA, 588 bp, Homo sapiens
atagaaggagcttgagtcccaggatgaatgtgtgaaatagaacacaccttggcaatataagcaagaaataaatatttattctggttgttatattagatagcacacttatatcgatgccttgaagtatgggggtctttcaaaacaaaactccaaaacatgtgacattggcttagcagttgagtaatggacaccaagaaaactgacatcaaaggctggaaagatggcaacctacattatgcagtggtgaaacatttggtaaaactgtcacctcgcttaatttgcacagagtttacatgtgcactgaagctgtagctccaggggaaatagttggaaaataacagagtgttagtgagagtatgactattattagctctccttgacaaggtactacccraagaagaaaaaagaaaaaaggtaagctaaacaaactggccagtttacgagccacagtggaagagtgtagaaggagtccagaaattttggacatcaggtgtgaaagaattaactgcttcttgatcctaaaaggtaaaatgtatacagaccttgagtgacaaagatctagtaacattcctcaactgaacagagtga

SEQ ID NO: 127630 - DNA, 578 bp, Homo sapiens
gattaggatccaaattcccaggaaagagaatctgcttggccaagattggatatttccaccctgttaacccaggtgggtgaagaggactgtgatgtgtrgcccgccatgggacttcacgcatcagaaagggagttccactgaggaaagggctgctgtttccttaaggtgagatgagatgtagagcagataaaaatcaacagatttctactgtaattactattttgagcaatggcataaagttgtactgaatcagccatattctcttgcctgttgtgacccatagcaagtatttttgacagaaaaatgaatagagaatagtaataatatcatccatgacaaaatgatataactgatgtcaattagctcatgagacttagagccacgacattggcatcattaatgttgtgcttgaactgatctagttaatcatccatggataatatgccccactcacatgctccctggtggtccctgctccccacaggtctagcggaacagggcagtgctctaacactggtgtcaagctggtgagaggctacctcccagggtttccttctgaccatttaatgtcaggcagt

SEQ ID NO: 127631 - DNA, 590 bp, Homo sapiens
tacttgcaagatacaatgtggatataggcaatgggtaaatactsccatacaaaaagggggaaatcagccaaaagaaaggggctccagacctcatgcaagtccaaagcccagcagggcagtcattacatcttaatgctccaaaataatttaccttgactctatgtctacatccagggcacactggtgcgaagagtgagctctcaaagccatgggcaggtccgtctccctagctttgcaagattcagccctcatggctgctctcaaggcttcctttttagtgcctgttgtttgtacagatgcaaggtgcaagctgctagtgtatctacattctagggtctggaggacagtggccctttcttgcagctccaccagaggacagtggtcctcttctcacagcagtatcccagtggggactctgtgtgagggctccaaccccacatttctcctccacactggcctagtatagtttctctgtgagggctccaataatgcagtaggcttattcctggatatctaggcttttccatacatcctctgaaatctaggtggaagctcccaagcctcaaatcttgtactgtgtgcaagcgcag

SEQ ID NO: 127632 - DNA, 590 bp, Homo sapiens
tacttgcaagatacaatgtggatataggcaatgggtaaatactgccatacaaaaagggggaaatcagccaaaagaaaggggctccagacctcatgcaagtccaaagcccagcagggcagtcattacatcttaatgctccaaaataatttaccttgactctatgtctacatccagggcacactggtgcgaagagtgagctctcaaagccatgggcaggtccgtctccctagctttgcaagattcagccctcatggctgctctcaaggcttcctttttagtgcctgttgtttgtacagatgcaaggtgcaagctgctagtgtatctacattctagggtctggaggacagtggccctttcttgcagctccaccagaggacagtggtcctcttctcacagcagtatcccagtggggactctgtgtgagggctccaaccccacatttctcctccacactggcctagtatagtttctctgtgagggctccaatmatgcagtaggcttattcctggatatctaggcttttccatacatcctctgaaatctaggtggaagctcccaagcctcaaatcttgtactgtgtgcaagcgcag

SEQ ID NO: 127633 - DNA, 568 bp, Homo sapiens
cttttccaattaaattcagttgcatttatatccagaaaattttcacaggggattggtttcctgctgtggaggtgggttttgaagctacttgaactaaattacagccaacatacatcctgagcacactgcagccctcttagatactttctacattcagtgtcctgattccaagagggttgattaattcacatygggttttcacacctagaaaacagtagtctgaaaaaaatcttgatgaattggagataaaaagaaaaacttgttaaaagatataatttattcaggacataaaaaataagcacatttcggagaagatataatcttctgatcctatttttaaaaatctattttgtcaagatttttttctattttatttttgttttaatttcattaactttggcctcaaacatttctgcgttggtaatacacacattgaatattttcatcaattaaaaaattatacttcgttagaggttataattctcacatcaaagtgagcatgcctactcacaatactcttctactcccaatgttaagacatacccttaactatgaatgagcatgagag

SEQ ID NO: 127634 - DNA, 621 bp, Homo sapiens
caatgacgagaaagcaaagatatacagcaaatcttagaaagatgtctataaaattttttttgttattggtgtatgaaactggattcaaatagataagaagtctttggtttcaggctaactgctaaagcaatttctattctgacctttaaaaaccatctgtactggtttaagtcttaatatgattttttagtctacaaacatctacagagaagagaagcaggctagaaacgctatttagcatccaagcrgggcatgtcatcataataacaaaagttccctatgtatatcttacattatttcccattttcaaagaaagattctactgtattaatcctgtctctttgtcatgatatatatttgatgtgtgaggacagatgtaaatctatatattcggaccattgagtggctcccctagtttataaacctacagatggagaggagctacccaatagtctgaatagatacaaatattacaatttggtatagcaaactatattagcctaatgagaaagggaacagaacacatttgtatgaaaagcttccaaagagctagtaatttacaaagtctttttatgggcaatacctggaaaatgtattaaacatgagagtgtaatttatttt

SEQ ID NO: 127635 - DNA, 505 bp, Homo sapiens
tggcagaaactcttgttcgttttctttatttcttttccaaacaaagtctctctctttgtgctgagctgcctggagctgagggtgatgtgatgaaagcagtcccgtggccaccaccactggaattgaattgggccaaacctgaagacagcacatcactgagtctcacccaaggtccactgtaaccaccacctggctaccacctatgtttgctcaaggccctagggctctacaatcattagttggcaaaggctgccaggttgtgtttttcccttcagggtactaagtttattctggccccaagcaggtccagagatgctgcctgtaagcaagggactgaaataaaacatsttagtattctattccactgcagctgtgctggcactcaaacacaagacgaagccttgcctgctccttttctcccctttccacaggtagaagagcctctcctatggacctcaccaacattgtcccagagaaagttctgccccaccactgccaatgttca

SEQ ID NO: 127636 - DNA, 590 bp, Homo sapiens
gcaatcaaaacgttatgatttgaatgttccctccaaaactcacgtggaaatttaattgtcaatgtaattgaattcaatggtacggccttgaaaaggtgcccagggaaggcagatttatgccattattgcaggagtgggttagttattacagtagttcaggttcctctttctctttgtctcatgtattgtctatttctctcttaactttcagcatggaatgcccctcagcagatgccaatactatgctcttggacttcctagtttccagaagtttgagtaaaaatagcttattttccttataaattacccagtctatagtattctgttatagcagcagaaaatggtgtaagacacagacccaggaagtttgaattgatagttgtgtgatacaatttaatcagttgtgttgattaagctctaatgcctatgatgttacacagtggcaacagaaagtatgtgcaaatttttaaaatactacaaacttagtaaaatactaattattatgtagctataatcaaaagcagctattagaactggttttaagtctccaaaaasttaacaaaaactacctgagtagtgttcgggaaatt

SEQ ID NO: 127637 - DNA, 553 bp, Homo sapiens
taggtcatggaggcagattcctcatgaataagattagtgcctttagaagaaaagtctgagagagaccattcacattctccaccacataaggacactatgagaaggcgtcatctctgaaccaggaattttgcccttaccaatgactgaatcagctggttcctagatcatgtacttcctagccttcaggaactgtgacaattcattttctgttatttataagctacccagttcatagtattttgttacagcagccaaaatgaagtaagattgtacaactttgtgaaatttcaggagactaaaaatagagaagaaaccttaaaagtttcctgagaaatgaagagaaattaaaagatatcatatacaawtaaatatctgaaagttattagatatttcataggaacacaggatgctagaaatcaatggagccatgccttcaaaattctgagggaaatggttcacgttttgtgtataaatttgtgtaaaattaagtttgagggtagaacatctagatatacataaagatgtggcaagattgtcactttccaggcagcct

SEQ ID NO: 127638 - DNA, 443 bp, Homo sapiens
ttggcctctctagcttggttggggatattctcatggatgataacctgaaatgtattttccaagttgcttccattctcttcatctctttcagaggcacaaaggagttgttgacttggtctctttacatgatcccatacttcttggaggtttcattcattattttaattttttttattcttgttaactatcttatttcagaaattagtcttcaagctctgagattctttcctcagcttggtctattctgctgttaatacttgtgattgcattatataattcttgtggtgtgtttctcaactccatcaggtcagttacattcttttcyatactggctatttttttctgtcagctatcattttattgtgattcttagctcccttagattgggtttcaacgttctcctaagtttcaatgatctttgttcctatctatattctgaattc

SEQ ID NO: 127639 - DNA, 631 bp, Homo sapiens
aagttcgatcaacagagaatctttgtcattactaacagtgactcttaaaggttcctatgtcattgttattatttcaggaraaaataaacaaagttttaaaaataaatttgacaaactttaaactgcaactttcatgatgcaggtatcatgtctgtggaggtcactgccatttactgtgaatacttgatgcccaataggatctttaaaaatatgtattaaataaataagcaaataaaatatttttattttgtctactatgcattatgtgataagctagagttaagacagtgggtgccccctatccatggcttcaaggggataccagagacaagattcacatgctagagtagaatttagcaacctctcatcagcctttccacaactgggacagctcaacctaaagcacagggaaaccctctgccatgaacaacattacacacaacagcagagccattgctcattactaaggtcataggtgaatttcagggttaagtcaacaccagatctgagttctcattactttcaattcaatacacaatttgaaagcaagccagttaatctgagaggatatgtttcagtactatgacagccttattccagcttcagcttggactttggttcccattacttt

SEQ ID NO: 127640 - DNA, 389 bp, Homo sapiens
gtggttctttttgagtgtagtgcacttcctcatgggtcacactgtcaacctcacctctaggggtctgccaggactttagtctagttataggtctaaaagcaaacaggggtgttgggggtgactcctgaggaaaatcaacattatcttgccttgcaactacctcagtggaggccatcaccattgcctcaggcagcacagagtttatctcctcagacaaaggtggaaaagctgatggcagtatgggttggggaggggatgttgccactactggggatggrgaagctgtttcttctggcaatgaagactcatcagagtttgcagagttagtgtcccaagcttcttcagggtcctcctacacattcccattccaagttgcaaggtcccattct

SEQ ID NO: 127641 - DNA, 574 bp, Homo sapiens
atcctgctgacacattgactttgcacttctagcttccagaactgtgagacaatacccttctgttgtttaggccacccagtctgtggtactttgttctggcaagtcttaggaaactaatacagagccatcaacaagaatttgtgcattacagcactttttttttcccccaaccgaaaccataccatgggcagcaaggttctcaggtcctcttaattatcagtcctgaaggataaggccaagacttctccctggaatttgtttaataagttttgttttattttgtaagtttatacttaaattttaagtgtatgaattcacaaatagctaattctatgtttagtttggcgagtmgctttgctaagaaatctagtcaagtttctctgtgtttctttctacgcttctctgtttttcattttctttttctcttttaaagcattatatcagtaaagctcatatttcatggaacatgacacagacaggattgcttcttaacaaaaatggattggcatgggctatcagtaaagcttctttcaagactgaatttgagcagagctcatcagataatctgaagatc

SEQ ID NO: 127642 - DNA, 574 bp, Homo sapiens
atcctgctgacacattgactttgcacttctagcttccagaactgtgagacaatacccttctgttgtttaggccacccagtctgtggtactttgttctggcaagtcttaggaaactaatacagagccatcaacaagaatttgtgcattacagcactttttttttcccccaaccgaaaccataccatgggcagcaaggttctcaggtcctcttaattatcagtcctgaaggataaggccaagacttctccctggaatttgtttaataagttttgttttattttgtaagtttatacttaaattttaagtgtatgaattcacaaatagctaattctatgtttagtttggcgagtagctttgctaagaaatctagtcaagtttctctgtgtttctttctacgcttctctgtttttcattttctttttctcttttaaagcattatatcagtaaagctcatatttcatggaacatgacacagacaggattgcttyttaacaaaaatggattggcatgggctatcagtaaagcttctttcaagactgaatttgagcagagctcatcagataatctgaagatc

SEQ ID NO: 127643 - DNA, 595 bp, Homo sapiens
aagttctgggcatgtggctgcaggcatgtcttacgggacagagacagcccccccagccgaggactggcctcccrataactctgttctgcctggagtgtccttgtgctggacttcctccagcaacctcacccttacagaaaaatagggatgcttttcttgaacttcctctttctattcctccttctaagtcagggacagatggggtggcaggggtgggaagtatactgatctgtttcttgtcactgttgcccctatgtcctgatataaaaacctgggagtcttgtctttttggtgaaaactcagtttattgctacattttattattatatcactcattaaaattagccgaaataggactttccaggacctacttagtggccacatagtcgcctctgggaggaacaaagggagtggctgctgggtccacagaggatgaagagacatgcagggcaggggtctttcagagccacatcgcaaagtgctttcttctcttgagactggaccaggtgagcctgtaagagccaaggtgactacagaataaagtgaaatgtcagccctggggggaggggggcccagaggtcagctgcagagaagg

SEQ ID NO: 127644 - DNA, 595 bp, Homo sapiens
aagttctgggcatgtggctgcaggcatgtcttacgggacagagacagcccccccagccgaggactggcctcccaataactctgttctgcctggagtgtccttgtgctggacttcctccagcaacctcacccttacagaaaaatagggatgcttttcttgaacttcctctttctattcctccttctaagtcagggacagatggggtggcaggggtgggaagtatactgatctgtttcttgtcactgttgcccctatgtcctgatataaaaacctgggagtcttgtctttttggtgaaaactcagtttattgctacattttattattatatcactcattaraattagccgaaataggactttccaggacctacttagtggccacatagtcgcctctgggaggaacaaagggagtggctgctgggtccacagaggatgaagagacatgcagggcaggggtctttcagagccacatcgcaaagtgctttcttctcttgagactggaccaggtgagcctgtaagagccaaggtgactacagaataaagtgaaatgtcagccctggggggaggggggcccagaggtcagctgcagagaagg

SEQ ID NO: 127645 - DNA, 625 bp, Homo sapiens
aaaaactgtagtaggtataacagcacaaggtaatcatttttaaattattcagacatttttaaaaatttgattctgcttctctcacctctgaaagatgttactggggtgtcttggttgcaaagattcattcatgttcttttgcttttggattctccatattctctgaggaagtgactgcatctaagactgtgtccaaggaagcatcttatcactttcatcctttgatccctgagtgcctttcactaccagatatactaaaacaaaaatcttctcttagctccctggtgcagtggagttgagggataaccacaaagaattcagagtacatcacataacggaactgtcaggaagcttttgatggcagaaacatattttcctggtgatgagattrgaaggatcttcatataaccatcagatatgttattgtcacttctgaacaatgctttttatagcagattgtttctcaaaaaggaaatagaaatgcgattttaaaatatgaaaaatatgttcaatctcattattaagataaatgcaaatacaaattataagaggacttaacagattggcaaacatcagaaaagtgaacaacctcctccactggcattcttttttttttttttttgag

SEQ ID NO: 127646 - DNA, 646 bp, Homo sapiens
aacaaggacatgttgggatggaatagggtatcgtcagtaaagaaactgacaataatccagaaacgggctggtaagtctcatttatcagctaatgtacacacttctgatagcagcctcttatctggtcccactgcatgttttctgtatcagccagagttcatttgcagataacagaagccattctagctatttgaagcagaaagggattcaaaacagttgtggtagattgatgttacaaaaatccttcctgtttcacccacctttttgcaattgccacaactcccataaagagatgaagtctatttttctctccttgtaaatctggsctagccctcggtttaattctgaccaatggaaagaggcagaactgatgctgtgtcacttccagacctagccttaagaggctttgcggctcccactctcaccctcttagaagaaagcagccgtcctgtaaggaagctcaggctagattactgaatgatgagagaccataggagagagaggtctcagcctttcaaggcatccctgccaaaatcctagacatatgagtgagacaaagtagggccactgacagctgaatacacccacatatgtggagccaggcaggatcagcagaattgcccagccaaactaagtttttggggtg

SEQ ID NO: 127647 - DNA, 646 bp, Homo sapiens
aacaaggacatgttgggatggaatagggtatcgtcagtaaagaaactgacaataatccagaaacgggctggtaagtctcatttatcagctaatgtacacacttctgatagcagcctcttatctggtcccactgcatgttttctgtatcagccagagttcatttgcagataacagaagccattctagctatttgaagcagaaagggattcaaaacagttgtggtagattgatgttacaaaaatccttcctgtttcacccacctttttgcaattgccacaactcccataaagagatgaagtctatttttctctccttgtaaatctggcctagccctcggtttaattctgaccaatggaaagaggcagaactgatgctgtgtcacttccagacctagccttaagaggctttgcggctcccactctcaccctcttagaagaaagcagccgtcctgtaaggaagctcaggctagattactgaatgatgagagaccataggagagagaggtctcagcctttcaaggcatccctgccaaaatcctagacataygagtgagacaaagtagggccactgacagctgaatacacccacatatgtggagccaggcaggatcagcagaattgcccagccaaactaagtttttggggtg

SEQ ID NO: 127648 - DNA, 647 bp, Homo sapiens
tgtgcagcttgaatactgagaacagaaatttcattaggtagcacgggggaatagacaagagaagattaaaatttacctaacaagaaataagcaggcaaaagaaaatattaataaatgaattattaggcacataatgttttgtatgtacatgtgtttacttttaatacaaaagtaacggactaagttaacatagaygttccaataagataatttatgtttcattttttggcttcaagtatcctcagggttataagtatcataagctgagaccggctgaattggtttgtaggttgatgaagccctatgcctgatttgaatttctcttgaatggtctgcagccctggaccaagttgaagaagccatgagagtctcagcttttttccttaccccattatgagataaactcattccttaaatatcttgctcatttgataaaacttggcacccttctcctttctactggtccctaatacttactacctgtactgtaagctcaaattttttacaatttctgcctttattatgtaacgtattccactggaatatgtgttacaggaaaggggtcccgatccagacccctagagagggttcttggatatccggcaagaaagaattcagggccagtccataaagtgaaaacaagttta

SEQ ID NO: 127649 - DNA, 647 bp, Homo sapiens
tgtgcagcttgaatactgagaacagaaatttcattaggtagcacgggggaatagacaagagaagattaaaatttacctaacaagaaataagcaggcaaaagaaaatattaataaatgaattattaggcacataatgttttgtatgtacatgtgtttacttttaatacaaaagtaacggactaagttaacatagacgttccaataagataatttatgtttcattttttggcttcaagtatcctcagggttataagtatcataagctgagaccggctgaattggtttgtrggttgatgaagccctatgcctgatttgaatttctcttgaatggtctgcagccctggaccaagttgaagaagccatgagagtctcagcttttttccttaccccattatgagataaactcattccttaaatatcttgctcatttgataaaacttggcacccttctcctttctactggtccctaatacttactacctgtactgtaagctcaaattttttacaatttctgcctttattatgtaacgtattccactggaatatgtgttacaggaaaggggtcccgatccagacccctagagagggttcttggatatccggcaagaaagaattcagggccagtccataaagtgaaaacaagttta

SEQ ID NO: 127650 - DNA, 647 bp, Homo sapiens
tgtgcagcttgaatactgagaacagaaatttcattaggtagcacgggggaatagacaagagaagattaaaatttacctaacaagaaataagcaggcaaaagaaaatattaataaatgaattattaggcacataatgttttgtatgtacatgtgtttacttttaatacaaaagtaacggactaagttaacatagacgttccaataagataatttatgtttcattttttggcttcaagtatcctcagggttataagtatcataagctgagaccggctgaattggtttgtaggttgatgaagccctatgcctgatttgaatttctcttgaatggtctgcagccctggaccaagttgaagaagccatgagagtctcagcttttttccttaccccattatgagataaactcattccttaaatatcttgctcatttgataaaacttggcacccttctcctttctactggtccctratacttactacctgtactgtaagctcaaattttttacaatttctgcctttattatgtaacgtattccactggaatatgtgttacaggaaaggggtcccgatccagacccctagagagggttcttggatatccggcaagaaagaattcagggccagtccataaagtgaaaacaagttta

SEQ ID NO: 127651 - DNA, 342 bp, Homo sapiens
ggcgcccatgctgctcgcggcatcgccttagcggtgccgcccggaatccctcagaccgcccctcctccaccctctccaaatctcccagtacagcccataatacttctcaggactgcgagtctctccgcccatcactgtacagcctgggactccgtcctggctcacggaccgcagcgcagccrgcacccagccgcctctccctttcctccgcacacgggcagccgcggtccaccgtagggcagtcgtcgttggcatcgcgcgtaatcatcggccggcctcctccagtgtctcccagccctggcggacagcccgggtcccagcctaggacccaggaggatgggt

SEQ ID NO: 127652 - DNA, 511 bp, Homo sapiens
gaattccactccagagctgagtgacacaggagtagctgggccacaggctccctctctgaagttccaaatagagactcacactyggaaatagtaacctagtggaaatacatataggatgcccagtacctgtgcagaacttcacctctgtgcatgacctgaaaccagaagtctgtaaaattgatctctttttattacatggaaccatgtgaaattatcaacaaaatggtaatttcatatgatttaacctaaaagaatcctaaaaagcaaatcaggcatttagctaacaaacaagaatgcaaaatcaattgtttcccaggtggttccactatggaacacctcgtaagacaggccgagcattgataagaaacatctattcgctcatggttccatgtttatatccatatttgttcctggccctcgagagctcacaaaggaacaggcaagtgaacaggcaaataccgcacagtatggaaactactactctacagagacgtgcaaaataagaacccta

SEQ ID NO: 127653 - DNA, 511 bp, Homo sapiens
gaattccactccagagctgagtgacacaggagtagctgggccacaggctccctctctgaagttccaaatagagactcacactcggaaatagtaacctagtggaaatacatataggatgcccagtacctgtgcagaacttcacctctgtgcatgacctgaaaccagaagtctgtaaaattgatctctttttattacatggaaccatgtgaaattatcaacaaaatggtaatttcatatgatttaacctaaaagaatcctaaaaagcaaatcaggcatttagctaacaaacaagaatgcaaaatcaattgtttcccaggtggttccactatggaacacctcgtaagacaggccgagcattgataagaaacatctattcgctcatggttccatgtttatatccatatttgttcctggccctcgagagctcacaaaggaacagrcaagtgaacaggcaaataccgcacagtatggaaactactactctacagagacgtgcaaaataagaacccta

SEQ ID NO: 127654 - DNA, 569 bp, Homo sapiens
acatagtaggcatacataatcatgtgttgagtacatgaatgaattagtgattgaatgaatgaattttttaaaatgcactgaactgaatgtctctgaagacagtgtagggccctctggtaccacagaggctgtgtcatgggtcatgccagtactcacaagaaatgtcaacgctggcatacacttcaccaacaggcagatatatctgtaagatgcaggggtaagttcaagtgcttccatgaggcatttccgtaattaattattagcattcataggctagatacctataataccaacttcagcatcgatctaaaggaaacctattcatttaaactgacaaaaacatgctgtcattttcatttccattacaaagcatgccaatgcagtagaaacattttgattgattgaatggctttctctcaatctgcacggcaaytgatcagtttaccaagggacaaatagttcaacaattcaagtcaaaagcagagaaaccttttttctttacttatgaggcataaatcagctatttaaaatatatagaaattacaaatagttaaaattatcttctggga

SEQ ID NO: 127655 - DNA, 569 bp, Homo sapiens
acatagtaggcatacataatcatgtgttgagtacatgaatgaattagtgattgaatgaatgaattttttaaaatgcactgaactgaatgtctctgaagacagtgtagggccctctggtaccacagaggctgtgtcatgggtcatgccagtactcacaagaaatgtcaacgctggcatacacttcaccaacaggcagatatatctgtaagatgcaggggtaagttcaagtgcttccatgaggcatttccgtaattaattattagcattcataggctagatacctataataccaacttcagcatcgatctaaaggaaacctattcatttaaactgacaaaaacatgctgtcattttcatttccattacaaagcatgccaatgcagtagaaacattttgattgattgaatggctttctctcaatctgcacggcaactgatcagtttacsaagggacaaatagttcaacaattcaagtcaaaagcagagaaaccttttttctttacttatgaggcataaatcagctatttaaaatatatagaaattacaaatagttaaaattatcttctggga

SEQ ID NO: 127656 - DNA, 623 bp, Homo sapiens
accaattattttctcttaaatgcattttaaagctacaaattttctcctgactgmttcatgtaggttttaatattatttgccatgaaatatatttcacagtggaatgacagataattgggataagaaatggcaattcaaggagttatttaaatatagggctaagatttgaattctagcttactgggaccaaagcttgtgaagtctcagggtatggctgaattatagtgctcttgttatttctaaagagtgtataatttttattctgatatcccctttaacccatgtgctttttcctaagagtacaacttaaggagggcatgtttgattattttattgttttataatcagttaactatgccctggtcctatatggtttcagcttttcagcacttgttgagacttaatttgccatctcacttatggccaatttttgtcaatattctatgtgaatttgaaaataatgtaactttcctattttgaatataagatggtataggcataattatagttatgattaatcttattaaccgtgttcttcaaattctccatatcctcaataagtttcagtcaactagatctgtcaattcctaagaaaggtatattaaacttatcactgtgattgt

SEQ ID NO: 127657 - DNA, 623 bp, Homo sapiens
accaattattttctcttaaatgcattttaaagctacaaattttctcctgactgattcatgtaggttttaatattatttgccatgaaatatatttcacagtggaatgacagataattgggataagaaatggcaattcaaggagttatttaaatatagggctaagatttgaattctagcttactgggaccaaagcttgtgaagtctcagggtatggctgaattatagtgctcttgttatttctaaagagtgtataatttttattctgatatcccctttaacccatgtgctttttcctaagagtacaacttaaggagggcatgtttgattattttattgttttataatcagttaactatgccctggtcctatatggtttcagcttttcagcacttgttgagacttaatttgccatctcacttatggccaatttttgtcaatattctatgtgaatttgaaaataatgtaactttcctattttgaatataagatggtataggcataattatagttatgattaatcttattaaccgtgttcttcaaattctccatatcctcartaagtttcagtcaactagatctgtcaattcctaagaaaggtatattaaacttatcactgtgattgt

SEQ ID NO: 127658 - DNA, 642 bp, Homo sapiens
ttgtctcctggttccaaaacatgtggatcattttttggtccactcctgtcttctgcagaagtcctccttggcactcttcactgttactccatctgccatctttgtcaattttttatcatttctaggaatttggggtggaatatgagaagaaagcaacatatcttcaggacacaatcttgaatcagtagctatttttcacctgtgcattagagatgggaaacttgcagagcacttaacaggacttccctacaatcaccaactagtatttattgaattgtttattagtaggaaacattaagcaattatccttcataaaaacattatgaagtaagcattactatagtcccagttttaagatgagaaaacacagattaaaaacatcctaaagagcagagccaagttacactccaggtggtccgtctcagwagcctgaactctttactaatacactatacgatggcatatccgggtgattttgggaacacattatacttctaccctgccaggagggccaaatatatttactttgtcatctctgtgctgtaaggggccacatttctacccatcaactcaatctacattactcaagcatgcttgtaattcatatgttatttcctcatgccaggaagaacagtcacagtt

SEQ ID NO: 127659 - DNA, 642 bp, Homo sapiens
ttgtctcctggttccaaaacatgtggatcattttttggtccactcctgtcttctgcagaagtcctccttggcactcttcactgttactccatctgccatctttgtcaattttttatcatttctaggaatttggggtggaatatgagaagaaagcaacatatcttcaggacacaatcttgaatcagtagctatttttcacctgtgcattagagatgggaaacttgcagagcacttaacaggacttccctacaatcaccaactagtatttattgaattgtttattagtaggaaacattaagcaattatccttcataaaaacattatgaagtaagcattactatagtcccagttttaagatgagaaaacacagattaaaaacatcctaaagagcagagccaagttacactccaggtggtccgtctcagtagcctgaactctttactaatacactatacgatggcatatccgggtgattttgggaacacattatacttctaccctgccaggagggccaaatrtatttactttgtcatctctgtgctgtaaggggccacatttctacccatcaactcaatctacattactcaagcatgcttgtaattcatatgttatttcctcatgccaggaagaacagtcacagtt

SEQ ID NO: 127660 - DNA, 538 bp, Homo sapiens
caacagtaacttcagctagaaaatgctggaaacaatttaataagcagaaatgattaactccaaaatcatcaacatgactccaccaaccccatttttaaatttctatttaaacatttcccaaattatttgcacattcttcttttggctgtaagtyttgtttttctctatgctagctaatagttttctagataatttctattcccttgacttgttcttatgttaaatcctcaaaattaagagctttcaactcaaaaatcagaaataggaaagaagtgtttaatgaaatgatttcacttttttctgaaagtattgacatgaagtattaaaagcatcatctgatagaaaaagaaggtacttgccaaatgttatatcggcctttatagagcactagtaacagacactataaagtcttttgtttcctaatttattattttcctaatgggccacatagcagacactgaaggttctacgtaacaaaggtcctacaagtaaattgtgaaaatcccttattggatggtgtttttagaatacagaaggt

SEQ ID NO: 127661 - DNA, 549 bp, Homo sapiens
cagcatcagttattgaagggaaatatatagatgctaatgccaatatcaaaaaggaagaaagatcttaaatcagtaatctcactttccacattataaaactaaaaaagaaaagcaaataaattcaaagcaagcagaaagaagacacaacttacagctgaaataaatgcaatagagcagagatgaaaaatcaagaaagttaatgaagccaaaagctagttcattgacaagagcagcaaaattgacaaatctttaccttaggctgaccaagaaaaagagagaagattcaaatttcaaaaaccaggaatgaaggaaggaatatatctacccccttaaagaatataaaggattataagggaatccyggaaacaaatgtttttcaaaaaattaattagataacagataaaatggaccatatcctggagagacacaaaatacaggaacagacacaagaagaaatatgtaattagagtagatttatgacaagtaaagagattgtgttaataatcttgaagctttctataaagaaatgcccagttccagattaattat

SEQ ID NO: 127662 - DNA, 645 bp, Homo sapiens
tttttccagaaagtgtacagttatatgtgctcacaaaaagatggtttgaaattggaatatatgtttaaaagagaagcagagtgtaaatgtttggaaaatttacaaactgaccatgtgatagaaaagaaaaaccaattttctgggaaggaattcaagcaggctgcrgaaacttgcataagtaacaaggagctgaatgttaatagtcaagactatagggaaagtgtctccagcgcatgtcagagacctttgcagcagcccctcccatcacaggcccagaggcctaggagagaacaatggtttcctgggctgggcccagggacccactgctctgtgcagccccaggatatggcaccctgcatcccagctgctacagctgtggctaaaaggagccaaggtacagctttggacatcgctttagagggtgcaagccccaagccttggtggcttctatgtggtattgggcctgcacatgtgtagaagacaagagttgaggtttgggaacctccacctagatttcagaggatatatggaaatgcctggatgttcaggcaaaagtctgctgcagaagtagtgtcctcaaggagaacctctgctagggcagtgtgaaagggaaatgtggggttggagctcccacatggaggcccc

SEQ ID NO: 127663 - DNA, 645 bp, Homo sapiens
tttttccagaaagtgtacagttatatgtgctcacaaaaagatggtttgaaattggaatatatgtttaaaagagaagcagagtgtaaatgtttggaaaatttacaaactgaccatgtgatagaaaagaaaaaccaattttctgggaaggaattcaagcaggctgcggaaacttgcataagtaacaaggagctgaatgttaatagtcaagactatagggaaagtgtctccagcgcatgtcagagacctttgcagcagcccctcccatcacaggcccagaggcctaggagagaacaatggtttcctgggctgsgcccagggacccactgctctgtgcagccccaggatatggcaccctgcatcccagctgctacagctgtggctaaaaggagccaaggtacagctttggacatcgctttagagggtgcaagccccaagccttggtggcttctatgtggtattgggcctgcacatgtgtagaagacaagagttgaggtttgggaacctccacctagatttcagaggatatatggaaatgcctggatgttcaggcaaaagtctgctgcagaagtagtgtcctcaaggagaacctctgctagggcagtgtgaaagggaaatgtggggttggagctcccacatggaggcccc

SEQ ID NO: 127664 - DNA, 645 bp, Homo sapiens
tttttccagaaagtgtacagttatatgtgctcacaaaaagatggtttgaaattggaatatatgtttaaaagagaagcagagtgtaaatgtttggaaaatttacaaactgaccatgtgatagaaaagaaaaaccaattttctgggaaggaattcaagcaggctgcggaaacttgcataagtaacaaggagctgaatgttaatagtcaagactatagggaaagtgtctccagcgcatgtcagagacctttgcagcagcccctcccatcacaggcccagaggcctaggagagaacaatggtttcctgggctgggcccagggacccactgctctgtgcagccccaggayatggcaccctgcatcccagctgctacagctgtggctaaaaggagccaaggtacagctttggacatcgctttagagggtgcaagccccaagccttggtggcttctatgtggtattgggcctgcacatgtgtagaagacaagagttgaggtttgggaacctccacctagatttcagaggatatatggaaatgcctggatgttcaggcaaaagtctgctgcagaagtagtgtcctcaaggagaacctctgctagggcagtgtgaaagggaaatgtggggttggagctcccacatggaggcccc

SEQ ID NO: 127665 - DNA, 615 bp, Homo sapiens
caaagctgctgattcccacaaatttaagcaatcctccctgataaatattggtttgctttcttttatcatttattttttccaacaggcaaaacagcactgtttgtctttgtccaaatactaaactgttcatggaccaagaacagtttttttagtttaggcaacaataatgattacattataatccctcctctattccctcctttttctcaggacagctaccagctggtcccaaaagaaatggtgggagacacacttgagagcatttattcaattttttaaaaattaactccaatttcaatttgaatgaggaaagaaaatgtcctatgcaaagataggrcgtttaaaccaggctagaagaaattcattttcacctagactgaatcggactttgtatctacaaactttggtagtctgagatactaaagcaccatccaatgatgtttagggtactaactatttaaattaatgtggatttttaaaaaggaaaatgtctttgcttatacaggctgctaccctctttggtcatttttgtgaattctatgagccccatctgaaacaagccatatctggggcatctgagcagggttacccctgggagtggtggcagaaggtcat

SEQ ID NO: 127666 - DNA, 480 bp, Homo sapiens
tccctccacccagctctgatgctgtggcaggaggttctgcccacaggagaggctggccgtatgacaaagagctctgcagatttgtctgagatgactgggtttacttggtacaaaaagcatagaattccatgcctaaggacactattaawaaataatgaagatcttggtgggcagtgactaagaagaggctagtagacccataatatacacagaacaacagagcagccggaaatgtgatagaatcaggaagagagacagcccaggatgtccctttggagatcacagtcaactcagggcttctggaaggctgtgtgcatgtgctgggttgccctcactcaggagcaatctgagcaggtcaaggcatgaaaatgaaaacattctccaagctacatgcagacccatcaacacagggtagaaacctcatagacacaaggagcttaaacacaacttctagcaaaacagtgactgaacagttaatta

SEQ ID NO: 127667 - DNA, 559 bp, Homo sapiens
ataggtaatttgtgtgttcccttaccatctctttttccttcttcttcctgatgaattattttctttattattttttaaatttcattggtttctgctttgatccttattatctttttcttctactcytgtggtttattttgttcttctttgtctaggttcctaagatggaacctgatatcatcgatttgagacctttcttcttttttaatattggcatttaatgttataaatttccctgttaccattattttgatatattgtattttcatttgtttcaaaacactttcaaatttcccttttgatttcttattggagccatgaattattcaggaatttaatttagtttccaaatatgtgggtttttttagaggtatttttttttgttattgattgccaatttatttccactctggtcagagaacatacttggtatgactgagtcctttggcatttattgaagcttatttctggtccaaatatgtccaatcttggtaaatgttttgtgtgtacttgaaaagaatgcgtgctcttctgttgtttggtatagtgctttataagt

SEQ ID NO: 127668 - DNA, 559 bp, Homo sapiens
ataggtaatttgtgtgttcccttaccatctctttttccttcttcttcctgatgaattattttctttattattttttaaatttcattggtttctgctttgatccttattatctttttcttctactcttgtggtttattttgttcttctttgtctaggttcctaagatggaacctgatatcatcgatttgagacctttcttcttttttaatattggcatttaatgttataaatttccctgttaccattattttgatayattgtattttcatttgtttcaaaacactttcaaatttcccttttgatttcttattggagccatgaattattcaggaatttaatttagtttccaaatatgtgggtttttttagaggtatttttttttgttattgattgccaatttatttccactctggtcagagaacatacttggtatgactgagtcctttggcatttattgaagcttatttctggtccaaatatgtccaatcttggtaaatgttttgtgtgtacttgaaaagaatgcgtgctcttctgttgtttggtatagtgctttataagt

SEQ ID NO: 127669 - DNA, 624 bp, Homo sapiens
taaatagcagacaatgtaaaatttacacaaatagtactttaataaataaagagggacattatataatgataaaagaacaatgttccacaggaactgaatgttaagaggaaatctctgaataggttctggttttctggaatcgattatctggtataagcatatttaaaggtattactgactctgtttccagtgatagatagggaactggtattctgtggcatacagcggcaaaacatttactcaaagtatcatctgtagacacttatagtcaaatgcttacagaaaaggctctgggggaccatgggtttgctgccatacaacattttaacaaaagtgaggagtataatgggttggttagttacttttaactgctctggagaacttggggaaagaaaagggtaagttttataggctaggaggacatgaaagcttctaygaatgcactgaaagaatctcctatctcttattgccacagggatatgtttctgaatattaaacccaaagtctaattttgtaggtggttgaattacaaagtgaactcagtttccagattcccagggtctcttttattaaaatcctggaactgatttagaaggaaaggggttctgaaaattactatggtga

SEQ ID NO: 127670 - DNA, 562 bp, Homo sapiens
tggatgattttgacaatatatactagcagaaacctgaaaactatctatgggactgaatctaaaccatataataccaatatggaaagaatgtaaagttggattgagctgaatatattgatatgaacccactacgcagacagtctatattaamtattttagttcaaggagctaggaagagctccaacagattgcttggtcagatgattgaaatatggatccaaatgtaataccaacagaagatgaaaggtcagaacttcttttctttgttgtcaagaaaggcatccaaatacttagggaaacttgaatgcttgagagaatttatcatctaagatatgctcatccagtgcaggagggaccaggaaatatgaccttcaccacaactgtatgaaataaacttatgaggggagtccagcatcctagacgtgttctacagtggaataacaaaataatggagcaatacacactttctccaagaatgtatggagaaaatataacaatgaggtgaacttaaagttgggtctagttggctgaggagacaaattgaaggtaaaaacacggaaaa

SEQ ID NO: 127671 - DNA, 577 bp, Homo sapiens
attcagcctcactgtgcctcagtttcctaacctgaaactgagaatttaacaatggtacctatatcatacaactattgtcagcgtaataaatcatgacatatccagcccttggagtgttgcctgattcatagtaactgctcaataaatgtttgccttgatggtaatgtttggtagaaagttttgttaaaatatttacttttattaattttttagagacagggtcttgctgtgtcactcaggctgggtgcagtggtccattcatagttcactgcagcctcgaactcctggactcaagaaattctcccgcctcagactcctgaatagctaagactacaagcgcatgccaccatgcctggttaattttatgtttttttttctttgaatttttgtagagatggggtcttgtcatgttgcctaggctggtctcaaactcctgccctcaagtgatcctcccacctcagcctcccaaattgctgggattacaggggtgagccatcrcatctggcccaaatgttatctgccatcaacttcacttaattggagttgacccagaagatttgaaatggcaggagaagtt

SEQ ID NO: 127672 - DNA, 490 bp, Homo sapiens
atgggcagcagaaggaaattataaataccaactacaaccacatgaccagttgaagaaaagaggacagtaatagacagtgagtatttcttccttattttgatatgaaaatatttgtgcatatgttaattacttcttctcctcctctctcattcccctaccatctaacataggatttgttaacagtagctaaccttatcattcagaatttaaataagaggtctaagaaggaatttgactcagctaggaaaggaatgaacctcacccaaagaggaggtacaaaagagactttgtgtcatattttgaaaagaaggttagtgtagcgtgttttcagttttacaagggacagttgcattatgttaggaggaagcatgcttttgcatrcttaatttggaagttaaatatagttaaaagaagcgtgtgggtgtgccatgttgacagggggtagcctacggtggttttgtgcagggtcaatttaactaagctggaaata

SEQ ID NO: 127673 - DNA, 621 bp, Homo sapiens
aatggctcaagcaagtttcccgaattccctaaacctcagttatctcatctgtaacatcaaagctacaatagtgcataacatatgtaaatggtcttggaacagggctgaggacattgcaaacatttgatgaattaaaagtattctaattcatctaattcattactattaattaaattattaagagtaaatattaacaataactctagcttaaaaaktacgagtcagagatctgggttctgttcctggatttacaacttactggctgcagtttcctcaactataaaatggaaataactgggtgataatgcctgtgttctctaccctggaaggaatgtcagggtctttgattggcagaacagtagcctcccaaagacatccacattctaattcctggagcctgtaactacgttacctagcatggtaaaagggactttgcagatcttgaaacaaggagtgccctggattctctggtcgggcccaatgtaatcacgagaggccttataagaaggaggcaggaggctccgagtcagtagtagatgatgtgatgatgaaagtggtaggctgcactgatgagaggaaggggttaaaagctaaggactgcagatgcttctggaagctgga

SEQ ID NO: 127674 - DNA, 617 bp, Homo sapiens
atattctctcttcattttttttttttagatagagtctcgctcatgtcacccaggctggagtgcagtggcgcaatcttggatgactgcaactcctctcttgggttcaagtgattctcctgcctcagcctcccaagtagctgggattacaagtgtgcaccaccatgcccggtaatttttttgtatttttagtagagatgaggtttcaccatgttggtcaggctrgtcttgaactcctgacctcaggtgatccactcacctcggtctcccaaagtgctgggattacaggcgtgagccaccatgcccagcctaatattctctactcttaaaacctgtagtgcaaggggccatttctcaccttgagaaaagggattcaatggactgaaagagagacatatcccatgtaagcaagaaataatgaatgtgcagtccccctgggaacactgaagggaagcactcacatggtattgtcaacagaagccagtgtttgactagggagagttcagaagcagtatccaacttcctctcagggtgactcctacctttcctgaatcaaagcagcaacctgacctgctaggaccaccaacacttctcctgtaatcacactgatgcccacaggg

SEQ ID NO: 127675 - DNA, 538 bp, Homo sapiens
ttgctatataatcaggattttaatcccttctttacattgtttaatcccttctttacattgtttctgaaaggtccagattctctttgtcagttatttttatatttcttcaaaaaaaatatctgagtgtttctatatgtcaggaattgttctaagtgctggggatacaatgataaacagacaagaccattgccctcatggaacatgtagtctcagtgaggaagtccaataaagaagaattaatgtgacaggcaattcccagaagtgccccttaagaactgtctctctgaaaaggtgacatttgaatagagagagatctacaagcrtgagggaagaagccctactaagtttttttattttttatttcattttatttttttgagatggagtctcgctctgtcacccaggttggagtgcagtggtgggatctgggctcactgcaacttctgtctcccaggttcagaccattcccctgcctcagcttcccgagtagctgggactacaggctcctgccatgccccgctactttttttttcttaat

SEQ ID NO: 127676 - DNA, 621 bp, Homo sapiens
ctcctgatgagatgtacaaagtgctccatcatcccatcatgctgggaaacaaaaggctccaatattgaaaacatcatcagctggatcccatggatacaagttaaggaacaatgacattgatgatcgcgcagcacatcctatggaagcagaactggattttctcttttctcctacaacagaccctcttacatgactttggactaagagccacagagaagaaaagaaagacataattataaaattttaactctctgtgctttaagaagagtgttttaagcaagattttctctttttgatgtraaggcagaacacagcaggattgggaacataccagtatgctgattactagagagcaagctgtgttagtgaaataaaaagcactattaatattttctagatgcaggttaggtaaaatgaatgtatctgaagtctacttctgttggaaaaaggaaaaacatcgtgaggcaaaaccaatccttaagctatacctgctgatatttgctttacaccacagttaaatcttaacagtattcaagggaccagaaactagcctctgactcataagaaaatcttccaatggggtaacggagggttgtgatattatggactgtacaaagaaaa

SEQ ID NO: 127677 - DNA, 621 bp, Homo sapiens
cttggtggtggaatataccaggctgtggaaatttcttttagaaaaaaagtactttgtagactccggcctttacatgcttgctcaatagcaactaaaaaggaagagaatccttggatcttaaatccaatgaatggctttctagctgtgacaataaagatgacaatttggcwaagaaatctttttttgttgttgtcttaattcaccaagccacagcctagccaactgcaagtccagtacaccagtttattctacctacattcccatttacattttttcataatcactattttctttgacgattgatatccaaaatgaacaatcttatatccactgctataaatgcattaaatggtgtttttcttccatcattgtggaaggcatgctctcaggttggaattaactttggggccagggaagtaataattagggtctctttgctttggacacaaatgagttcatttatcagcctaagagttgcaaatgatcaattttctaaaactagtgctagcaagcacctcattgcctatacttctttaggcttgaaagcaccccgctttcactaaggaaggtgaatccaaaaggcatgtatcccactaggggcaggaaatagatgggaagcaa

SEQ ID NO: 127678 - DNA, 621 bp, Homo sapiens
cttggtggtggaatataccaggctgtggaaatttcttttagaaaaaaagtactttgtagactccggcctttacatgcttgctcaatagcaactaaaaaggaagagaatccttggatcttaaatccaatgaatggctttctagctgtgacaataaagatgacaatttggctaaraaatctttttttgttgttgtcttaattcaccaagccacagcctagccaactgcaagtccagtacaccagtttattctacctacattcccatttacattttttcataatcactattttctttgacgattgatatccaaaatgaacaatcttatatccactgctataaatgcattaaatggtgtttttcttccatcattgtggaaggcatgctctcaggttggaattaactttggggccagggaagtaataattagggtctctttgctttggacacaaatgagttcatttatcagcctaagagttgcaaatgatcaattttctaaaactagtgctagcaagcacctcattgcctatacttctttaggcttgaaagcaccccgctttcactaaggaaggtgaatccaaaaggcatgtatcccactaggggcaggaaatagatgggaagcaa

SEQ ID NO: 127679 - DNA, 631 bp, Homo sapiens
ggactacctaactaccatacaactctcttagcttttcttccccagcctaccataagcacaccactaactcattaaacaagtgttatctcctccaaccactcttggtggtggaatataccaggctgtggaaatttcttttagaaaaaaagtactttgtagactccggcctttacatgcttgctcaatagcaactaaaaaggaagagaatccttggatcttaaatccaatgaatggctttctagctgtgacaataaagatgacaatttggctaagaaatctttttttgttgttgtcttaattcaccaagccacagcctagccaactgcaagtccagtacaccagtttattctacctacattcccatttacattttttcataatcactattttctttgacgattgatatccaaaatgaacaatctyatatccactgctataaatgcattaaatggtgtttttcttccatcattgtggaaggcatgctctcaggttggaattaactttggggccagggaagtaataattagggtctctttgctttggacacaaatgagttcatttatcagcctaagagttgcaaatgatcaattttctaaaactagtgctagcaagcacctcattgcctatactt

SEQ ID NO: 127680 - DNA, 535 bp, Homo sapiens
atccttgcctcagagttcacagagaaagagaagccaccagagaggaactgcctatgattcccaccacgaaatcatgaaatctaccaaattaccttcatttacacccccattctcagtgtctcctctgtactatggacagtgtcctagtcctgtcaaagactagttcctccccaccatgctttgaattccaccatctgagccttctcaaggttccctccttcctttatctcactccttcctgcaattttccctcttcagtacagcattcccataagcacacagacctgttgtattatctctcccattaaaagactctccytacactctattccttgttaggacaaaatttctcaaaagtcatattctcaacacctccacctcacattccctcccaaaccattccatccacatttccagctgcaccactcctctgaccctgtggttgccacagccacagggttccctgtgttgccaagccactggtcatttatctgtcctttcctcaattactctcagcacagtggactgcttattg

SEQ ID NO: 127681 - DNA, 587 bp, Homo sapiens
ggattggctcacgggccatagtttgcaaatcctggtctatagaaagaaaatctccatatttgtatattgacatctaggcaatcattgtatactaagctagcgtattcaaaamtaagttcttggattgattgggtcttaaaagaaaaagcaaattcttacttaagtaattaaccatctttattactatagtagtttcccatttcttttatttttctctctcaatgtatcagtcatttgaaagattttattatctaacagaaaactaacacttattgatttagtcagcaaacacttattgacctactctgtgaaaggtactatgttaggggctagaaatagaaaagtaaatcaaggaaaactgtatgcacaataagcttatagtttgtagataagatatgtaaatagagaaatgtaatttttcatgatgtcttgtagtagaggtgaatcctttaacagctgaacacacggccctgccagctctattttttagtatgaaactctttcctgttttctccccttagtagtttcatgagtttattagcatgttcaaaatgttacaataccatagattatccataataaacact

SEQ ID NO: 127682 - DNA, 587 bp, Homo sapiens
ggattggctcacgggccatagtttgcaaatcctggtctatagaaagaaaatctccatatttgtatattgacatctaggcaatcattgtatactaagctagcgtattcaaaactaagttcttggattgattgggtcttaaaagaaaaagcaaattcttacttaagtaattaaccatctttattactatagtagtttcccatttcttttatttttctctctcaatgtatcagtcatttgraagattttattatctaacagaaaactaacacttattgatttagtcagcaaacacttattgacctactctgtgaaaggtactatgttaggggctagaaatagaaaagtaaatcaaggaaaactgtatgcacaataagcttatagtttgtagataagatatgtaaatagagaaatgtaatttttcatgatgtcttgtagtagaggtgaatcctttaacagctgaacacacggccctgccagctctattttttagtatgaaactctttcctgttttctccccttagtagtttcatgagtttattagcatgttcaaaatgttacaataccatagattatccataataaacact

SEQ ID NO: 127683 - DNA, 524 bp, Homo sapiens
gtctgtaaaccccttccactctagctaggccatcagttcatagaagacctgcctgccaccttctttgccaaaataaaagtctcttcctgctgtagctgcttcctggtagaagagagcagtctcttcccatcttctttaccccaactctacctcagtaagatgctctgaccttctatcctatttttggtaaagtggtgattggaggatagaggagtgagaaatggagtgttgcacttcagacatacttgaaggaattggacgtgccactgctactctgacactccaacctcacatgggtggttgtcaatatcattgaytagtgatttcctgcctccttcttcaaaggtactgcccattctctgtaggcactatgtatacggtaactaattctacagcaccagccactggtgttcgttatcattgaatccagcattgattcatcacttgttggatagaggacaaagttacccatctgaatcttcctatggagttctgttttccaagtactcgcacaagttaaaagt

SEQ ID NO: 127684 - DNA, 517 bp, Homo sapiens
aagtttttctgaccttattcccctgctgtttagaactgggcttcccttgcatgtctctgacttagccatccaacaatagccttttaacagtcagaatcggcgctgcaggtactgcagctgacatggggtttgggattcagtaagactgtctcacagctagaatgaccttgacargctttttactttttcatgaaatttaccacctgtcctcattttccttcaccctgtcccaatttagggacatgaagccctggtctgggagaaagactgccagggatgtgaaattctcctgacaatttttctaggtgccatggtttccttcccgttgaccagactgtttaatatttaatctacatttatcaagcacatgttatttgcaaagcacagtgtccaaatactgggacaagaggaactagtgattcagaagatgtacacgtttaaaaaagtatacatttagacttaagaagaatttctcccctgtgtgtcccattacaaagctagtattcaagatagaata

SEQ ID NO: 127685 - DNA, 517 bp, Homo sapiens
aagtttttctgaccttattcccctgctgtttagaactgggcttcccttgcatgtctctgacttagccatccaacaatagccttttaacagtcagaatcggcgctgcaggtactgcagctgacatggggtttgggattcagtaagactgtctcacagctagaatgaccttgacaagctttttactttttcatgaaatttaccacctgtcctcattttccttcaccctgtcccaatttagggacatgaagccctggtctgggagaaagactgccagggatgtgaaattctcctgacaatttttctaggtgccatggtttccttcccgttgaccagactgtttaatatttaatctacatttatcaagcacatgttatttgcaaagcacagtgtccaaatactgggacaagaggaactagtgattcagaagatgtacaygtttaaaaaagtatacatttagacttaagaagaatttctcccctgtgtgtcccattacaaagctagtattcaagatagaata

SEQ ID NO: 127686 - DNA, 500 bp, Homo sapiens
taaaaatgtctgtttcatccagcctggctgtgagcatggaaaatgtctataagtggtcccttctgggaattgatgttttaataggtctgtaaggacaatggagcttaagatgttggcaaatgtagtgaagtgatggacaacagactctataaaggctaaagaggaatttctacatttgagaaagtaattctattcagtctgtacttggaaaatatttgatctagtggaatggaaaatttttccctgatattttggcatttgttgaaatattttctaggcagtgatccttcagccactgygtcacattgctgtgggttgctctgaacaattcagaggtatgtagacatattttacccaacatgcatgcactattgtttaactattactgaagacacaagttgttacagtgatttccttcagaaaaatcattaagttaaagaaagaaacaaagcatgagttcagttaataccaaaaagaacacgtttttgattatagacaaa

SEQ ID NO: 127687 - DNA, 388 bp, Homo sapiens
gaattcttttgtagggatttcaaaataacttggttccctacagaaaggaaaaagtacttcttcatttgcagctgcagattgttcctcaacttgcttggcatctatgccgcaccctaatgagaaaaataagagaaaattcaaaatatttgattgcttctggcacttgagggagtctggtaatggccatgtgtactactccgtgagaaccagaaggcagatcacagtctggatgaaaaccaatggcatttatatcacagaacaaatgtcacagagaagaaagaatcttgattataaacatgckatttgagtaccaataggggatggaagataagcagcagcaatggcaaatgagagcaaagcagttaagaaatggatcttgcatggctag

SEQ ID NO: 127688 - DNA, 557 bp, Homo sapiens
ataataataattattatttttttctgcttgcttgaatttttgtgtaaggctgaaaatattttaaatttagtacttctcaacttgtcttaggatattttgactacaaatatccgtcagtggcatgtccattgtgttatgaaaattcttttctattttaaggaaaaatgtacagacatctccattcattaagttaaaataggttgatggactcagttgtaaaatatttggacaaaattccagttataatctctataattttgctttagttgtgccagtgggaaggttcagatataattgctcttagtttctaagatgatttmtatgaaaaagttgaagcttctgcgtcataaaagattttatgcacaactatgccaaatcagttttgtttttttagcttgagtatctgctgcaagaatgaaatatagaattaggtaatcttcctggtagggcatattctgtacagttgggttgccaatcaaaatgattgaatcaatacatctagatcatatttgataaagtcagcaagcagacttgtgccttcgagagtcatcttataa

SEQ ID NO: 127689 - DNA, 551 bp, Homo sapiens
ttctattctggagattggataattattattgatatattctcaatttcactgatcttcagctgccatggatcttatgtttagcccacccagggaatgttttattctgttaatagttattacaacttctggttctagaattttttaaatttggttgtgttttatagtttcagtttctttgctgaactagcccatgtgattgttccaaatgattgctcactcaccagaaacaaatctttcttgaatgtgtttaaaacggttgctttaaagtctttgctaattccagtttctggttcatcttagggtagtttctgttgactggtttttcccttgagtatgggtaacttttctaatttttttttgcatgtgaagtaatttttaattggatttaacataaacgatacagtgtaggtactctagattctattattattttctcctgaggcatgtttttgttgttgccgttgctgttgttatcgagtcagttaattakgctggactctactctcaattctgtctcttttgtcttgggaactagctctgttgtttcagct

SEQ ID NO: 127690 - DNA, 551 bp, Homo sapiens
ttctattctggagattggataattattattgatatattctcaatttcactgatcttcagctgccatggatcttatgtttagcccacccagggaatgttttattctgttaatagttattacaacttctggttctagaattttttaaatttggttgtgttttatagtttcagtttctttgctgaactagcccatgtgattgttccaaatgattgctcactcaccagaaacaaatctttcttgaatgtgtttaaaacggttgctttaaagtctttgctaattccagtttctggttcatcttagggtagtttctgttgactggtttttcccttgagtatgggtaacttttctaatttttttttgcatgtgaagtaatttttaattggatttaacataaacgatacagtgtaggtactctagattctattattattttctcctgaggcatgtttttgttgttgccgttgctgttgttatcgagtcagttaattagkctggactctactctcaattctgtctcttttgtcttgggaactagctctgttgtttcagct

SEQ ID NO: 127691 - DNA, 573 bp, Homo sapiens
tcccacttatgagtgagaatatgcggtatttggttttctgttcttatattagtttgctgagaatgatggtttccagcttcatccatgtcccggcaaaggacgtgaactcatccttttttgtggctgcatagtattctacagtgtatattcaatgctatccccatcatgctaccgttgactttcttcacagaattagaaaaaaactactttaaatttcatatggaaccaaaaaagagcctgaaaagccaagacaatcctaagcaaaaaaaagaaccttttaaaattacaaatcagattcaataacttttgcattaagccttcaaagggcttttaatcatacttggaataaaatctaaaytcttacataatctagtcctggtgtagattcccttcattcactcattccatttcagccacaatgaaaatttgtaccagatttcctaattctgtatagtctattctcattaagctttgcaaagctagctccctcatctcattaaagctacagaataacgttaccattcaaagccatcttctctgaccacacagtagaaagtggccacccagctaaag

SEQ ID NO: 127692 - DNA, 622 bp, Homo sapiens
tgggtaagttaatcttggcaagtaacataagctaaccaaacacatttttgctaagagtagtttgtatcagaaaaatacaacaaatatgattgtaaccatgaaaatatttttcttgcatgcattataccytcaaattcccccatttcaagaagagttaacaagacaagctaatctaagagtactttaataatgtctgatcactttgttatttcagactctgattattagaataatagaccagacagggtaccaggcaataagaaggccagcaagaaaactatgttttgatgggtaaataggtcctcatggaatccttccacacataactagtaggtgactgcatcgttcacccaattttatcttttaaaaatcctgttttggccaggcatggtggctcatgtctataattccagcactttggaaggctgaggtgggaagatcacttgaggccaggaatttgagaccagcctgggcaacagagcaagaccctgtctccataaaaaataaaataacaaaaatcttttctttgtttgggttctatttggtatctgataaaaaagaaattctgaaagatatcagaggaaacaaataccttatctaccaaggagcaaagacaagaata

SEQ ID NO: 127693 - DNA, 528 bp, Homo sapiens
gaggaattccagcctccgaaacctggaaggagactcctgagagtcctttgttcctggatgttcagtttccctccccacccccacgcccaccccctcctytctcattatcaaacatttgaagactgagtaattccatttgttgatgtctttggcctcctctagcagagcaggccagagcctctgaaaatgcaaaggcccccaatgaaataaaaacccctggttttcaaggtggatttatcaccctttaaaggaatatttattgggtaatcactttccaaaagtgctcatgacacaggggactgaaataaagagcgtcctctccctcgggctgagggaagaggctgttggccacttggatgcagggaggagggagcctctttgtggcctatgtcttgggagggagcagccagagacaggccaagtttccccagctaaactcaagctggggtcttgcttctgtaccttgggcctacttatttctctcccgtttccaaacccaaattgggtttggaagatgccacttggaaa

SEQ ID NO: 127694 - DNA, 532 bp, Homo sapiens
gtgaattcagtgctgtgtctcccatcccaagtgctttgtactcagcagcacctgataaaggtgatggaatgtagattacagtgacagtgatggtaaagatgaatatgattttgataaataggtaaaggtggtaaaaagttcccagggaggaggaatygagggtttgaatcatcctcccaaggtcccagctcttaaaagcatggaacttcaggaggccactggtgtggtcaaggaaggtgcctcttccctctgctctggaattgttgacatcttcctctgcccagggctggtagcttgaaaactggtcacatctgcctcagctcagctgtgccggatcaggaggcagggacctcttggccaagatggaggcaacattgaaagatgccactctgagcaggacagcaatttgcccctaacaacatgccaggggggatcatcttgtctgtggggcaaaccatccctgcccagtctacaaccctcctccaaagctctgagggtagctctctgcatccccacaaactgaaaggggttt

SEQ ID NO: 127695 - DNA, 488 bp, Homo sapiens
gaattccaggcccaccacctgctcccccatgttggtccacgggagcagcagcagcaggcaggtccctttctctcccagcctagtgacctgccagagccagcttctctccacactccctccagcctcttctcccactcccagtccaggtgtctgtggcgaggaccttttcccatgcacagggggctgcccgggcctgaaccccagatgccctggcctcccagtgcagcggtggtgggtcccagagccctcagagcccagggtgagaagtcctgcccttttgccragtgttttcctttagttccagatgccaccctgacaggtgctaccctgtgattaatgtccccacccccaaggcctgggaccagcccctcctccccaagccagaggtggcggtgggtgtgcagcgcagggactgagcttcccgaatcccttcctggttcctccctctccctggaccccctccagccaccaggagcagagagcagacc

SEQ ID NO: 127696 - DNA, 442 bp, Homo sapiens
ctactgccatttaacagatgggagtaaaatgaaattctctcaactttatcttttcccttatggttcagaagacatcactctaataactttatctttccaaggggcatcattcaagtaacaactcatcctaaaaggcccatactggctttcagttgagtgtattctgtattatgctctggcgtctttcctgaaaaytggaagacaatagagtaacgccttcaaatttttgaggaaaatagtctccaacctacagttctatacccggccaaactgtgagataatcaaggatgagcataaaataaagacattttcagacacacacagcctcaaaacatttacttcccatgtacccttctcaggaaaatacttcacaaacaacagagggaaccccaaccaagaagccatgaaaaatgatctgagagtcatatgaaagggaagtctt

SEQ ID NO: 127697 - DNA, 586 bp, Homo sapiens
ctccagcccctaggccttttgaattggtttccacaacgtaagggttaattgaagaagtgcttggaggtatctgattargccaatagaaattttattcttgcaaaataatatggtacagtcaggttgaagtgtagggtaagggagaagggaatgaaaattgactttaactcttcggttggcattatctcctggtaaaattacattttatctttatctttttgcagagaataaaacagagaagtttccctgacaggcaagtacccaaaatagattgtgtgtgtgtgtgcttttgaatttaaaaagatcatataatggagtgaaactaagctattctacctgtaggattttatgtcagccactaagagctgtgtagattattctgacagacaattcctgcatataatgtactgaagataaatcagtacataaaacaaaaataaatagaccttatagatttagatagacatttgcattgtttgcacataaaatgaatttattgctatgtgatatgtatctaatgtgcaccttcacttataagaaatagagaaattaaactagtttgatttttagaatttatggtaaacta

SEQ ID NO: 127698 - DNA, 586 bp, Homo sapiens
ctccagcccctaggccttttgaattggtttccacaacgtaagggttaattgaagaagtgcttggaggtatctgattaggccaatagaaattttattcttgcaaaataatatggtacagtcaggttgaagtgtagggtaagggagaagggaatgaaaattgactttaactcttcggttggcattatctcctggtaaaattacattttatctttatctttttgcagagaataaaacagagaagtttccctgacaggcaagtacccaaaatagattgtgtgtgtgtgtgcttttgaatttaaaaagatcatataatggagtgaaactaagctattctacctgtargattttatgtcagccactaagagctgtgtagattattctgacagacaattcctgcatataatgtactgaagataaatcagtacataaaacaaaaataaatagaccttatagatttagatagacatttgcattgtttgcacataaaatgaatttattgctatgtgatatgtatctaatgtgcaccttcacttataagaaatagagaaattaaactagtttgatttttagaatttatggtaaacta

SEQ ID NO: 127699 - DNA, 545 bp, Homo sapiens
gatcggtagagaaggaacaaggctcccccagcagcagtctgattaggctcgcaacttaaatttatctactctcaggtggtggcccaagaggtgctgtttacatttatgtctgtggctgtgaaagcacaaatgacttacaaggtattctgtaagttcagaagaggaggctgttattctatgaaaaacccacgcatacaggttgatcgttgactttgtccctgagcattttttcattttgtctggctcttgagaggctcccctccagtataaggatgcatgcaggtatgacacgtccctccctctctcgacttggcccgttttcatcttttccacttgttccttttttttcctccaagcaaagaacatgaatgagaatcctccactgctgaccagccgtggatgctgcacctgctccttcttcagaagtggttcagcaaggaaagagcccgcatgtaccttttacckctgcaacttcacttttcttctttttatttatctatcttatctagctagctagttatctgtctgtctgtctgtctatctat

SEQ ID NO: 127700 - DNA, 578 bp, Homo sapiens
agcatctttttgtatgcgaatttgtcatctatgtatctagaatagtgagcccagaaatagacccacataaatacatactttctctactggtctttgacaaatgagcaaaggcaatacaatggggagaaggtartgtttacaataaataatgctagaacaactggacaaccacactaaaaaaaaagtgaatcaagacacataccttaaacccttcacaaaaattgactcacaatggatcatagaactaaatataaaatcccaaactgtaaaactcctagaggatagcagagaagaaaatcgagataatttagagtttggtgatgactttttagatacaacatccatggcacgatcaatgaaattaataactgagatggatgtcattataacttaaattttcttctctgttgaagatatgtccaagagaataaaaagagaagaaacatactggaaaaaaagatttgcaaaagacgtgtctcatgaaagaccgttatccaaagtacaaaaggaagtcttaaaaaccaagttaccaaagaacacactttaaaaatgagccaaagactttaatgggtacctca

SEQ ID NO: 127701 - DNA, 565 bp, Homo sapiens
ctgtgttattcaattcttttgtactctttaataaacaaaacctgcaagtttgtaaagttacataaagaatatatcactatcatttcaggcaatgtggtattacaacttacaagaaatgcctgggagcatcccacttgcacctcttcagagacagcttattttctatcttgaagactataaagtaaaaaatgaacataacaaatgtttcagtttgttccctagacatagtgtaaagcaaaggtaatacataaccgtaatataaaacatggcaatctctttcttaaggtgttcatatttagcaatatctttgaagtttcattcattaggcaaatggggaaaccaggactattatttctcctgaaaataatttttatttaagcacataatgtagaaatctacatcgttatgtgctcttatgtcctgttatatggagggcaactgcaagacatctcattgcattaggctgcagaccattaactaaaatcatcagaacctacccrttcttttttatcagaatgtaataaaggcatatattctcccacaggttttggttgttctccaaata

SEQ ID NO: 127702 - DNA, 600 bp, Homo sapiens
cttctgccatgattgtaagcttcctgaggccctcaccagaagctaagcagttgttgatgccatgcttctcgtacagcctgcagaaccgtgagacaattaaacctcttttataaattacctagtctcagatctttctttatagcaacacaagaacagcctaawacactcttcaggcctcgatttctttaataaaataaggacagtaagagtgcccgctgcagggcttgaatgggattgttaccacctttccctctgctcctcagagttcagatgtagactcagaagttagatggatcaacccaaatcactagtttcattactgagaaaactcagttgaagaatgcaggtggatttgggggtagaatcgggctttccacttcttcctcctcacaactaacactgtcttgttccatctctctcacccgccaatcccacaaccaattctgctccagtaggcttactcctgggaggaacaaatgattcgtgcatctgggcaggcctcaaggaaatagagatggcagaggggcgagagtcctgcaggagtcctctgcgaagcagtgagcaaggggaggttgagagagaggcctgggagccagtgga

SEQ ID NO: 127703 - DNA, 600 bp, Homo sapiens
cttctgccatgattgtaagcttcctgaggccctcaccagaagctaagcagttgttgatgccatgcttctcgtacagcctgcagaaccgtgagacaattaaacctcttttataaattacctagtctcagatctttctttatagcaacacaagaacagcctaaaacactcttcaggcctcgatttctttaataaaataaggacagtaagagtgcccgctgcrgggcttgaatgggattgttaccacctttccctctgctcctcagagttcagatgtagactcagaagttagatggatcaacccaaatcactagtttcattactgagaaaactcagttgaagaatgcaggtggatttgggggtagaatcgggctttccacttcttcctcctcacaactaacactgtcttgttccatctctctcacccgccaatcccacaaccaattctgctccagtaggcttactcctgggaggaacaaatgattcgtgcatctgggcaggcctcaaggaaatagagatggcagaggggcgagagtcctgcaggagtcctctgcgaagcagtgagcaaggggaggttgagagagaggcctgggagccagtgga

SEQ ID NO: 127704 - DNA, 610 bp, Homo sapiens
  misc_feature (1)...(610): n = A,T,C or G
ataatgcaacttgtggtacttgtgtcagtagtacagaacacctgtatcagtatttgttactgtcatattcatagtaatatctcacattagtacaagcacctgatagctttgttatagcttctactatagttgtgcccaagtatttgtatactgaagcacacattatctcattgtaaattttattttggtattcattcttttttatgataattgaggcaacataatttttttaaaaaacatgtgtaggtaggttagattatctaacaatttaatttcaggatattaaaagggaacactgtgatatatttattgcaagaaagagagaattccatctcacaggactgaaaaacactggtatatttcacacttgataccatactacaaaattccacaaagggaactaagtgtgtgcctgaattgatgaaattctgcactaacatatgtacctctatcatcacaatactcatgtactcagcacatcaaagttaattcccttwcatagtgttatagagtgcttctttgtagcccttaacacaggggacattttcatttattttgtggttatttgatctagttctgtgagggtaaggannnnnnnnnnnnnnnnnnn

SEQ ID NO: 127705 - DNA, 572 bp, Homo sapiens
tatttcagtctttacaatgccagttgagtactatcaaatagaatgttgaaaaacagccaccaacaagaggttaattttgcactctgcttcctatatcctgagggaaacaatccgatctatgcattctgcctcctttctctgagaatgacctttgaaatattcatgtctttgtgaaaaattcaaaaaygtaaaatgggtcctctccagtccacaggctcacttgaggctcccgcctcccccttggtattcatatacatatttgagatttatcttgatttccatttccctttaaaccctgcattcctaatcctagatatgtttatccctgtaccactgtgacctctgctgcttccttctctggaattcctccagcccatgaccttctctgggcttttcctttgtctcaattggagtcaagctcaaatcctgaagcaggccattgttggtgcagagggcagggcttcttccctgggcaccactccccacaaagcctcccttccttctgccttggagttccaggccttgaataactggtgctgcttcagtattagcagaaacattcctttctgccc

SEQ ID NO: 127706 - DNA, 572 bp, Homo sapiens
tatttcagtctttacaatgccagttgagtactatcaaatagaatgttgaaaaacagccaccaacaagaggttaattttgcactctgcttcctatatcctgagggaaacaatccgatctatgcattctgcctcctttctctgagaatgacctttgaaatattcatgtctttgtgaaaaattcaaaaatgtaaaatgggtcctctccagtccacaggctcacttgaggctcccgcctcccccttggtattcatatacatatttgagatttatcttgatttccatttccctttaaaccctgcattcctaatcctagatatgtttatccctgtaccactgtgacctctgctgcttccttctctggaattcctccagcccatgaccttctctgggcttttccttygtctcaattggagtcaagctcaaatcctgaagcaggccattgttggtgcagagggcagggcttcttccctgggcaccactccccacaaagcctcccttccttctgccttggagttccaggccttgaataactggtgctgcttcagtattagcagaaacattcctttctgccc

SEQ ID NO: 127707 - DNA, 572 bp, Homo sapiens
tatttcagtctttacaatgccagttgagtactatcaaatagaatgttgaaaaacagccaccaacaagaggttaattttgcactctgcttcctatatcctgagggaaacaatccgatctatgcattctgcctcctttctctgagaatgacctttgaaatattcatgtctttgtgaaaaattcaaaaatgtaaaatgggtcctctccagtccacaggctcacttgaggctcccgcctcccccttggtattcatatacatatttgagatttatcttgatttccatttccctttaaaccctgcattcctaatcctagatatgtttatccctgtaccactgtgacctctgctgcttccttctctggaattcctccagcccatgaccttctctgggcttttcctttgtctcaaytggagtcaagctcaaatcctgaagcaggccattgttggtgcagagggcagggcttcttccctgggcaccactccccacaaagcctcccttccttctgccttggagttccaggccttgaataactggtgctgcttcagtattagcagaaacattcctttctgccc

SEQ ID NO: 127708 - DNA, 572 bp, Homo sapiens
tatttcagtctttacaatgccagttgagtactatcaaatagaatgttgaaaaacagccaccaacaagaggttaattttgcactctgcttcctatatcctgagggaaacaatccgatctatgcattctgcctcctttctctgagaatgacctttgaaatattcatgtctttgtgaaaaattcaaaaatgtaaaatgggtcctctccagtccacaggctcacttgaggctcccgcctcccccttggtattcatatacatatttgagatttatcttgatttccatttccctttaaaccctgcattcctaatcctagatatgtttatccctgtaccactgtgacctctgctgcttccttctctggaattcctccagcccatgaccttctctgggcttttcctttgtctcaattggagtcaagctcaaatcctgaagcaggccattgttggtgcagagggcagggcttcttccctgggcaccactccccacaaagcctcccttccytctgccttggagttccaggccttgaataactggtgctgcttcagtattagcagaaacattcctttctgccc

SEQ ID NO: 127709 - DNA, 586 bp, Homo sapiens
tttctataacaaaatcctctttactaatattcttgggctttttccataaacaccaccatcttagtgatatggtttggctctgtgtccctatgcaaatctcaccttgaattgtaataatccccacgtgtcaagggtggaaactcgtggagatgatggaatcattagggtggtttrccccatgctgttgtccctgatagtgagttctcatgagagctgatggttttataagaggctttccccttcgcttggctctcattcttttttgtaccatcctgtgaagaggtgtcttctgtcatgattgtaagtttcctgaggcctccccaaccatgcagaaatgtgaatcaattaaacctctttgctttataaattacctagtctcgagtatgtccttaaagcagcagaagaacagactaatacacttagtctatagaaggacagcacatactactattgtcatgtaaaactgacttccagtttcacggcggttctttcagtttttagtagttctaggacttctttaaatcagtggactatataaattatttaaagttcttaaagcaaatatatgaatgtgaacacaggccag

SEQ ID NO: 127710 - DNA, 586 bp, Homo sapiens
tttctataacaaaatcctctttactaatattcttgggctttttccataaacaccaccatcttagtgatatggtttggctctgtgtccctatgcaaatctcaccttgaattgtaataatccccacgtgtcaagggtggaaactcgtggagatgatggaatcattagggtggtttaccccatgctgttgtccctgatagtgagttctcatgagagctgatggttttataagaggctttccccttcgcttggctctcattcttttttgtaccatcctgtgaagaggtgtcttctgtcatgattgtaagtttcctgaggcctccccaaccatgcagaaatgtgaatcaattaaacctctttgctttataaattacctagtctcgrgtatgtccttaaagcagcagaagaacagactaatacacttagtctatagaaggacagcacatactactattgtcatgtaaaactgacttccagtttcacggcggttctttcagtttttagtagttctaggacttctttaaatcagtggactatataaattatttaaagttcttaaagcaaatatatgaatgtgaacacaggccag

SEQ ID NO: 127711 - DNA, 573 bp, Homo sapiens
tccttccatgtacaggtgctggctgagaccagcacagctttgctctctgttgtgaatgggcaacactgagttcaatgtraagtcccccagtttcggtgctcccccctccccaagtttacagactatctctccatgccgaatggctgctgctgggacagggggtaggggtggtattggtgatttaagactgtctctcctaccctctttaatgcctctatcagtgacagtaagttaaaactaggtactgtgattgctcacctgatttttaggtcttgtaacagtacttttctgcgtacagatagctgttaagatttggtggtcctgcagtggtgtggaggcaaatggtttaggtttctattttgccatcttgctctacccgtcatcaagtctcttgaagctttcaaaattattttgtatttgttttaatgatgtcttcaatttcagaatttgtattttgttcctttgtaaactatctatctcttttgtaaatttctcatttatattctgaattggttttctgatttcttttttatcatttttcagaattttcttgtactgcactgagcttcttta

SEQ ID NO: 127712 - DNA, 582 bp, Homo sapiens
gaggtactcagctgagcccagcccatatcagccaacacccatttgacccacaaatgcatgagctaaataaatgcatattattatatgccactaaattttatggctatttgttacttagctttattatatcaataggtgactgaaaaaaattgatgaattaaggagatggtgtgtatgtcagaaagacactgtagaaaagaagacaagataagtaggaggggactacagaatgcttaccttcatattaacaagggaatttgatgttccaggaatgctgytagaatttgaccaaataatggagataatacaatttaagctgagtttcacaaacactctctggtcataggtctctttacagatatatatatatatatatatacacctatacctgtatatatttgtaaacctgtatgtttacaaatatatgtttgtatatgttcacacacatgtgaacatatatgtatatatgtttataggtttatatatataatattttagcaattcatattgtatacatatagttaaactatatgtatataaacagtaatcagaaaggagcagcaaataatctaactagccatg

SEQ ID NO: 127713 - DNA, 582 bp, Homo sapiens
gaggtactcagctgagcccagcccatatcagccaacacccatttgacccacaaatgcatgagctaaataaatgcatattattatatgccactaaattttatggctatttgttacttagctttattatatcaataggtgactgaaaaaaattgatgaattaaggagatggtgtgtatgtcagaaagacactgtagaaaagaagacaagataagtaggaggggactacagaatgcttaccttcatattaacaagggaatttgatgttccaggaatgctgctagaatttgaccaaataatggagataatacaatttaagctgagtttcacaaacactctctggtcataggtctctttacagatatatatatatatatatayacacctatacctgtatatatttgtaaacctgtatgtttacaaatatatgtttgtatatgttcacacacatgtgaacatatatgtatatatgtttataggtttatatatataatattttagcaattcatattgtatacatatagttaaactatatgtatataaacagtaatcagaaaggagcagcaaataatctaactagccatg

SEQ ID NO: 127714 - DNA, 413 bp, Homo sapiens
ccacagaattagaaaagccctcaacctaaaattcacacggaaccaaaaagagcccatatagccaaagcaatcytaagcaaaaagaacaaatctggaacaaaagagcaatcctaagcaaaaataacaaatcactacccaagttcaaattatatattacaagactatagttgctaaaacagcatggtactgatacagaaatagacacatagaccaatgcaacagaatagagaacccagaaataaagccaaatacttacatccaactaatcttcaaaaagcacacaaaaacacaaactggggaaaggatattctattcagtaaatgctgctgggaaaattggattgctgcctttagaagaatgaaactggatccccatctctcactgtatacagaaatcaactcaagatagataca

SEQ ID NO: 127715 - DNA, 555 bp, Homo sapiens
tatattgggcacttgttaatttttgttccttttccttctattgattttttttttttttttttgagatggagtctcactctgtctcccaggctrgagtgcagtggtgtgatcttggctcactgcaacctctgcctcctgggttcaagcgattctcctgcctacaggaggattataggtgtccaccaccatacctggctaatttttgtatttttagtagagacagggtttcgccatgttggccaggctggtcttgaactcctgacctcaggtgatccaccctccttggctctcagagtgctgggattacaggcgtgagccactgcgccccagccccttctattgatttttataactccatcctcttgattttcccctcttattttccattggtttgtctttgttcagttgttcaattattccttaaatgttgatgtttcttggccttcttacatcagggctgacaaataggttatacttacacttctgtattactggcagttccctgaaaggactggatttgaaaggattttgagtggtgtcctacccagtgggtag

SEQ ID NO: 127716 - DNA, 555 bp, Homo sapiens
tatattgggcacttgttaatttttgttccttttccttctattgattttttttttttttttttgagatggagtctcactctgtctcccaggctagagtgcagtggtgtgatcttggctcactgcaacctctgcctcctgggttcaagcgattctcctgcctacaggaggattataggtgtccaccaccatacctggctaatttttgtatttttagtagagacagggtttcgccatgttggccaggctggtcttgaactcctgacctcaggtgatccaccctccttggctctcagagtgctgggattacaggcgtgagccactgcrccccagccccttctattgatttttataactccatcctcttgattttcccctcttattttccattggtttgtctttgttcagttgttcaattattccttaaatgttgatgtttcttggccttcttacatcagggctgacaaataggttatacttacacttctgtattactggcagttccctgaaaggactggatttgaaaggattttgagtggtgtcctacccagtgggtag

SEQ ID NO: 127717 - DNA, 702 bp, Homo sapiens
  misc_feature (1)...(702): n = A,T,C or G
cagatggagaagatggaactctctctggttattgaacctgttagctttgatcccttgtcaatcacaccatgatggaggaagaaaaaaacaaaatatttctaaaaaagtaaatatgctcctcataggaatctaacctgcagtgctgggaaaattaaaactggattgaattctacattgttttattatatccatgttgaaaaagcccaggctactcttcatgcatgattccatttagataaaagaaggccacaaaagaagtgctgggtatagcccagtgacttggaggaccttatcataacaaatttatgcatctggaagctcacagaagacatcagtctgtggaaccctacatttctccagtaacgagtcgctgtaagaaaacttattttagtggacaaacaagctttgtggtcaaagataccacatactctaaaaaatgttagacattaggtttgtaatcatattacgatcaaacatatttaaattggtaamcttttaagttagaatcatcagttttcttagctgtgcaccctaatcaaagtcaaaccaaacttatttaatgagaaaatacttgtctttcctttaccaaagggaaaaaaaaattaccacatgccttccatagcatacaaacacaaggtattaatttttgcattattaactacattttttcnacatgtagaaattctgaactgatgacacaag

SEQ ID NO: 127718 - DNA, 599 bp, Homo sapiens
gaaatcgaataattaggtaaatccactttttctatatctacaacctaaattttttcagctcatgtatcttctcccaaagtcagaaccattttcattagaaaatggaatttcaggctaggtgyggtggctcatgcctgtaatcccagcactttgggaggcagaggtgggcggatcacttggggtcaggagttcaagaccagtctggcaaacatggcgaaaccccatctctactgaaaatacaaaaattagcctggcgtggtagcaggtgcctgtaatcccagctacttgtgaggctgaggcaggagaatcgcctgggaggtggaggttgcagtgagacgagatcacgccactgcactcctgcgcgacagagtgagactccatctcaaaaaaagaaaatggaattacaaatcccagaagattggatttgccatctaaaagaagacaaagcaaagagtaatcaactttcccaacctagtctttcttcactgcacttggcctatagatgaccacctttgggtttagcttcatccctagaccatttagctgtggtaggtgtggttgcatcacttgacctacattgtgaggcaacttctgtgcaa

SEQ ID NO: 127719 - DNA, 599 bp, Homo sapiens
gaaatcgaataattaggtaaatccactttttctatatctacaacctaaattttttcagctcatgtatcttctcccaaagtcagaaccattttcattagaaaatggaatttcaggctaggtgtggtggctcatgcctgtaatcccagcactttgggaggcagaggtgggcggatcacttggggtcaggagttcaagaccagtctggcaaacatggcgaaaccccatctctactgaaaatacaaaaattagcctggcgtggtagcaggtgcctgtaatcccagctacttgtgaggctgaggcaggagaatcgcctgggaggtggaggttgcagtgagacgagatcacgccactgcactcctgcrcgacagagtgagactccatctcaaaaaaagaaaatggaattacaaatcccagaagattggatttgccatctaaaagaagacaaagcaaagagtaatcaactttcccaacctagtctttcttcactgcacttggcctatagatgaccacctttgggtttagcttcatccctagaccatttagctgtggtaggtgtggttgcatcacttgacctacattgtgaggcaacttctgtgcaa

SEQ ID NO: 127720 - DNA, 599 bp, Homo sapiens
gaaatcgaataattaggtaaatccactttttctatatctacaacctaaattttttcagctcatgtatcttctcccaaagtcagaaccattttcattagaaaatggaatttcaggctaggtgtggtggctcatgcctgtaatcccagcactttgggaggcagaggtgggcggatcacttggggtcaggagttcaagaccagtctggcaaacatggcgaaaccccatctctactgaaaatacaaaaattagcctggcgtggtagcaggtgcctgtaatcccagctacttgtgaggctgaggcaggagaatcgcctgggaggtggaggttgcagtgagacgagatcacgccactgcactcctgcgcgacagagtgagactccatctcaaaaaaagaaaatggaattacaaatcccagaasattggatttgccatctaaaagaagacaaagcaaagagtaatcaactttcccaacctagtctttcttcactgcacttggcctatagatgaccacctttgggtttagcttcatccctagaccatttagctgtggtaggtgtggttgcatcacttgacctacattgtgaggcaacttctgtgcaa

SEQ ID NO: 127721 - DNA, 511 bp, Homo sapiens
aataggactccagatgggataagttgttttgcatatggccattcatctgtttaaaagcatggtcaggccataacccaggtatcttgtctctcgggccaactcctattccatatggctcatttctctctcacctcttaatacagaaaatggarcagtgattgtttctgaaacataagtaaaggatggcccatgccagtggggtgcattgactcatcatcattgcccttttaattggaggctccagcagatgcaaagttatttggatgttgcagtaacagcaaaaataatgttggcttcctctcagtttttgcctggagaagcccaagaagcctgtttcttataattagaaggtgcgtgtgaacctgaacagtaggacagagtcagtcattgtaagcgttaactgattcaccttttagaagtgacaagtgaagaatcagcctaaggttgcctggagctttcttcaggataatacctaaagggaaaccctcttaggttcaagccaagaatgacc

SEQ ID NO: 127722 - DNA, 539 bp, Homo sapiens
gtctatacatggagaggtaatggagatagaggctgaattaatttcttccataaagctgaagtaagatgctattctgtaagaccgatatccctttgtaggttataatgagaatgtacatgcactgtggaggtgatggggtgggggcgtgtatagaaattctagacatgggatccagagggaaatgcaaggccraatctgtgcgccacttgagtttttgtgattctcgtgacagtttctagaaaatggaatgaatttcagttgattgttgtttgttctcttttctaaccctgttagtaaggcattagtttagaaaatcttggtaggcatagaggttggggacaggctgcattgaggcaatgattatgcacaagggatactcttaatacagaggcttcttttattcatttaaccactaaaggtcaagtgttgtcctgcattgttatttgtctactttatcctgtcatatttttatgcctggggttttcataaaatcccatcctaaactaggaacccaagctttacctcctgtgttccacctt

SEQ ID NO: 127723 - DNA, 596 bp, Homo sapiens
acatgaaacagctgcaccagagagaaataaaacaaaactgttacattaaatggatctttaaaaaatcattacaacaacatctttacaacagatcgcatgggcacatgtgttgaaactgtggtatctgatagcccatccacaaaaatgtaatgggacagcctaaaagctaagggctttacccatctgagggattttgaacaacaccaaatgtatgagagcaaagtatcagctggttttcccaccaagatgctcaggtataaaccaatgaagaaaatatttaaatctgtataaaccagtgaagagaatattctaagggaactycatagaatggaatgggaatagaagcttccttccatttaaacactatgcaagcccactttacatggacattgagcaaaaacacaaaagagatggactacaaactcttttctatatactttttcacaacacccacagacccagatccagaaagcatctttagcccaagcaagcagtaaaaggcaaagtcccttttctaatgaccaaatgcattcccatgtgtttgcctgcttatgttctgggctgaactaaatgaagcacccagtagttccgcagat

SEQ ID NO: 127724 - DNA, 597 bp, Homo sapiens
tattgtaatatgtctaatgctatggctgaggaaaacatctctttcctttcagttggattttgttctctattatcctcaaatgccttaattgaagagttttaatttgtaggtatgagcaaaatgcaagacttcaattaacagtacaatcttgaattccatgctgatacatttccaggttcttggttacatattaattgaagaacttgcaattgttcatctcccagtatgttgrcagaagccatgagtaaagatttattctctccatagacatctctttccaaagactaaggagctgttctgaggtattggagtatgagaagatggtcccatagaacccatccatagggagccaaagtggaaaagccatccagagactgtagcagtttatgcaaaaaccacctgctcatgtgtgctcaaatggaactgctttgcataagcagatcttttcagttccccaggcttgcatagtctccattattcttatatcccagggaacatcctcaatgctgagaaatatgttcttatactgagagctgtagctatttggttcctttctttctcaatgtccttctttttttctttcttggcccaatgatt

SEQ ID NO: 127725 - DNA, 514 bp, Homo sapiens
atatttggtttgtggttgctattagagtaaaagaatcaggcctggtgtggtgcctcacacctgtaatcgcagccctttgggagggcaaggcaggaagactgcttgaggccaggagtttgagaccaggctggcccacatagtccgacccccatctctaaaaaaaacttaaaaactagccatgtgtggtggtgcatgccttttgttccggctaccgaggaggctgaggctgagcctagaagtttggggcttcagtaagccatgattgtaccactgcattctagcttgggtgacggagcgagatattgtctcaaaaaaaaaaaaaaaaaaaaaaaaagagagagagagggagagaatctatctttcttagtctccatctatcttttcacaaaartgaaatttgcctgactgacccgcatcaacatcccccttcacctacccccaataaaatcgtcaaacagagcaaagctcagagcaagagtgaaggttctggggccttcccatttgtcctgcctcc

SEQ ID NO: 127726 - DNA, 594 bp, Homo sapiens
acacagtaggtggtttgccgccagagctggaatcctgatcctgggaccctcagtgcaggactcttttgtcttaataatccccaggcccaggcggtggtgggtcctatggcagtccttttttaatatggtttgtgccatgtctccgctgggagcgaccccaaattatcacagcccgcccccttctgaggcagccaagaagctttttgtagcttggggcatctactgttggacccagggccgtccattggtgccgggagacacatccatccctcctcccacacgatggccccctgactatttgaaggcagggatcttgtgtcactcctgtgtgtcatccaaacctatttttaacgtcagctggttctgcctcttcacgtagcaacagctctgttttctctaaactgcacaattagagcccctgttctccaaaactgattctgttctgtggtctgcatatgaaaccaggaatcctcttcctgtccccttcccttctttgaaccccagttctgtctgtcttggcctttccatctgggtgatgacattcycccggtcgcttccattcctgatttatatctttagtttgttgttgctgct

SEQ ID NO: 127727 - DNA, 416 bp, Homo sapiens
ttttaaaggaactgagcttcaattacacacatcctccagagactgccgcttttccctttacctcttccagaccttccgcctccatttcccgcccagcccagcttccattcccactctccaactgcaggggttctcaacagccaccagagctacgtagatctcacgttacaaaatcccctggtagttactttaatgctcaagccttccacacagtgaccccaccctctccagccatcstcctctctgcagccacccgacccatccgccttgccagtttattctgcttgactaggtgattaaatggtagagattctgaaaagactctctcttctcatcctgtattctttccctcggcaatctctgccatgcccgtggtctgtttgccagatgaatatcattagatcagcgacttccca

SEQ ID NO: 127728 - DNA, 629 bp, Homo sapiens
ccggagggcaaaaccattcctggttgagaaccaccgtctccatttgtttacatcccaattgctattcagttcagtgcaatacaactgctctggacaactctgtgcaaactgcttaattacagagcactaatattctaatggctaaatccagtggtctagtttcagtctcgcctttttgacaattaactttgtcagtggtttcctctctttgaaatcccattcttcaatggcttacaaggactgctcttcaagtccttctttagtctcttttgctgattcttcttcttctaccctatacctaaaccccacatgcttatgcttatctctccttaaggcctakgtctaccttcatgactctaactaatcaactacaaataggccagtgactccacaaacttaactccacccgagactgcttttctgaattccagacacacgtttataactatgaagaaacttgtttctagttgatatctcaaatgtacttcaaaactcaacatgtccaactggagctctcatatacatattctaaaaatcaaacagtttcatgttcactatctctgcttactaaaacagcatccatcagtcagcagtcagctaagctaacactttatagtcagtataaactc

SEQ ID NO: 127729 - DNA, 561 bp, Homo sapiens
gatctgttaaaaattgtgcggtctctttaagaagaatcctcgtcttcccagaaggttagcaatgtcactcagcacagaacacagagtgatcgtatcaatattaataagctcagtgaagtgccactggcttcagtgcaattttgacactctgcaacctgattaataaaataaaaactaattctaaaaataatttacctcctggagaccttaaaatggattttactaatgaagggaaaaaactagcatggatctttcctttgtgataggtgaatcaaacgttaggccataaatctaaaatgacatattctaaactgccaatatctttttttgaaaaacattttgctcacttttcatccaggtttacaatttgagccattttagcagccagatattgatggaaggatgagggtgaggaaataggtaacgttaaatgaattaggctttgtttttatttagtccaktttggattcattcataactttagcttcaagttatcttccaattagcagattgcagtatggaaaattagagaatagcatgtgtataacaaaaacacgagat

SEQ ID NO: 127730 - DNA, 502 bp, Homo sapiens
tggtggggagaaatattcatagcattttttcagttrcccagactgcaggttcttcatcttaccatttaaccgcccaacagctgctcacaaaattctgtgtcattcacactgtgcccaatccaggaaagtttaagtgaccatggaatggcacactggcagtgtctcaaaaggatcagttcttttaggaagacttttaccttggtcttagaaacctgaggaaactgtccagtttattccagaggaatgtcaaatgtcaggatctaaagtctaaaagaagtaaaataataatgaattattagttttcatgattacatgggttgggttggcattttgtatgttcatttcacctggactcactcatgtgactacattcagccgctgggttggttgaaatggagaaggcccaggatagccccactcacatgtctggctgttgcttctggctggggtaagggtaccttaattctcctccacagggtctctcatcccctggtagagtaga

SEQ ID NO: 127731 - DNA, 502 bp, Homo sapiens
tggtggggagaaatattcatagcattttttcagttgcccagactgcaggttcttcatcttaccatttaaccgcccaacagctgctcacaaaattctgtgtcattcacactgtgcccaatccaggaaagtttaagtgaccatggaatggcacactggcagtgtctcaaaaggatcagttcttttaggaagacttttaccttggtcttagaaacctgaggaaactgtccagtttattccagaggaatgtcaaatgtcaggatctaaagtctaaaagaagtaaaataataatgaattattagttttcatgattacatgggttgggttggcattttgtatgttcatttcacctggactcactcatgtgactacattcagccgctgggttggttgaaatggagaaggcccagratagccccactcacatgtctggctgttgcttctggctggggtaagggtaccttaattctcctccacagggtctctcatcccctggtagagtaga

SEQ ID NO: 127732 - DNA, 617 bp, Homo sapiens
acttggtgaattgttttgctttgctgtattgactgagaaatcaggatagacagttcaacaattataaaactctcagtaggaccttgcakacattacgtcacctcacaatggtggctgtttaattgttcctccctctttctaaaagagtcatttcctctcaaagcagcagatttcatattgttgagaaaagtagaggaagaaacagcatcttgcaaccacaaccaggttaaatatgagcattaatctggtcatattaagagctcagagacaaaaggaagaggaacagggacagtgtgaagatggcgttaggcatgtggggagctaccgatgggcttgcacccctactcccaccatccagaaaatagcaaactcaaaagatgcagaaagtttgcttgtaaagcatgaagtcctcccgataaagaaagctgaggcaggccagataactggttaaggacactgcaaggtagaagggctaatcaatttgttagaaacatagatgtaatatattaacatcagaaactcaagcaatcagcttttggaaagctctccagtatagcagggatgccccaaacccactggccttcgtaaagctgaaaagtcaaattctacacccacac

SEQ ID NO: 127733 - DNA, 617 bp, Homo sapiens
acttggtgaattgttttgctttgctgtattgactgagaaatcaggatagacagttcaacaattataaaactctcagtaggaccttgcatacattacgtcacctcacaatggtggctgtttaattgttcctccctctttctaaaagagtcatttcctctcaaagcagcagatttcatattgttgrgaaaagtagaggaagaaacagcatcttgcaaccacaaccaggttaaatatgagcattaatctggtcatattaagagctcagagacaaaaggaagaggaacagggacagtgtgaagatggcgttaggcatgtggggagctaccgatgggcttgcacccctactcccaccatccagaaaatagcaaactcaaaagatgcagaaagtttgcttgtaaagcatgaagtcctcccgataaagaaagctgaggcaggccagataactggttaaggacactgcaaggtagaagggctaatcaatttgttagaaacatagatgtaatatattaacatcagaaactcaagcaatcagcttttggaaagctctccagtatagcagggatgccccaaacccactggccttcgtaaagctgaaaagtcaaattctacacccacac

SEQ ID NO: 127734 - DNA, 531 bp, Homo sapiens
gttattaatatcatatgcaaaatagggataataataattcttacctgtggcatttgtttgtggtattaataataatyaatacttattaatcactgaaaacagcacctggcacactgtgaggactattaaaaataaataaatatacttctaggaagctgctagcagtcatcttaagagcagacactcttaggaaggtgcacaacttatggaagggagagagaagtgagagaaagttgggacttcagtgatagcattaacccttctgaagtctacctggacgttccagttacgtgagtcataagttacaatcttattggctaagccagtttgagttgaactttgttatttatagtctaaagatccctgacaaaaaagtgaaatatcaccaactttaataaacactttaaaacatctattgcctttagatataaagataaataaagcacagacactctcttagattcaacacatatttatcgaattcctattatatataagacaaaatgcagtcgctcagggcatctctcagag

SEQ ID NO: 127735 - DNA, 477 bp, Homo sapiens
tgtcatatttaaaggcctatttttcatctcaatattcctgagccttgatttgggaaatccatgttgaaaggatatataagtcttattaaagggccatccacctcctatgggtgacattcttcatttccctaacaaatgatccttagtgacttcgttactctttagctggatgatagatgctttcggtggtccattgatttatctgttactaaaaggctgtcagttagtgccccaaacaagtcatttacaaaatgttgcctttggcctgtaagaaatgaaatgccttastgtctacttagctaccaggaaagtgaattaagtactgtggtttttcctttttttattaaaaaaaaatgccattttgcttcatcctctgatttgtgggtcacagagcacactgtgccataaccctccttagggaagccttctgaagccttccttatacttaggtaacagtaagtgtctcagaatagttct

SEQ ID NO: 127736 - DNA, 534 bp, Homo sapiens
ggatgaaaatttggcacaagagcaatcattggcggaagttgaatctgaaactgttgacaccaattcaagttaatgctgctagaggctgatcctcaggaagctttcttgwctccagaggttattatcataagtgatgatgaagacaattaggaggctgtgggactggaaacaaatacagcaataagaaacaggagcaaaatttttagaacaagattaaaacctccctaagaaggtaattaaaattggcatctttacatgtgtcagatattacctgttcaaaatttgagtgacttagagttctataaagaggtgctatgatgccatcaaacataatcatattggacagaaacaatcttcaatagaacttaaatcatgtgccatttaatactgttgctggacagctgataaaactaccttctgacaaagtttgatttaattagactctaataaaaggtcctatgagactttctaaaagactatattgggaagaaagaaacctcagaaaagtctaaattatcaagtagtaccatttaa

SEQ ID NO: 127737 - DNA, 536 bp, Homo sapiens
cattggcggaagttgaatctgaaactgttgacaccaattcaagttaatgctgctagaggctgatcctcaggaagctttcttgtctccagaggttattatcataagtgatgatgaagacaattaggaggctgtgggactggaaacaaatacagcaataagaaacaggagcaaaatttttagaacaagattaaaacctccctaagaaggtaattaaaattggcatctttacatgtgtcagatattacctgttcaaartttgagtgacttagagttctataaagaggtgctatgatgccatcaaacataatcatattggacagaaacaatcttcaatagaacttaaatcatgtgccatttaatactgttgctggacagctgataaaactaccttctgacaaagtttgatttaattagactctaataaaaggtcctatgagactttctaaaagactatattgggaagaaagaaacctcagaaaagtctaaattatcaagtagtaccatttaaatactcttactggacagctaataagcta

SEQ ID NO: 127738 - DNA, 648 bp, Homo sapiens
catcagtcactccaagaagctcaggcccctaagtcatcccttcccttatctcctaggcctgagtccacatatagctctatgtggctctctccaccactctctagccttcatttttccccttagcacatacatcacctgacatayaatgcatttgactgacttatttcttagtctcccctgattgagggtggggtgttctgtctctcttgtttgaccactatacccccaggatctacaaggtgtctggcatgtagcagggacttaataaacgtgggttgaggaatgaatgaacaaacaaaagcatctttagtgtcctctgttctctggacctcaggctccactgcagcctagttagtcttgatcttcaggcctaaacaaggcccaaaccacaggcctgcttccatactggcttatcccacctatctagcagtttcccaggctgggctttggagacaggtgggcttggatttgaatcctggctctgcattatgaggcttttaacaccccattttccttatgtgtaaaaccagaaggatgcctaactcccaagaatatggtaagtgaattaaatggaaggtgtgtgtaaagagctcagcacaactcctccaacacagtaagtgcacaataaatgtggccatgagggaagca

SEQ ID NO: 127739 - DNA, 648 bp, Homo sapiens
catcagtcactccaagaagctcaggcccctaagtcatcccttcccttatctcctaggcctgagtccacatatagctctatgtggctctctccaccactctctagccttcatttttccccttagcacatacatcacctgacatacaatgcatttgactgacttatttcttagtctcccctgattgagggtggggtgttctgtctctcttgtttgaccactatacccccaggatctacaaggtgtctggcatgtagcagggacttaataaacgtgggttsaggaatgaatgaacaaacaaaagcatctttagtgtcctctgttctctggacctcaggctccactgcagcctagttagtcttgatcttcaggcctaaacaaggcccaaaccacaggcctgcttccatactggcttatcccacctatctagcagtttcccaggctgggctttggagacaggtgggcttggatttgaatcctggctctgcattatgaggcttttaacaccccattttccttatgtgtaaaaccagaaggatgcctaactcccaagaatatggtaagtgaattaaatggaaggtgtgtgtaaagagctcagcacaactcctccaacacagtaagtgcacaataaatgtggccatgagggaagca

SEQ ID NO: 127740 - DNA, 648 bp, Homo sapiens
catcagtcactccaagaagctcaggcccctaagtcatcccttcccttatctcctaggcctgagtccacatatagctctatgtggctctctccaccactctctagccttcatttttccccttagcacatacatcacctgacatacaatgcatttgactgacttatttcttagtctcccctgattgagggtggggtgttctgtctctcttgtttgaccactatacccccaggatctacaaggtgtctggcatgtagcagggacttaataaacgtgggttgaggaatgaatgaacaaamaaaagcatctttagtgtcctctgttctctggacctcaggctccactgcagcctagttagtcttgatcttcaggcctaaacaaggcccaaaccacaggcctgcttccatactggcttatcccacctatctagcagtttcccaggctgggctttggagacaggtgggcttggatttgaatcctggctctgcattatgaggcttttaacaccccattttccttatgtgtaaaaccagaaggatgcctaactcccaagaatatggtaagtgaattaaatggaaggtgtgtgtaaagagctcagcacaactcctccaacacagtaagtgcacaataaatgtggccatgagggaagca

SEQ ID NO: 127741 - DNA, 648 bp, Homo sapiens
catcagtcactccaagaagctcaggcccctaagtcatcccttcccttatctcctaggcctgagtccacatatagctctatgtggctctctccaccactctctagccttcatttttccccttagcacatacatcacctgacatacaatgcatttgactgacttatttcttagtctcccctgattgagggtggggtgttctgtctctcttgtttgaccactatacccccaggatctacaaggtgtctggcatgtagcagggacttaataaacgtgggttgaggaatgaatgaacaaacaaaagcatctttagtgtcctctgttctctggacctcaggctccactgcagcctagttagtcttgatcttcaggcctaaacaaggcccaaaccacaggcctgcttccatactggcttatcccacctatctagcagtttcccaggctgggctttggagacaggtgggcttggatttgaatcctggctctgcattatgaggcttttaacaccccattttccttatgtgtaaaaccagaaggatgcctaactcccragaatatggtaagtgaattaaatggaaggtgtgtgtaaagagctcagcacaactcctccaacacagtaagtgcacaataaatgtggccatgagggaagca

SEQ ID NO: 127742 - DNA, 679 bp, Homo sapiens
gttgcagtgagccatgaccatgccactgcattccggcctggacaaagactgagataagaaaatttaaaaaaaatttttttaattaaaaaaatgagtagaggtaaatgaaacatagaaaagttaataaagccaaaagtgattctttgaaaaagatcaataaaactaaaattttttttgaactgattgaaaaaagaaagaaggttcaaacaaataaaatcagaaatgaaactggggacattactacagatcttgcagaaataaaaataatcacaaaagaatactatgggttgggtatggtggctcacacctgtaattccagcactttgggaggctaaggcaggtggatcacttgaggycagaaagtttgagaccggcctggccaacatggcaaaatgttatctataataaaaatacaaaaattagccaggcgtggtggcatgcacctgtaatcccagctacccaggaggctgaggcacaagaattgcttgagctcaggaggcagaggttgcagtgagctgagatcgcaccactgcactccagcctgggtgatacagtgagactctgttcaaaacaaaaaaaagaataatctgaacaattacatgccaataagataaccaacatgaaatggtcaaattcctagaaagatataaactaccaaaattgactcaaggagaactag

SEQ ID NO: 127743 - DNA, 463 bp, Homo sapiens
gtgtgagagctgctgatgagatagctgctgaataaaactacattttacctgcctatggcccgccaggttttctttcagctatcgcccatccacccagtcccctcgaacctcagcatgggctggaacctgaccctgggcatgacatttggcatagttgtggacctgacacctgtgtttgtcctagtcctgtttctccctgccttcctgttcctctcgctgccctcatggtcactcccaagrgatccaacccatgttaagtatgggctggaggactgcatgaatgcctcatgatcttcccagaggcaaaggcacctactgccttccaaggtcagtgggaggttgggatcaacactgtttattatgcttaggacaaaaaagatagggagaaagatgtgcaaccttacaggtcatctttctgggatagaacacaatgggtcttctcctgcctcctggatatgttagt

SEQ ID NO: 127744 - DNA, 576 bp, Homo sapiens
taacttggacttcccaattttcagaactgtaaaaagtcaatttattttctttctaaattaggcagtctgtagttctgtcattgtagcacagaaagactaagactttagcagacatttttccaaagcagacataaaattggccaagagatacatgcaaaggtgctcaacattagtaatcatcatgagaatgcacatcaaaaccaccatgaaayattctgtcacatttattaagatggctaatagcaaaaagacaggagataacaagtgttagcaaggatgtggagaaagggaaccctgtgtactgttggtgggaatgtaaattgttacagccatcatggaaaatagtatggaggttcctcgataaagtaaaaatagaatgaccacatgatccaataatctcacttctgggtatatgtatcccccacagaaaataaaatctgaatcttgaggaggtatcggcacccctatgtccattgcagcattaatcataatagtcaagatatggaaacaacctaagtgtctgttgacagaagaatggataagcaaatgtgtatataaacacacacaatagaatat

SEQ ID NO: 127745 - DNA, 547 bp, Homo sapiens
aggagcatctaatgggactactttaagtctcttgtgtgtgtatgtgtgtcactagaagctcttactttggggaccccaacatgtatcatatcaaatttattaaaatgtacttacatgctacaatcaatataagttttgctactaagaaaagtccaggtggcatccctcatagtagggacaggatatattatttaggyaatggtgggagaaaacaagtttactttatagggaaaaattaaggtagatcccaccacatctatggccactctgttcccttttctgcctctgcctgaacttggtcatgggcttcttgtctggcccacttgctccaactgtatcattgacaccaaaatgtccctcagggtattgaacttaacttaacattcctggtttgaggtttttgatgggtctttaaacagagagagtgcttttaattaaatcatgtttataattagtggagcacatgaactcagtcatcggtttcagcgtttgccaactgctgagttattcacagttgaaagctggcctgcgcacatgcacaaccaca

SEQ ID NO: 127746 - DNA, 522 bp, Homo sapiens
cacacaaacccaaattgaaggacattttgcaaaatcagtgacctgtactcttcaaaagtgccaatgtcatgaaatttaagcaaagtctcaggaaccgttccagattagaagaggctaacaagacagggcaatggagtacacgattttgaatttacttttccgataaaggcattgttggaccactggcaaaatctaataaggttttaaaattaaataataatattgcattgatgttaatttcctgattttgataatcacactgtgcattataagataatcccttattttatgaaacaagggtatttaagagtaaagaggcatcatatccgtaactttctccaaaatggctcagagaaaagcttatacacaaatataaatatatacatataatatgcatagatattatatatgtgcacatatgataaatacatgaagagagaaatagtrcacgcacacaagtgtagtaaaatgttaacattttggtaatctaggtaaggttattcatgacttttttgcatgatt

SEQ ID NO: 127747 - DNA, 554 bp, Homo sapiens
actcccatttgcacttgggctagtcctgtgataattaaactctttctctactgtaatactgctgtctcagaagattggttttatctgtgcagcaggcaggatgaacccattgggcaattataataaagcaaatgccaaggggcaattggccgccatcagtaccatcagtatgggcttatcggaagctgacagtcacgaagagtgagagggtagggggatttcattttaataagttttcggatacacttactgtatttagaaaacaaagaaaagttcacagcaggaatrctgtaattacactatctgccattcttggggggatgcaaggaaatctttaaaacagcaatgccacagacacacagcagttttttaccttttaaatatgaatttataataataaatctcatatttattttggtacatatttctcccaattaaaaacaatatataaagcctgatcctaattaggagtaagtcaatgtcactttgacaaaaccacaaaaatattgatttattgactatttttaaagaaataagccttattctgtacacat

SEQ ID NO: 127748 - DNA, 579 bp, Homo sapiens
cgagtttattacactgcaataggtcacagatacaaaccaacataaattcaaactccatttctacacctactaatactgtgatggtgaatacattttttttagcctctcgcctcataygcaaaatgagaataataatgcccatttaatagaattagaaccttgccagccacggctcccacttgtagaaacttgccagccacacctcccacttggaattgcccatagcccagttgcagggctggtcttaggtggtggagaatatattaagtagttttatctccctactcttccttagctgaggggaccagaagtagctgcctgaccccaatggctcatgtgagcgtgtttaactcactcttgagattataaatgaagaagcccagaaattgaagtcaggtagttgagccttggatttttcagatcatgtagagccgaggccagtgtcagaaccccaatgagccaaagtcacacgggaacggaagctaagagggagttggaactctgagtggacatcaagggggtccatagagcaggtgtgcagagagaagcctagagaggctgcctgactgcagccagaga

SEQ ID NO: 127749 - DNA, 573 bp, Homo sapiens
aagacgaaatgccaaattctgtaacccactgacagtaaaaatttcaagccaccagttttgtagacagtactctaagtacattctaatttgggaaatagaataagatcatcttacataaatttcccatccattctgtacaccaatttttatgtttgaactgtgatatactattaaaataaggaaggcactgtgtgggcgttggtgggagtaccttctgagatgttgatatatgaggtaactgatctacctgataacctgcatgctttataaatgagctgttgaactctctgctaaatttcagtcttaaatcatgattcaaagatgcaattgtgcatttattaaagtgrcgggagacagtgtgatgcactagagctagggacctactcactgaagggggcacaagaaaaaaaggaaaagctttccaagatattgggaaactttgagactagaagcattgctttgaatatgcttgctgcttgctgtaattaaaacattttaaagtagaaaaaaaagcagaaaacaaaacaaacctagtcatgagtcttctaagtaactttctatttattctggtgt

SEQ ID NO: 127750 - DNA, 579 bp, Homo sapiens
cgcactgcgtaatggaacgtcatgtgctttcacatccatgacatgagcagcactctaatacaggctaaactgtggcccctgctgcagacttatgacatgggttaaatcatcaccttgaaaggaacctaaatgatttctcaggcttccctctacagaaggtaaggaggcagggagagctaccaaaataccagttctattaccactgacaagttctgaccgagctctctaaggaagcactgaggctagtgcagtggtcttgatatcaagaagtccatgtttgggttcaaatcttagctcttccactcctaagctatgtggcctctatggctgtgaacgcattcatctttaaatggtggttaatgctctttatatagaactgttatgaagagtaaatgcagtggtatataaacaaaagatcatactctaaggtattagtaaccactttactatttttaataataaaattataatyatctagtacttatatataaaatctattcagtccttgggcatattgtgactagaatgttatctatgacaaggaacccatcaggggctgtactgcctgatttataaagg

SEQ ID NO: 127751 - DNA, 605 bp, Homo sapiens
aatcagtatctcctcacagctaaaattatcaaattttaaaaatataagttttacgttcttggggaaatwggcaagttttgacaataattatttttggcaactgtggagtctagtatgtttctgaaactatccaccgacatttaaacgggctctgagccttggacagaaaaaggcagagaaatgtttacagtttatagttgtgaaggtgtgctggagtattttgcctcaagcaatacagaaactcctgggatgagcaaaaagcgcatttcaaagtgaaagactgaggaaggtagcagaaatattacatggttaggttaaaaaacatttataaggctggatttaaaagcatagaaaatgagaaatctttatgctgcttctattaataatgagttgtgtctgtattcacaaattagtttgcaagttaatatttggatttggctaaacaactgcttattaattttttgagatgaaaaagttgagttcaccagttatttgagtgattttgaccagcaattccccaaacaagcaaacaaaactgtttatataaccatcgtataattcaactccctgtaggttgtgaatttcattctacagatggaattctc

SEQ ID NO: 127752 - DNA, 510 bp, Homo sapiens
cattaagttacttttgaaagctcttatgttttgggaagaaaaaaatggcagtaaaatcagcatggtttctgacaaaaggcctgagagcagcaatggtaggataaccaaatgccacacagagttgataacactgagtggagtcacagctgagcagaacaagcccaggaagtccaactttatgttgcatgaaagatcactggtgactgattttattcctgctctgaagaaaatgtagacaatgcatgcacacccggtccttcttacgactccccacctcctccctcctgttatatctgaagccagggtttctgacactctgatacaaagtcataatacataatccttaatacttccaaagggtcytggcttttcagctaagaaattaggtatgctttaagtttatttggactatacctatacactttgttaaagggctataccacaggaatgtaagaatatatacacttttatgtatttgcacaactattataaaatatgtggaaagcccaa

SEQ ID NO: 127753 - DNA, 481 bp, Homo sapiens
aggggctgggggtggagaatatatgaataacaaagcgaattctgagccatttatttttaataaaagctctgttcctgatgatgaaactgtagacctttagagggaaacaggtctatagagatcctattctcacatcttggcatgtcccagaatgacctggagagcttgttaaaacacagactgctgggatctaaccccagagtttctgacccagtaggtcaggggtggagcctaatcatttgtgttttcaaccagcttctacttgatggagattctgctggtstggaatctctgcaccggttccctcttgttcactgaagcccagcgaaatgcagcagctagcgcaagggtacagatgaccaaaaaccattcttcctcaactgttctttctaccaactcttgcttctctgagaaagaggggagcttcagagatggtatttttactctgaccctaaaattcagtgtgacgtcaacttgaggg

SEQ ID NO: 127754 - DNA, 481 bp, Homo sapiens
aggggctgggggtggagaatatatgaataacaaagcgaattctgagccatttatttttaataaaagctctgttcctgatgatgaaactgtagacctttagagggaaacaggtctatagagatcctattctcacatcttggcatgtcccagaatgacctggagagcttgttaaaacacagactgctgggatctaaccccagagtttctgacccagtaggtcaggggtggagcctaatcatttgtgttttcaaccagcttctacttgatggagattctgctggtgtggaatctctgcaccggttccctcttgttcactgaagcccagcgaaatgcagcagctagcgcaagggtacagatgaccaaaaaccattcttcctcaactgttctttctaccamctcttgcttctctgagaaagaggggagcttcagagatggtatttttactctgaccctaaaattcagtgtgacgtcaacttgaggg

SEQ ID NO: 127755 - DNA, 481 bp, Homo sapiens
aggggctgggggtggagaatatatgaataacaaagcgaattctgagccatttatttttaataaaagctctgttcctgatgatgaaactgtagacctttagagggaaacaggtctatagagatcctattctcacatcttggcatgtcccagaatgacctggagagcttgttaaaacacagactgctgggatctaaccccagagtttctgacccagtaggtcaggggtggagcctaatcatttgtgttttcaaccagcttctacttgatggagattctgctggtgtggaatctctgcaccggttccctcttgttcactgaagcccagcgaaatgcagcagctagcgcaagggtacagatgaccaaaaaccattcttcctcaactgttctttctaccaamtcttgcttctctgagaaagaggggagcttcagagatggtatttttactctgaccctaaaattcagtgtgacgtcaacttgaggg

SEQ ID NO: 127756 - DNA, 576 bp, Homo sapiens
accacatgcaggaaatacccctagagctgcggacactagtgtgttaatgtctttgattactttcatatggtatacttggaattgttaaaacacagctgccacacatcagaaggtactagaaacaatctgttggacaatacagaaaaatggcastaaatgaacttcagaaataccccatgctggttactaggggaggatttacgtaaaaaaggaaaaacagcagaaattgtaaaagtgccaagaacatcaggaaatatccccagaagtcactggtcttttgtgctcttgaatgtcctttcaaactggaatagtcactctgctgtattcctaatggaaaaaagaaaaagaaacctcctattattgattaatataattttgttccctcccttgagatagttttgtttgttaagagcaaaatttgacagtttggaagattaattattatataaagacagaaaaaatatcacctagctggagcaaatctcaaggggtgaattggtttatgtcccagcttttaagtacagtgacacctcatctagcacagacagtgcctgtgctattcgtaaagcttttcaa

SEQ ID NO: 127757 - DNA, 416 bp, Homo sapiens
gtcgggcacagtggctcacacctgtaatcccagcactttgggagatcgaggcaggtggatcacttgagctcaggagttcaagaccagcctgggcaacatagtgagaccccgtctctacaaaaaatacaaaaattagctgggcttggttgcatgcatctgtagtcccagctactcatgaagctgaggcaggaggattgcttgagcccaagaggtcaaggctgcagtgagccatgatcatgccactgcacttagcctggtgacagagtgagaccctgtgtcaaaaaaaaaaaaaaaaaaaaaaaaagtccgggagaacttttcactgtgcctggatttttctggacctaccccagtgacaacttgatcttctgagacatcccaratggcagctgaaggaaacttccagaaaggcatag

SEQ ID NO: 127758 - DNA, 513 bp, Homo sapiens
ccacccaaggttgttgggaccatcaacaagataagaaaggtgtggtttcacccaatgtcctctgtagcctccatttagctgggacttgagctaagcacgtggcattcaggactgcatttaattttcatacctaccttagaagtgggatcccattgtgatcctcactttacagatgagacaatgaagacttgaagaagtttaaaacaaactaaaatagaacacaatcttgctgaaggtcacaaccccagttcggtggggtgggtatttaaactcaggaaatggacttggtggtacctctctaactccctcccatgcccctgcaaagcccctgagccaacagaagtggaacattctgaaatcctacaaagctggctccaatatagaagatttcacagcctgtgacataggtgtagaatagtgacccrgtgcagctatggcccagaaagaattttgagatcccagatttggacaaaaggcccaagagatgtggttttccaagtagcagagtgacag

SEQ ID NO: 127759 - DNA, 536 bp, Homo sapiens
atcaggcagagtgagtatgcatggggttaacttctattgtgattttatgggtctgttggaagagagtctctgcttgggaaagcagaggtggacaatggacttgctatcttcagcccctcagagccttcccaaaggctaaccaccttggggaaactgaggctgtatatggaggagttagatgctatatgctgtattcagaaagacggcttgctaatagcagctgttgcaggggttgagagaagatattaaccttgagcttggagaccccaamaaggctagtcaatggtttaatctgggatcttttttttttttctgtacacctatggtgttttctggacacatctaacatgctcatgaaaattgaaagagggacaggagagactggtataaagaatggaccaagaccaggggctcagagtgacctcacaaagaaggaaaggcacaatgtcggtatcttccaaatgggtcgtgatcctgttgggacatggcaacaccagcaatgccagaaagggattcaaacttgattgattagaatg

SEQ ID NO: 127760 - DNA, 171 bp, Homo sapiens
aaacgatgtcacacttgtaaaggggttagcccagtgtcagacaggttgtaagtactgcacccatgaccattgtggaagtcacaccgtgcaacttttattttggctgatgtcagttgtataaaactatgacayagaccagtagatggatggaacattctgattggtgcaagt

SEQ ID NO: 127761 - DNA, 547 bp, Homo sapiens
accttcttcacaaggcggcaggaaggagaagtacagggggaagaacgccttataaaaccatcagatcttttgagaactcgctcattatcatgagaacagcatgggggaactgcccccatgatccaatcaccttcatctggtctctcttttgacacacagggattatggggatttgggtggggatacaaagcttaaccatatcacatcagtcataatggattagcacccactctaatggccttaacatgattamctctgtaaagacccaatgtccaaataatgtcacattcttaggttctgggagctaggacttcaacatagctattcttgaagatgcaattcaactcataacaaaggaattatttctttttgatgcagctgggaaaatgcagtgtagggcatccatttgcaaactgtgttctgcataactgtgttttgtagaggtatttcaaagattctgaaaacactgattcaaattttctttgaaaatatatttaaaagtcatcacatacactcaactatggtacacatcacttacgaacactag

SEQ ID NO: 127762 - DNA, 671 bp, Homo sapiens
ggggttctcaaactgcatctattacaacttgtttctttcttttgcgtacactactcacacacagtacaactcgttctatccttgttccagaaaattgaggcttaatcaccaaaacatgccctaagtttcgctttgttctaaacacaaaagacaaattgaaagatttaagcacctccctgtctgctcaaagaataaattccatcagagaacttaccacattgtatggcaactgcttaagaatccatccgtgggcccggcgcggtggctcacgcctgaaatcccagcacttcgggaggccgaggtgggcggatcacgagatcaggagatcaagaccatcctggctaacacggtgaaaccctgtctctactaaaaatacaaaaaatcagccaggcgtagtggcaggcgcctgtagtcccagctactctggaggctgaggcaggagaatggggtgaacccgggaggcggagcttgcagtgagccgagattgcgccactgcactccagcctgggtgacagagtgagaytccatttcaaaaacaaaaacgaaaacaaaacccatccatggtagattgaattactggttcaaaaactgcccctctctaaaccaatgcctacagtcctccctagtgaccctcccgtgggagaaacattcttcctgccttcactgatgtt

SEQ ID NO: 127763 - DNA, 540 bp, Homo sapiens
aacgcgcctgcaccgcccgggagctgctagagaccgagcggcgctaccaagaacagctggggctggtggccacggtgggggacctggcacacgctcccattataggacagggaccccagggtgtgggagggtctctgcgaggtcggtaacccggagcatgtagggagcctgggcagacttctgcggtttctgggggcgcttggcgttagccttctcttcctctaggctaagaaccaatgttctctccttccgcagtactttttggggatcctgaaagccaaggggaccctgcgaccacctgagcgccaggccctgtttggctcctgggagctcatctacggcgccagccagtgagtggaaggggcacagggagaggaaaggagggagagtcctggcctgtggccgtgcacagagcttggagtcagacttaggttctatttggagtccgccagttagctcacctgtggccttggcccagkgccttagcatgcccttgttctccatctgtacaatggggtaatagcactactattagtgcta

SEQ ID NO: 127764 - DNA, 688 bp, Homo sapiens
taatacacataaaatgtgcaatattaggtkcataatatatttgcattagtattactattgtaagaaatctacataaacagtttaaattccacttttgagcaatttctaatatttaatttgggctagagtggttatattgtattaatgaatagtttagtttcttaggattgattatgggttttaaatttcagttctacaactccttcattatgtatccccaagagaattatttaggtgtccaactttttgtacctttctctgtaaactaagatacataatgtaccccaactagacaaatgtgagaaataaagtgaaaaaccaggaaagtttcttttatcacaaaattattattcctaaattctgtgagtgatattatatatttgtcatttgtatttagaaatttgttattaagcctaagtacaaaaatgttcatttgattattatgttatagttgtacccaaagataattaaaatgtatatgtgttaatacatgaggccagtactcaaaacatagaaatagtatggaaaattactatatgctttaaaaacactaaaaggtcaaatctgaaagaatcactactttgttcctaatagctgcaatattttgcatggctaataattggatgtaatggaaactctccacaataaagctttattgattaaattataagaaagctttaaaacaaaa

SEQ ID NO: 127765 - DNA, 688 bp, Homo sapiens
taatacacataaaatgtgcaatattaggtgcataatatatttgcattagtattactattgtaagaaatctacataaacagtttaaattccacttttgagcaatttctaatatttaatttgggctagagtggttatattgtattaatgaatagtttagtttcttaggattgattatgggttttaaatttcagttctacaactccttcattatgtatccccaagagaattatttaggtgtccaactttttgtacctttctctgtaaactaagatacataatgtaccccaactagacaaatgtgagaaataaagtgaaaaaccaggaaagtttcttttatcacaaaattattattcctaaattctgtgagtgatattatatatttgtcatttgtatttagaaatttgttattaagcctaagtacaaaaatgttcatttgattattatgttrtagttgtacccaaagataattaaaatgtatatgtgttaatacatgaggccagtactcaaaacatagaaatagtatggaaaattactatatgctttaaaaacactaaaaggtcaaatctgaaagaatcactactttgttcctaatagctgcaatattttgcatggctaataattggatgtaatggaaactctccacaataaagctttattgattaaattataagaaagctttaaaacaaaa

SEQ ID NO: 127766 - DNA, 556 bp, Homo sapiens
ttagttcaatggttagtctaatttcatatttcgggtataaattccctaaaaatccaaggctcaatgaatatattgagtggctcctgaatcaaaattaggaaaaaaagtttctgtactcttctacctacctcctcagtagagatcttggtccaataaattttgttaatacatcctcccttttgttacccagaataagacactgttaacaatgcttacccagtaataactcttatctcctttcctattaaagagtcacttgatgataaactgcatcctttttgtttataatattttagcttcaactttaccctagattttatataggatttaygtattctttgtgttttttcagattcaatgaacccagccatgtaaataaggcatagctgataattacaaggtcagaatgaatatataactgtttttaagacataatgctagagacattaaactaacatttttatattaacatttgtatatttttatatatttttatatgcatgctaaacaacaaggctgctctattttagcagaactggcagacatttagagaaaa

SEQ ID NO: 127767 - DNA, 556 bp, Homo sapiens
ttagttcaatggttagtctaatttcatatttcgggtataaattccctaaaaatccaaggctcaatgaatatattgagtggctcctgaatcaaaattaggaaaaaaagtttctgtactcttctacctacctcctcagtagagatcttggtccaataaattttgttaatacatcctcccttttgttacccagaataagacactgttaacaatgcttacccagtaataactcttatctcctttcctattaaagagtcacttgatgataaactgcatcctttttgtttataatattttagcttcaactttaccctagattttatataggatttatgtattctttgtgttttttcagattcaatgaacccagccatgtaaataaggcatagctgataattacaaggtcagaatgartatataactgtttttaagacataatgctagagacattaaactaacatttttatattaacatttgtatatttttatatatttttatatgcatgctaaacaacaaggctgctctattttagcagaactggcagacatttagagaaaa

SEQ ID NO: 127768 - DNA, 622 bp, Homo sapiens
aaatgacttgaaaatttacaattaacttctacacaaaaatctgcacatggatatttatagcaactttattcataattgccaaaacttggaaacagccaaaatgtatttcagtaagtgaatggacaagctgtggtaaatctatacaatggagtattattcagtgataaaaataaatgagaaatcaagccatgaaaagacatggaggtaacttaagtgtayattactaggtgaaagaagccaatgtgaagaggcaacatagtctataattctaactgtataacatttgggaaaaaaacaaaactatggagacaataaaaagatcagtgtttgctaggggttcagagagagcaggggaacggtaaatcggtggagcacacagcatttttagggcagtgaaattgtactgtatgataacataatggtggatctatttgcccaaacccatagagtatacaacacaaagagtgattcctaatgcaaacaatgcaatttagttaataataatgtattagctcatcatttgtaacaaatgtaaatgttaataataggggaaactgggaaatgatggtgaaggactatataggaactgtctgtaccttctactcaatttttttaaaactct

SEQ ID NO: 127769 - DNA, 602 bp, Homo sapiens
gatacccttataaagcccctttgggaaagatgtagtctaaataacaaacataataaaggtgatcatataacttaattcagtaatgccattgataggaatgtatctacacaatgtaatttagtagaaccaaaggtgtagaatacatggagattttcaagttgtattatagtcaacaaaaaatgaaaatgcttttgttagaattttaagtgaaaaataagaatactatgatgataaacttgagttcttggaagaaaattatggaaaaagtaactgttcctgttagagggtgggattataaaggatttgttacttctagcaccactgttgcaaataaattttgttcattgtttagtaatgttttatactttcacacaaagttcaacaaaatatttacatttaactctactgatgaaataaaatatcgagtattgttttctcaatttggattacagttccagttttagcactagtcatgatttaagatcaaagttagatctcaagcattttgttcaacattgtgttgaaatagaatmacacagttattccaaaattggagttttattctttttttgtattatacttttatttaaaagaattatctg

SEQ ID NO: 127770 - DNA, 613 bp, Homo sapiens
gtttatctttctatccctggcttatttcacttaccataatgtcttccaattccattcatgttactgtcaatgacaggattttttttcttttttatggctgaatagtattccatggtgtgtgtgtgtgtgtgtgtgtgtgtgtgtgtgtgtgtgtrtatatatatatatatatatatgccacattttcttcatccacttatctgctgttggacacctagatttgttccgtatcttggctattgtaaatagtgctgcaataaacatgggggtgcaaatgtctctccaatataattattttctcttctctcaataaatattattgaaaaaaaaggttatcatgtgtacgaatgggcacccagataaacaattctaatttgcaaattaaagcaaaactttcatctatctaatttattattttgaagtaaaaaaaattatgaagatctatatgaaccacccattatgtaattgcaagagagagaaaagaatgaataagaattcaggctctgagctatctggaacaggaaccatatctttactcattcaatagatattttgtttagtacttacaatatgccatcttctgtattaagtattatgtacaacaatgaatgat

SEQ ID NO: 127771 - DNA, 613 bp, Homo sapiens
gtttatctttctatccctggcttatttcacttaccataatgtcttccaattccattcatgttactgtcaatgacaggattttttttcttttttatggctgaatagtattccatggtgtgtgtgtgtgtgtgtgtgtgtgtgtgtgtgtgtgtgtgtatatatatatatatatatatgccacattttcttcatccacttatctgctgttggacacctagatttgttccgtatcttggctattgtaaatagtgctgcaataaacatgggggtgcaaatgtctctccaatataattattttctcttctctcaataaatattattgaaraaaaaggttatcatgtgtacgaatgggcacccagataaacaattctaatttgcaaattaaagcaaaactttcatctatctaatttattattttgaagtaaaaaaaattatgaagatctatatgaaccacccattatgtaattgcaagagagagaaaagaatgaataagaattcaggctctgagctatctggaacaggaaccatatctttactcattcaatagatattttgtttagtacttacaatatgccatcttctgtattaagtattatgtacaacaatgaatgat

SEQ ID NO: 127772 - DNA, 680 bp, Homo sapiens
atcccattaactttcatttatgatattaaaaaaacatgttaattaagatataacttgcaaaatgctctgcagtttgtgtgtgtgtgtgagaaagagagggactttcaggaattgaagattttctctgcatgatacacttctgacagctgactaaaaagcagctcagtcagacatctttattatggagcacaagtcacattttaaacaactgaagcttattattttgggattttcttctggatttgccatcacttttaatggcaaaaagygcaattacatttgcaccaacctagtaagattcactcatttgattcctgaggctcccagagtcgtttagagttaattgtccctagtctgtattccctagacttgttagagactattttcttctcaagatcaaggaagatgttgtatttatgcagggtccttaaaacatagttattgtaactggcacatagcagatacaggttaatatttatggaataaatgaacaaataattggtcaaggtctctggaaatcagtttgaactgctttaatatgataacctctacagttcctctaaaatctgaacgaaattttggggtgagaaaatcaagaaataactatctagctggcttgagtctagaatcttcaggagagataagaattatcatgctatttggagttgctttgattactt

SEQ ID NO: 127773 - DNA, 578 bp, Homo sapiens
tgaaagtgatagttatcggccatctgctgaatgtgagcacacgtggataatggagagctgaagtgattaattggggtgggcagaggtattcttagaatctgaagagtacttaaaggaactgtgtacagttattaaatgaagtattattaaagggtatccatttagttgttaaactattaaaatgtatccatatagcgttggtgaacgatatcagacattcaatacataaataaaattataatacttgtgcaaattcacagagctttctctctcacctccagtatcatttccctacctaattatgttgtggccattccccagtagtgctcctgttacattgtcagtatggtaacttacttttaaagttctttagaataaacatgtgatgtgtgtgctaattagttttaatctgamcatgaaaggtgcttagttagcatgcaaagtttcttaaccatccattgacatgtacttgttcattcattcaactgtcaaatatgtacaaactgcttaaagttgttgaggcactattctaggagacaaaacaggttaaagcacctgcctcagtaaagctcatggtc

SEQ ID NO: 127774 - DNA, 616 bp, Homo sapiens
ggatagaaaccttatcagtggaatgaaatggagagcctggaaaaagattcagacatagagataacctgatttatgagatatgtaatgctacagctcatagaaaaaaacttaaccttgtcattaaattttgctgtctttgactatcaatagggaaaaatagtgcattggtccctatctttcaccacaattacaaatttaacgcagatggatagtagttctaaatgtcaccagcaaagctataaatcttgcagataaaagcacaggagatcacatcagcaacctgggaggtggcaaacatttttgaaaaacaacacaaaaagcattacccacagaagaaaaaagtatctgggttatgttaaaatcaaacatttttttatgaagaaatactgtccagagagcaatagggcggcacacaaaatagtaggagatatttaccatgtatatatacaatttaggactcatatccagaatatatagtaagaatatatataaaatataaaaaagaataaataacagaatatacatgaactattataattygaaaggataagtaaatattcaacaaaatttaccccaaaggcttaaaaatatattttacaaaattatatatatgcat

SEQ ID NO: 127775 - DNA, 597 bp, Homo sapiens
  misc_feature (1)...(597): n = A,T,C or G
tctgagnnnnnnnnnnnnnnnnnnnnnnnnnnnnnnnnnnnnnnnnnnnnnnnnnnnnnnnnnnnnnnnnnnnnnnnnnnnnnnnnnnnnnnnnnnnnnnnnnnnntcgtactacattcttatttctcaggaatttaaatttagtatgtgcctttttcatagtttttacctaaattctagtgaaaaataatgtataaatgtaaaaactgaaatctcaaaccaatgtattcattatacaacataacaccaaggcaaggaaaattctatgagcatagtaaaartttcatgaatgctaactgatttagttctgtattcaaggaaaataaatgactggaagggaaggtactctatatatatcaactaaaatatatccttatttctcttttattactttttttgaaaagacattttatttatgagataatgacatgttgtttatgaaagaattttgattttatatttacctagttgcaactaactagaaaaaaaaggttaatctttttagtattccttctaaggccaaagatcatgtcgaggcctgaagagaactagttaacaatgttttagaggctactgataccagtctctgaaatgtag

SEQ ID NO: 127776 - DNA, 592 bp, Homo sapiens
caaagcaaaatgatatcatttgaaagctggcttggttggccagtagagccaaagattgaatttagcatttcttatttccttggctttgaaagccataatctgactttggaagcctcactcctctgagtgtctaaagagagaagtgacctcattcattaagacaaaaacttctttcttgagagtttgttttttccccaagcatgctagtacaatgtggggaagaaacgacatttatacagagagccacaatattgtccctttccccttggtgtgacttcagatgacctcctgccttagatggaccactaaacttagaaaatatcagaataactgtcttcacattccagaaatggctccctgtggatttagacccagcttcagaaagcaaatttgcagtctagtgggtccaagaaattcagtgtcacaccaaaaagctttcgaccctggaccatagtctgatctgtgacaaaaatatccttctcaagattcttcctacagtgggattgagggattgagaagaggagamgaagcctttgcctcctgctgtgatgatgtgagatctccagctgtgccaattctcattagcacccag

SEQ ID NO: 127777 - DNA, 576 bp, Homo sapiens
cagaacatcttttaataaaataaattcattttaatttctaaatggtaattcctattttctattaaatgaatggctttctcagtacaccttgagctgagtgcatgatgaggtgatggtgactctcaagccttgggatttgaggaacttgtactgctgtagccctatcctcaggatgggggctggtgggaggatttgcccccgagagcctgggtgatgctctcagagagagggagaaaggcagagcaagtctgggcccagggtggagctaaggggcttcgacctcacacggtcctagctccagacatggcttggctatcagctcatggtctcaccttatgccaattgtttcttccttccaggattcagttgcctgtctgaacagtgactaccatgaactctacatgcygtctacttctaaccctctttggcctgactccagcttcaacacctggaaacatggcaaaaagaacagggggacattggcttggactggagccacgtgtcagagtttgactcaaggatagttgatgtagaatgaagagaatgagcagggaacaagaggtataaatgtgcatg

SEQ ID NO: 127778 - DNA, 610 bp, Homo sapiens
aaatgggttaatttgtctcttctgttacctaaggacttctaccactcaaatgctccctgtactctaaagcagtgcccctctctgatgtcagcagtggcacaattgcatttgcatacaattttcttttggggtacatgtagggcaaaagatgtgaagcttcaagagtgttagttgtgagaatggaggcttastgtcatgggtgacactttgccagcactgagcaggagatcttgaatgacagaagtacgcatgctttttcaaacaaaacttatcctgtgctttgtgattctacgtgctgtgcttttaaaaatgaaactcatctcagtgttttgcattcctttgcttatgatcccttcttctatcttcaaagacagcaatggagagcttcagaccctcccctcttgcatcactctggcttcttcctctctcttgtatttgtgattacattagactcacctggataatccaggatactctcctgatctcaggattagtaaattcattacatcttccatgttccttttggcatgtaaggtcacttatccacaggtttcctggattaagatgtggacattttggcaggccaaattctgccctccacagaaccccc

SEQ ID NO: 127779 - DNA, 548 bp, Homo sapiens
attctaacagtattttttttgagactttagggttttacatatattagatcaagtcatgtgcaaatacagacactctacacttcaactgttcctcctcccacattttctgttactgattcaattggcctcttttatttatcatatattaattcacaaattattatatagttattacttacataacttttatatgagttgaaagtgatttatgtatcaccattgcagtatctgagtaatctaatttgaaatacattcttttgttgacagtcaattttatattttcacatgtttctatgttgtgtcaattcattccaacttgaagttcctttagtatttcttataaggsagatctagtggtgatgaactccttcagcttttgttgcccttggagtcttcatttctgaagggtagatttcctgtttatactattcattggtaggcaggtttttcttttgtctttcagcactttaaatatatcatttttctctttcccagtttgacttttaaggatttcattataatgtgtctcattaaagatatctttatgt

SEQ ID NO: 127780 - DNA, 548 bp, Homo sapiens
attctaacagtattttttttgagactttagggttttacatatattagatcaagtcatgtgcaaatacagacactctacacttcaactgttcctcctcccacattttctgttactgattcaattggcctcttttatttatcatatattaattcacaaattattatatagttattacttacataacttttatatgagttgaaagtgatttatgtatcaccattgcagtatctgagtaatctaatttgaaatacattcttttgttgacagtcaattttatattttcacatgtttctatgttgtgtcaattcattccaacttgaagttcctttagtatttcttataagggagatctagtggtgatgaactccttcagcttttgttgcycttggagtcttcatttctgaagggtagatttcctgtttatactattcattggtaggcaggtttttcttttgtctttcagcactttaaatatatcatttttctctttcccagtttgacttttaaggatttcattataatgtgtctcattaaagatatctttatgt

SEQ ID NO: 127781 - DNA, 602 bp, Homo sapiens
gtttctcaaaaatataattaatggctgggcaaggtggcccatgcctataattccagcacttcgggaggctgagacagaaggatcacttgagcccagaagtttgacaccagcctgggaaacatggcaagatcctgtctctacaaaaaataaaaataaaaataaattagctgggtgtattggcatgtgcctgtggtcccagctacatgggaagctgaggtgggaggatcacttgtgcccagggggttgaggctgcagtaagctgtgttcacactgttgcactccagcctaggtgacagaacaagaccctgtctcaaatatatataaaatttaagttgtttgaaattttcatactcagagaacacatatgagtactgatatgttcatttcatagttattcatgacataaacctggaataagtcatccccaggagtctgacaaccatgtgtctggctgcatctttaaggctgaatggaagaatgaaagagccaatgattagctggctgacctatgrcagagttgcctcctttcccacgaggctggaatgccaaagaccctctaacttgtgaacattctccagacagttctgggaaactctggtaca

SEQ ID NO: 127782 - DNA, 485 bp, Homo sapiens
ggaattcacttggtttctctcagttccctttgtagaaagaccacagtcagaaggaccaacattaccctgaattaagggcactgaagcccggggctctggtttgccctgagattctggtagttccctcctccccctcggccaaggcttttatatccttaaggggcactcgtttggcaaatgaggatgcagtgtctgctgtgctccaggcaacaccctgtcttccctcctcctgcagagagtgtgacaatgcatcacttggtcaaagatagaaagtgtcttccctgtgtgggctcaggctgatggatctcatgtgtgagggatgggggtctgcattccccttttgctggcatgagtatcctakgtcattggaagtgtctttgtggctgaggatggctttgccgctgcccaggtgtcatgggtttaccatctctgctgggataaactccatctttgcacctgctgtgcctggcagactcccaggaggg

SEQ ID NO: 127783 - DNA, 452 bp, Homo sapiens
aattccactggcttcagtaagagaaacaatcacttcagaaactatagttttattccatagaaatggcttttgatggggaattaccacagtaaaagagaggtttttatattgcaaaattaactttttagatgttcagccaaatgacaacagaataaaaaattaaatgctcaagtaactgacaaaactcctaggayatatctgtgaattggccttacacattatgaaaaaatattatttgaaaccagaaatctcattgtatgcaattctaataatgtcagatttatagagataatataatttacattttaatatatgtaaaaggaatcatgaacaagttggtttttaggattttcagtttataacatcttccagattgaatgtaacatataagaaatgggactacaatgttaccccaagaagaccatgggaaagaatttgggcagtaacaagat

SEQ ID NO: 127784 - DNA, 571 bp, Homo sapiens
atgagattcactctgtagtcatcttagtaatgcttaacctcttatggcttggttaaattttaaaactatgaggttgtttctaagagttaaaggtgtctttaaagttaacttgataccatatattgtagatgtttgcaaaagaatttcattgtccttccaggtttggcaataagtgtcaggaggaatcataygttagaaaataaaagcaaaacaaatgttttaactcaaatattttaattattagcatttaatataattaatattttaaaatttcaatagtatttttactattaccacagtaaaaattatgtaaaatattttatgtaaaaaatggtgttactaaaaatagtgaaattttcaaaaaatattttaacttttaataatattgtattacttaaatctaacgagagtattcaaaattaaatatgcactataagcttagtaaaaatttaccttgcatattttgcatactttcatttgacacgtggctaatgtgtctcaaaagcaaatataagaatctgtaaaagtcacttttgaaatcaatattttgtagggcagctgcttaatactt

SEQ ID NO: 127785 - DNA, 314 bp, Homo sapiens
ataaccacaacaatcctaagtaaaaagaacaaagctggaggcatcacattacccaacttcagactatactacaaagctactgtaaacaaaaatgttactggtgcaaaaatagacattcagaccaatggaacaaaataaagaacccagaaataagaccacacactcacaactgattattgaaaaagttgatggtaaacaatggggaaaagacactctatttaacagattctgctgagaaagctggcwaactgtgtgcagaataaagaaactgagcccctacctctcacgttatacaaaaaataactcatgacgag

SEQ ID NO: 127786 - DNA, 314 bp, Homo sapiens
ataaccacaacaatcctaagtaaaaagaacaaagctggaggcatcacattacccaacttcagactatactacaaagctactgtaaacaaaaatgttactggtgcaaaaatagacattcagaccaatggaacaaaataaagaacccagaaataagaccacacactcacaactgattattgaaaaagttgatggtaaacaatggggaaaagacactctatttaacagattctgctgagaaagctggctaactgtgtgcagaataaagaaactgagcccctacctctcacsttatacaaaaaataactcatgacgag

SEQ ID NO: 127787 - DNA, 530 bp, Homo sapiens
attctttcaatccatgaacctggggtgtttttctatttatttgtgtcatctatgatttcttttgtcaatgttttgtagttttcctgtagagaccttttacatccttggttaaatatactcctactatcgtatattattttatcctatttttttattttatttttatttactataaataggattgccttcttggtgtgcttctcattttggtgtatacaaatgtcattgatttttgtatgttaattttgtattctgaaacattactaaatttgtttatcaaatctaagagttttagggaggagtctttaggtttttctaggtataaaattatatcaacagcaaactgagataacttgactttatctttttcaatttgaatgccttttatttctttctcttgcctgattgctctggctatgacttccagtactatgatgaataagagtattgaaagttggcttttatatttccyagacttcctccctgacctccatcttcttaaactctgccaatcacttgtatgttttata

SEQ ID NO: 127788 - DNA, 554 bp, Homo sapiens
aggtataaaattatatcaacagcaaactgagataacttgactttatctttttcaatttgaatgccttttatttctttctcttgcctgattgctctggctatgacttccagtactatgatgaataagagtattgaaagttggcttttatatttcctagacttcctccctgacctccatcttcttaaactctgccaatcacttgtatgttttatatttctataattttgccattttaaagatgctaggtagtggaaaatacatgctctttatattttatgtaatatatagtaaggacttttctcagcaattcaaattytgatatgaattttaattgggtagttactagattgtatgttagttgcatatgtaactatttttctgaaactgctaaattgttttcagaggagttatacattttatgatcctaccagcaatatatgcataacccaatttctgtgcatgctcacccacatttggtgttgtcattatttttgaaagccatttgatagttgtgttagtgatttctcattgtgggtttatttgcatttcccaaa

SEQ ID NO: 127789 - DNA, 552 bp, Homo sapiens
tctgtgcatatgtgcgtggatgggacagggatctagacattgtaaaaaagctgcattgtaaagaactcttgggctcaggcaatctgcccttcttggcctttcaatgtgctgggattactggcgtgaaccactgcgcccagcctggaaaacctcttttaactacacattttattttctggtcactaaaaagtaacctaagaccaaaaaggcaacagacaaacctagaacacattataagaaaatgcattttataacttttttaaaatgcatttaggacaacaaattggtgaaaatataaggaagcactgaaaacaatgcatattttcaggygcaatttaaaataaggatctcattaagattcatgtcccaagaacatttttatttctaaaataggcttggttcagctgaggctttttatgtataatttaacaacggaaaccataacaacaataatgtatggataggaagagtttcttctcttgaatgaacaaattaggtcatcatcaagcagttttatttaatgggaatcccccgtgaggtattcacatagtg

SEQ ID NO: 127790 - DNA, 568 bp, Homo sapiens
tgaattgctgcaatctcatgataaaccttgaatggatgaacagtgacttgcttgcttgttttattgattggctgactgagatagggtctcgctctgtcacccaggctggagtgcagtagcacgatcatggctcactgcagcctcaaccttttgtactcaagcaatcctcccacctcagcctcctgagtatctgggactacaggtgcatgccaccatgtctggctaatttttgtattcttttgtagacggggtttcaccatgttgcccaggctgttctcaaactcctgagctcaagcgatccacccgcctcagcctcccaaagtgttgggattactggcataagccactgcccctggcctcagagtggcttctcatggatgagcaaagaaagtggtttcttgagatggaatctactcctagtaaagatgttgtaaacattgttgaaatgacaatgaacagtttagaatattacataaacttacttgataaagcagtggcaggatctgagaggactgactccaattttcaaagttctactgygggtaaaattctatcaaagagcatcaca

SEQ ID NO: 127791 - DNA, 639 bp, Homo sapiens
caattccatccacgttgctgcaaatgacaggatttcattcttttctatggctgaaaaatattccattatgaaccacattttctttatctattcatctgttgtggacacrtaggttgattctatatcttggctattgtgaatatagctacaataaacaggtgagtacagatatctcttcaacatactgatttcttttggatatatattcagaagcaggaatgctggatcatatggtagatttatttttagttttttgaggaacttccatactatttcccaaagtggctatactaatttacatacctaacaactgtgtagtagtgttctctttctccacatccttggcagcatctgctatcctttcactgttttaaaaagatgtatatgttgttgttgtttttgagatagggtctctctctgtaacacaggctggactgcagcggcacaatcatagctcactgcagcctccatcctcagggctcaagcaatcctcccaccccagcctcccagggctgggattataagcataagccaccatgctcagtttgacgttttaataatagccattttaactagcatgagataatatctcattgttttttatacttgcttttctcttatgattagtgatgttgagca

SEQ ID NO: 127792 - DNA, 605 bp, Homo sapiens
tcaattttactttccatagctaaagtcaattcaggagagtaggggtaggcttggcagtaatacaaagaggtattatgttgatgcaaaacctataaaaatgcaaacatttgcactcattacttactcacttactggatactatgaaaatcaatccaaaacatcgtgattcatgtgcctgatgctcattctcattaaattggctccacaaaattggcaaccagaagtacgtaggcttacagagcccacgcttggggcaagcagctatatgtggtgactccatgcatgtttataaacttgaaaaatgttgctcttcattggctgatggtaatttacatttcaaagaggataatagtgaggactgccatattttggtgctgaaattcacatttcacagaatacaatttacgtcagaatgttatgtcactacaaaaygcctcaggctcacagctcactgaactaaataactctgtctccccaggtgatgatgatcaagacttaatcgctcatctagtttttctcagctggaaattaaacctgaatttacttacaaggagttgttgaggaatttcaagatacaggcaagagtaaaaggttttgtggaagca

SEQ ID NO: 127793 - DNA, 586 bp, Homo sapiens
gccacttttggcaagcacagttgactatggtagtttcagtaacatttttcttcctctatgttactgatgtcaaacctatctaatcctcatacaatctctatgagaaagttttattccaaatttacagatgaggaaaaggcctggggaggttaaacagcttccaactcctgaacactgcccaagstcacagagcttagaatgagttcaatgcagatctaagaggccaagggatttaactacggcactagatttgcttacttcccaattctgtaatttccttaacaagggatacctgtgttagtgataatatgttgtgccatgtatatcactgtggaaaaaaaccccgtctttaatcaaattaaatgctgaaaataccatccaagttaaaagttaaagatgtgggtttatggactcttgcatttcatagagatactctgcgtggtgaagaagctattgaaaggcaataccaaaaatcaaattgtttctgtttgagagtactatataaaaaggttttaaataaatacttaattatattggttaattaggtacctgcaatattagggcaattttctgatgtaagacaatt

SEQ ID NO: 127794 - DNA, 227 bp, Homo sapiens
agagagacttataaaaaattaccaagtaggaaattcatatatggccactgttaacacatatgttcttttctggttttaaaagtggggtcaattcgtgctattgyttttaacttgcttcttataactataagttaacatcttacagaaagcctattactgaggactttctatataaattgacacatatgttttatgtattataaagcccgagggtgccaaaagaggta

SEQ ID NO: 127795 - DNA, 605 bp, Homo sapiens
tctatgcttaaaaaaccagcactagatcctgttggctgtttcttccaggagttctcagcctctcctactattaatgcagcttttcacacaatatttctggtcctttgagtctgtaagctttctcagacatattcttcctttcaactgaggtgtttcaattaattcatttatttatttttgggtagtggtagagcaagtaaggtagagagaaagtgggaggaggggatcacaaatatacagacaattttcccagccaacacgaacaaagatgaaacmcacttcaggctggaaaataagcacggcaacgagacgtgatttcatagggagcatattaaggctctgctagagtggtttcctgctccagaagctttgcagcctcattttatttgggaccgctgaagccaagggaacttcgtttggttaggagattgaaatttgtctttatatcttttccatctatcatttgtttgcacagtctctttactttccccacccccagagccttaggttgtataatacttgggcctttaaaggaaagggtctgcatcccttaggaatgtgctgagcagctgcaaacctcctcaaacactaatccctaaaaagca

SEQ ID NO: 127796 - DNA, 558 bp, Homo sapiens
accatcaattagaatggtggctttctgatcccaaagtcactcattctgaaaacaatatttttcataaatttgaaagtgagaarttttgatcttgccattcccaagtaactctcttaataagaggcatcagcatgcttcagtgacagctgtcaccttccattgctgagagtcatctttgagttctctatttcactccctacactccaatttagctgcagttctcttggccagtcctatgaaatacatccatggcctaacgacttctcaccactactaccactcatgctgacagcattctcacctaagtcactaccttttttcgctggattagagtagcctcccaatttatttgctcacataacctatttattctacacagtgcaccagatacacccctttgaaatgcaaacacaatcatattattctctggtgaaattatctcatatattcctatcgcatttaaaattaattcagaatcatcccatgattatcaaaaccctacatgctcttccacaacatggtttacttccaagatatctcttcaacatttttttcact

SEQ ID NO: 127797 - DNA, 558 bp, Homo sapiens
accatcaattagaatggtggctttctgatcccaaagtcactcattctgaaaacaatatttttcataaatttgaaagtgagaagttttgatcttgccattcccaagtaactctcttaataagaggcatcagcatgcttcagtgacagctgtcaccttccattgctgagagtcatctttgagttctctatttcactccctacactccaatttagctgcagttctcttggccagtcctatgaaatacatccatggcctaacgacttctcaccactactaccactcatsctgacagcattctcacctaagtcactaccttttttcgctggattagagtagcctcccaatttatttgctcacataacctatttattctacacagtgcaccagatacacccctttgaaatgcaaacacaatcatattattctctggtgaaattatctcatatattcctatcgcatttaaaattaattcagaatcatcccatgattatcaaaaccctacatgctcttccacaacatggtttacttccaagatatctcttcaacatttttttcact

SEQ ID NO: 127798 - DNA, 597 bp, Homo sapiens
ttttgcattctgtcccactacccattggttttcatgtcaagataatgtcagaaattctttacaattgcttccagaaggagtagccttttgatctagtgcacaggtgtccagtcttttggcttctcagggccacattggaagaagaatgctcctgggccgcacataaaatacactaatgctaacaacagctgatggggttaaaaaaaaaaaaggtttgtgcataattttcatgctacccaccaccacagataggtggaaaagtccttgtaatcaaagggytggacacggctgatctagtgtcttgtcgtccgttttggctttctccctgaatccagaatgcaggtagagatgtagagacatgctctcaggacagctgttgagataaaaaaaattcgttgtcatttattcccaagcacagctgtttctcattgcattgaaaaagtctccattcaaactgctgtcacatataaaatctatttatgtaagtctgtatttttctgttgtcttggcctttgtaggcagtagtgtgttttaaccgagcaaactgtccttccaaataatgaagccgaagtcagcctacctacttgccatttttct

SEQ ID NO: 127799 - DNA, 597 bp, Homo sapiens
ttttgcattctgtcccactacccattggttttcatgtcaagataatgtcagaaattctttacaattgcttccagaaggagtagccttttgatctagtgcacaggtgtccagtcttttggcttctcagggccacattggaagaagaatgctcctgggccgcacataaaatacactaatgctaacaacagctgatggggttaaaaaaaaaaaaggtttgtgcataattttcatgctacccaccaccacagataggtggaaaagtccttgtaatcaaagggctggacacggctgatctagtgtcttgtcgtccgttttggctttctccctgawtccagaatgcaggtagagatgtagagacatgctctcaggacagctgttgagataaaaaaaattcgttgtcatttattcccaagcacagctgtttctcattgcattgaaaaagtctccattcaaactgctgtcacatataaaatctatttatgtaagtctgtatttttctgttgtcttggcctttgtaggcagtagtgtgttttaaccgagcaaactgtccttccaaataatgaagccgaagtcagcctacctacttgccatttttct

SEQ ID NO: 127800 - DNA, 600 bp, Homo sapiens
ttattgggtaataactttgttgccaaacaatgactttctgcaagtgtacttcagcgacgcattcattgtgttgtgatcacaggcacacctgctcagtgcttcccatatacagcgaccaagccattaatcctccctaaattcaacacctgcgctgaccttccccttcaaggtcccatccttaaaggaaccttcaagtctccactaggtcattctaataagcggaaggtgacactaaactgaataggtaatgatcccagggcactgggtgaaaatatttatcctaggtcattctccttgtctgatgtgtcacttgggaattaacctttctctgatgcctcactggcttgttgagggcaagggtaatgaaaatacgctgggagctatttctaagtgttggtgtagctatgtctttagtctaaatgatcaaccacattctgttaaaayatttaataccacataagctgctctcctaatttcttataaatgtgcttttaacttccagccagtgaaaggcacatggtggtgatatttttgagaaagtagagaagaaaagaatgaatccggatggttgttgagacagaaactgagcgtcgaacctca

SEQ ID NO: 127801 - DNA, 581 bp, Homo sapiens
gtgaggctgcaggaggtgaggttgcggagaggaggcagaggttgtggtgagccgaratcatgccattgcactccagcctgggcaacaagagtgagactctatctcaaaaaaaaaaaaagaaaaatggagagtgtgttttagttttagagtttggcatacacagtccatttcctagtactgctacttaactagtcaaatgttcctcaagcaagtttcctcttaatccctctgagcatcagtgtcctcatacatacaatattgagaataatgtctgaattactgaattattataaggatttaatctaatgaatatatatgccatatattgagggacccacagtaagtgctcaaaatatggtgggcagtaccaattattatagggtcacttacactttgggtcatattgtgcatcctgaaatatcacaattcagcaacattcatagcatgttgtatatgctatgtacaacatggtgcagtgcaacttcaaatattaacacaataagacatgttgaatcttccactagcatcataaagatttttaaatcatttgaatctgggagttggcaattgcaaaaaagaat

SEQ ID NO: 127802 - DNA, 590 bp, Homo sapiens
gcttttatttgcaattctagaattaggcaacacctcatgctatgaaatagaatggatgttctgctgagctgagcagacggagttggctttatgggcaggaaagggctgaagaaggcagaaacagagaacacaaagcagattggacatttcagagttaccctcctaacagggttaaagctaagtggacttccttatgatgcatgctcaggtaaactgggccccttccgattggttgctgtgaagctcctgttgtttggaagagtgacccatttccaagttcagtttgattatgtgatactgaacacaagtggctccactctgctttggcctggtctgctggggcctagtgcaggagctcagtctaaaacaatggcttcccataaactttgtttaacatgagccagttatcytctcaactttctgccactcagccaggcgactacctgactggagtccctggccaagcagatagatttgcgctccttaaaagctctaccttgttgcacccctaacctgctctccttccagtcgatgtcaccccaaataaacgaggctagtaggcacagaccccacagtcacagataggtctc

SEQ ID NO: 127803 - DNA, 588 bp, Homo sapiens
cctgctattgggcaccttctttgcagtggtatttctctgatgtttatttatatgatacacaaatatcccatatattttatgcccatttgtgtaaattcatgcatagacatctacccaaagctccttagatatgatgttcccgtatttttttttcagtccactgaccacagcgaagctatttgcaatttttcaggagtccgtatgcatcccaacctcatatcaattctcttaccaaaaacactggcaaaaaaagatgtacgtttaaagttgtccactaaaaacagttagtgttatttagggccacttctggaacaagctttagaggggcagaataacattgtcagcttgcactgatatagttagacaaagcatcacccagcaagcctgaatgctttcttctcattcacctggttataaggaatgctgcacaaggccatagccatgaccactggtgcaacctactgaagcagtatgggtgtctgatcyatgtgttcatgaaactgactttcagtctctagacctgcttgtgtgtgtttctaaatgaaatgtattattttcatcacatgatagattgctcattattagcat

SEQ ID NO: 127804 - DNA, 596 bp, Homo sapiens
agggccccaagtatactccatttaccaatgtaataaggaatgtgctggagagaggaacaccagtaccattgaaaagctcagtgatagctgtcctttgtaggcagggatgatggtggaagatgttacacagctggtttcagtgatggcaacgttcataacagaatctggaaaaaaatagaggccagttggtagaactttcataaaaagcaaggtgtacacaattaaaatgagtgtattagtctgcttgagctgctaaaatagaataccatataggctgagttttctgcttaaataacataaatktattttttcacagctctggatattgtgatatcttggaagatccaagactaagatgccagcagtgttggtttctagtgaggcctctcttcctagcttgcaggcagccaccttcttgctgtgtcctcacgtggtttttcctttgtgtgcatgcagggggagggagggagatgagagagagagagggagagctctcttgtctcttcttataaaacaccagtcgcatcagattaaggcctcatccttattacctcatttaacctgaattaccatttccctatctccaagtacagtca

SEQ ID NO: 127805 - DNA, 599 bp, Homo sapiens
ttttctaccgcgtcaccaggctgcaaattttccaaacttgtatgcttggctccccctttaaatataagtgcctacattagatcatttctctgctcaggcatatgagcacatgttgttagaagcagccagtccacctcttgaatgcattgctgcttagaaatttcttccaccagaaaccctaaatcatcactaccaagtccaaatttccacagatcactagagcagggcacaatgcagccaggttatttgttaaggcataataaaagtgacctttactccagttcacaataagttcctcatttccatctgagacctctgcagcctggccttcactgtccatatcactatgagcattttggtcataatcattcaaccagtmtctagaaagttccaaactttccctcatctttatgtcttcctctgaaaccctccacactctgcctattacccagttccaaagttgcttctacgtgttcagttatcttcatagcagtgcccactcctaggtaccaattttctgtattagtccattattgcattgctataaagaaacacctgagactggataatttatagaaaaggtttaattggctcatgat

SEQ ID NO: 127806 - DNA, 535 bp, Homo sapiens
atacggactgcattttttcttgctaatctactcacccataacatcctacctttcatcttaccygcacatggctaccaggaccatgatgttagagcaccagggtaaccaataaccttttattcactactaaatgaaatgtacacctacggtaaaattcagtactttttggtatatgccaatttgatgttccatcccttccccttacaaaaactttctatttctagtcaaactagattctatccctacatttaataacatgatattttttctgccccagtcttcctgtttatcttgaactactgaaatctttactgtcttttaaaccatagttcaaattctagacccttttgggagtctttcttcccctcatttttatcaatatgccaataacttagtcctcacttttctgggctatcatagcaaactgtttaaggctacatcatcttagtacactacaagaaacataaaatttaggaggaaggataagtatatcacacataactataatatgaaactcagaatgtgatacatgttt

SEQ ID NO: 127807 - DNA, 571 bp, Homo sapiens
acttaacctttgaagtgactctctctaccttccttcaactcttggtactgacggyatcacacaacattggttttatctgtccacttcccaacttccctggcatccttctctgtatagtcttttaaataggtagctcctcagaaattaaacatatcccctccctttattttcactctatactcttggtttaggcaagctcctggcttcaaacaccagccagctgtcaataagttccaatataaatatgtagcccagaccttttaagttcctgtaccaatacatccaattgcctatacaacatgaagctctgaggggacattaaattcaggatgtccccaaacttaggatctgactctccaaacctggccttcctccagtcatccatagctcagtaattggcataacaccagtaggttgtacataccagaaaactacaagccagtcctgataccacctcatcttcaccagcccatttaacccatcatcaagtcctgccatttacttcttacctaactcccacatcattctttctctgtctctaccaccaacatcctggaacaaattaccttca

SEQ ID NO: 127808 - DNA, 437 bp, Homo sapiens
aacttgcccagggtcacttgagcaacaaaagatagattccagttcaagttttaacactaacttgcacccttaactccccatggtactgaaactcagttcctcagaaagactagttgccagcggtaggcacaggtgcagcttgacaaagggttgtctcaggcttatgaaaagataatggcttggggagataatggctatgctacatgcaaaggtctgtctgttgacctgtaatgaagtcagacatttagagaagaatagtctctgactgcagtggggtagtgttttggtgtctaggttaarcaactcaagtatacatgtaacttacttggcaatcagatgaaacttaacctactactgaatatcatattcaaggttttgctttcctattcaatctcttgaatatacttataacaaattttgaatgttaaacattaatt

SEQ ID NO: 127809 - DNA, 591 bp, Homo sapiens
aggacagtggatggactagtgcaagatggaaagattgctgagtcagttaaggttcagagacatgagagtaaagtctgttagtgtggctatgagctttgctacagccaagttcaactgcatgggtgtcgcacggactgggcagggaattgacagaatgtgcaccagtagtgattatagcaattgcccatgaaacttaacccaagtaagatgaagagagatggcatcagaaagacaagagagaatgggagatgataggatcaacrgaaagctcttaggggtcacaggactggatgaactgaggcaccaggaggggtgagctgagaaggtagcaagttttggtcagagtagagtaagtgaaatcgagattagagatgggtggagactactgaataaattctagaatatgaccatgagaacgaggagtggagggaatgtggaggacagatcactggcagagaagagctcaaggaacagagagaagcctggatgttaggaggatcatctatgagaacattggaatttccaagaatgaagctattcttgcgatattatagagagtgacaatgagccagatgctaaaattgtcaagaa

SEQ ID NO: 127810 - DNA, 561 bp, Homo sapiens
aaggcatgttaggcggtaatgaattcccttagcatttgcttgccccaaaagaatttgtttctctttttcttatgaagctcagtttggctgaatttgaaattctttattggaatttattttctttaaggatgctccaatctcttcttgcttgtaggacttctgctgaaagttctgctgtaagcctaatacagttccttttgtaagtgacctaccccttctctctcggtgctaatattttttctttcatgttgactttggagaatccgatgactgtgtgtcttgggcatggtcatcttgtatagtactttgcaagtgttctctgaatttcctgaatttgaatattgacctctctaacaaggttggagaagttttcatgtacagtatcctcaaatatgttttccaagttgcctgctctctctccctctctttgaggaatgccattgacttgtaggtttattctctttacataatcccatattyctccaaggttttttttccctttttttctttatttttgtctaagttgattgaaagaactggtctttgatctctgatattatt

SEQ ID NO: 127811 - DNA, 531 bp, Homo sapiens
ttcttagaaatgaattttaaaaagcagttctctttgaaaatattttaaattatttgtccaaaatttaagccactctgtctctggtctgcaaaactctctaagtgaacaraactactctttttaacttgaaatttaattctcacaaagagaaatggccattattatggaaataaaatgctgtacatttttctaaaagtgagtatatatatatatatcatattcacttccctttgatgatgtcgcattttttttgacgtgaaattttaagcatttaaatgtactaatttgaatgcaactggaagtttcattatgcagctgataaatgctaggtgtttatgccaagaatgaggaagggagtagtgtaatcattttatgaagctctgtcaattatttgttcgtataaacaactgatcagaaggcatagacatgtatgtgaaacagctacacaagaaagttcctcaggaatcaacctgttttacagtttacatcaactgatattaattgtttaagctacttcatattgataccctc

SEQ ID NO: 127812 - DNA, 631 bp, Homo sapiens
accatctcatgctacagagaaattattgaagaagaaaagccagttaatgcagcaaaattcattgctgtcttattttaagaaattgacacagccacctcaatcttcagtaatcaccaccttgaccagtcacgactccagcagcaaaaaggttacgactcactgaaggctcagatgacttttagcatttttcagccataacgcatttttaaattcagttatgtattttgttttttggacataatgctattgcacatttcatggactagaatatagtgtaaacatarctttgatatgcagtaggaaatgaaaaaacattgtatattttctttattgaggtagtcagaaactgaacccacatctctgatgtgtgcctgtgttcttctcaagcacagatggatattttttcaaatgaccgtttacatagaacaagtcaataaattattaaaaatgggtatgcaatgaccatattgcaattaagtaaaaattagtaccaaatgtaacatttaaaaaaatcataagttgagaatttggaatacacaaataaacaacttgtggtaggagacattatcatatgaattttaaaatactttcatctttattaataataaaaatagtttagattaaatttgtg

SEQ ID NO: 127813 - DNA, 631 bp, Homo sapiens
accatctcatgctacagagaaattattgaagaagaaaagccagttaatgcagcaaaattcattgctgtcttattttaagaaattgacacagccacctcaatcttcagtaatcaccaccttgaccagtcacgactccagcagcaaaaaggttacgactcactgaaggctcagatgacttttagcatttttcagccataacgcatttttaaattcagttatgtattttgttttttggacataatgctattgcacatttcatggactagaatatagtgtaaacataactttgatatgcagtaggaaatgaaaaaacattgtatattttctttattgaggtagtcagaaactgaacccacatctctgatgtgtgcctgtgttcttctcaagcacagatggatattttttcaaatgaccgtttacatagaacaagtcaataaattattaaaaatgggtatgcaatgaccatattgcaattaagtaaaaattagtaycaaatgtaacatttaaaaaaatcataagttgagaatttggaatacacaaataaacaacttgtggtaggagacattatcatatgaattttaaaatactttcatctttattaataataaaaatagtttagattaaatttgtg

SEQ ID NO: 127814 - DNA, 556 bp, Homo sapiens
ttaaaacagctgtattgaaatatgattcacaacacatttgacctttacaattttcttaaggcctcctcttaaccaccatgtgatcttatttgattttgattattggaaagcatctgtatgggttttcttctgtccagtaggtaacctctctaactgtcagcagctttacttgtgatacagttttccaacatcactttcatcaacttcaaaaaatttctcttttgcaaaatctagaattaccctgtaaaaccaaatcacattgcaytcatagtttattgtggagaaatcttaaatctgggagagactaagcaacaaaaatatgacctgatggatgaaaacatgcaccaagattaagcaagcagagatgtttaagtagggactgatttcataaatgagcatttttttgttagtaaataattttatgttataaaacatttaccttcccaatgttaccataactatgggaacttgaaataggaatactcagaaaatgataagagttaggagccactaacatgggttaagtgtcccaagcttcacttcaccaagcaaagaa

SEQ ID NO: 127815 - DNA, 594 bp, Homo sapiens
tgtcttctagaatttttatggtttcaggtcttatatttaagtatttgattcatcttgagttgatatttgtataagatgagatagggatccaatttcattcttctacatgtggcttgccagtttccccagcatcgtttattaaataggatgtccatttcccgattgatgtttttgtatgctttgtcaaagatcagttggctgcatgtatttgggtttatttctgggttctctgttctgttttattggtctgtgtgcctacttttataccagtaccatgctgttttggtaactgcagttttatagcataatttgaagctcgataatgtgatgcctccagatttgttytttttgattaggattgctttggctattggggctctttttttcgttccatatgaattttagaattgttttttctaattctgtgaaaaatgatgttaatgtttggcaactttttttacattagcaccaaaatactgattgatccattaaaaatacattaattcctgatatgattcagacacagtgctaactcctaagaatactacaatgaacaaaattttctttccctcactctactccagccacatgaac

SEQ ID NO: 127816 - DNA, 572 bp, Homo sapiens
tttaaacttcttagaatggtattacacacccttcagtctttcatccctcccagctcaccttcccaacttcactttaccagctcttcaacatatctaactaaaccagattgcattaactatgtttggatacttccactcatctttgtctctgttctctattactctaactcctagatttccccaggtgccctttcccctcttcactatgtgttaacatcatactcaatctctagtacccatttcaaacaccacctctgcagatccttccaagataaacgtctttacactctagagcaaaatcaattggtcattcctctataacataatcacagtacatactgtgatyaggagaccacccaaattaagaactcctctaaggcaggaactaagtcttacttattatattacctgacagcataataccaagttaagaattcagtgtctgaaatatctgtgtcatacctgtgtctgaattctggttctaacactccctagctacatgaccttgggcaatctatttcatctcagactcagtatcttcttataatggggataacaaaacctaccttaga

SEQ ID NO: 127817 - DNA, 627 bp, Homo sapiens
gattttatagtagaggaattcttgcaagaaagggtgctggccagaccaaacataggttctctatctggatactattagagtctatagaaaggacatctaatccaaacttgagctagggcgtgcttcctgaaagaagtcacattcaatgtgaagccttagattaatagggattagtggaggacaggtggtggatacaagtatagcagggaggataatattctaagttaaaaaaacataaacattatatgggtaagcctgaaagtatcagagcatggcatatttaagtaactacaaaaaattcattgtaactaaaagatggagtttaaggtagtggtggtagagggcagagtgaggaaagatgagggtagggagaggtaagcatggagagatgaaggtggggaaaaatgagggtggatcatttaaggccacctaagctacatttaagagtttgaggtcattgaagaattttgacatgargattgttaaaattatatttacacttttgagagctgtaaaactattggaatagttcaaggatgaaataaggtaccattttaaagggcttacaatagaccaggtgcattctaggttctttctatgtattatcttacttaactagaagtcatt

SEQ ID NO: 127818 - DNA, 627 bp, Homo sapiens
gattttatagtagaggaattcttgcaagaaagggtgctggccagaccaaacataggttctctatctggatactattagagtctatagaaaggacatctaatccaaacttgagctagggcgtgcttcctgaaagaagtcacattcaatgtgaagccttagattaatagggattagtggaggacaggtggtggatacaagtatagcagggaggataatattctaagttaaaaaaacataaacattatatgggtaagcctgaaagtatcagagcatggcatatttaagtaactacaaaaaattcattgtaactaaaagatggagtttaaggtagtggtggtagagggcagagtgaggaaagatgagggtagggagaggtaagcatggagagatgaaggtggggaaaaatgagggtggatcatttaaggccacctaagctacatttaagagtttgaggtcattgaagaattttgacatgaagattgttaaaattatatttacacttttgagagctgtaaaactattggaatagttcaaggatgarataaggtaccattttaaagggcttacaatagaccaggtgcattctaggttctttctatgtattatcttacttaactagaagtcatt

SEQ ID NO: 127819 - DNA, 601 bp, Homo sapiens
gcggccgggccacccgccggctggggagagccgcccccgcccgccgctcgtgcctcttggccggagaccgagccgcagccggagcgctcctccgtctcagacgcgccgcgggtaggggacgaggtgccggtggccacggtgactggagtcggggacgtttttcagggcggagaggcggacgcgacggaagctgcctggagccgcgtggaggggccgcgccaggcggcggccagagaagccgagggtaccgccggaggctggggcgtcttccccgaggtatctcgtgccgcgcgccgcccctgcggctgccccctaggcggggaggacccgccgggtacaccggccgcgaccccccgcgctgcctgctgctgcgcgccgcraccagcggaggacgagccccccgcgccgcccgcggtgtgccccaggaagcgctgcgcggcgggggtgggcggcggcccagcgggctgcccggcgcccggctcgaccccgctcaagaagccccgccggaacttagagcagccgccgagtggaggagaggacgacgacgcggaggagatggagaccgggaacgtggctaacctcatcagcatcttcggttcca

SEQ ID NO: 127820 - DNA, 607 bp, Homo sapiens
attaaatgaagggtatatgagattactctgtattatttcttacaattgcatatgaatctacaaatataaattttacctcaaaatacaattttaattttaaaaattgtagtgataactaaatatccgtaacatatttcactgcatattcctccttccttttcttttatcctgaaataaaagtaaattcattcctcatagtccacatttttaaagtctagaaatcmtcctcccataatgtatcagttagcttctttggcctctgacaaaccaacacaaactataatgacataaaacaaaaaacaatgttatattacttttgtgaaaggaaaataaatcttggggccccaaaatcactaagctaaagggaaaattcaaactggaaactgcttagagccaactgcctcccactcgattcaaagtcactcctctgctcactgagataaatatctcattgcctcctttggaaaggctaatcagaaactcaaaagaatgcaaccatttttgtttcacctatctgtgacctggaagctccctccctgcttgaagtcttcctgcctttgcttcaatttatcctacctttccagactgaacaaatgtacttcttaca

SEQ ID NO: 127821 - DNA, 470 bp, Homo sapiens
tccttagagatcatccccaccaacttcctaccctgaaagtctaccctcttcaacatcctggagagaccagctggatgctgctgcttggactcattgggggacgagatcctgctatcttttggggctgccaattctgtttgtgaacagttctagttaggaacatcgcccttactttgacctacctccttgtaatttaccctagtcatctaattcttccttttggggcctcacagaagaaaacaaagcccttctccccatgccagyctttacagatgttaagtctcaagatccttcttgtagatggtgcacagatgacagccagtttcctggtgtaagagcaccagcctgggaaccaggagacctcagttccagccctcacgccggctttaatgcagcgaagtggccttgcttggagggaggtatacacagttcccatttcacagataaggatactaaagtaaagggaggtt

SEQ ID NO: 127822 - DNA, 487 bp, Homo sapiens
gaccttctcagtgaatcctaggcggcagggacgggcccgcggctctgcgggccattggctgccgactgcgtcacctgcccgcggtgggctaggagacgggaggcgggaggcgggaggcggggacctgggyccgggcggggacgccgcggcaggaaggccatggcggggcccgagcgctggggccccctgctcctgtgcctgctgcaggccgctccaggtaagggcgcggggccgcgggagggagggggaagagggctccccgggccgggccgcgcctaccctcggacccggagctcctgggacaggcacggggtccgcagccacccgagccgggtgcgaatcggccctgcctacgcgcccccagtttgcttcttcccaggactgaacagaaccgggtctttgatattcctctcccgcaggaaacgaatccagtttcctaatgcttccagcttcaggagaactggagaaaaagacagcggcagtttga

SEQ ID NO: 127823 - DNA, 371 bp, Homo sapiens
ttgaaagaaaggcagcacccccagtcaggcgcttatagataaaactccctgggacagagcatctgggggaaggggtggctctgggcgcagtttcagcagacctaaacgttcctgcctgctggctctgaagagagcagtggatctcccagcacagtgctcgagctctgctaagaaacagactacctcctcaagtgggtcccggacccccatgcctcctgactgggagacacctcccagcagggatcaacagacrcttcatacgggagagctctggctggcatctggcaggtgcccctctgagacaaagcttccagaggaaggaacaggcagcattctttgctgttctgcagcctctgctggtgatacccagg

SEQ ID NO: 127824 - DNA, 605 bp, Homo sapiens
ccaacctccagcactggggattacaattcagcatgagatttgggtggggcacagatcaaaaccacaccagaaggaatctgtcctgattagagaaagcagctaaatcaatcagagcgcacaatccaatctccatttttactggaaaacaaagtgtgtcccaagtttctcgttggaaaatactaagaatggacataaaattgggttattctagggagtcagcaactcctagagaaagaaccaggcaaacctaagtttcaggccagactctaccacctagaagaaatgcaacctcctgtatgtccttcaacctctgagctcatttactcctttacaaaatggagctactactctgctgaggtagtgaaaaaatcaaataaaataatctttctgactcctagaatcatacccyctttctgtcaaatccatcctggaagaatgtaacccatcatcagcctggatttttataacatgtaagaattggaaaggaccggcatgatgccttggcagagttgccaggcaataaatatgtattaaactaatgaattaatcatcaaaaaatgtaatttaataattgtacaaccccctgtgaaactcaaagtcttggg

SEQ ID NO: 127825 - DNA, 457 bp, Homo sapiens
agattctccctgtggatgaattaggctgagtgaggagaacaggattcttgcccataattttttcaacatatctagttaatttatctgttgataccactgtattatggcagttaaaacactgcaacactagaacaagctggaacagacttcatgcattcataaaagccatgtgaagaccacatgcaggaggcggtgggagaaccggtccagataagaaaatggatgtgaatatttgcaattctttgcttaaagctgaacactgagtgctttggctgcagaatcataaacattgcaatggaatttgggaattatcaccttgtagaagccttgagatggagatggctcagacaggtgaakggccaaagcaaatgggataaacatcattttgtgttcctgctaggaggacccccattgacggagaggacatttgtcacattcctcagctctgattctaccc

SEQ ID NO: 127826 - DNA, 572 bp, Homo sapiens
ctgatcctcagaatgaagattgtgactgtgattccaagtttcacaagttgctcttagtactctgaatttggttcactcacatgtttgaacacaaacttagggggtaaaaataaacatgccagaggatctcaggagattaataacatactgtagaagagataaaaataaataaataaataaccacagcaagagataaagaggaggtggcatttgagatgaagcattgaaaagtgggtaaaatttggaaatatagaaatagaagggaagtatactctaggacaatgaaacaacattaacaaaaacatgraggcagaacactcaaaagattttaaagagtaaggagtcttgatgtatatggactgtgaagcatgtcctatgtatagacaaccttgctgtacccttgtccatgtaagacagcccatttatggcagaggatcagtgagaaccagagtctggcagacacttccagtgctcacccatatttagcttgctttttcttctgggcacaagaaaggactctatttccccaccactcctgtagctaggcagcatcgtctaattctaaccaatgc

SEQ ID NO: 127827 - DNA, 571 bp, Homo sapiens
cagctgctccagatgtcttgggaagtgaagaggggaagggtgtttgctgcagagtcagacagaactcagcccagcctgcaatggggctgctgctgggtgcatggggagtgagggcaactccttggatttagtgtctgcagccaatggggccactttcactggcatctctaccccaacttgcccctaccagccagccatgatagatgttcacagcctcctgggcaccaggctggcagctctgtagcttcaaagttggcacaggatagctgctctcataaatagagctgttaaattagctactttctatccattatctcatttaatttccacaaatgacctaagagttcaggtttacaaggcccatttcacagataagaaagtgaagcccagaaagctaaaggatgtgtccacagtcacaagcaaacaagttaaagaacctgacttaatgcaaggtcatctgcccctacttctgagcttgtcagtctacccctactgagatgtgacagccccagagccgagarccagcttctcagtcctccatcctctctgctgggggcattttgaagggtgg

SEQ ID NO: 127828 - DNA, 564 bp, Homo sapiens
agctggcagcttggcatactgatgttagactctgaaggcttaaatactggacgggccacttctgggtttttgggaaattacacaacctttctgtgcatcagttttccctttggtaacctgggggtaataatagtaataataatagataactcggtgggttactgtgacaactaaatcagacartgtataaaaagtaaagccggctgggtacagtggctcacgccagtaatcccagcactttgggaggctgaggcgggaggatcatgaggtcaggagttcaagaccagcctggccaacatggtgaaaccctgtctctactaaaaatacaaaaaattagctgggtgtggtggcatgtgcctgtaatctggctactcgggaggctgaggcaggagaatcgcttgaacccaggaggtggaggttgcattgagctgagaccttgtcactgtattccagcctgggcaacagagcaagactctatctggaaaaaaaaaaaaaaaagcaaaggctgacacatagactatgtgctcaataaatggtagccaatactcttattattacaagtct

SEQ ID NO: 127829 - DNA, 564 bp, Homo sapiens
agctggcagcttggcatactgatgttagactctgaaggcttaaatactggacgggccacttctgggtttttgggaaattacacaacctttctgtgcatcagttttccctttggtaacctgggggtaataatagtaataataatagataactcggtgggttactgtgacaactaaatcagacagtgtataaaaagtaaagccggctgggtrcagtggctcacgccagtaatcccagcactttgggaggctgaggcgggaggatcatgaggtcaggagttcaagaccagcctggccaacatggtgaaaccctgtctctactaaaaatacaaaaaattagctgggtgtggtggcatgtgcctgtaatctggctactcgggaggctgaggcaggagaatcgcttgaacccaggaggtggaggttgcattgagctgagaccttgtcactgtattccagcctgggcaacagagcaagactctatctggaaaaaaaaaaaaaaaagcaaaggctgacacatagactatgtgctcaataaatggtagccaatactcttattattacaagtct

SEQ ID NO: 127830 - DNA, 595 bp, Homo sapiens
atagccacactatgttcagctggtctgaacaaaatggtcagatggtagaaatgataagaggtatggcaagagttcctactatctggaaacatggcagtgtagtggcacttcaacctcaaatgatatggcccgctctaggggctaaacataaggatttgtggaaactattaatggctcttaataagatccaaatttgggaaagaataaaaaagcatctagaaggacactctgcaaacttgtctttggatattgcaaaattaaaagaacaaatatttaaagcatcccagacacacctgaccttaatgtcaggaactggagtgcttgaaggagctgcagacagattagcagctagtaacctgttaacatggataaaaacacttggaggctctgtgatttcgatgatgattgtgcttttaatctgtgttgtttgcctttatatagtctgcagatgcagatcctgacttctgagagaagtagctcaccatgataaagccgcctttgcttttattgtcttgcaaaaataaaaagggrgaacatgttgggaacaggcccccaaatctggccataaactggccccaaaaatggccataaacaa

SEQ ID NO: 127831 - DNA, 538 bp, Homo sapiens
cgaattcctggactcaaaggatccgtccacctcaggctcccagagtgctggaattacaggtatgagccaccatgcctgggccagacaaagacttcttttttttttttttttttttgaaacagagtctcactctgttgccaggctggagtgcagtggcatgatctcagctcactgcaacctccacctcccaggttcaagygattctcctgcctcagcctccctagtagctgggactacaggcgtgtgccaccacgcccggctaatttttgtatttttagtagagacagggtttcatcagattggccaggatggtcttgaactcctgacctcatgatccacccacctcagcctcccaaagtgctgggattacaaacatgagccactgtgcccggccagacttctaattaactttaatgtccaaagaactaaaggtattcatgtttgactaactaaaggaaaatacaaaagtgctatcacattacacagagaataccaataaagagatagaagttataacaaaaaagaaccaaaaagaaat

SEQ ID NO: 127832 - DNA, 617 bp, Homo sapiens
tttggattggtttctggacaggaaaaaaaaattgttttcaaagatactattgaggcaacttgtaaaaatggaatatgaactgtagattaagtaaaacaaatgcatatttcctaagaacaaggatattttcttatataataatggtgtaactataaaattcaggaaaatttaacgtaatgcaatactattaatgtggtaaagggacatggtatattcagcatactctcagctggttcatgaaaaactggytcatgataaaacaatgtggcaagatgtgtgcaactgatgcattaggttacaggtacagatacacagagatctttgtattcttgtaacttctctgtaaacttgtcatatatatatataatttttcgttttaatatcattttaaacatatggggacccattaaatcttgccaaccctcaaagaaatacatagtaagacatttttacagttttattttacaccaaatactttcattaaaataatagaatcatttaaaataataatactagcaagtgaggtggaaatgtttggcggattataaattgccacattttggaaaacaatccagcaatatctcaaaagctgtctaaatattcatgcttctttgacc

SEQ ID NO: 127833 - DNA, 617 bp, Homo sapiens
tttggattggtttctggacaggaaaaaaaaattgttttcaaagatactattgaggcaacttgtaaaaatggaatatgaactgtagattaagtaaaacaaatgcatatttcctaagaacaaggatattttcttatataataatggtgtaactataaaattcaggaaaatttaacgtaatgcaatactattaatgtggtaaagggacatggtatattcagcatactctcagctggttcatgaaaaactggttcatgataaaacaatgtggcaagatgtgtgcaactgatgcattaggttacaggtacagatacacagagatctttgtattcttgtaacttctctgtaaacttgtcatatatatatataatttttcgttttaatatcattttaaacatatggggacccattaaatcttgccaaccctcaaagaaatacatagtaagacatttttacagttttattttacaccaaatactttcattaaaataatagaatcatttaaaataataatactagcaagtgaggtggaaatgtttggyggattataaattgccacattttggaaaacaatccagcaatatctcaaaagctgtctaaatattcatgcttctttgacc

SEQ ID NO: 127834 - DNA, 579 bp, Homo sapiens
cagaatattcctatatctactaaaaaatttaacttgtagtttaaaaactttcccacaaaatcaaaacaaaaacaaaaactctaggctcagatagctgctctactaatgatttctaccaaactttttttttttttgagacagggtcttgctctgtcacccaggctggaatgcagtggcatgatgatagctccctgcagccttgaactcctgggctcaaggaatcctcccacctcagcttcctgagtagctggggttacaggcatgcaccactacattcagctaattttaaaaattatttttagagatgagatctccctgtgtttcccaggctggtctcaaactcctgggctcaagcraacctcccaccttggcctcccaaagtgatgggattataggtgtgagctaccatatccagccttcaatcatttaaaggccaaataatactaattctacaaaactcctacagaaaattttaaaaaaaaggaatactttctaactctttcaattagttgagaaatattgtgataccaaaaccaaagacattttataaagataatattacagagcaatatccctcat

SEQ ID NO: 127835 - DNA, 579 bp, Homo sapiens
cagaatattcctatatctactaaaaaatttaacttgtagtttaaaaactttcccacaaaatcaaaacaaaaacaaaaactctaggctcagatagctgctctactaatgatttctaccaaactttttttttttttgagacagggtcttgctctgtcacccaggctggaatgcagtggcatgatgatagctccctgcagccttgaactcctgggctcaaggaatcctcccacctcagcttcctgagtagctggggttacaggcatgcaccactacattcagctaattttaaaaattatttttagagatgagatctccctgtgtttcccaggctggtctcaaactcctgggctcaagcaaacctcccaccttggcctcccaaagtgatgggattataggtgtgagctaccatatccagccttcaatcatttaaaggccaaataatactaattctacaaaactcctacagaaaatttwaaaaaaaaggaatactttctaactctttcaattagttgagaaatattgtgataccaaaaccaaagacattttataaagataatattacagagcaatatccctcat

SEQ ID NO: 127836 - DNA, 609 bp, Homo sapiens
cagtatggaacttagaacctcaaggaagcaacataaagctcaaagtcagtttacgaatattttgagtgggttgtagcattcaagaaactagtgtcactgcaggcaatgttagagaaaggtgggtggttttcagtggcagccttttagctggtgattcttgaggaaggacagttgaagccaccggctttcatgactaaacctggctctctcccatcctctccattctctgagccatccaatgttgtccgctaaactgctttactttttaagtgggcttgtattgttttactcaagaattctgaattagcacatttcagttacaaatgacttttatctattcccattaaatcagatagtcaactgtttaaaaatactggattcataagaaaaattttctttcaaaatattttataactagagtttctcccaatttagtctgccttctaacattgtcaattttaactcgtgtgaaaaatgctttcccgttttttgaggagygtattataacatggtcttaattcttcagaatagttgaataagttagaaaagtgatgtgttttatattcaggtcttgacttaaaatagaaagttctcatatccattccatag

SEQ ID NO: 127837 - DNA, 539 bp, Homo sapiens
ggaccaggtagtgctttagagaaccttggtcttttataatagagatagggaggaccgagaaagagagaggagacacaggaaagaagtagaggctttaatggctaccatgcaagcccacaaaccccagaatccctgagatgtgcctgttaactgctacagatgtggcaagccagggcattttaggaaggattgtccaggcagcattaggagcccaccttgacccrtccaatctgcagtggggactattggaaggtagactgctcctggggacactggtcactgggtccagagccagtctctcaaatggtccagcagtatcaaggggttcagaaactcctctctctggctctggtgatccagaccaccattaccctccaggagccctaggtagttctgtaaattgaagtggggaaagtggatcttcttctggacccctcaggtatttgaggtatatgctagtctctcagttctcctttccaatccaggtcccctttcctctctttgcatgactataaggggcatctcaggaaggcctttaa

SEQ ID NO: 127838 - DNA, 533 bp, Homo sapiens
ttatatgcagatgctatgttggcaatttcctgtatgacaagaaaattaaaatagactccccacttcttctttagagtggggttgaacataggaactgcagtgaggtggcttgaagatctttagaaggagggtagttaaaagctttccatatgatgttcaaatcactgagtctgaaaaagaataatgtgtaattgtatcagtctatgtccaatcaggagacagaaactgcacagtgataagtaatttgaacaaagttaaatatatagaattgttaagtataataatytggagtaatggggtttggagtaataaagggttaattaatataaaggaaacagaagtttaaagaatacagaatagcacatataagaagcagctactacttccagggctgagatagaacatccaaaaaagagcctgccccttgccccaacccctgggggtgagacacaaaccttgttggaggacacagttatgagtaactagatggtggagaactcactggggggtgctgcacaggtggaacttgctgg

SEQ ID NO: 127839 - DNA, 595 bp, Homo sapiens
aaaatattcaggagaagtattatttgaggactaatatgtttactatgctccaagatctatttaacatgccagatttgttaatttaaatgtaggagaaaaatatttttaaaacctctggcactttctcaaagcacttatcaaataattttgaacatccctgttatctttatctaccagtaaactgtaagctctggaaagatagggatggcatctgacttgctaataaccattattatagcagtgactagggacagcaagttttccgttgctatgtgttgaatgaattcactaagtaattaatgaagattctaacatcagggctgttttaaaaataaactttttacttttgaaatatttttaggtttacagaaaagttgtgaagatagtaacagagagttcttatatactcyttacccagttttagtttttcctaatgttaccatcatactttttccatggtacatttgtcaaaagtcaacattagtacattgctacaaggtaaactccagacatttcttggacttgaattaattttcccagtagcattctttttctattccagtacccaatccagggagccacatgtgtttagtta

SEQ ID NO: 127840 - DNA, 564 bp, Homo sapiens
ctgattaaaaataaatattgtctcccagctgctaggaaggttcaaacacttgaaactgattgcagaaagaaaacaggtccaatatgttctgttctacaaaatatcaatagagacgactatgcaggcacatctgatacttttcttttgcacaaattacagagtagaatagatacaagaatgacatgaatagagatacgtatttcaggagaataaaggaaatggtacatctatgagctgaacctccacaggttgctacctgccatggacttctaaagctaaattcatataaagagggagggctcccctcaccccaccccacaattctccaaagatgaagctacctaatcacaggagtactttcataggcatatgtttttaggaattatcttgcgcatagcacttgggatcaagaatgcagggtccataaatacactgtatctgtctttctgggagcaatttgcctattctcagcagctggagcagaaggaaggctatwcacacacattctaagatagcattaaaggcctatgtttaaaatacctttaaatctgttcagtaacacca

SEQ ID NO: 127841 - DNA, 630 bp, Homo sapiens
gtaaattatataaaagagaacttattggtgaataaaaataaatctgattctaagagataagaataactggcatgcaggagatactgactcacaaagcttcctgtaccaaccagagtatcattttttcaaataggagaggagtgaatgttatgcactgtggcttaatagtgtgyatgaaattactctgatgctcatttttctgattccaagactcttgactaagaatgttcaagctcttatttgagaccataaaatagaatatgaaaataaataacttgaaatagagaggcaggcatctcagcgagtagcccatatgcactcacccctaaaccagtcccgagtacctcctcagtaacacaccctcttcagcgtgctagaaatatgaagccagtacatgacacaggaagactggaatatgatatttatcttactcttgtctactgtttaatgtgtaagagtgtaaagggtattcttcccttatttatgagtttgtttccctttgtgtagaatgtagtataagtccatcatatataatatataagtgtgatgtatacatatatgcattttcatgctgttaaacattatttctaaacatgattaatgatggctgccttgtctactgttttagtg

SEQ ID NO: 127842 - DNA, 595 bp, Homo sapiens
ctttgcttggtgatgttgaaatagactctagaagtgagcaaatcaccccagagtttcctcaggtgctattatttttggggtgctatgtgaagaaataaaaacaaactctaaaacacaagccaggtgtgcatacagctctagaatgaaaaggtatttctgttatttcttagggcaaattttactttttgaggatctgtttattagtattttgagtattagtcatgaacttaaaatataagtatagtaggcttataattactacccactagtaatttcttttatattgagacagcttcatttgtactgaatgtataaaattaataatgatatacatggatacttaattaaaaaccaattactgagttatttttatttattttgacaataggaatttattccaaagctttgcatatgtgaaaacacggatctcctcaggtgttgttggtagtctagacataataataatgtawcttgtttgagaaatcttgttcttctatgggcaatcaaatacatgattactgaagaaatcaagtattcagaatcagtttgtattgaaacaaaccctctatagtcccagcttacagatacattaaaa

SEQ ID NO: 127843 - DNA, 445 bp, Homo sapiens
agtaccttacatggtgcctggaaagtagtaggcactaaacacctgttgtcttatttttcatcctcaatattcccataatctcaatatggtattaaggttatactcttaacaagggcaccaaggtgtgggaactgcaaaggcactttaagatcaactgatttaactattcacaaacaggtggaggatggtgaggcacatcagaacacagaactacagtctccctgttttctccttccttccatgttgatgtagtttggatatctgtccccaccaaatttcatgttkaaatgtgatccctaatgtcggatgtagggtctggtgggaggtgtttggatcatggggacagatcccttatgaatggcttggtgccctccccatggtaacaaatgagttcttgctctgttagttcatgtgggagctggttgttggaaggagccagtttctt

SEQ ID NO: 127844 - DNA, 625 bp, Homo sapiens
caaaaagcaaatgcaccaaaaacaaagttaaatagatgggacttaattaaactaaaaagtttccgcacagcaaaagaaacaatcagcaaagtaaacagcccagagtgggagaaaatatttgcaatctatacttctgacaaaggactaatatccacaatctacaaagatctcaaatcagcaaggaaaaaaacaatcccatcaaaaagtggtctaaggacatgaattcacaattcttgaaagaagatatacaaatggccaaraaacagatggaaaaaaacgcttaacatcactaataatcagggaaatgcaaatcaaaaccacaatgtgataccaccttactcctgcaagaatggccataaacaaacttaaaaaaaaaaaatagatgttggcatggatgtggtgaaaagcaaacacttttacaccattggtgggaaagtaaactagtacaaccactatggaaaaagtgtggagattcctttaagaactaaaagtagatctaccatttgatccagcaatttcactcctgggtatctacccagaggaaaagaagtcattatacaaaaaagatacttgcacacacatgtttatagcacacaatttgcaattgcaaaaatatggaaccagc

SEQ ID NO: 127845 - DNA, 481 bp, Homo sapiens
ataagatataaataaaaacaacaaaaagtttaaaagttgggggatgaagttaaatgtaaagtttttattagttttctctttgcttgttggtttatttaatcagtgttaagttgtcatcagcttacaataatgagttataagatattatttgcaagcctcatggtaacctcaaatcaaaaaacatacaacagatacacacaaaacaaaaagcaaaawattaaaacatatcaccagagaaaatcaccttcactaaaaggaagacaggaaggaaagaaagaaggaagagacgaccacaaagcaatcagaaaacaaataacaaaatggcagaataagttcttacatatcaataataacattgaatataaatggactaaactcttcaatcaaaagacagtggctgaatgaataaaaaagcaagacccaataatctgttgcctacaagaaccacacttcacctatatatacacacacacagactgaa

SEQ ID NO: 127846 - DNA, 541 bp, Homo sapiens
agctgggaggtcaaggctgcactgagctgagatcccaccactacactccaggctgggtgacagagcaagrccctgtcagaaagagtgagagagggagagagagaaagagagagagaatgagagaagggatgcagggaaagaagacaagaaagaaagaaggcagagagagggggaaagaaagaaagagggagagagaggaggaaagaaagaaagaagggagggagagagggaaagaaggaaagaagaaagagagagaaagagaaagcaagcttaaataatgaaaagaaaacaaatagaacctgttctagggatgccccatgaatgttcccaacaagcttatttgtaggaactgaaaatgtgggcatgtaggcttgtgacattcccattcccattgttttagaaccttgagtaattagtaatttcccccaatggtaggaggggttcactttcaggttcctccacactcactagtcactggatggagcactggatagaaaggaagggctcgtggtggccctgcttcctcactgcttcggagacg

SEQ ID NO: 127847 - DNA, 541 bp, Homo sapiens
agctgggaggtcaaggctgcactgagctgagatcccaccactacactccaggctgggtgacagagcaagaccctgtcagaaagagtgagagagggagagagagaaagagagagagaatgagagaagggatgcagggaaagaagacaagaaagaaagaaggcagagagagggggaaagaaagaaagagggagagagaggaggaaagaaagaaagargggagggagagagggaaagaaggaaagaagaaagagagagaaagagaaagcaagcttaaataatgaaaagaaaacaaatagaacctgttctagggatgccccatgaatgttcccaacaagcttatttgtaggaactgaaaatgtgggcatgtaggcttgtgacattcccattcccattgttttagaaccttgagtaattagtaatttcccccaatggtaggaggggttcactttcaggttcctccacactcactagtcactggatggagcactggatagaaaggaagggctcgtggtggccctgcttcctcactgcttcggagacg

SEQ ID NO: 127848 - DNA, 541 bp, Homo sapiens
agctgggaggtcaaggctgcactgagctgagatcccaccactacactccaggctgggtgacagagcaagaccctgtcagaaagagtgagagagggagagagagaaagagagagagaatgagagaagggatgcagggaaagaagacaagaaagaaagaaggcagagagagggggaaagaaagaaagagggagagagaggaggaaagaaagaaagaagggagggagagagggaaagaaggaaagaagaaagagagagaaagagaaagcaagcttaaataatgaaaagaaaacaaatagaacctgttctagggatgccccatgaatgttcccaacaagcttatttgtaggaactgaaaatgtgggcatgtaggcttgtgacaytcccattcccattgttttagaaccttgagtaattagtaatttcccccaatggtaggaggggttcactttcaggttcctccacactcactagtcactggatggagcactggatagaaaggaagggctcgtggtggccctgcttcctcactgcttcggagacg

SEQ ID NO: 127849 - DNA, 541 bp, Homo sapiens
agctgggaggtcaaggctgcactgagctgagatcccaccactacactccaggctgggtgacagagcaagaccctgtcagaaagagtgagagagggagagagagaaagagagagagaatgagagaagggatgcagggaaagaagacaagaaagaaagaaggcagagagagggggaaagaaagaaagagggagagagaggaggaaagaaagaaagaagggagggagagagggaaagaaggaaagaagaaagagagagaaagagaaagcaagcttaaataatgaaaagaaaacaaatagaacctgttctagggatgccccatgaatgttcccaacaagcttatttgtaggaactgaaaatgtgggcatgtaggcttgtgacattcccattcccattgttttagaaccttgagtaattagtaatttcccccaatggtaggaggggttcactttcaggttcctccacactcactagtcactggatggagcactggatagaaaggaagggctmgtggtggccctgcttcctcactgcttcggagacg

SEQ ID NO: 127850 - DNA, 649 bp, Homo sapiens
cacaagagcaggaactttactaggaggactcattccacaaacacttgattcttccaacaatttcttttaaatttgctatttcagtctgtggtgtgtccacaaattatttacatctctatatgctctactcatatattttcattgaagtttacttaaaagaatagatgtccatatcaaaacctttattagctttcttgttccaattaagtatacaaaatcacaaattgaacatgtatatcctaaatatacttaatccatcaaatagaacacttgcaacactttaatgaatacaacaggmaaatatgaaatactgatttcaaatagttccaaagatccttgatttcaggattttcacctattcaggcttaataatctgaactaattccaaattagtgagttttcaccacaccatatgctggtgaacaatcttgtcaccaacacgattctggaactccagtagcattgtcgcagccgccacttactcagatgttatagagagacttcaaaatgtcatgcaagtatttatttatttatttacttatttaaactttaacggaaggcaacacaaaggaatttatcttataaacacatgtggtgcttgctgttatgtgcccaatctgtgttctaaacattttaaaaatattaacca

SEQ ID NO: 127851 - DNA, 649 bp, Homo sapiens
cacaagagcaggaactttactaggaggactcattccacaaacacttgattcttccaacaatttcttttaaatttgctatttcagtctgtggtgtgtccacaaattatttacatctctatatgctctactcatatattttcattgaagtttacttaaaagaatagatgtccatatcaaaacctttattagctttcttgttccaattaagtatacaaaatcacaaattgaacatgtatatcctaaatatacttaatccatcaaatagaacacttgcaacactttaatgaatacaacaggcaaatatraaatactgatttcaaatagttccaaagatccttgatttcaggattttcacctattcaggcttaataatctgaactaattccaaattagtgagttttcaccacaccatatgctggtgaacaatcttgtcaccaacacgattctggaactccagtagcattgtcgcagccgccacttactcagatgttatagagagacttcaaaatgtcatgcaagtatttatttatttatttacttatttaaactttaacggaaggcaacacaaaggaatttatcttataaacacatgtggtgcttgctgttatgtgcccaatctgtgttctaaacattttaaaaatattaacca

SEQ ID NO: 127852 - DNA, 478 bp, Homo sapiens
gaccctataaatgtgataagtgtgggaaggcgtttactcaaagatcagtcctcacggaacatcagagaatccacactggagagaggccctacaagtgtgatgagtgtgggaatgccttccgaggaatcaccagcctcattcagcatcagagaatccacactggggagaagccctaccaatgtgatgagtgtggaaaagccttcagacagaggtcagatcttagtaaacaccagagaatccataatagacgtggtacctatgtaygtaaagagtgtgggaaatcattcaggcagaactcagctcttactcaacatcagactatccacaaaggagaaaaatctgtttctgtgtgatgactacagggaagttatctcacagagttcaggccagtgagaaatactatttagctttacaattattggggcaaaacttcagtcaccattgttataaggaaacctcagatatttaataagaattc

SEQ ID NO: 127853 - DNA, 557 bp, Homo sapiens
ttatcttggcagccatgtggggatggactgtaaggaaatgagactacaggcagggagaccagctaggagactactacaagaatccagggtagagagagtgagggcctgaatcaaggcagtagcaatagaaatagagaagacagataatacatgttaagaggttgaattgattttttacaactcattcattaattatatagattcccattgaatgcgatctttgtgccaagggcttgctggatataataataatgaaggacacaaggtcctcatcctcatggggtttataatgtaacaaggaatacagacagaaagagacccagcttatacaattcaagagaccttatttgagaaaaggaatacaaaattacaagtacaaacatagatatgaaaatggagacttaagtcaggtgtaatagctcacgcctgtaatcccaacactttgagaggccragatgggaggatctcttgagtccaggagttcaagacaagcctgggcgacatagtgagactctgtctctgcaaaaaataaaaaatattatccaggcacagttact

SEQ ID NO: 127854 - DNA, 605 bp, Homo sapiens
ttggtgcatttacaaatcttcagctagacacagtgctgattggtgtgtttacaatcctttagctagacagaaaagttctccakgtccccaccctaaccggaagcccagccagcttcacctctcactactaggacatattattgcctctaggctccttcagtgtacaagagctagaatatatgaatatgttatatatataatatattatatataatacgtattatatattatcctatatatcatatattatatattatatataatacatattacatattatcctatatattatatattatatacggaggattttatattatatatatgtgtattatatataacatatataatatattatatactatatattatgtacataatatatattatatacagatataaaatcctccatatacatatataatatatatatggaggattttataagatactttctgttcaaaaacaactccacagaattcttttacatttttcaccgttgcacatttgttttttttcttttcacccacagtgaaaactctggctcccaacagcataaataaattcactcaaacaaaatagtttcttataaacaaaatagtttc

SEQ ID NO: 127855 - DNA, 598 bp, Homo sapiens
gcttagatcttgttttttaatattattgttcaatgaaaaggagcaagggttcttagagaaatgtctgattcaatgactggaataggaaacacacaaaatgagcctggagcatcttatggtgtcagaaaataagaatgctaagaacaaacaaacaaacaggaaaccccacaatgatggtggtgtgttgaacagacacagaagccaactgaaagagttcccaatcgtcagtgctgtatgtaacaatttgagcaagaaaataaagtagtattggattacattccaaagtgtaaactaaacatctatgattccatagatgatagggcagattatttaatatacastcatgtggcacataatgacactttggtcaacaacataccacaaatatgacaagtggtctcataagatcataatactgtatttttactgtgtcttttctatgtttataaatcttgagatacaccaatacttatcactattttgtaatcacctatagtactcagtacagtaacatgctgtccagatttgtagcttacgagcaataggtataccatgtatcctaggtttatagtaggctataccacctatgtttgtgtaa

SEQ ID NO: 127856 - DNA, 632 bp, Homo sapiens
agccctcaacgaaatcttgactgtgcacccacagtgttaggcactttgtgagatcctaaagagaacaagcccggctgggtgtggtgtctcacgcctgtaatcccagcactttgggaggctgaggcagcaggatcacctgaagtcaggagtttgagaccagcctagccaacatggtgaaaccccatctctactaaaaatccaaaaaattagccggccgtggtggtgggcacctgtaataccaactactcgggaagctgaggcaggaaaattgcttgaacctgggaggtggaggttgcagtgagccaagattgtgccactgcactccagcctgggcaaaaaggcaagaagggcaaaactccatctcaaaaaayaacaacaacagcaacaacaaaaaacaaaccctgctttctagccccaagatttatctccgttgattcaagcaactttactattatccttaggcattagtttataagatatttataatttgatagcttcccttgtggatatttctagtttctaaaacataattctgagtgtgcacagagaattctgctagggtctcatcaaaatgaaatatgacttcctgatcttgcagagtcaaaattttccagttgtgttaaactttaaaa

SEQ ID NO: 127857 - DNA, 390 bp, Homo sapiens
tttttataattttcctcgagtgagtaaatgtgagtatgaaaatctatcactctcaagattatgttacttatttcgtgcaaagactttgcaaatgttatgaaggttactagtcagtcagttggccttaaggagatattttctgcttgggtctaacctaatcacaggagacctttaagagtagaacattttttttctggtggtgggagatgaggtagtcagagagatttgatgcttaaaggggcttgtacactagggaggttctcctctcctgagacggaggggccatggggccaggycctgagaggagcctctaggagctggggtggtccttagatatcagccagcaagaaagtgaggacctcagtccaacaaccacaaggacatgaattc

SEQ ID NO: 127858 - DNA, 613 bp, Homo sapiens
gtttggaagttcctagagtctgagatgtggtgatgtggagagttcacrtcctgtttcattactctgaaacagattgaacatgaacgcacacacgtgcacacacaccaaggatggagaggatctatgcaatataattaataagatggaataatggatacatatggacacttgcaaccaataattggggagaacattctattaatatttaatagcacacatacaatctttttatttttaattatgatcttttaggtaatgtgggcagtcaagggttccaaacatctgaaattttatacattatgtccactggccaaaatgcaataaatctagaagtccccagtaaaagagtattttaagaccttcaaaattttgaggtaagatgtcaagtaaacaaggttctcataatctctttgcaaagccaaataatgagaacaataatcaagttaataccagcaaaaagatatatacaaaacaatatagcaaaagaaagaggtggaaatttctaagaatctgcacattcctgggaagcacatcttatcttggtactccactatatccagaggctctttgtagggttggaagtgagggctcttggttgggatagacaggcaca

SEQ ID NO: 127859 - DNA, 613 bp, Homo sapiens
gtttggaagttcctagagtctgagatgtggtgatgtggagagttcacgtcctgtttcattactctgaaacagattgaacatgaacgcacacacgtgcacacacaccaaggatggagaggatctatgcaatataattaataagayggaataatggatacatatggacacttgcaaccaataattggggagaacattctattaatatttaatagcacacatacaatctttttatttttaattatgatcttttaggtaatgtgggcagtcaagggttccaaacatctgaaattttatacattatgtccactggccaaaatgcaataaatctagaagtccccagtaaaagagtattttaagaccttcaaaattttgaggtaagatgtcaagtaaacaaggttctcataatctctttgcaaagccaaataatgagaacaataatcaagttaataccagcaaaaagatatatacaaaacaatatagcaaaagaaagaggtggaaatttctaagaatctgcacattcctgggaagcacatcttatcttggtactccactatatccagaggctctttgtagggttggaagtgagggctcttggttgggatagacaggcaca

SEQ ID NO: 127860 - DNA, 613 bp, Homo sapiens
gtttggaagttcctagagtctgagatgtggtgatgtggagagttcacgtcctgtttcattactctgaaacagattgaacatgaacgcacacacgtgcacacacaccaaggatggagaggatctatgcaatataattaataagatggaataatggatacrtatggacacttgcaaccaataattggggagaacattctattaatatttaatagcacacatacaatctttttatttttaattatgatcttttaggtaatgtgggcagtcaagggttccaaacatctgaaattttatacattatgtccactggccaaaatgcaataaatctagaagtccccagtaaaagagtattttaagaccttcaaaattttgaggtaagatgtcaagtaaacaaggttctcataatctctttgcaaagccaaataatgagaacaataatcaagttaataccagcaaaaagatatatacaaaacaatatagcaaaagaaagaggtggaaatttctaagaatctgcacattcctgggaagcacatcttatcttggtactccactatatccagaggctctttgtagggttggaagtgagggctcttggttgggatagacaggcaca

SEQ ID NO: 127861 - DNA, 581 bp, Homo sapiens
aaggtaattcccttctattccaagtttactaaaattttttatttttaaaatatagaatggatatcaaatttgattcgaattttttttctgcatctattgaggaatggctcttgggaacaatattttctgagctcttgcatgttgatttcaattttcaccctgtgcatgaaggtcagtttttctagacataacatatcggctcataaaaatctttccttggacatcttattattccatcttcttttgtattaaagcattactcttaaaaatctgataatcatctaattttcttttcctcatattcttttgcgtaaatcctccccccyccccattttctttcttcaaactgcagcaattttacttaaaatttattaaaccttggtattggtcatactcatttgatggtttcaggtatgtactatgatacttcaacatataattttaaaaacaattatttcaggaaaattttctttaattattactctaaatatttcttgaattagtgaatttgttctgaacccttgctttggtttttcttctttaaactttctgttatctatctactagtcttctttacctat

SEQ ID NO: 127862 - DNA, 614 bp, Homo sapiens
acatggtggggaggaggcttgggagacagagggacttggtggggaggaggcaggataggagaacagggctgtccacatgtggactctggccagggggagggattttctccatcccacaagcaagaataaacccagacgtagttgagcaatggacagccccctcagatgcaagcatggctgccgaatgggaaggggatgtgggcccaagacgggatggatttgggcaagatggaggtggtgaacacaaagtgaggtgagtgggtttggaggacgtagcaggtggtgaaattgtgagtctggaatgggttgggcacaagatgcggtacagcaagatgccagggaagcccctggtcccygacctctgcacctgctcatggatgttggtgcctctgtggacctcagatgagctgcttttcagcctgggcccatcccccatcagcagtaaagactcctaaaccctgatgacagagaatctctgccatctctccgttccctccttgtctacttcttccatctccagggcaccaaccacctggcctcccacctcctgccagtccattctcccagagcagccctttggggagtcatcactgtctcacttggcaaatgaggaa

SEQ ID NO: 127863 - DNA, 654 bp, Homo sapiens
  misc_feature (1)...(654): n = A,T,C or G
nnnnnnnnnnnnnnnnnnngcaaaacctagcaccgctgctacatactggaggcactcactgtgtgtttattgaataaatacacagataaagatttccaaaaccgatgactttcaggagtcaagccagtcagctcagtagatgtcccaattaatacactcaatgatcatgctgacaatggcaatgacaagctgacaatgttaatgataaatattaataatttaataagtaatattaaactatatagggcactttccaatgtacagatcccttttacctctattctctyctttgatgctctcatcaaccctgtgtgggaagcagagcagaaattggcatccctgttttatacagaagggaagtgaggtcccaaaaggttaatgggactttctccaagattacccagctcatcaatgtagatctgggacaaaaatttaaatcttttcattccctgaccatgatcttttcataagaaatcccccctctctctaactcctctgagaacacaggaatgagcccttattgtactatgagtacccaatttttcctgcatcttcctgattagactcctgagccatctcatgacctcagtattggtgtctgagctcctgcaccctccaaggctgcccactgtgccgccctgctccagcaactgt

SEQ ID NO: 127864 - DNA, 628 bp, Homo sapiens
aaagaataaatgaacacatgagtaagtgagtgaagtcttataggttcttctactgaggcaggaagatcatttggtacttttcctgttaataaactgggatgcagaggctttaacaagagaattgatttccctaagggcacacactgttaagcattagaggaggaaccccatccacacccttctaacttctggtcttttggggattccacaggcccaggttgcctctttattacattaaaaaaaaattcatatttgtcatggcacgctagttaacaagcgatgagcgggaagctacaggttggccctaagtccaggtatattacccacctccctccacactgccacccttctattaaccccacttggaagcccatgaatgattatgaatataaatgtgaaggctcctcctttgaggtagatgagggcggggaaagagaagatggagaacagacaattcagacagccaaattcaatttgagggaatttggttcagtgctttccattaacaacactcaacgaaaaatataattcccaggacaaaagaagaaaagggaaaaaacaacaaaaaacaaaagcaacttttcatcatgcacagtcaatggaaarcaaatcaatcaccctgtttctc

SEQ ID NO: 127865 - DNA, 552 bp, Homo sapiens
gtagaagtatctttctgacctgttttcaattattttagatacatacctaagagtgaaattgctggatcatagcataattctatacttagctttttgaggaaccgccaaactgtttaccacagcagctgcaccatttacattcctaccagcaatgcacgaagatgacaatttctccacattcttgccaagacttatttttttcttcatcttttttattatagccatcctagtaggtaggaagtgacttctcattgtggctttgatttgcatttccctaatgaagtaaatcaagattcttctttgaaaatttggattttcacttacaaaatgattagagaagtgcttattttttaaggttttctgccccgaataaataaaactgttttgtctgaaacatagtaaaatccacaaaagggtagatgatggcatcagtactgttggaggwaacgatgcctttgtccattcaggtaccttccttttggaatatcttctcttcccatatttccagctgttcaccttaaatctatccccctgtctgttcacacagaagta

SEQ ID NO: 127866 - DNA, 514 bp, Homo sapiens
gcaacttcagcaacaataacagttttctgctagcaaaataaccttccrtttcattttttaaaaatgggctggaatggaatggagtgaaagaggtttcatgtctcctacaaagccaagttcctaatttttagttttcactagctgtgtgtggggactggtttttcattcctgataaataaaagtgctacattttacatttagactattgctgtccttagactactggctaagtaatgtcaataggaaagatctattggaacactttatacgttcatggggaatatagcagatttttttttacctgcgtgacacacattcccccataatctggttgtagcaccccaccttttttatggctgagattctgagtggttgtgtccagtagcacacattatggaaactgttgccttaatccaccagacatgagagaagcattttcaaagaaagatctggatgaagggaacaatctgatttcaacattggttgtcagcctctgccaacgaagaagcaggag

SEQ ID NO: 127867 - DNA, 514 bp, Homo sapiens
gcaacttcagcaacaataacagttttctgctagcaaaataaccttccatttcattttttaaaaatgggctggaatggaatggagtgaaagaggtttcatgtctcctacaaagccaagttcctaatttttagttttcactagctgtgtgtggggactggtttttcattcctgataaataaaagtgctacattttacatttagactattgctgtccttagactactggctaartaatgtcaataggaaagatctattggaacactttatacgttcatggggaatatagcagatttttttttacctgcgtgacacacattcccccataatctggttgtagcaccccaccttttttatggctgagattctgagtggttgtgtccagtagcacacattatggaaactgttgccttaatccaccagacatgagagaagcattttcaaagaaagatctggatgaagggaacaatctgatttcaacattggttgtcagcctctgccaacgaagaagcaggag

SEQ ID NO: 127868 - DNA, 203 bp, Homo sapiens
aatcatatgccatcaatataaataaataccgtgaaacccaatcagtgttaattaaattctggctagatcctgcagcttaggcaaagaccatgaatatgaggctctttgttaaaaagggaaaatgttaaaaaataaacatygttgaagagtagcaccaagggagatgactcattggtgtaatcagagggactgaaatagaattc

SEQ ID NO: 127869 - DNA, 564 bp, Homo sapiens
ctgctgtacttacataaaacataytaagaatagatgttatatttctgtgtttgaatattgagcttaaacataaaacatgtttgaaatgtgtttgtgtgtgtctctcacacacacacataacatgtacatacctgaaactcatactgcaattgcaacacatcttaagtttttccttttaaacataccaagataacattctaaaatgaagaataatatctatgtctctcttcctactacatactatctctctatgtatatgcaattgctataaacatatcttcatatttgatatatataggtacatatatatggatagataaatatagatatatgagagagaaatggagattagagatctatgtttgccataaatcatacttgttaacataaaccatctgattaaactgatattttgtggcccaagacctgagacatgcaaaactattcttagcagatagaattttctaaaagctgagagctcattctccaggagctggccaaggaccagtcctaaaggcagacctttcttggaaatgtacagagtctgggcaaacaagacctgct

SEQ ID NO: 127870 - DNA, 528 bp, Homo sapiens
aatactatataattctgcttatatgaagtacctagagtagtcaaagtcatagagacaggaaataatggtggttgtgccaggggctagggagggaagaatgggaaattaatgggtatagggtttaggaactttagtctaagaaaggagaatattggatgccagaaattcagttttctttctgttccaagatccctttagctagagcgacatattgaagtcagagttcctaagggaaaatcattgtgyatggagatcatccttgtggatcaaatgtgaatcaatagtagatcaaaagatattccacttttgcagatattgacatttgttggacccgtaagattttatctagtattagatagataagatgtgaaccacttctcaacgctgcagactcaaatactaggaaatactaagaacctcaggacaaacaaatagccagtccaaaaagactcacagactagataagctgtcatctaccacctaacagataatgtatccctgttaaccactatctccagatgttcattt

SEQ ID NO: 127871 - DNA, 564 bp, Homo sapiens
ctgctgtacttacataaaacatattaagaatagatgttatatttctgtgtttgaatattgagcttaaacataaaacatgtttgaaatgtgtttgtgtgtgtctctcacacacacacataacatgtacatacctgaaactcatactgcaattgcaacacatcttaagtttttccttttaaacataccaagataacattctaaaatgaagaataatatctatgtctctcttcmtactacatactatctctctatgtatatgcaattgctataaacatatcttcatatttgatatatataggtacatatatatggatagataaatatagatatatgagagagaaatggagattagagatctatgtttgccataaatcatacttgttaacataaaccatctgattaaactgatattttgtggcccaagacctgagacatgcaaaactattcttagcagatagaattttctaaaagctgagagctcattctccaggagctggccaaggaccagtcctaaaggcagacctttcttggaaatgtacagagtctgggcaaacaagacctgct

SEQ ID NO: 127872 - DNA, 535 bp, Homo sapiens
tggttactcatcttgagacactgtaagaaaagtaagtcccttgatggtttttgcaaaataacaagatcattggatagctcttcaaataatggactttcagttcagctgcattttatcttacatttctaaatgcctactaagcattcattcaccaaataggcgactaggctatatgctgatataagagactaagcccctggtctcaaattcagtctgatacttaagagctaatgtaaagtaagtgtaaackgttagggagcagcgtggaaatcaaatccatgcagggaggtctgggaagggtttccaaaggagctgtctgacaagaatattgaaagatgccatcctttaaatccattttaacaaaagtaagctagataaagaagacagaacagttctatcttggagaggaagctcctgagagactggtgtcttagagagcaggggtagaaaagtgtttcaggaagacaaaaaaacaaatatgaagacacaaaggcaagaaaaagcagaggtgccctcttcaaagaactctaggaag

SEQ ID NO: 127873 - DNA, 599 bp, Homo sapiens
agcttatagatacaacatgtgaatacccagaaaaagatgaaaagggactcttttgaaatagcctaaagtgagagatgataatggcgtagactagggttgtgatgccgctgtggattaggtagtacaaccgataggacaagatgtgggattggatgcagagaaggaaagcatgactcacaggtttttgattgagttctatacagatggtgctgggaataatgggtgagaaacagattttaagtcagagaaaaatcaataamtatttttagacatcttaattttaagagggctgttagaaatctaataagagatattgaccatgcagttgaagattcaaaactgaagctcatagtggatactgaagaagagttttagttttgcaaattatataaatagatgagatcctctaagaaaaaggtgaatagaaagaaaaaaaaactctttttaattttccttgtagagaatttgatgatacatggacaatgacaattttatttcttgtgttctgatgcttatatcttttacttttttccagcttcactgccatttttatgatttccagaaaaatactggataaaagttgatttagtagacaccta

SEQ ID NO: 127874 - DNA, 461 bp, Homo sapiens
ctactttgttttttcttcaccttatatattaaatgaaattgttttaaagtaagcaagattctctttagttaataccttctccagactagaagttggaaaagttctctagaagttctaaagaagycactaaaatggcaatgatatcttttagcagaacatttccatctgtatgcccatgcacatgtgcacaccctacacatctacgtacatatacatactacaaaagtccatgcacacacatacagaaacaaaacttcatcggtgtcttggaaatgcattattggacgtgtttcccttgtttatcaaatgaaaagtcagttcattttaaatatagtaactgtaaatagtgagataaagctaaactagttgaaatttgttatggctacataaacaaatttgagaggacaatacggctattacacaaataattcagcaaaggccatgcagatttgcttcctaga

SEQ ID NO: 127875 - DNA, 461 bp, Homo sapiens
ctactttgttttttcttcaccttatatattaaatgaaattgttttaaagtaagcaagattctctttagttaataccttctccagactagaagttggaaaagttctctagaagttctaaagaagccactaaaatggcaatgatatcttttagcagaacatttccatctgtatgcccatgcacatgtgcacaccctacacatctacgtacatatacatactacaaaagtccatgcacacacatacagaaacaaaacttcatcggtgtcttggaaatgcattattggacgtgtttcccttgtttatcaaatgaaaagtcagttcatttyaaatatagtaactgtaaatagtgagataaagctaaactagttgaaatttgttatggctacataaacaaatttgagaggacaatacggctattacacaaataattcagcaaaggccatgcagatttgcttcctaga

SEQ ID NO: 127876 - DNA, 461 bp, Homo sapiens
ctactttgttttttcttcaccttatatattaaatgaaattgttttaaagtaagcaagattctctttagttaataccttctccagactagaagttggaaaagttctctagaagttctaaagaagccactaaaatggcaatgatatcttttagcagaacatttccatctgtatgcccatgcacatgtgcacaccctacacatctacgtacatatacatactacaaaagtccatgcacacacatacagaaacaaaacttcatcggtgtcttggaaatgcattattggacgtgtttcccttgtttatcaaatgaaaagtcagttcattttaaatatagtaactgtaaatagtgagataaagctaaactagttgaaatttgttatggctacataarcaaatttgagaggacaatacggctattacacaaataattcagcaaaggccatgcagatttgcttcctaga

SEQ ID NO: 127877 - DNA, 590 bp, Homo sapiens
tggtagtcttgaaagctattgagctataattcttaaacagaatttactagagttaagctttatgcatgagaaattttgctcatgatttaatttgtagctttcaaacaattaaatttgatatgaagataattatcccatctgtctttcagcaatatcttagagaattaacattttaacacactgcagttgtgaggattctaaaatcagaatactaaagtttaatctcagtaaaatgtcttgtgtacatctcatgaagtattattaatctgaagtctcttgctatataacaatagaaacataaattttgtcagagtgggtagcaataaatcacagtacttccatcttattactctcaaatctgtgaaagtagatgtagaggaaaagaaatcttgggaaataaaataagtccagacaaaaccaaacttaattaaaaagtcataaagtataatctgtaactctgatttttatctttgaagaatcatactgtgttcggaaaatggatgtccacgataattttctataattttctggatggtycttaatgaataaggtatgtaatatttcatgttttaaaaattaaacacattaca

SEQ ID NO: 127878 - DNA, 551 bp, Homo sapiens
taggagaagataatcattattaacaaattgagtgaaaaggtgttaggtaagttatttcaggccttaatttcaaataaagttgtatataatctcagcgtgaaaccaatacagacttcacaattgtagctgtatttcataatcttctacagctatcactggttgaatttgccagtgagaaagttacctkggggagacatgcctgtgcatgctcatgtgtagagtaatctttaaatgtatcaagaaagaatcaagttctgaatgcaaatgcaaggttccagaaaaaccctcttgctctcaggatggaggaattagacaggacttagtgatgcagttatcacaaacccagcaggagcactgatccctggcatccttctctgaacttcaactctgaaaacatgttattcgagacctgccctatagggatcccccgcggatctcctcaaacccacagtttttctattataaatgtaacaaccaaaataaaggagtcataacaacttgtttcttcacaccctgtagcactacataaagatgctaggtagtcctgagtg

SEQ ID NO: 127879 - DNA, 455 bp, Homo sapiens
ggatctcgggagtggctggggactgtgcactcagccccagggcagcgtctggccaggaatggaggcagacacaacctactgagtagagaactaagaacagcaaagccaagtgaggaggcagggtcttggtggttggggcctggacactggagagaaaaggggactactggcacgagagcagaagcaaaatgcagttgggggttcccagccaggaggcactgggggggacttccagggaaggtctggggttggagcaacccaggaaccagttctggggcacaaggaggaggaagctctggggacttctaggagggaggctggtggccggggtcctgaggaggccaggctagaggcaggagttcttgcacattctcgtctctccaccccrgacgcctccagagtggtttactctaaccgccaccacctcctcaactcctaggatgccctcaactttt

SEQ ID NO: 127880 - DNA, 474 bp, Homo sapiens
ctttctccccagccccctgcatggtagagcatcatagagaggataaaactgtggactctggagccagacctgccaggattggaatctggctttacccagttggcagctgagtgaccctcagtgcctcagttccttatctgtaaactagggataataaacaatcccaatctcattaggtcattatgtggctgcaatgacttccctcacaaactatccagggttagggaaacttcacaggttaagggcatggtgctctataaaagtcctctcactttaaacaccagccacaggcttggtgtcctcagggccccttgrcttctgatgagctgcctagaaattgggggtttctactatccaatcagcctcaactatttgctagaataattcacagaacttaggaaggtgctgtgccaacataacttggagatatttcaggtttagttctagcccactgcaataaagtgagtcacacac

SEQ ID NO: 127881 - DNA, 547 bp, Homo sapiens
tcaactatttgctagaataattcacagaacttaggaaggtgctgtgccaayataacttggagatatttcaggtttagttctagcccactgcaataaagtgagtcacacacactttttggtttcccattgcatataaaaattatgtttacactatatcatagtctattaagtatataatagcattatgtttaaacatgtacataccttaatttaaaaaatattttattattaaaacatgctaaaaatcatctgagcctttagtgagttataatctttttcctggtggtgggttttgccttgatgttgatggctgctgactgatcagggtggtggttgctgaaggttgaagtgactgtggcaatttcttaaaataagacaacaatgaagtttattgcatcaatggactcttcctctcacaaaagatttttctgtagcacgtgatgctatttgatagcatttcacctagagcagaaattctttcagaactgtatattctaaatcatttgttgtcatttcaacaatgtttatagtatttttgccaggagtc

SEQ ID NO: 127882 - DNA, 669 bp, Homo sapiens
ctgggtgcagtggctctaatctaatcacrcctctaatcttagcactttgggaggctgaggtgggaggattgcttgagtccagaagtttgagactagcctgggcaacatagggagaccctgtctctacaaataatttaaaaaattagccaagtgtagtggcatgcacctgtggtcccaggtacttgggaggctgaggtaggagaatcacctgagcctgggaggtagaggcttcagtgagctgtgtttgtgccattgtgctccagcctgggtaacagagcgagaccctgtctcaaaaataaaaaagaaagaaaaatgaatccaaatcaattctattttcctatgagtctgtacaattttgaccacatctactggtgtgtgttaatagccatttgataggtggatggtgggtgtaatcacttcaatttttaaaaattctgaaattttcccaaaaataactaggaaaaatattctaaggattataaacattcaaaggtttataaaattctgaatttgtgtacagtggctaaactagttaatatattagtattgtttaatctgttagtactaagatatttcagatgatatctagaaacatcttgaaagtttgcaatttaaaaatcttaaaataatagtaaaactgtgatgataatgagtaatagttaccgagca

SEQ ID NO: 127883 - DNA, 669 bp, Homo sapiens
ctgggtgcagtggctctaatctaatcacgcctctaatcttagcactttgggaggctgaggtgggaggattgcttgagtccagaagtttgagactagcctgggcaacatagggagaccctgtctctacaaataatttaaaaaattagccaagtgtagtggcatgcacctgtggtcccaggtacttgggaggctgaggtaggagaatcacctgagcctgggaggtagaggcttcagtgagctgtgtttgygccattgtgctccagcctgggtaacagagcgagaccctgtctcaaaaataaaaaagaaagaaaaatgaatccaaatcaattctattttcctatgagtctgtacaattttgaccacatctactggtgtgtgttaatagccatttgataggtggatggtgggtgtaatcacttcaatttttaaaaattctgaaattttcccaaaaataactaggaaaaatattctaaggattataaacattcaaaggtttataaaattctgaatttgtgtacagtggctaaactagttaatatattagtattgtttaatctgttagtactaagatatttcagatgatatctagaaacatcttgaaagtttgcaatttaaaaatcttaaaataatagtaaaactgtgatgataatgagtaatagttaccgagca

SEQ ID NO: 127884 - DNA, 560 bp, Homo sapiens
acattgctctagttgttcaaatgagattctatgtggattgtaaaaatatatttttctactggaaagtaagtctatttgagtagctagggctcctgttgtaatagaaagggtaccaatcccaagtaatatgatttctaaaatgaagtcattatcataagtggagtatattatttcaagtgagtaaaacttttgaagagtgaattgttcatattctgggttatgtatgcatttgttacggtcaaggaagcttgaagcttcaaattcataaataaattacatcaaatgcaataagaataccacctactggacactttataatatgcattaatagtatatttatgactttatttaatttctaaaatggccctatgaagttatttttagaattttcattttacctatgtggaaactgagccacakagaagatgcccaaataacagtatttctgcagaaatcaaaacccaatttgcctgactccaacatttacactatatatattttatacatatatactatatatatatataacacatatattacactgtttaatataattacag

SEQ ID NO: 127885 - DNA, 560 bp, Homo sapiens
acattgctctagttgttcaaatgagattctatgtggattgtaaaaatatatttttctactggaaagtaagtctatttgagtagctagggctcctgttgtaatagaaagggtaccaatcccaagtaatatgatttctaaaatgaagtcattatcataagtggagtatattatttcaagtgagtaaaacttttgaagagtgaattgttcatattctgggttatgtatgcatttgttacggtcaaggaagcttgaagcttcaaattcataaataaattacatcaaatgcaataagaataccacctactggacactttataatatgcattaatagtatatttatgactttatttaatttctaaaatggccctatgaagttatttttagaattttcattttacctatgtggaaactgagccacagagaagatgcccaaataacagtatttctgcagaaatcaaaacccaatttgcctgactcyaacatttacactatatatattttatacatatatactatatatatatataacacatatattacactgtttaatataattacag

SEQ ID NO: 127886 - DNA, 560 bp, Homo sapiens
acattgctctagttgttcaaatgagattctatgtggattgtaaaaatatatttttctactggaaagtaagtctatttgagtagctagggctcctgttgtaatagaaagggtaccaatcccaagtaatatgatttctaaaatgaagtcattatcataagtggagtatattatttcaagtgagtaaaacttttgaagagtgaattgttcatattctgggttatgtatgcatttgttacggtcaaggaagcttgaagcttcaaattcataaataaattacatcaaatgcaataagaataccacctactggacactttataatatgcattaatagtatatttatgactttatttaatttctaaaatggccctatgaagttatttttagaattttcattttacctatgtggaaactgagccacagagaagatgcccaaataacagtatttctgcagaaatcaaaacccaatttgcctgactccaacatttacactatatatattttatacatatatactatatatatatrtaacacatatattacactgtttaatataattacag

SEQ ID NO: 127887 - DNA, 607 bp, Homo sapiens
gatggacacttaagctgcttccaaaccttagctattgtgaagagtgcagtgtcagtaataacttaactgtacattttaaaatagctaaaagagtgtaattggatattgttcaacacaaaggataaatgcttgaggggacagatatcctattctccatgatgtgattatttcacatgacatgcctgtattaaaatgtctaatgtgccccataaatatatgcacctcctatgtatccacaaatatttcaaaaaatatattacactctgtggttttttatcatttaaaatacaatcttttgaacaatcacataaagtcttacaatattaaacattaatggatcaaatctcttcatcataaacaagaagtcctcatgatcaaaaaatttttgtaaaaaatatatttaatggaggagggtgattagattaagatggtagagaggaggcaaggctaacttgcagctcccactcagacagacagagcagcatgtaaagactcacatggtgaacttttgctccaagaactaccacaggaccatacaagaaaagccgagataatctacagaccctgtgaaggaackggatcaccctggcaggctctctgagatgcc

SEQ ID NO: 127888 - DNA, 625 bp, Homo sapiens
catattatattgatgttacagttactgaagttcataactactttctaattctataggatattttcatattctgggaatacataatgatactacttagaggataaaggttataaggcataaaattgagagagagggagaaatgaggaagaaaaagggttcatatagatgttctttgtactacttttatttatgctaattttctgtaaaattgaaattaattttaaataaataattaaaatatgtcccctccctcccaccttttttgagcagtacacatgatataatatcttagaaaacttgctgattgcaatgtagttattcactgctgagacaatccagccatttgtccacccttattggaggctgtcttggcccacatggttggttcctgaaagattaaggtctgttattgaggttaacagtcttcatcaagtgctkggttttgaatcccgaattccgttaagagactgtggaaaacatattagcctggggtgaaaagaagctttagagaagatttccagcacaaagtgacatctgagctgagttttgaagtatgtaatttattagacaaataagaagaggtagagtatcaaatatccaattgttcatttatccagtaaatatt

SEQ ID NO: 127889 - DNA, 543 bp, Homo sapiens
attttttaaaaatcaattttatataagtagttctttctatctggtgactgcaaaatgttaacttgcatttactctgaaaataattcatgtacatattttaacttactgttacaattgctaactgttgttaatgtataatttctataaatgtatatctattgsgttgaatatcagagtattaatttaaaagtggtactttttacatatataactaggagtggaatagcagggtaatataataattctatactttgtgttttgaaaagctgtcaaactgttttcaactatggctgaaacattttgcatttccaccagcaatgcatgagtcttaatttctccatattctcaccaacacttattactgcttaatgagtaaggggttttacagcttgggatcgtggaaatgttttggaactagaggttgttgttgcccaatattgtgaatgtataagataccactgaattgttcactttaaaatggttaattacattgcatgaagttcacttgaataaattatttttaagtggcgctgtttgtttgga

SEQ ID NO: 127890 - DNA, 348 bp, Homo sapiens
atcctaaacaaaggggaaagacccaaakaattttctaaactaccaaaaaacttaaaaaatttcaaccaaccatactaggattgaatcatctcttcttgcttatagaaaatattagagtacatagtaatgtagccagttgttggaaaaaatggtaaaagtggtaagttcaaccagttaagatttaagttgaggtgtttatgtatttcttcgtggtattttgtcagctttctaaaggtgtaattttgttggagtttcactgaagagaatattatacctgtgcaatcatgatttgtagcctgttttcttaagatgccccagattgcataagcttcagcctcagaaaacctg

SEQ ID NO: 127891 - DNA, 348 bp, Homo sapiens
atcctaaacaaaggggaaagacccaaagaattttctaaactaccaaaaaacttaaaaaatttcaaccaaccatactaggattgaatcatctcttcttgcttatagaaaatattagagtacatagtaatgtagccagttgttggaaaaaatggtaaaagtggtaagttcaaccagttaagatttaagttgaggtgtttrtgtatttcttcgtggtattttgtcagctttctaaaggtgtaattttgttggagtttcactgaagagaatattatacctgtgcaatcatgatttgtagcctgttttcttaagatgccccagattgcataagcttcagcctcagaaaacctg

SEQ ID NO: 127892 - DNA, 544 bp, Homo sapiens
ttaaagtacaaatttatcatggttgatctcataaaccaatggttgcatagttttaatgtctagaccaaagattttaagtgcatagaaaattacattaaaaattttaaattgtatattwatcacatacctcgatggaaaatattttttttcaaaaatccagcacacagaatgaaaatgtctgaaatatttcaaaactttttggcctaaacatcaaagttacaattacatgtatgtaactcggggggcaaaatagctgcactaaattgaacaaaagaatagtctatagatttttattttttattaataatcttgacaaatcacctatatagaaaaggtcatgaaaaatcaaaatagccaaaatatacactatgttcaatttttttcataatcaaatccatattgtgagtttcgatactagtgctaaatgctggggcaagcatgatgctgccgcaagtgtgttctcttactgttaagcatttaacaacttggtgataagcttctaaagcatagtaaaccattgtccatgaattatgccagagaattc

SEQ ID NO: 127893 - DNA, 544 bp, Homo sapiens
ttaaagtacaaatttatcatggttgatctcataaaccaatggttgcatagttttaatgtctagaccaaagattttaagtgcatagaaaattacattaaaaattttaaattgtatattaatcacatacctcgatggaaaatattttttttcaaaaatccagcacacagaatgaaaatgtctgaaatatttcaaaactttttggcctaaacatcaaagttacaattacatgtatgtaactcggggggcaaaatagctgcactaaatygaacaaaagaatagtctatagatttttattttttattaataatcttgacaaatcacctatatagaaaaggtcatgaaaaatcaaaatagccaaaatatacactatgttcaatttttttcataatcaaatccatattgtgagtttcgatactagtgctaaatgctggggcaagcatgatgctgccgcaagtgtgttctcttactgttaagcatttaacaacttggtgataagcttctaaagcatagtaaaccattgtccatgaattatgccagagaattc

SEQ ID NO: 127894 - DNA, 599 bp, Homo sapiens
actgtggctatgaacacttatgagtagcaattaatattaatcttgctttcaagactaaaactgccaggtggatctttcataagtaccttatttcagcatgtaactttctgactgaaacaactcccatttgcaccttatttctcgacgctgagttctggtctcyctgccttcactttccagccgcactccaccccacacacctcagctctccacgggctcttcagctgtagttagactggactctcccctctctcttccacccctagtgcctgctaattcccatttgcgagccttttgacattatttacattgtctctgatcatgtcctctctccttcagtctcgagtttcggaatcagaccggtttccctctctactattgcactgtttaactgaactgactcctgtcttctcctggttcttgtgatccactattttcaaagcagtgatcacttagatgctctttaaaagtttcatgctttaagatcctttcagtctctagccctagggttgaacctttgaggtaaagaattctgacatggtattcctctctttaacactttcatttccatagttttagttaacctgcaatccgccagg

SEQ ID NO: 127895 - DNA, 217 bp, Homo sapiens
gccaaaacgtttgacagaaaacaagtttcttcagtaatcctgtcactaaaatgagaagaaatacaccataatctaataaagaaaaattcatccctcagtatycctgaacatataaaagggacacacattcatattactcaaaaaagcatgagaattcattccattgattcaaggaatgtttgatactgctgtgtcgcgtctgagttcagaaatttct

SEQ ID NO: 127896 - DNA, 570 bp, Homo sapiens
acttttatcacgcttgacaggagttaatatttgatgctcatgtatttttttctcctcaaccaaggtgtgacaaactgaagtttcagcacagaccaacacaaaaattgcttttttttctttctccctttggatgtttattcatcttttaggcctattactcatatctccatctctgagcactaagaaggaaaactctactgttgctattgtttttgcttcaacataaggagagtttattccttgatgcttcagggactgtaaattttgactattctagaaccaaaagattcagatacatttgtagtattggtggccaaaacgtttgacagaaaacaagtttcttcagtaatcctgtcactaaaatgagaagaaatacaccataatctaataaagaaaaattcatccctcagtattcctgaacatataaaagggacacrcattcatattactcaaaaaagcatgagaattcattccattgattcaaggaatgtttgatactgctgtgtcgcgtctgagttcagaaatttctttaccatctatagtttttgttttcttgttttgttttttgag

SEQ ID NO: 127897 - DNA, 536 bp, Homo sapiens
ttcaaggaatgtttgatactgctgtgtcgcgtctgagttcagaaatttctttaccatctatagtttttgttttcttgttttgttttttgagacaaagtcttactcttgtcccccaggctggagtgcaatggcacgatctcagctcactgcaacctccgcctctcaagttcaagcgattctccttcctcagcctcctgagtagctgggattgtacaggcacctgccaccatgcccgattaatctttgtatttttagtagagatgaggtttcaccatgttggccaggctggtctcgaagtcctgacctcaagtgatctgcctgcctcggccacccaaagtgctaggatcacgggtgggagccactgcacccgactgtagttatttttacttataaacatgaaggatcagtaaaatggtagagaaataaacttgaggaaaaaacccaagtagcagtggattactaggatgatataatattaggacaggttcaggatkccactctgtcagagaaactctaacattttggctaaacaatat

SEQ ID NO: 127898 - DNA, 609 bp, Homo sapiens
ctactctttgcttaaattaatcagaattaatttctgatgcctgcagccaacacaacaataacaaacatatcttttattaattgataatgcatacaaggtaatcaatttaatattaatcttaatgtggatacattaggaatacgaaggatggagtaattgaatgggaaatattgatgacctgaaaatctttgcctgataaaagtaacacatagaagtggatctagtccagctatagaactgtacaaatgaaaatatgctgatttrtaactaccttcacctaaactggagattcgtcagctttgtagctccttgacgttcctggatcattcagaatcaataatcccaaatcctgctactgagatggctctctgttctgtatgcaggtggacagtgactcagaatcttttggtgcagtaaagcaggagagtgggagagaaagataaaaactaggctgactctcatgcagccatcagcaaaacctagggatttttgtcaaggtattttctttccacaaacaagtgttcattcccgtcacttctgttgtacttatttatgagatgtgattgcatgaagtattcttatgctaaggtctgcatcttattcacctgt

SEQ ID NO: 127899 - DNA, 431 bp, Homo sapiens
tccttaccttggcctttaaccatttttaagtgtacaattcagtgttattaaatatattcatattgttgtgtaaccatcaccaccatccatttccaaaattattttcatctctataaactgagactctatacccatcaaacaatagttcccctttctcctctccctcagctcctggcaatcactattttatttgtttctatgctcttgactactctaagtatcttacataagtggaatcatacagtatttgtctttttgtgactggcttatttcacttagcataatgtccccaagattcatccataatgtagcctgtgtcataacttccttcctttttatggctgaatactatttcatggtattgtgtataccacattttgtttatccattcatccatyggcagccacttaggtcactcccacattttatct

SEQ ID NO: 127900 - DNA, 612 bp, Homo sapiens
ttattgctgaagttcctatagtttcctgactgttaatggattcttattaaataattctatcaatgaaaaacatttcattatattgtatgtatactatacattgtttgaaattatgaatttggctctttgatattaaattgagtatttcttctcttatatatgctgaacaactatattcagaaaaatcccgtttgatggagattgggttacttcaagctggtgaaatcccaagtcaagttttagagagtttagtcataaagtacgatactgaaacaatctgtactgawaagaaaagtgagacctgctaatcaacatggatgtaacccaatatcttgtctaataggaaagcgtagaatgtactctctcctttcaactgaaaatgtcccaaataagatgttatcttcttccaatcagctttcatcgttactgtcaccatagcaactaaatagctctgagatgcaacctaaacaagggaccaaataagatgagctgatgagccactgcattatcagtgttcataagatagtaattcaaaaatgctcatcatacccacaaaggaaaagcatttcttctctcttttcctaatgaaagtatggttaataaaagtatttc

SEQ ID NO: 127901 - DNA, 612 bp, Homo sapiens
ttattgctgaagttcctatagtttcctgactgttaatggattcttattaaataattctatcaatgaaaaacatttcattatattgtatgtatactatacattgtttgaaattatgaatttggctctttgatattaaattgagtatttcttctcttatatatgctgaacaactatattcagaaaaatcccgtttgatggagattgggttacttcaagctggtgaaatcccaagtcaagttttagagagtttagtcataaagtacgatactgaaacaatctgtactgaaaagaaaagtgagacctgctaatcaacatggatgtaacccaatatcttgtctaataggaaagcgtagaatgtactctctcctttcaactgaaaatgtcccaaataagatgttatcttcttccaatcagctttcatcrttactgtcaccatagcaactaaatagctctgagatgcaacctaaacaagggaccaaataagatgagctgatgagccactgcattatcagtgttcataagatagtaattcaaaaatgctcatcatacccacaaaggaaaagcatttcttctctcttttcctaatgaaagtatggttaataaaagtatttc

SEQ ID NO: 127902 - DNA, 541 bp, Homo sapiens
acaataatgaggaagactggcagaggcctggattatattgctatatttggtccaacgtcatgattagattaatggtgtaaatttctttattgttatagttctagtaacagacttccctctacttccgatgccagtactgactgacttactgtataagtaaagcagtacactttattattttctttgtaatgggatttgcaataataccaatttgtatcacctgagtattgttgagattcataaaataactattgaaaaacrttttaatatacttcattgaaaagaatgataattagaataactgctatgtgaattcacatgtaatctttttatatattttagaaaataaaatacgtttataaaaatttttaaataatgttacaaatgttaaaaaagattattttacaaacactaaagttataagcaattgcagcattattttttggggaggtcacaataataaagggtaaaaaaacatgacgtgaagctttaaaattgagatatttctatgtcttagtctgcaagacaggatagttagaaa

SEQ ID NO: 127903 - DNA, 541 bp, Homo sapiens
acaataatgaggaagactggcagaggcctggattatattgctatatttggtccaacgtcatgattagattaatggtgtaaatttctttattgttatagttctagtaacagacttccctctacttccgatgccagtactgactgacttactgtataagtaaagcagtacactttattattttctttgtaatgggatttgcaataataccaatttgtatcacctgagtattgttgagattcataaaataactattgaaaaacattttaatatacttcattgaaaagaatgataattagaataactgctatgtgaattcacatgtaatctttttatatattttagaaaataaaatacgtttataaaaatttttaaataatgttacaaatgttaaaaaagattattttacaaacactaaagttataagcaattgcagcattattttttggggaggtcacaataataaagggtaaaaaaacatgaygtgaagctttaaaattgagatatttctatgtcttagtctgcaagacaggatagttagaaa

SEQ ID NO: 127904 - DNA, 572 bp, Homo sapiens
agctattttcaatacagaatattattgttaattctagtcatcctactatgtaatagatcaccagaacttatttctcctatctaattgtagctttgtacctgttgttcattctctagccattctgcttttcttcccccttcctgttgatagttatacacattaaatctatttactgaatctgcaagtatcaattatatgtcagtgtacaattaaatgygagtttcccgctactgtaaataaaacatatctagactgctgagaatgtaaaactacactatttaatgctattatcttacaaaatactgttttaaaattttttaatactttttttgtgaagtgaaagaactactaggactggagaccaattgttatgaaatcatgggctggtacttgacgagaaggtgctcctggcacgttttgtgtatcctggttgtacatctggtatgagtcagataagggacagaaatcagcacaggtaatgaattccagagaaagacagaaggaagagtacaccaggatcctccatgccagcatggaaaggaattcaacatgaaggtatgaaagcaaaatag

SEQ ID NO: 127905 - DNA, 572 bp, Homo sapiens
agctattttcaatacagaatattattgttaattctagtcatcctactatgtaatagatcaccagaacttatttctcctatctaattgtagctttgtacctgttgttcattctctagccattctgcttttcttcccccttcctgttgatagttatacacattaaatctatttactgaatctgcaagtatcaattatatgtcagtgtacaattaaatgtgagtttcccgctactgtaaataaaacatatctagactgctgagaatgtaaaactacactatttaatgctrttatcttacaaaatactgttttaaaattttttaatactttttttgtgaagtgaaagaactactaggactggagaccaattgttatgaaatcatgggctggtacttgacgagaaggtgctcctggcacgttttgtgtatcctggttgtacatctggtatgagtcagataagggacagaaatcagcacaggtaatgaattccagagaaagacagaaggaagagtacaccaggatcctccatgccagcatggaaaggaattcaacatgaaggtatgaaagcaaaatag

SEQ ID NO: 127906 - DNA, 626 bp, Homo sapiens
tgaatctaggcagcaaagctcttgcgagtcgcacatcctcccctctggctccatgagaactcactggggtgagcacagtgtgatccaactaattgcctcccacatcccagcagggaccagaaactgagagcccgcaggagaggaggcagagcccctgggcaccggctcagtcccaaggcctcctggtccyggggttctttgatcagccctgccagatgtagcatctgctgctccaaaggtcaggcaggccccgcttatgaggtcccgccgatggacgtgggagccactaataagggcatcatgacagatgaaggccagcgtgccagcttctcaggagatgatgctcacaccagcagcacagtgaaggcctgtggagggacagcgggcccctgctgggactaggtgttctgggtggttcctgtctccacccctcccactccttagaaagttctgtcctggccccttccttcctttcccctctgtcctttctccctgtctgaccactgaccttggagaccaatgaccctgactctagctgcatgattcctttctccctctaaagcccaggagaactaaagaagcagatttgcattcccctcctgtctccttcctttgcccatttggca

SEQ ID NO: 127907 - DNA, 617 bp, Homo sapiens
ccttaatatattttcaccttggcactttcatattcttattgtattcttgatatattggctatttgcttactgtctaccttcatcaacgtgaatgtaactaccaagaaagtaaagactttgactgtcttggagttgagtgttgtattactagtactttgagtatctggtgtcacataatatctaatcaataaataaatgtttaaagaatgaatgacatgaaagcaatagtgattgagtagaatgaagcctcttcagatgaattatattggacacaagaaaaaatagctgggatgtaaaatgagctaaaatagcagttaaataggtattaacaaactggttcaagagtgtaattcacttcatattgaccagccagaggtaatagcaagcagctttctaattgaacagggcccaaacaatatggttacttatgackaattaaattaatcatcttcgactttgttaagtgtcttatagatgtttaaaatatctaagaagtatttactatatctatatgatttattagaggtcattctcaatattcacggaacactaaggagctgccaagcttcatttgaaatgctggggatacaatggtgaattagaaagcattcactgcc

SEQ ID NO: 127908 - DNA, 589 bp, Homo sapiens
atagtgtttattaatcaaattatacacgtaatttctgaaaaaatatatagctccttccagtttttctaagtagtgtcaaatatggttataaaattatatctacttttattatgaaatacactttttaaattgtatatgtatattatttaattatattgggtttaatttactctttctaatttcctaaggtgaaagcttatataatttattttaygcctattttattttattacataagcatttaaggacaatcacatctaatttcattcagtgccactttaaatgcatctcaaaatcttaattcatgttgagttgttattatctttccattaaaaatattttctgtttttctcatgctttcttctttgacccatggatcatttgatttggaggcaggtagcttaatttccaaattttggaagattttaaagattttttaaattgttgatttgattgtttaatttcattgtgtcttaaaaacatacttcatgtaatttctgtcaacttaaaaatgttgaggcatatttcatagcttagcctataaaatattatctcattaagtgtttggatgcacttgtgaagaatgtgc

SEQ ID NO: 127909 - DNA, 589 bp, Homo sapiens
atagtgtttattaatcaaattatacacgtaatttctgaaaaaatatatagctccttccagtttttctaagtagtgtcaaatatggttataaaattatatctacttttattatgaaatacactttttaaattgtatatgtatattatttaattatattgggtttaatttactctttctaatttcctaaggtgaaagcttatataatttattttatgcctattttattttattacataagcatttaaggacaatcacatctaatttcattcagtgccactttaaatgcatctcaaaatcttaattcatgttgagttgttattatctttccattaaaaatattttctgtttttctcatgctttcttctttgacccatggatcatttgatttggaggcaggtagcttaatttccaaattttggaagattttaaagattttttaaattgttgatttgattgtttaatttcattgtgtcttaaaaacatacttcatgtaatttctgtcaacttaaaaatgttgaggcatatttcatagcttagcctataaaatattatctcattaartgtttggatgcacttgtgaagaatgtgc

SEQ ID NO: 127910 - DNA, 600 bp, Homo sapiens
ccctaccatcctcagctctccccagtcctcctctgtctagtctagccttggcaccctctgcatatggtatgtctggcaatgrttgaagtctcctcgcttgatcaaaggctcttctcaaacctcatgttaagtgtacaacttagcctttaattgtgggctctgcctcttggggtaggttaaccaggtattctgtgtatactggacatgtcctgtatgtaatgattttgacttgtatcttacaatgattttgtcaggatatttaaatgtccttatttcagcttttatagaaaaatacagcaattagctatttttcaaatttagctgagtttcttgcttttttttgcctccctaagatctggtaacgttaccttcctactgtgaggaacacaattttaccctcattttcctgcatggttttttttcagtctctggactgatgttttttttccttctgtctaagatgctacatgttatacaaactaggggtctgcactaattccctgataattaggacgcaaacaatagttactgaataaatgaacaggtgaatgaaagaaaatagtttgccccataggatctctttccctttaggatctcatt

SEQ ID NO: 127911 - DNA, 600 bp, Homo sapiens
ccctaccatcctcagctctccccagtcctcctctgtctagtctagccttggcaccctctgcatatggtatgtctggcaatgattgaagtctcctcscttgatcaaaggctcttctcaaacctcatgttaagtgtacaacttagcctttaattgtgggctctgcctcttggggtaggttaaccaggtattctgtgtatactggacatgtcctgtatgtaatgattttgacttgtatcttacaatgattttgtcaggatatttaaatgtccttatttcagcttttatagaaaaatacagcaattagctatttttcaaatttagctgagtttcttgcttttttttgcctccctaagatctggtaacgttaccttcctactgtgaggaacacaattttaccctcattttcctgcatggttttttttcagtctctggactgatgttttttttccttctgtctaagatgctacatgttatacaaactaggggtctgcactaattccctgataattaggacgcaaacaatagttactgaataaatgaacaggtgaatgaaagaaaatagtttgccccataggatctctttccctttaggatctcatt

SEQ ID NO: 127912 - DNA, 600 bp, Homo sapiens
ccctaccatcctcagctctccccagtcctcctctgtctagtctagccttggcaccctctgcatatggtatgtctggcaatgattgaagtctcctcgcttgatcaaaggctcttctcaaacctcatgttaagtgtacaacttagcctttaattgtgggctctgcctcttggggtaggttaaccaggtattctgtgtatactggacatgtcctgtatgtaatgattttgacttgtatcttacaatgattttgtcaggatatttaaatgtccttatttcagcttttatagaaaaatacagcaattagctatttttcaaatttagctgagtttcttgcttttttttgcctccctaagatctggtaacgttaccttcctacygtgaggaacacaattttaccctcattttcctgcatggttttttttcagtctctggactgatgttttttttccttctgtctaagatgctacatgttatacaaactaggggtctgcactaattccctgataattaggacgcaaacaatagttactgaataaatgaacaggtgaatgaaagaaaatagtttgccccataggatctctttccctttaggatctcatt

SEQ ID NO: 127913 - DNA, 615 bp, Homo sapiens
cgggcccttctgccatccttggggtcttagagaaactactggagaaggaatagagaacagggcttgtcagaggtgggggagcttttgagacaatctgttctagtagaaccaattcctgcaagtaggcttctccttcttgctcaaggcctgtggttgacgtctcagtcaatcatgatgtctccacttgcctttgtccattgaatctcaacacttcctgagaacycttccaggccaacacaccagacaataacccctgtagccaagatggagggagacgcatgctcaggtctccctttgggaaaggacttgctgcctacctgccaagagtagagttactagcagccttcagctattaggtccttcaggatctgtctcggcttttgagttgaggttcttccatgggcatctcctttccaatgcttgagcagggctgtggtgcaaggacccagccatttctctccaatgtgggacacctctaaaggacaatctgtcctccagagctcccagataggcaagtaaagatcactctccctgcccattccttccttttcttcattttcctttacaggtatcactctctaataaatattttgcatccctatttatcatgtctgt

SEQ ID NO: 127914 - DNA, 575 bp, Homo sapiens
tagggagtgagaatggttacatttctattgaccctgaaataaatatcaaagagcagagtgctattaaattctagacataataatccactgtacaaaactacctgaatcctgagtaactgtttctccttgtaataagcaaccaccattaaaggggatacgacacgtctgacagatgtgaaagccactaagtcatcaaagaaaacttatcccttcccccaaacaggtgagtcaatagcatcgacattttcaaatgtcagctgctggattattatttarttctgtttggagcaaaacagcattagttcattgattcaaaaagccattttttgagcacctgctaggtaccaggaaccatggcaggcttcaagaggtgccaacgataaatagcagacaagattttccctaaagagtccacagcccagtgcagcagatagacatatgcagaaatcaacttggtatagaaaaattgctaagggttttggtgtccttgaagggtgtgcaggatgaatgggaagggcattcctgtgtgagggggtaacatgcacaaaaggaagagaccacagagctttgggtca

SEQ ID NO: 127915 - DNA, 579 bp, Homo sapiens
gtaaatatgagctggtcatgagcttccttagctgccctaatgtaacagagagatgtcctagtgaagtggagaggatacaggctttggaayaaaggtgggtctaaagctggctccactacttaatagtgtttgacaatataaaaaaggcttactatctctgaatctttgttccttcatcaattaaaaagaagaaggtgatggctacacctaccgcatgtggatattgccattagaagatgcttatggatgctaatccccttcctaacatctgcattaaaccctcagctggttttagagctcaaacaatcaattcttttctatgagacctcttgaatgaggtcttgactcttccaaatcttcctaatccctctcccccaacttcttattctgactctcctcatcctaataaatcaactggttccaatctgactgctagtgacaagtcagagagctctggctagtcctttcccagaagttgctggaaggctattcatgcttctgcttgctccttacagaaaatctatagtagttgttcttcccatgggtcacccaacacagaaaagaaagctgcagccagct

SEQ ID NO: 127916 - DNA, 587 bp, Homo sapiens
atgctaacctggcctttcctcaaatgtaggtaagaaaggcagcaagcctacagctcagaatttttctgacctggtggatttctccttcctctaaggctgtcagtacctccaaatattgggcatgcctttgtgaggaactagggtggcatggagagctgtgcccactcacctgtgttatctggtgtatatttattctttcagtgctattgctggtatcattgatagcaggggacctgttgagcaggagagggtttgagagggaggatgttgcattcaacaggcagcacatgggaagctctttacagtttgctgaatgaatrggggaatgaaatccttcaagacactttaaaaggtatattccttaaggtgcttaaaattaaaaggactagattcaggaaaaaaatagtttttgtctcgaatgccaactctgaatggtaatgggtgcctagagctcccagttgagtagaaaattaaggctgtgccttggccctctgagaaaatgtgccaggcataatcctcaatgtctgcctagatcataggagaaggaacggaggataggaagctaagcagaggctgaagatgaattc

SEQ ID NO: 127917 - DNA, 570 bp, Homo sapiens
tcagttctttctaccaaaggcctcaatcagacagattctctttcccaggagtagacactgagggggtggaaacaggctctgagttgactccactgagaagtccctgaatggatagcagccagggaattaaggagtttccctgtggcaagtctctactcgtacaatattaggacagctgtttttttaatttgttctgtgggtgcatatttttgatctccacaacataactacttactcactgtgttgctttttgaaatttataacatctaaatttgcaaatgtgaggtatgctctcaggaaaattatatatctgttaaaattctttgctccttttaggacacttccatccatcwggtgacctctagtagcgtacatactcagcaacaattaaaggtagtttctggcttgtttttcccaaacaataatttgttcaaaatacagaaatttggaaagtaccccatgatgagaaacttttgaaagagaatttaatgtacagtaactatttttttcctctgaggaataattttgggaaaagaaatttgctttatattcaggcatattgagtaagtt

SEQ ID NO: 127918 - DNA, 584 bp, Homo sapiens
ccctttttaaggaatttcctttaacctgaaaaaagattaattgacacaaatacaattttttctccaaagagagattgtttttcttcttaatcatgtgttttagtatttgtttgtttgtttgtttttgacacagagtcacattctgtcacccaggctggagtacagtggtgcaaactcggtttactgcaacctctgtctcccaggctcaagcaattctcccaacccagaccytaaagtagctgggactaaaggtgcatgccaccacacccagccattttttgtattttttgtagagatggggtttcactatgttcacttactttttttcttcctcctcttagcaagcattaattaattgagggcctatgatgtgccaggcactgtgttaggtattaaaagtacagagaagagttaaaaataaatttgaagtctttgtggatagacacactggcataagtacttgaaaaacaaatacaactaagatggaggggtgcatcaggaaatggatgctgatcactatagcaaatataaagggaataaatgtaaagaaattgccagtttgtgcttagaattgaggtgaatct

SEQ ID NO: 127919 - DNA, 584 bp, Homo sapiens
ccctttttaaggaatttcctttaacctgaaaaaagattaattgacacaaatacaattttttctccaaagagagattgtttttcttcttaatcatgtgttttagtatttgtttgtttgtttgtttttgacacagagtcacattctgtcacccaggctggagtacagtggtgcaaactcggtttactgcaacctctgtctcccaggctcaagcaattctcccaacccagaccckaaagtagctgggactaaaggtgcatgccaccacacccagccattttttgtattttttgtagagatggggtttcactatgttcacttactttttttcttcctcctcttagcaagcattaattaattgagggcctatgatgtgccaggcactgtgttaggtattaaaagtacagagaagagttaaaaataaatttgaagtctttgtggatagacacactggcataagtacttgaaaaacaaatacaactaagatggaggggtgcatcaggaaatggatgctgatcactatagcaaatataaagggaataaatgtaaagaaattgccagtttgtgcttagaattgaggtgaatct

SEQ ID NO: 127920 - DNA, 532 bp, Homo sapiens
ctgttgggggaagaaggatataaaattttatttaggaggcacataatttgaagtcatgccatttgatttgattattaatttctgccattttggcctttactgagggaaacaaagtggcattttctactatttcttgttggttggttctttcatataatctctttcgctaagagtcctctagaaagtaataaagattgtagcacctaaaatgtttctactcatttgttacatagaaataaaataataaaccattttatgcaacaagctacaagagaaaaaaaaatgcatcattgagcaagatcatcagaatatcacaaagaaagcttggctttcccaggtggtagtcatttgtttctcttttaaaattaatagccaaacagtttagaaacttcgtcttccctacattcacagggtaacattggatattgtactgcagtgttaaaaagagggtttaccagatagtccaagacactagcgaaaggggagataasttttgatcagttataagagaaatagaggctttttttgttaa

SEQ ID NO: 127921 - DNA, 612 bp, Homo sapiens
ctgaaaacattagtatcattttgatgaagatgatgtgaggtgactacctcgatcactcacttattcttataaaaaggacttaaagggcaagtggggaggaaatttacctggtattaaactgtatggcttaaagttgtttaaggcctgcttccattctgattggtctgtgctggtttttaaatgttatcagttttattcctgaaataatgttgataattctaaagtttcacaatggccttccactcacaacaatataacaaacctcagattcacgcatttttcctctccaacctactgaaaattttctatataattcaataaaactcatgtatatcagtgctcacaagaaagaaaataaattccaggggctacaaacaaaagcactggaaactggaatccacagtgacaagctggcaatgacaccctcgtttgttatctgaagacctttggctaaagagaggaccatgatcagaatacttgacrccaaggagacaagatgctgggctcactccaaacagtgaaataaaagaggttctgctgaccaaatccaggagccttcaatgaaaaagtgagctagcaaatgtcttcccaccggaaaaggactctacagtg

SEQ ID NO: 127922 - DNA, 604 bp, Homo sapiens
tctgcctttgctgacttcagaattcctcattagtattttggcatttaaaattttatttttattttctgttagtatggaactcaagccagtttcttccttgatgaagaacaattgctaagggcctttagagaaacttgggaaacgtgagcacatgtgttctggtgtcttgcaaagctgtctgcccaggtgacctctggaagccccatgataaatgaggcactatggccaggtaggagggaagagaaagctcactgagtcacccagagcagaggtgcaatgaaaggtctactttcaaacacagaagatggtaaactcttgaaaatataaactcttgaaaatataaaagcacatgcrcctatcaaggatataaagtgaaaagtggtggtggggaagcaagggaagactgtgattttgaaacagggtattacataatcagagtggcagaaatgactttagagagccttggaaggctggcgatgagggtagtgaaattatgaaacaagatagacaaaaaaattaattatcataatatttatttaagcaattcatttaggaatagtggacagggtaaatgtgtaaggggtgagaatcacagaaatgagaa

SEQ ID NO: 127923 - DNA, 586 bp, Homo sapiens
agtgcccacaaatggtcttgttttgcataccagagaaagagagcatctttacttctactccagaaaccctggctaagttactttttttgcaaagacattgccaaaatcaggatgcacagggcccctgaagtgcgagctggtctgatgggttccaggaaacgtaagaaagctggggtagctcgaaagagtgagcaagagacagaaagggagctgagcctgcaggtcacgtgtgcttggccatgacaatctcagcccagcatagaatggacttggactttttagcttttcttagggagaagtcactggaggttttaaagcagaggagggatccttgtggctactgtatatttaagattccaaagaggaacaagaatagaagcagactattgcaataatccgggagaaacatgacaggctagagcagtaccaggagagaaggtgagaagcggtaaggttctggatgtatttgaagggaaagcaaacaggatttgatgacagataagtgtggagtgtttgaragcaaaaagtaaataatactatgactttttgaacggagcaactggaaaaatgtatttacccataactg

SEQ ID NO: 127924 - DNA, 541 bp, Homo sapiens
aaattgcaaaactagttctatgtttaatgtttttattcatgaataagtgtcttgttttctatccttattaactttttttcttgctaataatgaatttattttatttcttataccacaggggttttcataagtaactttcaatcctttttggagcaaagcagaagttatttggtaaatttattaatgtaaatattcttttattctcttttttttytgttccttctccatttttgtagttcaacacttttcaaattagtcttaattatttgatctgaccattgccataacctgtaattggataaaaatgtctaagtactggtctcggtttgacacttagaagcagtaacctcagaatgttccttaactctacttaatgaaaagagaactgtccttataatgaggacaaagggataaataaataaaatcataaatatgaaaagtcttaacatgatacctgaatcatactgtatccttaataaatgctctttgattcgtgaattataaaatatgattttttccatcctgacctaatatttgtcat

SEQ ID NO: 127925 - DNA, 540 bp, Homo sapiens
gccatggggcattttttttccatttaattataatgagaagttttcttgaaatatttagctatccacattgtcttctgaaatacaataaagaatttaaattattccattagcttttaggggatggactgcccatccctaagtttttgaagaaaaacaccctaacttttaaatgtacttatttctaaagttttgctgtttccttatttgtctctgaaattttgccagtatctgctgatatttttgtagtatttataatcaccagaactcccaacagttcatatcctggaactaaagatgggtgaaaccagttgtattggaggygggttggtgaacatcttgaactatttttcaaattgtgtttggggttcaaggaaaaccaaaacacattttcatattttaccaagaactttttttcctcctaattttaaaatgatgtctattttaagggaaatttaatccatatgttactaaattccttacacttacctcatcaaaatttgtttctgtaagagctatttgatgtgcaagaagccttgggag

SEQ ID NO: 127926 - DNA, 689 bp, Homo sapiens
attagcttacacattattagctggaccaaggggatgtttatggctgtttcccctctgaggctgggcggtgttctctcctgttatgtcctgactgtgggggtagggggtccagcctctgcacaggtgtcccaggacatcaccaacaatagcagattaaggcagatacaggtaaacaacctggagtatcttggcttcattgtataattaaggcgcctctggaaggaaatatgtgtacagctagcttcccaaagtctaaaagtggtagtcagagttcttaatttctatgctaaatcctcatgagcactacctggtagkcctgaagctggtgccaaaaccacagggaccaggtccccttgcttgggaaagggaacaactatcttcacttcttcctgattctttattatctacagaacttgggcaaagttcacaggggagtaactttcagcagggaaagaaccatagatcttggcaggaagacttggggcaaagcccctgaggaaaggaattgacttgtgaactccaagaacagccatgccaagtaatagatgaaagtcactcacagtgttaaatattaatttgttaccccaaaggcttcagaaaagtcttgttgaaattcagaaaattcagaattacagtattcaagatttaatttcaccaaataaaaggtttgaggggatactgctgtgtga

SEQ ID NO: 127927 - DNA, 417 bp, Homo sapiens
aattcccccaacgcagtttccccagtgatgatgggttgaagctatggaatcaccctgtggttgattatattgttcatactgtcaacttcccccctaagtgcataatatacatctccatctctgcaaagccttcctgttttatttacagggttttcctgtgacttgctttgsctagtggatcaggggagaatatgaaatttgcactctcaaacagaagtagtaaatgcacttgggtgattggtctcgaaccctttcatagacgacaagtatatctcagactgtggccactcctctagcttggcttccgaataagagctcagccagctcatgttactcacagtcttcatagaacatgaaaatgcaagaaacactgttggcataagccccttcgaaattgagattgttactgaagtaaaa

SEQ ID NO: 127928 - DNA, 546 bp, Homo sapiens
ccaagagaagatgtgaaaaatataggcaagaagtagctaaggtccacggtcaagagaaatttgattgtgcaggcaactgaaggggcaaattaagggcaaattaccagcaaaaaagtcaaattaccagcatcaaagtcaggtgcaaaggaggtagaacaattacagtaactatgtcaatctttttgttatattagtattatctgcccaatgcctagaatayagtgggtccctaatagttattagttccttttttcttcctctttctcattctctgaatttatttttatacttaagggattagttaccaccaaaaatgtgtatgtatcaatttgattcttactgaaagtagacaccatgcaaattacaaatttcaaaaataaattatagctctgccaatgctgtgcagtggccttagattatagctactctatagcctaagcttcctgtactctataccatgaaatctttatctttcaatatggataatagctcccccaaataatacatagcacagtgcttgcagcatgattttggactagagcagat

SEQ ID NO: 127929 - DNA, 546 bp, Homo sapiens
ccaagagaagatgtgaaaaatataggcaagaagtagctaaggtccacggtcaagagaaatttgattgtgcaggcaactgaaggggcaaattaagggcaaattaccagcaaaaaagtcaaattaccagcatcaaagtcaggtgcaaaggaggtagaacaattacagtaactatgtcaatctttttgttatattagtattatctgcccaatgcctagaatacagtgggtccctaatagttattagttccttttttcttcctctttctcattctctgaatttatttttatacttaagggattagttaccaccaaaaatgtgtatgtatcaatttgattcttactgaaagtagacaccatgcaaattacaaatttcaaaaataaattatagctctgccaatgctgtgcagtggccttagattatagctactctatagcctaagcttcctgtactctataccatgaaatctttatctttcaatatggataatagctcccccaaataatayatagcacagtgcttgcagcatgattttggactagagcagat

SEQ ID NO: 127930 - DNA, 625 bp, Homo sapiens
atgtgtagtttgttacacaggtatacatgtgccatggtggtttactgcacctatcaacctgtcttctaggttttaagccctgcatgcattaggtatttgtccyaatgctctccctccccttgctatccactccccaacaggccctggtgtgtgatgctaccctccctgtgtccatacgttctcattgttcaactcccacttatgagtgagaacatgtggtgtttggttttctgttcctgtgttagtttgctgagaatgatggtttccagtttcatccatgtctgggtgtatactaaaatgaccttatttttctatgattcagtttaggtttccttataagtccccatgcctacaaatagcagaatctttatctcaggaaatttggggccactccccacgtttctcaggggttgattccgagtgctagctggtgctgtctgatacaactttctgtggtgatggaaatatatttgcactgctccatgcagtagcccccagccatatatggctaatgaacacttgaaatgtggctaatgcaactgagctaatgccttgttaattttatttaattttaaattaattttaatttaaacggccacacgtagcaatggctaccatactggac

SEQ ID NO: 127931 - DNA, 625 bp, Homo sapiens
atgtgtagtttgttacacaggtatacatgtgccatggtggtttactgcacctatcaacctgtcttctaggttttaagccctgcatgcattaggtatttgtcctaatgctctccctccccttgctatccactccccaacaggccctggtgtgtgatgctaccctccctgtgtccatacgttctcattgttcaactcccacttatgagtgagaacatgtggtgtttggttttctgttcctgtgttagtttgctgagaatgatggtttccagtttcatccatgtctgggtgtatactaaaatgaccttatttttctatgattcagtttaggtttccttataagtccccatgcctacaaatagcagaatctttatctcaggaaatttggggccactccccacrtttctcaggggttgattccgagtgctagctggtgctgtctgatacaactttctgtggtgatggaaatatatttgcactgctccatgcagtagcccccagccatatatggctaatgaacacttgaaatgtggctaatgcaactgagctaatgccttgttaattttatttaattttaaattaattttaatttaaacggccacacgtagcaatggctaccatactggac

SEQ ID NO: 127932 - DNA, 596 bp, Homo sapiens
ccatctaaggctcagaagagaagcttgggtaaggcattttgagaaacgaggaccttcaaaagaagctgtataggtgaattttaaaaactattgtgatggttaattctaagtgtcaacttgattgaaggatacaaagtattgatcctgggtgtgtctgagaggaaaggagattaacatttgaggctgtgggctgggaaaggcagacctacctttaatctgggtgggcacaatttaattagttgccagcatggctagaatataagcaggcagaagaatgtgaaaagagagactggcctagcctcccaacctcgatctttctcccctgctggatgcttgctgcccttgaacatcagactccaagttcttcagttttggaactcggactggctctccttgttcctcagccygcagatggcctattgtgggaccttgtggtcgtgtgagttaatatttagtaaactcccctttttgtgtgtacatacatatatatatatatatatatatatgtatatatatatatatatatatatatataaaattatatatgtaatattaccccctctcctcccagatatataaaatacatagcatatata

SEQ ID NO: 127933 - DNA, 596 bp, Homo sapiens
ccatctaaggctcagaagagaagcttgggtaaggcattttgagaaacgaggaccttcaaaagaagctgtataggtgaattttaaaaactattgtgatggttaattctaagtgtcaacttgattgaaggatacaaagtattgatcctgggtgtgtctgagaggaaaggagattaacatttgaggctgtgggctgggaaaggcagacctacctttaatctgggtgggcacaatttaattagttgccagcatggctagaatataagcaggcagaagaatgtgaaaagagagactggcctagcctcccaacctcgatctttctcccctgctggatgcttgctgcccttgaacatcagactccaagttcttcagttttggaactcggactggctctccttgttcctcagcctgcagatggcctattgtgggaccttgtggtcgtgtgagttaatatttagtaaactcccctttttgtgtgtacatacatatatatatatatatatatatatgtatatatatatatatatatatatatatawaattatatatgtaatattaccccctctcctcccagatatataaaatacatagcatatata

SEQ ID NO: 127934 - DNA, 602 bp, Homo sapiens
gggcttaatacctacacctaggtgatgggttgataggtgcagcgaaccaccatggcacatatttacctgtgtaacaaacctgcacatcctgcacatgtaccccagaacttaaagaaaaaaatgcccgaacaatgaagatccataaaaaaagagaccccaatttcaattcttttagataaacacatacaattgagattgctggaccctatagtagttctacttttaatttttttgaggaaccactatactgtttttygtagaggctgcaccattttacatttccaccaacagtgctcaagggttccaggtactctacatccttgccatcattcgttgtcttttaaaaaataatagccatcctaacagatgtgaggtgatatctcattgtgctttgatttgtatttctctgaagatttttcagggatacaggagaaaaatatttgaagacaaatgctataaatgttaccaagaacctactaaggatactgtaatttttttctttgagataattttattattctaaaatgaatatataagttataatttaaataataataggattataataaaaattagtcatcctctactccaggtgtcagcaa

SEQ ID NO: 127935 - DNA, 533 bp, Homo sapiens
gggtgtgagggatatggcaaggacagaagcaggaagaccatattccaggtcacagatgtgggaatgtggccacttggatcagtgaagtcgcagagtgggtagtgagaagttgaattytggatttctttttgtttgtgaaaacagacccaataagatgttctggcacatgagatataatggaaaatactcctcggctgtttaaattattataatcaatcaaatttctatgccctaaatattattctccctaaaagcccttttcgtcaaaagtagttctattgcctgaaccattctcctatacactctatgataccaaggacttcatggcctgctttggtgaacattgaacttatgattcttaacaactgcaaagggtttttgaatgttttaaacaatgttacattctgccatcactgataaatcactttcagagttggaatgcttcaactcaaggccactagatggtgacctctactaaattttaataccagtggatggaatttgaggtattgattatatttactaaaaatcat

SEQ ID NO: 127936 - DNA, 612 bp, Homo sapiens
ggttaccattagcaaaatgtggctgaacttcagtaaaaaataatgatcaaaacaatatattataaggcataaaattttaaaataaatagagttctgggccgggcgcagtggcccacgcctgtaattccagcactttgggaggccgaagctggtggatcacttgaggtcaggagttcaacaccaacctgaccaacatgacaaaaccctgtctctactaaaaatacaaaattagctgggtgtgttggtrcatgcctataatcccagctacttgagaggctgagataggagaatcgcttgaacccgggaggcagaggttgcagtgagcagagatcgtgccatcgcactccagcctgggcaacaagggcaaaacttcgtctcaaatatataaataaacaaataaataaagttctgaatgattgatattcaaaaaaggcagggaaaggaaggaaagcacactcttcttgacaaaagaatgacagctaatacgtccagaagaaattctggaattagaaaattactgttttggaattcccagtggaatcattgattcaggcaacaatcatcaatgtatgctaaaaccattgggtcaaattttcttgtaaaacaggatat

SEQ ID NO: 127937 - DNA, 612 bp, Homo sapiens
ggttaccattagcaaaatgtggctgaacttcagtaaaaaataatgatcaaaacaatatattataaggcataaaattttaaaataaatagagttctgggccgggcgcagtggcccacgcctgtaattccagcactttgggaggccgaagctggtggatcacttgaggtcaggagttcaacaccaacctgaccaacatgacaaaaccctgtctctactaaaaatacaaaattagctgggtgtgttggtacatgcctataatcccagctacytgagaggctgagataggagaatcgcttgaacccgggaggcagaggttgcagtgagcagagatcgtgccatcgcactccagcctgggcaacaagggcaaaacttcgtctcaaatatataaataaacaaataaataaagttctgaatgattgatattcaaaaaaggcagggaaaggaaggaaagcacactcttcttgacaaaagaatgacagctaatacgtccagaagaaattctggaattagaaaattactgttttggaattcccagtggaatcattgattcaggcaacaatcatcaatgtatgctaaaaccattgggtcaaattttcttgtaaaacaggatat

SEQ ID NO: 127938 - DNA, 612 bp, Homo sapiens
ggttaccattagcaaaatgtggctgaacttcagtaaaaaataatgatcaaaacaatatattataaggcataaaattttaaaataaatagagttctgggccgggcgcagtggcccacgcctgtaattccagcactttgggaggccgaagctggtggatcacttgaggtcaggagttcaacaccaacctgaccaacatgacaaaaccctgtctctactaaaaatacaaaattagctgggtgtgttggtacatgcctataatcccagctacttgagaggctgagataggagaatcgcttgaacccgggaggcrgaggttgcagtgagcagagatcgtgccatcgcactccagcctgggcaacaagggcaaaacttcgtctcaaatatataaataaacaaataaataaagttctgaatgattgatattcaaaaaaggcagggaaaggaaggaaagcacactcttcttgacaaaagaatgacagctaatacgtccagaagaaattctggaattagaaaattactgttttggaattcccagtggaatcattgattcaggcaacaatcatcaatgtatgctaaaaccattgggtcaaattttcttgtaaaacaggatat

SEQ ID NO: 127939 - DNA, 631 bp, Homo sapiens
agtgttaagagggaaattgatagcactaaatgcccacatcaaaaagctagaaagatctcaaagtgataccctaacatcacaactaaaagaactagagagccatgagcaaacaaaccccaaagatagcagaggccaagaaataatcaaaagcagagatgaactgaaggagataaggacatgaaaacccgttcaaaaaatcagcgaatccaggagctggtttttttgaaaaaataaaataaaatagaccattarctagactaataaagaagaaaagagagaaaaatcaagtagacacaacaaaaaataataaagggaatatcaccactgatcccaagaaaatacaaacaaccatcagagaacactataaacatctctatgtaaataaactaaaaaatcaagaagaaatggataaattcctggacacatacaccctcccaggactgaaccaggaagaagttgaatctctgaataggccaataataaggtctgaaattgaagcagtaatgtataaccttccaaccaaaaaaaacaaaaaaagcccaggatcagatggatttacagctgaattctaccagaggtacaaagaggagctggtaccatttcttttgaaactattccaaacaattgaaaa

SEQ ID NO: 127940 - DNA, 525 bp, Homo sapiens
ttatagctcccaaattaggaagagaagagcagaaatcctctggggcatttaaccatctggcagaattgttgctgcacccttatcccagttataagacagtcaaaatgactatttcctaaatattgtgagtgtatgaaatgtgaaattaaagcaaaaactggagacttttaatgtatttctttaatttgaaatgttttgtggattgtgaaataaaaataaatttatgtcaagttttattcaaaattcatttatgaaataatgccaacactgttctaaaaagcaaggagtcaagaaattataaaattcagattaaatcaggaaaacacattagatggaaaattatactatagaatttgagcttattaaaatttattgcataagaaaagtctcctttttactttggtatttaaacctaacctagactatttgtaaatgaatrgactgagacacaaatcctttttcatataaaaatgtataatggagaaagggaacatcacaaataaattttacaagatttttaaaatt

SEQ ID NO: 127941 - DNA, 563 bp, Homo sapiens
tttgtcccttaagccattgagtcacttcagaggatcatcttaagaaacattagaatcatagaatcttctcattaaaagggactagcaaggtcatctaccttgaaatttctctaaagctgtaattcatcaatgaccatttactttgtaatagatcatagttctgaagctctgctgcaattcttctcatttctctcagtgcaagctggtgttttcttctccaaaaggctctatatttcataggagtgattgattagttggtttttcagagcaaaacagtctgaattcaatcctttctttgccacttaatagctatgcaatcttgggcaaatgtactratacctctaaatcttagtatttctcatttctaaaacagagatgcttaatcacataacaaaagtaggagaagctacgatcatgctgtatagtagcaaagcttcaataagtagtaatcatcattgtatagtaaacaattacttgagaattctctctccccatcatgttcccttgctggcaatttcttgatgctggttttaattctctaacttctttcaagttcatttctt

SEQ ID NO: 127942 - DNA, 524 bp, Homo sapiens
cttgcacaaggcaaagggtcacttggagcaaatctcaacagatgaacaaaaaaatggggcagggaggtggagataaagggaaaggataggcttctaagaggcagatatcaatacatgcaaagtatagtaaacaccatagtgtatattgcaacagacaggaatttactcacaactatagaacacacaraaaatgtaagctttagaattttttaaacgaattttcttttgctctggacgcctcctttcttccctatcattttcactggagagtagaaagaatactgaataagttctaaataagcccccgctgccttgacataaactgggtctctttggagaagcttgtatatttcaaggtttcttcacccttcttcgtctttgtttctcctctggtagcctccagatggcacaaggaaagctcatgtaatttcatcgtggaaggaaggggtgtcctgcctctgtgtggtccttctctacaggattttactgatctccacttgagatgtcattttattgactgatat

SEQ ID NO: 127943 - DNA, 524 bp, Homo sapiens
cttgcacaaggcaaagggtcacttggagcaaatctcaacagatgaacaaaaaaatggggcagggaggtggagataaagggaaaggataggcttctaagaggcagatatcaatacatgcaaagtatagtaaacaccatagtgtatattgcaacagacaggaatttactcacaactatagaacacacagaaaatgtaagctttaraattttttaaacgaattttcttttgctctggacgcctcctttcttccctatcattttcactggagagtagaaagaatactgaataagttctaaataagcccccgctgccttgacataaactgggtctctttggagaagcttgtatatttcaaggtttcttcacccttcttcgtctttgtttctcctctggtagcctccagatggcacaaggaaagctcatgtaatttcatcgtggaaggaaggggtgtcctgcctctgtgtggtccttctctacaggattttactgatctccacttgagatgtcattttattgactgatat

SEQ ID NO: 127944 - DNA, 567 bp, Homo sapiens
ttattcattaattggataggttgtaaaactgtttcttagtgaaactaactagtttgggaggatagtatatcttaatggattttaaaggagactttagaatttaggaattacattgtccaaaactaattgtgtatctaatggatgagtaggatctctttctcagcaactcactctatggcacaaagaactcatatccatgttaattgcccccagtgattgtggttttaaagaaagtgaaggaaacctgaagaattctatgttgcaaagtcttgtcaaaatgatctcaaagtccatacagattccaaaaagtgagatgattccaatacttaacatgcccatttagaaaaataaattatttggtccaaaaatgttaaacaaaaaagaaagtatactaagcttaattacattgaatgtaaacaaccgtrgattctcaggtcagttgacgctaaaggacaattttgatgtgtaattacaatgcctacaaacagacatgctttctgtttactaattttgagtgttttcaatttgccatggacaattggacaattgctttgtattgcaaaattt

SEQ ID NO: 127945 - DNA, 533 bp, Homo sapiens
aatttacagacaaagcatatattttaagcaattcataactcctgtaatttgagggaggcaatgttttgtaggaggaaaacagtgacataagaaaaaaagaatatttgcagttttattcttatttattttggyaattattggagagattttgaatcactctttttatctgtgaaaaaaaatttcataccatgatttctaaactgtttcttagttctaaaaattttactctagatatgtacatttaccttttaacacctaatctacatatcttagaatataattctgtcattatccagtacaaaatattgttttcccacataattagataatgagttcaagttatatacatctgtaaatacatgatatggttggctgtatccccacccaaaatctcatcttgaattgtaatccccataatcctcatgtgtcaagggagagaccaggtggaaataattgaatcatgggggcggtttcccccatgctgttctcatgacagtgggtgagttctcaggagatctgatggtttcataagt

SEQ ID NO: 127946 - DNA, 545 bp, Homo sapiens
gatttgggtgaggacacaaagccaaaccatatcagtgaccctcccagctgagtaaaatggctttttggacttaaataggaaaaatctgtttctacctgctagctctttattgcagtgagggaatacaactattgattaaggaccacttaatgagatcattttatctgtggcctttaattttctgcaaagcaacgtagctataattttaatcaacactacctctcatcattaatgtcaaagataccataatttgattagattaaatgtgtaaattgaagagagaaaactgtattagtccattgctgataaagacayacctgagactggacaatttccaaaagaaagaggttttttggacttacagttccacatggctggggaggcctcatgatcatggcagaaggcaaggaggagcaagttacatatttggtggatgacagcaggcaaaaaaggagcttgtgcagggcaactcccatttttaaacccatcagatctcatggtacccattcactatcatgagaacagcacaggaaagacccactccc

SEQ ID NO: 127947 - DNA, 589 bp, Homo sapiens
ctgggtacctcttgtttacatttctggacccctgtttatttcccccatcattctgctgtatcttgctttcttggctctaaaggatccatcttgtatccttactgcttgattcatagtagatgctcaataaatggtggttttcatttgaatttgagaagactttctgaatgtctcttgaaccaccttctagctatccttgttagggttccacgattcctagaaatgtggacctcatgrctagtagggcatggaggggccagtgggatggtctgtgtgttgggcctgatgtgtgggctcaaggccagtgccagggcagcaaggtcacaatgatttccttgagtagcacccttgggctggagatgggttaggtggggtgcccctttcttgggacatgttctggataatcagatatcttgtgttcttgatgcaggtaatatagctgctgctggaagtgacgagaagtgcaagctggcgatgcagaggggtgcgcagtccagcgtgaactacagtcagggcagcctgaaggatgcagtaaggaagctggtgggcgagggcggggtgaatgtggccatcgacatggtgggaggag

SEQ ID NO: 127948 - DNA, 561 bp, Homo sapiens
tcggttgctacaacaccatggttatctgataattgtttagatttagtacacttaccagaaggatgctggcattttggcactttggttagttttgatttctcatatgaactccttccttttgcttttctccctcctcccctaatttacttccattttaatttctctatctcataaaacaccacttatcttactcatttgaattgccagttcctttttcctcacagcactaaagccctgtaggaaagaaagatgttgctgcagaaccatgaacgtgatcagaaacacaaataatcaatgtcaaagaaatcctattagaacctgataagacacccacttttcttccgtaaacttgagaggttagtagcactatttagttctctgacctgaggttctgaggttctgatggrtagatttgagcttactacttttcctaggatgtaaatactagttttgttatcatcactgatgctagacaccctttccccttcctgcggtactaggtatcttctcctggtcttgtggctgaagcacaatagaatccacatcatctcttgattagag

SEQ ID NO: 127949 - DNA, 619 bp, Homo sapiens
gaagtaaatgcttctgttagcccctattttgagaaaaatattgatgcaaagagatgttaaataacttggccaaagttactcatawggtgtgtgagctgagattgtataaaggccattgtttaatagcctccgtgcttgcattcactgtgagactgattcaatactcataaatatttactactagtttaaagtagctctctgccattacatttctgcctttcaggactcaaccatataggcaaaagctacccttcaatgaaccagtgtgacttgagccatagtaacccccaaccaggcttattagttcatacttaatttcactttacgaagaatcctcagaatctcctcatcacttgagtaatctatctctcagccattttctataagattacttattttctatatgatacacttgagaatgacacatcaatgctagagacaggatccatatggaagaaactttcctttttttatggagaaaaagatgaacccttcttgtgtgagacaaacctaccccatttttcccaagacccagagtgaaattattttgtcaggctggactctctaataggtaacaaactctacacagctcaatgggcaggtatattatacactaatt

SEQ ID NO: 127950 - DNA, 656 bp, Homo sapiens
tgtaaaatttaacttaattttaccttctgtagaattctaagttgatgttatataatagaaatatcttttgagtggtcaggaatattttacctgttgcttttgaaattactgtagaaaaagtaaggaataagaaatctacattcaaattttacatacttcaagaaaatttcagaagcttgttaccttcaaatattctactgccaagtatttcaaagtgggttctggataactttaagtgatgatgtttctaatctgatggtgttatagatattttcagcttgctttattctcctcatttctctctctctcttttctttacaatgaagggcaagcaaccttccttaaggcatcactgcattaaataaattcatctgtttagtgtgaatattaatacaaaggacaaagttagctttgccccagtagtggcctgaaaacacctacctaatrcctgttgttaggctaaatgtttcacagccaaccgaactcaactaaccacgattgaattaaatggatgaaagatggagagaaggacaatttacctaagaaaataattaaaatgagttcttagagcttacctgaggtagacttttatctttttaaatgccaaggaaagtcaaaattataaatgagtaaatatatgatgtttgctaaaaaaa

SEQ ID NO: 127951 - DNA, 627 bp, Homo sapiens
ctgtttatggacatgggctgcttccacctcttggctatggtgaatatgctgttatgagcatggttgtacaaatatcacttcaggactgctttcaaatcatttggatatatactcagaagaggattgctgaatcagatggtaattccatttttaatttttagagaaacgactaaactgttttagcattttacattcccaccaacaatgtacagggatttcaatatctccacatcctgaccagcatttgctgctctctcttgttttttaatagtagccattctaatgggtataagatggtatcttattgyggttttgatttgcattgcttgtgttttttatttgcattttcctaatgattagtaatgttgaacatctttttgtatgtttgctaaacaaaaggcctgcgcccgtttttgaactgggttgtaaataaatacataattgaaagtaaaagataaaaaaagtttaaataaaaatttaatgaattaatataatcacaataatataaaatctacttaaaataatgtaaatcaaagccttagaataagggatgctaaatccacaaagaaactaggagaaaaataaattttgtttaaagaagcatatgaaagatataaaaataggtaa

SEQ ID NO: 127952 - DNA, 627 bp, Homo sapiens
ctgtttatggacatgggctgcttccacctcttggctatggtgaatatgctgttatgagcatggttgtacaaatatcacttcaggactgctttcaaatcatttggatatatactcagaagaggattgctgaatcagatggtaattccatttttaatttttagagaaacgactaaactgttttagcattttacattcccaccaacaatgtacagggatttcaatatctccacatcctgaccagcatttgctgctctctcttgttttttaatagtagccattctaatgggtataagatggtatcttattgtggttttgatttgcattgcttgtgttttttatttgcattttcctaatgattagtaatgttgaacatctttttgtatgtttgctaaacaaaaggcctgcgcccgtttttgaactgggttgtaaataaatacataattgaaagtaaaagataaaaaaagtttaaataaaaatttaatgaattaatataatcacaataatataaaatctayttaaaataatgtaaatcaaagccttagaataagggatgctaaatccacaaagaaactaggagaaaaataaattttgtttaaagaagcatatgaaagatataaaaataggtaa

SEQ ID NO: 127953 - DNA, 582 bp, Homo sapiens
caggcttaaatgtttcatttagggcttgctgttttaattggataactccaacacctggcagcccagatctttctcccagcacagccaacctcctgacagagcattttaccaagaggataaagggtgtgtttatatttgaaaagttacatatgactaaaattcactaaacatataaattgcatgtcaggttcaatgaaagtctaataatataaatatgaatacaaatctatccrttctcttagagaaaagcataataaactacccaccatttaggaagcttagagctacactagcagaattaacaaaacaaagcctatatagaaaagaacagtgaagaattttctaatgaaggattggaactcctggtatgtatacatggcatctgaagtaggttttgtaaaggataagtataattttttcagattataaagaggcagggtattttaatcatatcaaagtgtatgtaccaaaaaaggcatagaagtagataaacatgacatgttggaatcagcagtaatctaaatgaatgatagttttattaagtaaagggtgtgaaaaatgacgatacatatgtaatgttag

SEQ ID NO: 127954 - DNA, 580 bp, Homo sapiens
tgataatggcaaactgagtaactaggttatgggatatacaatatatttaaaagaactataggtttagtttagttttgtcctaaacatttgaaaggcaaacacagaagamatacaacatagaaaggacattgatattggaactggaaagacttatatttgaattctcattctgccacccctaaaataatactcacaacttgagctaaattgctttacctccctgaatctcagccttcaaagctgaaaccagttcaggaggtatacttcagtagaactattttgacatttaatgaaataatatatggaaactgcctagcactgtgtctgggcattcctttgtttcttataagtgtgagcctcaattcagttgactgtaatttacacatacacaccagcctgaacaattccttctgatgtttattgagcacaaccctgtaagaggcattctcctaggtaccagctgtctaaatataggaaggaggctgcattctttgctctcaaggaatcatagtctaatcagggaaatagacttataaacagtgattgcaaaagtcaaaccatgagaagagttctaagcagc

SEQ ID NO: 127955 - DNA, 594 bp, Homo sapiens
tggggtggtcagtcatcgacgtacacaggtgccctgcctgctggctgctctccccttgcagaccgccaaaacacgcagaaaacaagacaagcaaccccaccgcgttccctgccattatcataactaccgcttgttgagcatccatcatgagctcagcactttccaagcaatatttctgatcctcataacaagccttcaaaatgggtctcattgctccctttccatgaatgagaaaactgaggctcagagaggctgtgtggtggctggcggggaggctacctggtggtcaggtcccagaggaaagtgggagtgggacgccatgaagcaggagccctgggtctgccttactttgcacagttgcaggatatgtttagtgagaggtgcagtcyttcacgaatttacaaaaacagaatctagttttggaaataacaggtgagattcttggctcaagaaagcccacgtgacagagagagatggaaggagagtcagggcaggagccaactggaagctgacctgagcccagcacacggtggccttgggaagctggagaaggaggcagggggtactcagggccaggttactggctcaggtcca

SEQ ID NO: 127956 - DNA, 650 bp, Homo sapiens
aagctactcagtgaggtagtttctattatctccatttcacacagtgctgaagatgctggagcctcatgctctggtttggtttaaattagatctcagaggacacagtttgtcctaaggagtaagtgtttctctcagagttcaagagatggagcttttctttctctgagcacttactacatgccaagcataggctaagcagtttacaagcattattttgttgaattcttacatccatttacaagtatcattatcctttcttacagagacaagaaagaaatgtctgaaaagtctaagctgccatggtgcaggaggagagggattaaagaagaggctggtatatatcttcctttatttatatctttattttctttcaatacattttgtagttctaggatagaagaattatacctcttctgttcaacttttccctgtgtcattcrtataagtgtgatgcaaatgttataatcatttaaatgttatgctctatttgtttttgatacgtagaaatctaattgacttttacatgtggacacagtatcaagtgactttgctaaagtcacttgtttattcttataattcgtttttgatattttaggtaaatcatatgttatctacgaataataaaaaggaatcattccttctcaaaaata

SEQ ID NO: 127957 - DNA, 403 bp, Homo sapiens
gaattcagagtcacagtggacttcaaatctccttcttatcacatactagttatttctyaaacagttggagtaagagctagattttctgttatttgtgacgggtgcctgagccgtttgggaaaaggtgaccctagaaggccagaggaattgggaatgcctgggttgcctgtggagagttgagtaacagtctccatgtgctgggcacctgaagaaattactcctgaaggttaatcctaaagtgtttcacttcattatttcccatgggaggagaaactctagctgaacttagcgacctatgtaggacttggggaagggcttagcagacgtttagggtctttgcaatgaatctgaccctataagtcagctgcagcttctcattggtctatacatacctgtctgggta

SEQ ID NO: 127958 - DNA, 599 bp, Homo sapiens
ttcagtgtagtaaaagctggtacatacccaaaggggaaagaaaaaaaggaacccacaagaatctgtgtcgttatggaaaagtgaaaagcaaagagtttgagaaaggcaaacactgccatgactcatttataaaaaaatcataatgagctgaatcattctagacattctttttacatggatgcactttttcaaactttttttgtcaactacctggtcaagtctcagtaactatacactctgttcccatttctagcaaacaaaaatatatacgatctcaatctttaacaaattaagctttacawtgcaaatttcccatctttttcattgatatatttgggatcgaagtaggaagaaaagtgtcactgtcacttttcttagctgtaggggtcataatttcctattttgttttccccaaaattaaatcaatagcccaaaagtgcctttgtcatcttttgtaacattcttcccaagagccccccaaaacaatagaacaaacaagacattggagcagtcactgtttccatcagtgcagccctatctcaaaaatgctgggggagtcacagcatcattagctgccaggaatcctggtctagtgcaga

SEQ ID NO: 127959 - DNA, 553 bp, Homo sapiens
tatgaagctcatttgtttcttaagtggcccataatttgtatagagggaatacaaaagcatatcagaatgctagtattattatttgtatgcatattacatactcttttaattaacaaattcaacttcacctgttatgacaaaccataacataagaagcttatgtatagagatgtakgggaatgagtccatttataataacatacctagaagtaacatactgttgacttagtgtagtgaaataacctaaaaatactggccacaagattcattataaatcaaaaagttctttacacaatgactgattgatttgagaacagaaggatgctgggtgttttgttactaaggctatttctggcagtcatccaggaattacaactgcacaaccttacaaacagcatagaaattgactattttaacaaagggtctcaccaggataatgagtagtgcacattaaatctcactgtgcattgataagctctctttgaactttgctaagcttccaacaatggtgacaggcctctggcactttcagaataagtgggccctgaatggt

SEQ ID NO: 127960 - DNA, 597 bp, Homo sapiens
ggcaagaatatatattcctcatagcttgatttcccaccataaatcaaatttagaaattatataaatgctaaatgttcatggtagtttgttctagatattactctcaatttttactgactacctgaggattaataagaatggtcattgataagcttatttggtaggtgaaaagtactgactaaataatgtaagagctatttgcttatcctaaattaaaattcccttttgcaaatgacatagtgggcataagcgaacattactgtgtgatctaattaaaagatataaataaatataagaggggtaaaaacatctagcttaacaatattaagtctgtcagtgctgaaaatatttctggctttaaaaagcacttgccatttggttacattagggaaattcataaagtaaaattaattttccaagatgaaaacaataaaattgaaaataaagttaaaatataattataatgagaaaaaattctgaaaaataagtgccatgcccyatgaaatatatttgcggaaaataaaagcagaagcaaagttcacttttggctcatcacttaactatatttatagagctgcacgtatttttcaagtcttg

SEQ ID NO: 127961 - DNA, 512 bp, Homo sapiens
tgaatattacatgaatctacaatttcctatattcacaagtattagttatcctcttttgtaaatctcagctttcttagcgtaatattatgamatttcagaaatatcagtggctttaatattttaagtcaaataaaattttagatattcctagattgtcaactacatgattcaaaactttcttccattgaggaaattgtcaccagaggttttgttttgttttaatggcaaaaaacatggacaaagtgatagcaatctatttttgtctattcgggaaccactattttgtcatatgacttgatcaagcctttgaaatactttttttttttttagctctgaaacgcaattaagatgcttaagcactgttgaccttacagaattgttttatatatggtgactctacatcctggtttgcccaggtactgttttcattaataataccctcttgtacaaataaaaaatatcatgatttgtgtaataaattatagggccattctaattataaggattcaatt

SEQ ID NO: 127962 - DNA, 512 bp, Homo sapiens
tgaatattacatgaatctacaatttcctatattcacaagtattagttatcctcttttgtaaatctcagctttcttagcgtaatattatgacatttcagaaatatcagtggctttaatattttaagtcaaataaaattttagatattcctagattgtcaactacatgattcaaaactttcttccattgaggaaattgtcaccagaggttttgttttgttttaatggcaaaaamcatggacaaagtgatagcaatctatttttgtctattcgggaaccactattttgtcatatgacttgatcaagcctttgaaatactttttttttttttagctctgaaacgcaattaagatgcttaagcactgttgaccttacagaattgttttatatatggtgactctacatcctggtttgcccaggtactgttttcattaataataccctcttgtacaaataaaaaatatcatgatttgtgtaataaattatagggccattctaattataaggattcaatt

SEQ ID NO: 127963 - DNA, 512 bp, Homo sapiens
tgaatattacatgaatctacaatttcctatattcacaagtattagttatcctcttttgtaaatctcagctttcttagcgtaatattatgacatttcagaaatatcagtggctttaatattttaagtcaaataaaattttagatattcctagattgtcaactacatgattcaaaactttcttccattgaggaaattgtcaccagaggttttgttttgttttaatggcaaaaaacatggacaaagtgatagcaatctatttttgtctattcgggaaccactattttgtcatatgacttgatcaagcctttgaaatactttttttttttttagctctgaaacgcaattaagatgcttaagcactgttgaccttacagaattgttttatatatggtgactctacatcctggtttgcccaggtactgttttcattaataataccctcttgtacaaataaaaaatatcatgatttgygtaataaattatagggccattctaattataaggattcaatt

SEQ ID NO: 127964 - DNA, 617 bp, Homo sapiens
gtgaggaagcttaatgagatccaagagaaagctaaaaaccaaagaaatcagaagaaaaatcaggatgttaattaaaaattattacagataatttttaaaaaaacagaacttctgaaaataaaaaaaattattgaaataattacaagatacatttggaagccttaccattagagcaagtagaagaaaaataatcagagcttaaagacaagccttctgaattaaccaagtcagacaaaaaaaaaaaaaacaaaacactaaaaaaaggctttgagaaataaaagattacgtaaagtaaccaaacctatgaattataggcattcctgagggagaagaagaaaaagctggggaaacttatttgtgggaacaatccaggaaaatgtccctggtctggccagggaattaggtatccaaatacaacaagctcagtgaatacttggaacatactttacaagatgaaactcattatcgcatatagttrttaggttatccaaagccaatatgaaggaaaaaaatcctaaaagcagcaagagagaagtgtctaatcacttctaaagggactctcaacaaaattttcatcggtgttaaaaacctacattagaaagatagaaatattccaa

SEQ ID NO: 127965 - DNA, 651 bp, Homo sapiens
atacaatcaatgcactgtattaccttttaaattgccacatccctgtacctccaagtgaaggatctcagctggtttatcccaggcatctaaaatgtaaaactgccttatatcatgatttcatttagatcaattcataaactaagaagcatatcagaatatttttgttaaaatagtattatacaaagagaaaaatttaagtccttcatgcccaaaaaagataaatatatttataaacttgaaacaaaatagaaggagtgagtgggatgatgtcatcaacctgcttgggtctgcttctgggcaggcatggctgggaattcagctaatgtggttaatggaacacatgtgttccaggcaaggtggcaaaatggaacttggatcactgtttcacataacagattaagtggaattctgttgcctgggaataagccttataaaaagctccccaagtagggatccaagaaaacaaaaaggaaaagatagttgactgatcagaaactaatctaarttgcctgttctaaaaaaaaaaaaaaaaaaaaggaaaaaatgggagggtaatggttaatttgttacttcagtgcttatacttttaagaactgtaatttttattatttactatatgctctgtttattttcttataactaatacaaatc

SEQ ID NO: 127966 - DNA, 619 bp, Homo sapiens
taaaaacacttgaaagccggcaggcatacccttcgatcaaagcatgtaactctaaactgagggaatggtaaagtttccctccstggaaatctaacaaagacacctacacagcagctatcttattaacttaataagcactaatttaatattccaccattctatgtgaaactcttccaaattgtcttattcatctttgtgatcataatgaacctaacatccctaaggcataggataaaatttgacaccaaggaactgcttagtaaatgtttgctgaatacagtttcaatttaacttactaaaattttcaaagaaaaccactcagagaatttttaattgaaacttttttctagtcttactctagaaataaaatttatttgtacaataatataatttcaattgaactaaccatctagatagaacagattaattctttttacagagttacataactaatagcaatctactgattatatcttataaagcaatggtaaaaattattggtctaatttctggaaacttaaaccaaagattagataacaaagcatattttcatgaatggcacaatgactccaaatttgaatatgttgtgaagctttcttctttatgaagtttcagaaat

SEQ ID NO: 127967 - DNA, 619 bp, Homo sapiens
taaaaacacttgaaagccggcaggcatacccttcgatcaaagcatgtaactctaaactgagggaatggtaaagtttccctccctggaaatctaacaaagacacctacacagcagctatcttattaacttaataagcactaatttaatattccaccattctakgtgaaactcttccaaattgtcttattcatctttgtgatcataatgaacctaacatccctaaggcataggataaaatttgacaccaaggaactgcttagtaaatgtttgctgaatacagtttcaatttaacttactaaaattttcaaagaaaaccactcagagaatttttaattgaaacttttttctagtcttactctagaaataaaatttatttgtacaataatataatttcaattgaactaaccatctagatagaacagattaattctttttacagagttacataactaatagcaatctactgattatatcttataaagcaatggtaaaaattattggtctaatttctggaaacttaaaccaaagattagataacaaagcatattttcatgaatggcacaatgactccaaatttgaatatgttgtgaagctttcttctttatgaagtttcagaaat

SEQ ID NO: 127968 - DNA, 619 bp, Homo sapiens
taaaaacacttgaaagccggcaggcatacccttcgatcaaagcatgtaactctaaactgagggaatggtaaagtttccctccctggaaatctaacaaagacacctacacagcagctatcttattaacttaataagcactaatttaatattccaccattctatgtgaaactcttccaaattgtcttattcatctttgkgatcataatgaacctaacatccctaaggcataggataaaatttgacaccaaggaactgcttagtaaatgtttgctgaatacagtttcaatttaacttactaaaattttcaaagaaaaccactcagagaatttttaattgaaacttttttctagtcttactctagaaataaaatttatttgtacaataatataatttcaattgaactaaccatctagatagaacagattaattctttttacagagttacataactaatagcaatctactgattatatcttataaagcaatggtaaaaattattggtctaatttctggaaacttaaaccaaagattagataacaaagcatattttcatgaatggcacaatgactccaaatttgaatatgttgtgaagctttcttctttatgaagtttcagaaat

SEQ ID NO: 127969 - DNA, 550 bp, Homo sapiens
gaattctactgcatctcataaaaaaaacacacacaaaattataaaacaatcactttataaagtaaaaaacaaaaatttcatatatactgtggtcagcatttgtcattccttgagcagtcagcaacctacatcccttctttgggtaacagcaccctgacttgcttctgaaaactcagcactccttatctctcccaaggctggataacatgacttgggactggctaatcagagtatcatacttccctatttcagtgacttgttcagccatggacatgatatccagtcagggccagagagacccactgacaccggtgataggggcctctcttccactggactgacagctacaaggatgtaggctgaaggtctggcagccaccttgcgaccatgaggtaagcctgcctgaaaatggagttgtcacagaagacatgaattgagagatagaaataaacagcctatgagcccctcttagcagccttgmcctaatgccagtttcacctccctggactcctcaggcaccagaaccaacaatgccaatgacaattggagt

SEQ ID NO: 127970 - DNA, 589 bp, Homo sapiens
ttggtcttgaactagtttttgatacaggctaaattaatggtatcacatatcctgttcaccaacaaaataccaaaaagaaattgcctcaagcatgctgaacatggaaaccacaactctaagattacagccatatcatgctggcccagtgtagtggattccacaaggacattccttgtatattttatttgttccgtaaaaggaaagaatgtgtgcattccaattatttccctcaagtcctctgctggccagaagactattctaatattctatagatctattacattatctttatttggaaatagggaggagtaatttctgtaaacttgtcttgcaaatttctaggagwgtagggagaaaatcttgccaaaactgcctgagacacaccttttggctcatatttgaggagacagtactggtgttactcagggtgacacctattccccaaggtgaattaccttcatcaggcttgcagtgcagttatttctcatttcccatcacgtaatatgttcttagggactcttcactgtgctgcaagaaaataagctgttgagatttaatgcacaaacttttgaaaacaaaaaccaaacac

SEQ ID NO: 127971 - DNA, 597 bp, Homo sapiens
  misc_feature (1)...(597): n = A,T,C or G
acactttttggagagttaggtgccattattaacatgttaatcatgttttctgaaacatttttttttcctggagtttaaattctaacacatcttttgcatatttatacrtaatacatctttaaagaatctaatgaaacctttagtagagtctgtaggggttttgtttaaattctgtggaaatcatccctttttatttttatacaaatattcttgcaaaatgagataaaagcagatttatgaagatatcaagatgatataacaaagatgagatacaaaataaaagcagaggcattagcaggagctagttttactcatggaagccagaaggaggatggggtggttggtactgtggaggagannnnnnnnnnnnnnnnnnnnnnnnnnnnnnnnnnnnnnnnnnnnnnnnnnnnnnnnnnnnnnnnnnnnnnnnnnnnnnnnnnnnnnnnnnnnnnnnnnnncagtattaaactagattaactctaaagccattgcaaccttaatattcttttattattccaagtaaaggggatgaaacactaaaatcaacatttccaggcattaagaaggtgatttgcaaaaacatttcatttattcttt

SEQ ID NO: 127972 - DNA, 597 bp, Homo sapiens
  misc_feature (1)...(597): n = A,T,C or G
acactttttggagagttaggtgccattattaacatgttaatcatgttttctgaaacatttttttttcctggagtttaaattctaacacatcttttgcatatttatacgtaatrcatctttaaagaatctaatgaaacctttagtagagtctgtaggggttttgtttaaattctgtggaaatcatccctttttatttttatacaaatattcttgcaaaatgagataaaagcagatttatgaagatatcaagatgatataacaaagatgagatacaaaataaaagcagaggcattagcaggagctagttttactcatggaagccagaaggaggatggggtggttggtactgtggaggagannnnnnnnnnnnnnnnnnnnnnnnnnnnnnnnnnnnnnnnnnnnnnnnnnnnnnnnnnnnnnnnnnnnnnnnnnnnnnnnnnnnnnnnnnnnnnnnnnnncagtattaaactagattaactctaaagccattgcaaccttaatattcttttattattccaagtaaaggggatgaaacactaaaatcaacatttccaggcattaagaaggtgatttgcaaaaacatttcatttattcttt

SEQ ID NO: 127973 - DNA, 597 bp, Homo sapiens
  misc_feature (1)...(597): n = A,T,C or G
acactttttggagagttaggtgccattattaacatgttaatcatgttttctgaaacatttttttttcctggagtttaaattctaacacatcttttgcatatttatacgtaatacatctttaaagaatctaatgaaacctttagtagagtctgtaggggttttgtttaaattctgtggaaatcatccctttttatttttatacaaatattcttgcaaaatgagataaaagcagatttatgaagatatcaagatgatataacaaagatgagatacaaaataaaagcagaggcattagcaggagctagttttactcatggaagccagaaggaggatggggtggttgrtactgtggaggagannnnnnnnnnnnnnnnnnnnnnnnnnnnnnnnnnnnnnnnnnnnnnnnnnnnnnnnnnnnnnnnnnnnnnnnnnnnnnnnnnnnnnnnnnnnnnnnnnnncagtattaaactagattaactctaaagccattgcaaccttaatattcttttattattccaagtaaaggggatgaaacactaaaatcaacatttccaggcattaagaaggtgatttgcaaaaacatttcatttattcttt

SEQ ID NO: 127974 - DNA, 581 bp, Homo sapiens
ttaatttatatggcaaatttcattgttgtctaattttaggaaattgccacagtcacccccaccttcagtaaccaccaccctsatcagtcagcagccatcaacatcgaggcaagaccctccaccagcataaagattatgactcgctgaaggctcagatgatcattaggatttttaagcaaataagtaatttataattcaggtatgcacgttactattaaagacctaatgttattgtacacttaatagactacagtacaatgtaaacataacctttatatgtaccaggaaacaaaaaaattgtgactcactttattgcattattagctttgtcatggtggcctggaaccaaacccacagtacttctgaggtatgtctgtaatttaattttctgcctcattcacattctctctcattctcttcttcccagagaatgttatgttatgtttagaacagttgctgtgaagtctgcctgctaaatccaacatctggcccgtcttggagtcagtttccattgactgcttttttttcttgactatggatcccatttttctgcttctccacaggtctagtaatttttattt

SEQ ID NO: 127975 - DNA, 581 bp, Homo sapiens
ttaatttatatggcaaatttcattgttgtctaattttaggaaattgccacagtcacccccaccttcagtaaccaccaccctgatcagtcagcagccatcaacatcgaggcaagaccctccaccagcataaagattatgactcrctgaaggctcagatgatcattaggatttttaagcaaataagtaatttataattcaggtatgcacgttactattaaagacctaatgttattgtacacttaatagactacagtacaatgtaaacataacctttatatgtaccaggaaacaaaaaaattgtgactcactttattgcattattagctttgtcatggtggcctggaaccaaacccacagtacttctgaggtatgtctgtaatttaattttctgcctcattcacattctctctcattctcttcttcccagagaatgttatgttatgtttagaacagttgctgtgaagtctgcctgctaaatccaacatctggcccgtcttggagtcagtttccattgactgcttttttttcttgactatggatcccatttttctgcttctccacaggtctagtaatttttattt

SEQ ID NO: 127976 - DNA, 598 bp, Homo sapiens
tgggttgtctctacgttttggctcttataaataatgctgctatgaatatttgtgtatagatttttgtgtgcacatatgttttcatttctctagggtattacctaggagttaaattggtgaatcatatggtaactctacgtttaaccatttgaggaactgccagactgttttccagggcagctgcaccatgttatactcccacctgcagtgtatgagggtcccaatttctccacatccttgctgatgcttgttattatttcatttcattccatttctttgtcctcaagggctaaggtctggtgatattactcagctccatcttgtaacttattagtaatctccattataaagtccatccctcctgcatggttttctaaatattttatttttcatttctagagtctctaattggttctttttcacaatagcttatccttatttcatgagtaygattttctccctttggggatataaataatattcacttaaagttttctgtttgctttaataactctttcttttcagaggtgatttactcatttattgagtaggtatttctattttatggtaactttttttagatgtttcatgatgtctt

SEQ ID NO: 127977 - DNA, 599 bp, Homo sapiens
gtaaatgcaccttttaatataattcacatgaagagaatcttaatagcaaatgaagttacaatgattacataatgtcttctcaaaatgccttccctcttgtatttctggtaatggtttaagacctttacagtaacaagaaagaaaaggtgaataaacaaagataaaaataccttctagcaataaagaatattgctatcctccataagaaccggatgagtggaaattgccttataacttttttcacattacaaggaataattctggattgaggctaaaaatgataatataaaaactatccagaaaaaatagatgttgtaaggattttatagctaaaggtaaaacataaatcttggaggatccactgtgatccaaagcagttactgccagatagtattattagtgcaggtcttaaaataaaattgaactcatgcaaaatactttgaaatgactttggaaaaggsaagtatcctaacatgcattggaataagcatttgaatatagtaggactctttattatttgccttgaattatttgtaacacacttgaaaataattagcagactaaatatattttaaatgattgactatattatccaagtg

SEQ ID NO: 127978 - DNA, 464 bp, Homo sapiens
ttttgttggaaagacttctactgagaccttgtcctaactatctgcctaacttgttcttttttctctcctttctcaatttctagaaatagatttttttttaattttcttaaaaagtcagtttagtggcagataatctgtatactgaatttctatataaataagttcacatcatctctactttctatttagtctgttgatctttttgtctattyatgtctctgaaatatattaatagaattctaaatttcttatatgtttttaaatccagtagattgagtctctcctcaatcatttttgggtttgtttttgtttttgtgtttacttttgaaacttatttttctatatgaaatttagagtcatcttgcactttcatttgaaataatgtttaaattatatactaacgtaggaacaatgtatatcttatgatgatggtgtcttcctattcaaatttatattatatttca

SEQ ID NO: 127979 - DNA, 464 bp, Homo sapiens
ttttgttggaaagacttctactgagaccttgtcctaactatctgcctaacttgttcttttttctctcctttctcaatttctagaaatagatttttttttaattttcttaaaaagtcagtttagtggcagataatctgtatactgaatttctatataaataagttcacatcatctctactttctatttagtctgttgatctttttgtctattcatgtctctgaaatatattaatagaattctaaatttcttatatgtttttaaatccagtagattgagtctctcctcaatcatttttgggtttgtttttgtttttgtgtttacttttgaaacttatttttctatatgaaatttagagtcatcttgcaytttcatttgaaataatgtttaaattatatactaacgtaggaacaatgtatatcttatgatgatggtgtcttcctattcaaatttatattatatttca

SEQ ID NO: 127980 - DNA, 571 bp, Homo sapiens
agatattgctgagtgattttataagttgaatttcttatccatcatcttgaatttctccaaagaatttgtttgtttgtttgtttgttttgagacagagtcttgctctgttgccaggctggagtgcagtggcacgatctcggctcactgcaacctccgcctyccaggttcaagtgattccccttcctcagcctcccgagtagctgagactacaggtgcgcaccaccacgcctggctaattttttgtattttagtagagacggggttccaccatgttggccaggatggtcttcatctcctgacctcatgatccaccctcctcagcctcccaaagtgctgggattacaggcttgagccaccatgcccaggcaagaatttgggttttatgagtaacaagttttggaacaatttgcaatgggtatagatccaagtaatactttgtgtaatcttaaatatccttttcataagcatttatgattgtcattttctgtctttcccagaaagcatgagtcattattaattcttcacacagaagacatagaattggacatgttgtaaactgggaattcttttg

SEQ ID NO: 127981 - DNA, 571 bp, Homo sapiens
agatattgctgagtgattttataagttgaatttcttatccatcatcttgaatttctccaaagaatttgtttgtttgtttgtttgttttgagacagagtcttgctctgttgccaggctggagtgcagtggcacgatctcggctcactgcaacctccgcctcccaggytcaagtgattccccttcctcagcctcccgagtagctgagactacaggtgcgcaccaccacgcctggctaattttttgtattttagtagagacggggttccaccatgttggccaggatggtcttcatctcctgacctcatgatccaccctcctcagcctcccaaagtgctgggattacaggcttgagccaccatgcccaggcaagaatttgggttttatgagtaacaagttttggaacaatttgcaatgggtatagatccaagtaatactttgtgtaatcttaaatatccttttcataagcatttatgattgtcattttctgtctttcccagaaagcatgagtcattattaattcttcacacagaagacatagaattggacatgttgtaaactgggaattcttttg

SEQ ID NO: 127982 - DNA, 571 bp, Homo sapiens
agatattgctgagtgattttataagttgaatttcttatccatcatcttgaatttctccaaagaatttgtttgtttgtttgtttgttttgagacagagtcttgctctgttgccaggctggagtgcagtggcacgatctcggctcactgcaacctccgcctcccaggttcaagtgattccccttcctcagcctcccgagtagctgagactacaggtgcgcaccaccacgcctggctaattttttgtattttagtagagacggggttycaccatgttggccaggatggtcttcatctcctgacctcatgatccaccctcctcagcctcccaaagtgctgggattacaggcttgagccaccatgcccaggcaagaatttgggttttatgagtaacaagttttggaacaatttgcaatgggtatagatccaagtaatactttgtgtaatcttaaatatccttttcataagcatttatgattgtcattttctgtctttcccagaaagcatgagtcattattaattcttcacacagaagacatagaattggacatgttgtaaactgggaattcttttg

SEQ ID NO: 127983 - DNA, 571 bp, Homo sapiens
agatattgctgagtgattttataagttgaatttcttatccatcatcttgaatttctccaaagaatttgtttgtttgtttgtttgttttgagacagagtcttgctctgttgccaggctggagtgcagtggcacgatctcggctcactgcaacctccgcctcccaggttcaagtgattccccttcctcagcctcccgagtagctgagactacaggtgcgcaccaccacgcctggctaattttttgtattttagtagagacggggttccaccatgttggccaggatggtcttcatctcctgacctcatgatccaccctcctcagcctcccaaagtgctgggattacaggcttgagccaccatgcccaggcaagaatttgggttttatgagtaacaagttttggaacaatttgcaatgggtatagatccaagwaatactttgtgtaatcttaaatatccttttcataagcatttatgattgtcattttctgtctttcccagaaagcatgagtcattattaattcttcacacagaagacatagaattggacatgttgtaaactgggaattcttttg

SEQ ID NO: 127984 - DNA, 483 bp, Homo sapiens
gaaatcaccagtgaaacatctgatactgggctttggttgttgttgaggaggagttttgattgccggtctattctccgtactttttataggtctgttaagaatttcttcttcttcttgaatcacattaggtaatttwtgcgtggctaaaaatttgtccatttcatttaggttatctaattttgaggtgtacagtccatttcacctaggctgtctaactttggggtgttcatagtatttcttcacatttctttctgtcgttagagacaagtataattaatacgtataaaatatggtattctcctatttccacaatgatcaagaacaaattcttcaattttatgtttttattatgtcctctctcccgaacttcactcctatcattttcctttcttgggaatcttggtgaaggaattttgcaaacaacatcaaatttcagaatctgattttggaaattgttgacaagattctggctagtttcagaca

SEQ ID NO: 127985 - DNA, 606 bp, Homo sapiens
aaataaattgctatccttttctcttgttaatctctgtcttttgttacaggaatgtcagccatgacctatgatgtgtgaagaaagatatctcacacctttctaccccttcaccactgtctattccactcttaatctgcactcaactactgtgactctccccttggtctcttatcccagagtactgtgactctacctctaagccttgcttcctgctcttgtgccattttttacatctttctctaatcttacggattaaattatatccatttgaacgtctgggatgaaatctgttttctgatgcatcccttacaaatataaggacatttaaacaaatatttaagggaggatatctcagaggagactgttttggacagaagtaacaccaagatctaataaagaaatcatactttgcctggatctttgaaaaacagtacgaccagtgtgaatgaatggagtaaccaagaggttaggcagtaggagatgaggccagagaagaaagagggtgtggtagcccccaatcctggcacttrcttccactggatctaaaatcgagcatggaattatgctgaccacatcagtctaactaatattgatctaagttatcat

SEQ ID NO: 127986 - DNA, 538 bp, Homo sapiens
ggttattgaggctatcacatgaattaatacctggaaggtacagtgactgtcagagtaaaaatgcacatgcaacaaaactagtttttaatattttgtggaaaacattgaaaaatttgactcagcactactgttcaatcmctgcagaaaactagattgccagtggaagagtcttgagagggacaaaatgccgaaggacaaagatgagcaaactcagtcacctgacaataaccacagcacctcaatttgagctatgcctgttatatagtgtctcatagtcactggtccatagtaagtataaaaaaattgctatcaagtgaatatatacattaattaatatcaggcttctctataaaatttaattcttatgaaatgtgtctggtgctgaaatacattataaaaatatcccactaatcttagttcaatagtttgttcatcagaaatatcattaagatatccgttggtaataattagtaataagacttgatgcagacttagtgcagaaccagggccatgaacccttatgatgaatgaagaaagg

SEQ ID NO: 127987 - DNA, 538 bp, Homo sapiens
ggttattgaggctatcacatgaattaatacctggaaggtacagtgactgtcagagtaaaaatgcacatgcaacaaaactagtttttaatattttgtggaaaacattgaaaaatttgactcagcactactgttcaatccctgcagaaaactagattgccagtggaagagtcttgagagggacaaaatgccgaaggacaaagatgagcaaactcagtcacctgacaataaccacagcacctcaatttgagctatgcctgttatatagtgtctcatagtcactggtccatagtaagtataaaaaaattgckatcaagtgaatatatacattaattaatatcaggcttctctataaaatttaattcttatgaaatgtgtctggtgctgaaatacattataaaaatatcccactaatcttagttcaatagtttgttcatcagaaatatcattaagatatccgttggtaataattagtaataagacttgatgcagacttagtgcagaaccagggccatgaacccttatgatgaatgaagaaagg

SEQ ID NO: 127988 - DNA, 602 bp, Homo sapiens
tgaaggcctttttattattattattaatgtgatgggaatagttccatcacatcgtgtctctgcacagcatcctgagaacaaccttttcatcacataaataattacagttctgttttttttaatgtctcctgctattccttccctccccctcttcaccattttccctttgagtgaggagaggatagcactcccttcagataaaggtttcctaagtattgacaaaaggcaggcacgtggtgatagtggtggaggatsggggaggggaggattgttctttgtcccaacacaacccaggtctgagctggctggaaaggactgtgtccagaaacaggtgtatatccttttaaaagcaaacttgttatatgtagaaagtgcagtaatttttccagagaaagagtcagcttctggcctgataccttttccttcttcatgggtctcctgcaaccagagctcctggcctgggtctcagaaagcacatcctgcatataatggtacccagggcctagatggggccagagtcctcttggtgatgggggtgagcaggtcaggcaagatctttgctctcagggcgtgaacattctcctgagggagacacacagcaa

SEQ ID NO: 127989 - DNA, 512 bp, Homo sapiens
gtgcttgtaggaaaatctactcttgctttggggttatgcaaactgtcaatatctacaaattaagaaataaaagtgatctctatctacatatattatagctcattcagtgttaaaaatacccacagtctgctcttaatagagtaatatgtttttgttaagaatccagatccagaatcaagcagtttggctctcaaaagcagatgttaaattctktaattaaagatattcattaattccttaatctttcctttagaaactactgctaaacatatgtttgaggttgtgttttgtttgtttgtttgtttgtttaatctagcctcctgccagtggcagaccctggtagtacctttaggtttgtctgagcccttagcctctacacacttctaccactgaaggcctctcgctgataaaatatcctaaaataaatacatgctggccaccttaggcttacccatcagagttcctagaagcttgctgactgatcattgattgtgaatgtctctgcctgtgca

SEQ ID NO: 127990 - DNA, 613 bp, Homo sapiens
agaaataggttaaagagtctttttgttttgttttgttttgttttgttttttgcctgaaaaaggacttttgaagtggcagtgcaaatggaaagcaacggtcaaatgccatggtcttataaaggatggatagtcaggatttggtgactcaatgaggaggccaaggwaagcaatcactgctgatgtttaggcttggaaacatggtgacttcaagaagagcaatttgagaagagctagaagaacaaagacatattgagtaaacaaaaaatgtttggagtggttgctccataccagacactgtgcttgtcatggtgaacaagacagacatagttcctaaacatatggcacatatagtccaaaggaagcaagtgaacaaagtaaattgcaatggggcagtgagggaaattaagcagtgtgctgagacagagagcagtcagaaggactcattttagattaaggatgtcagtaaaaaatgggaagtggccatatttgggactaaagcttcagttgtagacttactatttgataaagcaggctgatatatgtgtaaaattatttcatagactgttggaaaggcagaatgaaacccaggagaaaagttgagaatggatgcaaa

SEQ ID NO: 127991 - DNA, 614 bp, Homo sapiens
gttaatgggcctttgggttgcttttttttaggactattatctaaaaagttgttataaatatttatatgccactttttatggacatatgattttcacttctcttggggaaatacatgagaaagattgctggttcatatggcaattccatgtttaattttatgagaactagccaaagtctttgcaaagtggctatactattgtacattaccagaagcaatgtgtaagagttgtagttgctgcacagccttgctaacacttatcatgtttaaatcttttttattttagccattcaagtgggtgtgaagtaatatctcattatggttttgatttcatgatcaataaagttggttaactgtcaatgtgttgttagcaattagtatattttcttttgtgagcaattcattcaaatgtgagaattatttacatactctagatataattttttgacagaaatatatttttcaactacttctcccaatctatgccatatatatatatwttttttttattttcctaacagcatcctatgataaacaatgtttgtttttcaacaaaatattgcaaatagtaaaccagataaataaaaaaaccacatccaggtccactacagtaaa

SEQ ID NO: 127992 - DNA, 581 bp, Homo sapiens
caattttacattattctgtattttctatatatttmccttaatcaatacaatgtatgtctttgcatgcttttgtgttgttggttagcatcctttcattttaattttaaaaactcccttttgtaaagcaggtctagtggcaatgaactacctcaaatttgtttgtctggaaaagcctttatttctcattcatttttaaaggacattttatccaggtatagttttttttttaactggcagtatttttctttcagttttttagatatgtctttccatgctttcctgaccttccaggtttctgctgagaaattcactgatagcctcaaaagagttctcttttatgtgatgaaaccttttctatggcttctttaaaaattataccttcgtctttgacttttgaaaagttgattatatctcagtgtaatctttcatggactccgcttggagaattttgaagtttcttactctgaatgtccacatccctcccaagactggagatgttttcagccattatttttttaaataagcttcctgcccctttctctatctctttcctctgagatttcaataatgcatgttggttt

SEQ ID NO: 127993 - DNA, 581 bp, Homo sapiens
caattttacattattctgtattttctatatatttaccttaatcaatacaatgtatgtctttgcatgcttttgtgttgttggttagcatcytttcattttaattttaaaaactcccttttgtaaagcaggtctagtggcaatgaactacctcaaatttgtttgtctggaaaagcctttatttctcattcatttttaaaggacattttatccaggtatagttttttttttaactggcagtatttttctttcagttttttagatatgtctttccatgctttcctgaccttccaggtttctgctgagaaattcactgatagcctcaaaagagttctcttttatgtgatgaaaccttttctatggcttctttaaaaattataccttcgtctttgacttttgaaaagttgattatatctcagtgtaatctttcatggactccgcttggagaattttgaagtttcttactctgaatgtccacatccctcccaagactggagatgttttcagccattatttttttaaataagcttcctgcccctttctctatctctttcctctgagatttcaataatgcatgttggttt

SEQ ID NO: 127994 - DNA, 567 bp, Homo sapiens
atgggaagcaagaatattccactcgtgtttatttcataaatacagagatgtattcatgaaagtactgatttgtcactttaaatagctcaataggcctgcttcagggatcatgaaggaatagtagcgagaaaagaggctgcaggtactggtcttcatcaggtcataggggtgcactatgtcataccaggaaattgaactcctttgctgaaggcaatgaagagccttgagaagatttttaaagaatagggacataattagggttgtgttgttttgaaatataaatcagtccaatgtatagaaaacagactaggagagaactaaatgaaaatgataaagaraaatttataggccatgtcaacagtataagtaagatattggaaagccccatagaagacggtggcactgatttcaagaccacagatgtaaagagataatttcaattgaactttatcatttttaagggatggaagaattacataaaagacaagtcactaaatgaaactcgatgaatccaatgaaatggagcagatttgtggaatggaagaagatggttatgaaaaaattgac

SEQ ID NO: 127995 - DNA, 657 bp, Homo sapiens
catacctgtataggttaacaggcatcccacctctttttatattatttttatttattcactaactagccttcactgagataaaacgcagttagacctttccaccatttgttagtgccctgggtgagacagttgagctactgccataaggctggcaggagagaatttatttgacttcctgtaaaacttatctgatgaacaatggtgatatgtatattactgaagtataatattttaaccttatgaggagtaagactatttattatcataaacggtcaaactgacttaggcactctgtctcctcttcatttttaaagaaaatatatactccttagaagaaaacattaataacttwgtcaacactttatttcagcgcactgcaagtaaaactcctttgtaggtgtctgagatatatgttttatattttttcctacagtctaaccacttggctctacctcctgccagaggctataataccttaaaggctttaacaaagaactatcccaaggtttgtcattttacactgacattgaacttaatgagtttcagctgtcatcacgttttaaaacataaatctatgttctatttatcgttgtttttttcggtgacatttttaaggtttcctaaaattttatggcagatttgacacacttgccctgg

SEQ ID NO: 127996 - DNA, 648 bp, Homo sapiens
gaggaatgtctattcaaatatttcacccttttttatcagattattagattttttttctataaagttgtttgagcccttgaatattctggttactaattacttgtcagatagatagtttgcaaamattttgaacccattctctgggttttctcttcatgttgttgattgtgtcctgtgatatgcagaagttgtttacttcatgtgatcccatatgtccatttttgctttggttgcttgtgcttgtggcaaaattgctaaagaaaattttgcccaaacaaatgttctggagacttccaaatggtttcttgcagtagtttcatagcttgaggtcttcaagtctttaattcattttgatttgatttttgtatatagcgagagacaggggtctagtttcattcttctgcatatggatatccagttttcccagcactatttattaaagaggctgtcttttttccccactgtatattcttgttagctttgtcaaaaccaatattactgtaggtgtgtagatttgtttctgggtactctattctgttccattagtctgtgggtctgttttcatgccagtatcatgatgtttgggttactatagctctgtagtataatttgcagtcaggtaaaatgattcctccagttttgttcatt

SEQ ID NO: 127997 - DNA, 648 bp, Homo sapiens
gaggaatgtctattcaaatatttcacccttttttatcagattattagattttttttctataaagttgtttgagcccttgaatattctggttactaattacttgtcagatagatagtttgcaaaaattttgaacccattctctgggttttctcttcatgttgttgattgtgtcctgtgatatgcagaagttgtytacttcatgtgatcccatatgtccatttttgctttggttgcttgtgcttgtggcaaaattgctaaagaaaattttgcccaaacaaatgttctggagacttccaaatggtttcttgcagtagtttcatagcttgaggtcttcaagtctttaattcattttgatttgatttttgtatatagcgagagacaggggtctagtttcattcttctgcatatggatatccagttttcccagcactatttattaaagaggctgtcttttttccccactgtatattcttgttagctttgtcaaaaccaatattactgtaggtgtgtagatttgtttctgggtactctattctgttccattagtctgtgggtctgttttcatgccagtatcatgatgtttgggttactatagctctgtagtataatttgcagtcaggtaaaatgattcctccagttttgttcatt

SEQ ID NO: 127998 - DNA, 621 bp, Homo sapiens
atttctttgaggtaagctggaatgtcaatgtgttatatttgcttttgtaaatagtatggtgaatattagccaatttaatgaacgaaggatataaaagttgcatagttgtgtaattcttgggtacaggaaacttatctggatagtgtcagcttcttcatatcaagaatatgttccmagatgttctgggacagtatccagttaaggatgaagcttcatattccagaattgagagctccaaactagatggattaaaaagttgaaacaaaacatagactactatgaatacaattgtttatcttttgcttgatttctttgtattgtgcatttaaaatgaatagccaacatttaaaataaagcatgtatttaaaataaggtgtaactatcatgttttatacatgctctgacagtgtaaatcatattcccaggttcagctaaaataatcatcataaaaagaatttatttaaaaaatttaaaaagtaatgatattcaacgataggcatgatactcatttaaattattttaaaattggtagagtgttcatttaaattgaaagcaagagaaaagacccctgctcaccagatctctttttatgtgttgtgaagggagtatgggcagaattag

SEQ ID NO: 127999 - DNA, 621 bp, Homo sapiens
atttctttgaggtaagctggaatgtcaatgtgttatatttgcttttgtaaatagtatggtgaatattagccaatttaatgaacgaaggatataaaagttgcatagttgtgtaattcttgggtacaggaaacttatctggatagtgtcagcttcttcatatcaagaatatgttccaagatgttctgggacagtatccagttaaggatgaagcttcatattccagaattgagagctccaaactagatggattaaaaagttgaaacaaaacatagactactatgaatacaattgtttatcttttkcttgatttctttgtattgtgcatttaaaatgaatagccaacatttaaaataaagcatgtatttaaaataaggtgtaactatcatgttttatacatgctctgacagtgtaaatcatattcccaggttcagctaaaataatcatcataaaaagaatttatttaaaaaatttaaaaagtaatgatattcaacgataggcatgatactcatttaaattattttaaaattggtagagtgttcatttaaattgaaagcaagagaaaagacccctgctcaccagatctctttttatgtgttgtgaagggagtatgggcagaattag

SEQ ID NO: 128000 - DNA, 621 bp, Homo sapiens
atttctttgaggtaagctggaatgtcaatgtgttatatttgcttttgtaaatagtatggtgaatattagccaatttaatgaacgaaggatataaaagttgcatagttgtgtaattcttgggtacaggaaacttatctggatagtgtcagcttcttcatatcaagaatatgttccaagatgttctgggacagtatccagttaaggatgaagcttcatattccagaattgagagctccaaactagatggattaaaaagttgaaacaaaacatagactactatgaatacaattgtttatcttttgcttgatttctttgtattgtgcatttaaaatgaatagccaacatttaaaataaagcatgtatttaaaataaggtgtaactatcatgttttatacatgctctgacagtgtaaatcatattcccaggttcagctaaaataatcatcataaaaagaatttatttaaaaaatttaaaaagtaatgatattcracgataggcatgatactcatttaaattattttaaaattggtagagtgttcatttaaattgaaagcaagagaaaagacccctgctcaccagatctctttttatgtgttgtgaagggagtatgggcagaattag

SEQ ID NO: 128001 - DNA, 535 bp, Homo sapiens
tggctgatgagcacttaagttgattccatatctttgcaattgtgaattgtgctgcaataagcatatgtgagcagatgtcatttttatataatgaatttcaaaaacattaaatttatcaaagatacgtgatttcaaaaaatggaacccagtcagtttatcaatagaatagaaaataagtcagtaaatttcagacacctctggatgtgggactagattgatcttcctgctgaatttacagatgtgaaggggatgatcaaattggctgagttgactgattctcactgtcaagggcaaattcaagagggattgggggcacaacaaggaggagtctctcaaatgttgaagatcatcaggagtcctcagagagccctgttgtcccatggtaactgtattagtccattttcgcrctgccgataaagacatacctgaggctgggtgatttatactgaaaaagaggtttaatggactcacagttccacgtggctgggaaggcctcacaatcagggtggaagacaaaacgcacttcttacatggc

SEQ ID NO: 128002 - DNA, 621 bp, Homo sapiens
ttcaaagtatctgaagtttctttagcttttatgttgagctcccatcttccttattgtatataagttcacactgtgaatttctatacactatttttctatttcctagtgaatgagacatctaacaaagcttctaagccgacatgttggaggaaaaaaataaaaactaagttcatatatttatatacattacagcatgaaaaaaaatctcaaaataatgctgaattaaagaagccatacaaacaagtaaccattgtataattttattttctcataatctagaaaatgcaagctaatctatagtaacacaaagcctatcactgtttgcctggggtggagggcaagtgtgagtgttggtgcaagaaaacaacggaagaaaaaagtataaagttatggaaayatccaggtgtgatgtatctacaaattatcttgattgttgtgatgttttgcttgtgtacacatcacatatgtcaacacttttcaaattctatacttcaagaatgtatattttactgcgtgtcaaatgcacctcaataaagttgttttaaaaagatggcagtgataagctgggtttagagtggttgtgataaaaaattgaaaaataaagagtattcatttaattag

SEQ ID NO: 128003 - DNA, 542 bp, Homo sapiens
atgccatttttagatgagctaccagtacgaatgtaaacaaatgtgtttcaagtatatacttttaagttgagaaatgattagcaaggtgtagtggtacatacctgtagtcgaagctactcagaggctgaggtgggaagattgcttgagcccaggagttcaaggctgcagtgagctgtgatcatcacactgcactccagtctgggtgacagmgtgagaccctgcctctaaaaaaaaaaaaaccctataaaataaaataaaataaaataaaaataaataaaataaaataagaagtgaaataactttgtcctcaaacaaaaaccaatgtttgcctcagttatttattaggtatcagcctcagtaatgaattgctgagtcgacattttctttcatatgttgctggaataattttgttacttacaaaacactaactttgttactttataagacattagtgatgtctaccaaaaattatgactatgagaattaagacaaggtttagtttagcagggccagagaagatttgactggaagtagatcttgaa

SEQ ID NO: 128004 - DNA, 530 bp, Homo sapiens
atgccatttttagatgagctaccagtacgaatgtaaacaaatgtgtttcaagtatatacttttaagttgagaaatgattagcaaggtgtagtggtacatacctgtagtcgaagctactcagaggctgaggtgggaagattgcttgagcccaggagttcaaggctgcagtgagctgtgatcatcacactgcactccagtctgggtgacagcgtgagaccctgcctctaaaaraaaaaaaaccctataaaataaaataaaataaaataaaaataaataaaataaaataagaagtgaaataactttgtcctcaaacaaaaaccaatgtttgcctcagttatttattaggtatcagcctcagtaatgaattgctgagtcgacattttctttcatatgttgctggaataattttgttacttacaaaacactaactttgttactttataagacattagtgatgtctaccaaaaattatgactatgagaattaagacaaggtttagtttagcagggccagagaagatttgactggaa

SEQ ID NO: 128005 - DNA, 498 bp, Homo sapiens
tattgtttcttgtttgactttctgtcttgacgacctgtctggtgctgtcagtggagtattgaagtccctcactattattgtgttgctgatgatctcatttcttaggtttgttagtaattgtttgataaatttggaaactccagtgttaggtgcatatatatttaggattgtgatattttcctgtcggacaaggtcttttaccattrtataatatccctctttgtctcttttaactactatttctttaaagtttgttatgtctgatgtaacaataaccacccctacacttttggtatccatttgcatgaaatgcctttttccacccctttactttaaatttatgtgagttcttatgtgttaggtgagtctcctgaaggcagcatgtagttggttagtgagttcttatccattctgcagttctgtatcttttaagtggagcactgaggacatttacattgaattttagtgttgagatgtgtggtaccattccattcatca

SEQ ID NO: 128006 - DNA, 590 bp, Homo sapiens
gttaatgtttcaacataatttacatctgcaaactactaacagtaacatctgttaaagaaaatgattatgtggaaagagactaccaccacagggagggcagaggaggcatgcaatagtaaagaatgcatctctcatcttatcattctaatatgttttactaatracatgttccacagtaatgggtgtaatttataaatagactgaaatccagagtgtttgatgatcaaatagtccatgaatgctacatttcaaatgtgtgtgatatttataataggatgtaaaatgcatttaaacacaagctgtgctcatttatattcatagtcagggcataagagatacagcagaagggaatgtgttcttggtgtgctaacttgttctatagaaggcatgagctgaggtcatatttctcgtgatttaaattaggcaacataacctgagctgagacacgcagagaaaagtttcagctaccatagaaaactttattcttctatgagaaaacatgtctctgagaggttaaaagtcagatatgtgaagagagaatgcatggctgttgattgtggagagctgctttgaaacatctcttgttccta

SEQ ID NO: 128007 - DNA, 590 bp, Homo sapiens
gttaatgtttcaacataatttacatctgcaaactactaacagtaacatctgttaaagaaaatgattatgtggaaagagactaccaccacagggagggcagaggaggcatgcaatagtaaagaatgcatctctcatcttatcattctaatatgttttactaatgacatgttccacagtaatgggtgtaatttataaatagactgaaatccagagtgtttgatgatcaaatagtccatgaatgctacatttcaaatgtgtgtgatatttataataggatgtaaaatgcatttaaacacaagctgtgctcatttatattcatagtcagggcataagagatacagcagaagrgaatgtgttcttggtgtgctaacttgttctatagaaggcatgagctgaggtcatatttctcgtgatttaaattaggcaacataacctgagctgagacacgcagagaaaagtttcagctaccatagaaaactttattcttctatgagaaaacatgtctctgagaggttaaaagtcagatatgtgaagagagaatgcatggctgttgattgtggagagctgctttgaaacatctcttgttccta

SEQ ID NO: 128008 - DNA, 590 bp, Homo sapiens
gttaatgtttcaacataatttacatctgcaaactactaacagtaacatctgttaaagaaaatgattatgtggaaagagactaccaccacagggagggcagaggaggcatgcaatagtaaagaatgcatctctcatcttatcattctaatatgttttactaatgacatgttccacagtaatgggtgtaatttataaatagactgaaatccagagtgtttgatgatcaaatagtccatgaatgctacatttcaaatgtgtgtgatatttataataggatgtaaaatgcatttaaacacaagctgtgctcatttatattcatagtcagggcataagagatacagcagaagggaatgtgttcttggtgtgctaacttgttctatagaaggcatgagctgaggtcatatttctygtgatttaaattaggcaacataacctgagctgagacacgcagagaaaagtttcagctaccatagaaaactttattcttctatgagaaaacatgtctctgagaggttaaaagtcagatatgtgaagagagaatgcatggctgttgattgtggagagctgctttgaaacatctcttgttccta

SEQ ID NO: 128009 - DNA, 467 bp, Homo sapiens
aaaccatccagaagttctcacagacatcctgtaaatccagcacttgaagtttccacctcctgtgggaaaatagaggtgagacttagaatttcaggactcatttctgaacttaaactccacatcctggatagcagctcctcccctccctgcttcttgtccctagtatttgacatttctccaccctgttttccccttggatcctrcccactttcacagttttttttttttttttttttttttttgagaccaagtctccttctaaaacccaggctggagtgcagtggtgtgatgtcacctcactgcaacctctgcttcccgggttcaaatgattctcctgcctcaacctcacaagttgctgggattacaggagcccaccaccatgcccagctaattttagtatttttagtagagttggggtttaccatgttggacaggctggcctccaactcttgacctcagcctcccaa

SEQ ID NO: 128010 - DNA, 467 bp, Homo sapiens
aaaccatccagaagttctcacagacatcctgtaaatccagcacttgaagtttccacctcctgtgggaaaatagaggtgagacttagaatttcaggactcatttctgaacttaaactccacatcctggatagcagctcctcccctccctgcttcttgtccctagtatttgacatttctccaccctgttttccccttggatcctgcccactttcacagttttttttttttttttttttttttttgagaccaagtctccttctaaaacccaggctggagtgcagtggtgtgatgtcacctcactgcaacctctgcttcccgggttcaaatgattctcctgcctcaacctcacaagttgctgggattacaggagcccaccaccatgcccagctaattttagtatttttagtagagttggggttwaccatgttggacaggctggcctccaactcttgacctcagcctcccaa

SEQ ID NO: 128011 - DNA, 610 bp, Homo sapiens
tacttgggaggctgaggcagaaggatcgcttgagcccaggaggttgaggctacaatgagctatgatggcaccactgtactcctgggtggcagagtaaggccctgtctcaaaaagaaaaaagggggagacatccacagttgctgacagaagggagctctgggccctgaaaaatgaggacataacatatagaggactggcatggaaggagatacaccattttatccagcatgcagatctctgacaaggcatttatttttgagggaggaaagagactggaaatattgtctcatatttttctctcctaggaatttcctattctgtgggttaaaagaaggaacagtggggtacgtggagaaaatgatttctccgtaaaggyctatctgaaagtatctgcatgttgaaaaattttatgtaattaaagttttatttttaagaatatataaatattcttttttacttaacaggtgtgcaaaacccattctggaattcttggaaagggtctagctctttctcattcaccaactatattagaagcacttgagggaaatttaccactccaaatccaaagcaatgaacagtcttttctggatgattttattgcctgtgtccc

SEQ ID NO: 128012 - DNA, 523 bp, Homo sapiens
gaaaaactggcttcctgggccaggcccagggtccccatgctgcatgcagcctagagacttagtgacctgtgtcccagctgctccagccatgattgaaatgggccaatatacagctcaggctgtggcttcagaaggtggaagccccaagccttggcagcttccatgtggtgttgagcctgcgggtgcacagaagtcaagaactgaggtttgggaacttctacctagatttcagaagatgtatcgaaacgcctggatgcccaggcaaaagtttgctgcaggggcagagccctcacagagaacctctgctagggcactgtaggagggaaatgtggggttggagcccccaaaccgagtccctactaaggcactgcctagtggagctgtgagaagacagctactgtcctccagaccccagaatggtggatgcactgacagcttgcactgtgtgcytgcgaaagccatagacactcaatgccagcccatgaaagcagctgggaaggaagttatatcctgcaaagccaca

SEQ ID NO: 128013 - DNA, 538 bp, Homo sapiens
ttaaatgcgaggcactgtaccaggcatagtcctcggttcgtgacacataatcacgatcagtccttacgtagcccgtcttttactttcattatttatttttattgcataacaaacgctgctaagccagcctcactcaagaattaaaaatttaccacggatatacgtctccctacgtgctcaccactatcccatgtccctgcttgccttttttttttttttttttttttttttgagatggagtctcgctctgttgcccaggctggagkgcaatggtgcgacctcggctcaccgcaacctccgcctcccgggttcaaatgattcttctgcctcagccccccgagtagctgggattacaggcacccaccaccacgccagctaatttttgtatttttagtagagatggggtttcaccatgttggccaggctggtctcgaactcccgacctgatgacctgccggcctcagcctcccgaagtgttgggattacaggcatgagccatcacagctggcctatccctgcttgcctcttgaagggagtt

SEQ ID NO: 128014 - DNA, 547 bp, Homo sapiens
gaaaaggactacactcagttaaattctttgaacaatcatgacaaaagccaaccctatatccagcagaagttgagtataaaagggtagagactgcactgaaaaattgaaaagtaaattattacatgcaaagcatgtacctttgcatgaaaacagaattttatgactgtaccatctctgtctattagccaataaagttttaaatgatatttttgatgatgtctccagaccctaagtgttggagtttccacaacagagcactcagatgagaaagagacaaaaaaacaagcagatggctctctgggcacgaccatctctgtggtaatcataagggtgggaacctccctaacaggtatccagggttcaaggatcaatgccccaggggtgattgtgaatgtgataattagttcacaacgtttgtactcatgcatggtraatctgtaaaccagaataatcatcatttaagtatatgtaatcatataaatatatatacatagatatctatatcaatctagctatctatatcatatgtaattgtgtagccagggca

SEQ ID NO: 128015 - DNA, 571 bp, Homo sapiens
aaataacacattggttaacatgaggcatatatataggaaaaaaaaaagccaaaatctcaggcctgaccaaacaatgcttatttagagaggatgagtatccaagctgcagttatggatctctgagagtgcatagtcacttcagaatcacttttaaacattctcccaagaatctggagattcagaaagctcagagccagaagccttccacttgagcctcatgaactcaagtggatttaggactatgtgatacccaycccagtttcacatggtagaagtgagacattgccttttttgagtcctatcgacatttaacactaggtttttctgttgctggcacaaatattttcaatttcagtttgatttttaccagatagaaagacatagaaaaaaagtaaaacaaagaaccccagaacaatttaggactgcgttgtttaatgaggacctgcccaggattatatctacatattaaaaagtagatgggagaattattataactctctaagtatgctgttaaacaattcgtctttgttaaaacatctattcacataatttccaaactttttcctaatgc

SEQ ID NO: 128016 - DNA, 571 bp, Homo sapiens
aaataacacattggttaacatgaggcatatatataggaaaaaaaaaagccaaaatctcaggcctgaccaaacaatgcttatttagagaggatgagtatccaagctgcagttatggatctctgagagtgcatagtcacttcagaatcacttttaaacattctcccaagaatctggagattcagaaagctcagagccagaagccttccacttgagcctcatgaactcaagtggatttaggactatgtgatacccaccccagtttcacatggtagaagtgagacattgccttttktgagtcctatcgacatttaacactaggtttttctgttgctggcacaaatattttcaatttcagtttgatttttaccagatagaaagacatagaaaaaaagtaaaacaaagaaccccagaacaatttaggactgcgttgtttaatgaggacctgcccaggattatatctacatattaaaaagtagatgggagaattattataactctctaagtatgctgttaaacaattcgtctttgttaaaacatctattcacataatttccaaactttttcctaatgc

SEQ ID NO: 128017 - DNA, 614 bp, Homo sapiens
tttctgtttcttgagctaaatagattgattcccatccccactttaaatctcagaaagaattaagaatatgcctttcttggcaaaaygaatagaaagccatctctgattctgaccttcacctatggacagactacagtagaagacaatttccaactgtggtaatttatcaactcattaacatgtctctgatgaggcactttgaataatccatcaggagatagactgggaaatgcaaacactacttacaaacaattactagtgctgcccaactatattcttggcacaccatttttatatcccctcagtgggaatagtttgaatccacacgtagtgactactcatattttaaggcactcctgtttggtttttgttttactattttttatgccaacgggcatttgggaaacaacagaaagtatgaacttactcactgtactaatggaatatatctttggtctagttagtattcacagtattaaaatcaaagactagctagtgagatgttataaagaatatggaaatatatacagcccttttctggaaagacactaatctaatcacctgctgacctcagagctacagctaaactttgagacaaccgtaaagcctacgtc

SEQ ID NO: 128018 - DNA, 527 bp, Homo sapiens
gatccagaaactgaaacgagtactgaacaattatttaattctcccttgcccttgtccaatttattttgtgttttttattgctacattgtggagagtattactgtctccaaataaatgttttaatgagatcaatagtgggaattggtttggatgaaacataatctgatctaacaggaggaaattggatgaaaataaagtgtggtgtgctggacctatccttgtcttcacatttgtgccatgaacaggcaatgagagtaagaagattggaaattactgaagagaagacatatgttttactatattagtgataatctcatagaccatgtaagtggtaaagaatttaatcttgcctaaaagacagtagctcctcttccatttttcattagacctacattttgtgtttcagccatactgtcgtcttctgtgtgtcttctccacttctttttgtgaaatcacatcytgcatttttattaatgggttttagtcttttgtgtgctatcaagcaaaatgtgtgtcagagatatcaa

SEQ ID NO: 128019 - DNA, 580 bp, Homo sapiens
tatgccactgcactccagccttggcgacagagtgagactctgtctcaaagaaaaaaaaaaaagagtcctatcttgcgaaacagagcaaggtcatggctccagtggcagaagaaaggacggtcagtggcaggaaataggtgtgaacrgaacagtcaccagggcacccagacacccccagggaaatggcaggtgcagctttatttcccgcattatggagagagggaaaaaaagtgtcagtctcttattagggagagtaattacatcctttataactgtgtacctaattagtttctttctaaccattctcatcatgaacaaacacattaaataattggagagaagaggagataagaaagagaattaacatttgagaagagactaccatgtgtcagacaagcactgtgctcggcatccttctgtatgttagctctctaaccctcactaaaacaaacacacaaaccaaagatgattcagtagttgatattttatcagctacatctcccagggcctcagaaagttttaagtcattacagagctggcaggcagcattgctacaatttgaacccagtttctacaaaac

SEQ ID NO: 128020 - DNA, 580 bp, Homo sapiens
tatgccactgcactccagccttggcgacagagtgagactctgtctcaaagaaaaaaaaaaaagagtcctatcttgcgaaacagagcaaggtcatggctccagtggcagaagaaaggacggtcagtggcaggaaataggtgtgaacggaacagtcaccagggcacccagacacccccagggaaatggcaggtgcagctttatttcccgcattatggagagagggaaaaaaagtgtcagtctcttattagggagagtaattacatcctttrtaactgtgtacctaattagtttctttctaaccattctcatcatgaacaaacacattaaataattggagagaagaggagataagaaagagaattaacatttgagaagagactaccatgtgtcagacaagcactgtgctcggcatccttctgtatgttagctctctaaccctcactaaaacaaacacacaaaccaaagatgattcagtagttgatattttatcagctacatctcccagggcctcagaaagttttaagtcattacagagctggcaggcagcattgctacaatttgaacccagtttctacaaaac

SEQ ID NO: 128021 - DNA, 580 bp, Homo sapiens
tatgccactgcactccagccttggcgacagagtgagactctgtctcaaagaaaaaaaaaaaagagtcctatcttgcgaaacagagcaaggtcatggctccagtggcagaagaaaggacggtcagtggcaggaaataggtgtgaacggaacagtcaccagggcacccagacacccccagggaaatggcaggtgcagctttatttcccgcattatggagagagggaaaaaaagtgtcagtctcttattagggagagtaattacatcctttataactgtgtacctaattagtttctttctaaccatyctcatcatgaacaaacacattaaataattggagagaagaggagataagaaagagaattaacatttgagaagagactaccatgtgtcagacaagcactgtgctcggcatccttctgtatgttagctctctaaccctcactaaaacaaacacacaaaccaaagatgattcagtagttgatattttatcagctacatctcccagggcctcagaaagttttaagtcattacagagctggcaggcagcattgctacaatttgaacccagtttctacaaaac

SEQ ID NO: 128022 - DNA, 581 bp, Homo sapiens
ttctgctaattttaccctcctgcataagggaataagcttgatctttccttcttttttttatcattaaattacactggaaggcttgatctttcttaaaaagcacacttgagcgtgtgtggtgattcagcactttgggaggccaaagtgggaggatcccttgagcccaggagttcaagaccagtctgggcaacatagcaagactccatctctaccaacaacaacaaaaaatagttggacacagtggcacacacttgtgttcccagctaatcgggaggctgaagtgagaggatcacttgagcccaggacgtcaatgctgcagtgagccatcatcatgccactgcgctccagcctgtgagtgacagagtgaraccctgtctcaacagaaaaaggggaagaaaaagcacactcatagcacattgcaggcctcctgaaagttgttaccagtgccccattccctgcaggacagagtctgagctactgggaagggcttctaaggctatgtgcttcccatctgcctctggaaccttagttggctgctctgaggcccaggccttgcccccggcaacctcaagcactttata

SEQ ID NO: 128023 - DNA, 573 bp, Homo sapiens
atatatgtaagaataatttcattgcttactccattcagtagttattatattcaatctcatgtaggccagcattttagtcaccggccaagaaatttctgtaaagtttgtgagatgcagaaatccytgggatgtattttattgggtgctttaaatgtactgtataaagcattagtgaggagaaattataaaaattataacacaataaccctttcatttttaaaatgagttatctgtatattaagtgctgatggtgtaagttaaaggcacatagggagagcttaaatatatgagtagggcacaaaatgcatactcttattttccattttctctggccactttcaggcacaatacatatcaattaactttctaatccattaataaggatggtttctcacctgcacgtgctcaaatggaagtctagaaatatcccagttcaagactgcagtgggttgttatcttgcctttttcctttagtttatgatttattgctgaaatgaagccatactgtgtctagtgtaactgtacactttatttgagggtgtagaattattatatcttaataaaaaaggtttt

SEQ ID NO: 128024 - DNA, 573 bp, Homo sapiens
atatatgtaagaataatttcattgcttactccattcagtagttattatattcaatctcatgtaggccagcattttagtcaccggccaagaaatttctgtaaagtttgtgagatgcagaaatccctgggatgtattttattgggtgctttaaatgtactrtataaagcattagtgaggagaaattataaaaattataacacaataaccctttcatttttaaaatgagttatctgtatattaagtgctgatggtgtaagttaaaggcacatagggagagcttaaatatatgagtagggcacaaaatgcatactcttattttccattttctctggccactttcaggcacaatacatatcaattaactttctaatccattaataaggatggtttctcacctgcacgtgctcaaatggaagtctagaaatatcccagttcaagactgcagtgggttgttatcttgcctttttcctttagtttatgatttattgctgaaatgaagccatactgtgtctagtgtaactgtacactttatttgagggtgtagaattattatatcttaataaaaaaggtttt

SEQ ID NO: 128025 - DNA, 573 bp, Homo sapiens
atatatgtaagaataatttcattgcttactccattcagtagttattatattcaatctcatgtaggccagcattttagtcaccggccaagaaatttctgtaaagtttgtgagatgcagaaatccctgggatgtattttattgggtgctttaaatgtactgtataaagcattagtgaggagaaattataaaaattataacacaataaccctttcatttttaaaatgagttatctgtatattaagtgctgatggtgtaagttaaaggcacatagggagagcttaaatatatgagtrgggcacaaaatgcatactcttattttccattttctctggccactttcaggcacaatacatatcaattaactttctaatccattaataaggatggtttctcacctgcacgtgctcaaatggaagtctagaaatatcccagttcaagactgcagtgggttgttatcttgcctttttcctttagtttatgatttattgctgaaatgaagccatactgtgtctagtgtaactgtacactttatttgagggtgtagaattattatatcttaataaaaaaggtttt

SEQ ID NO: 128026 - DNA, 588 bp, Homo sapiens
ataaactcaaaagttaactccctaatatattgatggaatggtgaattcaacctacctggtttcatttatcaattcttctttaattattttctgcaaatttccaactgctatgtaggctaattccaggtaaggcatttcatatcatagttggactgtaaagaggccatgaggactaaaatataaagtttctctttctagaaaaaacaacaaggcttttggcctgaaaaactagaccatactactttccccagtggtttcatccaagccatccattactttccacaaatttatctttcaaaaaatgtaaaccacaaaaaaacccacttcatttacaatatcttcagaacaatctaccacttaaaatcttagctaagtgataccaataatcagctaggttggctctgaattaggcagtttctggtaaaatttagtttttcatttatattttagttgatgcaacactgaatataggaattctttytactaatgaaaaattggtcatgtgttacagaattctcagaggtattgtgtatacgttaagaatatcaggattggcagatgcgaaggagctataaggattcattacca

SEQ ID NO: 128027 - DNA, 617 bp, Homo sapiens
caggtaacaggtgctcctgtcatgtcatgtcaaactcttacaattttgaggactttggcttgtatacatttttattatgagtgggagccactgaagagatttgagtgcaagaatgtcaccattgaacttggtttttatacttctacagtggcactatggcttctgtgctaacagtagayggtggggacaaggactgagtggggagaccagttaaaagacacttgcagcaatccaggcaagagaagatgtagcagcatacggtgatagcaaaagatacagtgataagtggttagattcaggatatattttaaagttaaagctacagaatttgccaatagctcaaatgtgaattataagaaaaagtaaagcttcaagaatgatgacaatgtttttggcttaatcaattggaataatgaagttgctattaactgagtttgggaatactagaagagcagcaggtttggagcaggacggtggaggaaatcagctcatttggggctcattgaaggtactcgttaaacattccaataaggatggtgggaggaccattagatgaaagagtcaagtttaggcatgagatctggcctagagatacaaatttgagagttatcatcata

SEQ ID NO: 128028 - DNA, 621 bp, Homo sapiens
gctgacatgactaacaattccaggtacttttcatagatgggtttggacatggtctcagaatctttctccagtaaaccatgtccatacactgaaaactgcatgcaaggtaaatctagttgtcatctgagagtccatggcctcaccttgtaaatggtgaaaggccctgagagaggctgagtaacttcccaaggttcaaaagtccatgaaaggcacagcagaaagcagaaytctctaacctggctttagtgttcttttctttttttcacacatctaagacacgagattagttctacaggcatacctcattttactgtactttactgcacttcgttttattgtactttactgcacttcacaaatgttgcattttttacaaccctgagtctaataagactatggatgctatttttccaacagcacatgctcgcttcgtgtttctgtgtcacattttgataattcttgcaatatttcaaaatttttcattattattatatctgtcatggtgatttgtgatcagcaatctttgacgttactattataattgttgtggggtaccataagtcatgtttatgtaagttggtatgcttaattgataaatgttgtgtgttatgactgcaccat

SEQ ID NO: 128029 - DNA, 564 bp, Homo sapiens
agaaagctgcagaagttggaaactagcagagcttggtccacgaggttgaaggaaagaagccgtttccatacatgaaagtgcaaggtgaagtagcaagtgcagatacagaagttacagcaaggtttccagaagattaagataattgataaagacgggtacactaaacaacagattttcaatgtagatgaaacagcttcatattgcaagaagctgccatctaggactttcataactagagacgagaaaatygtaagtagagaagacgacgtttggcttcaaagactcaaagaacaggctaactctcttgttaggaggttaatgcaactggtgactttaagttaaagccaatgttcattggccattccaaaaatcctagggcccttaggagttatgctaaatctactctgcttgtgctctataaatgaaacaacaaagcctggatgacagaacatctgtttacagcatggtttccttaatattttaagcccactgttgagatctgcttctcaaaaaaaaaaaaaaaaaaaaaagattcctttcaaaatactgataatgcacttggtc

SEQ ID NO: 128030 - DNA, 564 bp, Homo sapiens
agaaagctgcagaagttggaaactagcagagcttggtccacgaggttgaaggaaagaagccgtttccatacatgaaagtgcaaggtgaagtagcaagtgcagatacagaagttacagcaaggtttccagaagattaagataattgataaagacgggtacactaaacaacagattttcaatgtagatgaaacagcttcatattgcaagaagctgccatctaggactttcataactagagacgagaaaatcgtaagtagagaagacgacgtttggcttcaaagactcaaagaacaggctaactctcttgttaggaggttaatgcaactggtgactttaagttaaagccaatgttcattggccattccaaaaatcctagggcccttaggagttatgytaaatctactctgcttgtgctctataaatgaaacaacaaagcctggatgacagaacatctgtttacagcatggtttccttaatattttaagcccactgttgagatctgcttctcaaaaaaaaaaaaaaaaaaaaaagattcctttcaaaatactgataatgcacttggtc

SEQ ID NO: 128031 - DNA, 463 bp, Homo sapiens
atgggtctctttaagagcatttcaaagtcargttccaagctgaggaggccagctgtgtcacagaaataaactgctaattacacgcaaaccctctgtaaacactgaaataaattacctttcccctacttttcattgtttccccaccccccaccccccaccggtcactggaggagggagctgagctgtagtgaggcaggacaagcagaggctgcagcagccatagtccctgcggacagcagctcactctgagagcagaacctgtgctgcatctcccgacagcctggcagtctggaagccatggcatctttggtgggttccgacagccactctgtgaaatcaatccatcagtggatatttaccgaatacttagccatgtctaggggactggggttgatgccaggagacagaacatttaataaggaaaagggatgtaaacacctagaagacgatgaatgatacagga

SEQ ID NO: 128032 - DNA, 582 bp, Homo sapiens
ttctcacacgctattttctcacacgctcttagcacagcatgtccctactgggtacgtgaaattacccctgttcccactgtctccaattaatattcttagactcccartcacccatgatgtttcggagcaaggccttgggtagcagccatcagctgtgcctcctcctcttttcctcctcctctcttcctgcagagagaagcagatatattccttcctgcttatataaaccacgaacatgctgtgtcttatttgtcatttgttagtccctgaaaacaacaacaactgtggatgagggaaagtgaaaacacctcagatgcacttcacaggggatctctctggagactggaggaattacagttggcaaaacaaaaggaaaggaaatccccaaagaaaatttgctaaattgattgtttaattataacactaacctttgctatcaaagaccaggtgagacagagagggaaaaggaatcgaaacaggaatgagagagcctgaacttccacactgaacataagccacctaagaaaggcagtcaccctgccacctgggggacactcatgccctggcacgctgagctggcac

SEQ ID NO: 128033 - DNA, 605 bp, Homo sapiens
gagctgtcacataacgtaaaatggcctaagacatgcttaattgtaatcttcaaaggcaaagtagtggcagygggtaggtggggtggaaacaaaaacagtttgaagaaaaaatagagaaaaactacaattatagttgaagatttcaacacgcctctcagtgagtagaaagaaaacaaagatgtagaagacagggacattattaattaacttgactttattgatagttacagcacaatttattaattaacttgactttattgatagttacagcacaatctgtccaaaaccaccagaatatacattcttttcaagagctcaaatggaacatttaccacaaaagaccatattctgggcttcaaaataagcctaaataaatacaaaagcatttaggacctatgaatcagaagactgaatatgcacatatacaaaatgagaatcattctctcacatacaaaacttatataggtagtaaagatacagttgattaggtagatttgaatgttgaatcactgacatttcctgaaggtagagctacaaattacttttttaaatccactaacccacccccaccttacctcacttactctttttggccttaccaccta

SEQ ID NO: 128034 - DNA, 591 bp, Homo sapiens
cctttagctcttactacctctttgcctggactacggccaaggctttctaattggttttccttcctctggtctcttctaatttcaatccatcacatagagttgccagattaatattcctgaaaataatctctatgatatcactcccccactcaaaaaatcttaatggatcccctctggctagtaaataaatttaaattctctaaccagatagtcaatacsctctatatcacctaagtaccagtcaaactcaacttccaaagcattttatttatccctctatgaaggtacctttttctttctgctagctactatagctaacttaaagtaggtcttacttcccttcatcatgtcagctgtttgtgggcaagggaccatagcttaataccttcccatagaaaataacacagtaagtaatgtttgtgaaggaagaaaagacttcagaataaaaacaaattaaatttcagctacaaacgtatttcagttatctttcttgcagatgtagtctttccagaaagagtacataaaataaaatctatttattacctgttattacatttatatctgggtactggttttcacacagaccaacag

SEQ ID NO: 128035 - DNA, 596 bp, Homo sapiens
cacttccttcttgtgaaagaggaagggaacttaaaaaagataactgtgaacaaattacagcaaaaatggaacaaayaaaaaataagttttgtgtactacaaaaggaactgtcagaagcgaaagaaataaaatcacagttagagaaccaaaaagctaaatgggaacaagagctctgcagtgtgaggtatgatatcctagttttaaataaatatttcaactatttatactaaaagtatgtaggatactttttgtaaaagctgacttaccttctgagatttaactggagaaaaaaatctgtcttgtagagtgtcaaattcttttaaataataaaagttcttaaatgtgaatacttccactgataattaatgcatatttatttaaatcacaattttaatggctatatagaaggccattatttggaaataccattacttagcaaattaatttttttgatttttaattttttgtattataaatgctacaagacataactgcatgtaaatctttttctacctttctaattattgacttggaataaattcttcaatatagaaatatttagttaaattataggaatttttaaaaagttctttgtt

SEQ ID NO: 128036 - DNA, 596 bp, Homo sapiens
cacttccttcttgtgaaagaggaagggaacttaaaaaagataactgtgaacaaattacagcaaaaatggaacaaacraaaaataagttttgtgtactacaaaaggaactgtcagaagcgaaagaaataaaatcacagttagagaaccaaaaagctaaatgggaacaagagctctgcagtgtgaggtatgatatcctagttttaaataaatatttcaactatttatactaaaagtatgtaggatactttttgtaaaagctgacttaccttctgagatttaactggagaaaaaaatctgtcttgtagagtgtcaaattcttttaaataataaaagttcttaaatgtgaatacttccactgataattaatgcatatttatttaaatcacaattttaatggctatatagaaggccattatttggaaataccattacttagcaaattaatttttttgatttttaattttttgtattataaatgctacaagacataactgcatgtaaatctttttctacctttctaattattgacttggaataaattcttcaatatagaaatatttagttaaattataggaatttttaaaaagttctttgtt

SEQ ID NO: 128037 - DNA, 596 bp, Homo sapiens
cacttccttcttgtgaaagaggaagggaacttaaaaaagataactgtgaacaaattacagcaaaaatggaacaaacaaaaaataagttttgtgtactacaaaaggaactgtcagaagcgaaagaaataaaatcacagttagagaaccaaaaagctaaatgggaacaagagctctgcagtgtgaggtatgayatcctagttttaaataaatatttcaactatttatactaaaagtatgtaggatactttttgtaaaagctgacttaccttctgagatttaactggagaaaaaaatctgtcttgtagagtgtcaaattcttttaaataataaaagttcttaaatgtgaatacttccactgataattaatgcatatttatttaaatcacaattttaatggctatatagaaggccattatttggaaataccattacttagcaaattaatttttttgatttttaattttttgtattataaatgctacaagacataactgcatgtaaatctttttctacctttctaattattgacttggaataaattcttcaatatagaaatatttagttaaattataggaatttttaaaaagttctttgtt

SEQ ID NO: 128038 - DNA, 670 bp, Homo sapiens
aataccagagaactagaaagaaaaaaaaaattcaggaatataggaattttattggaataataaaccagtataggaagaagtagatctcaaagtgaattctattttctaacaaaatgaattttaagataagtatgtttaatggcagattgactttaaatcaagaagaagagaagagaagaaatgtcgatatattaaaagaaaaaattagacccgaagagcaacttaggaaaaagttagaagtgaaacaacaacttgaacagactctcagaatacaagatatagaattgaaaagtgtaacaagtaatttraatcaggtaaatcaatctctggcaaaaattttatatttctgactttatttcatcagtattacttttaacatccctttgatttagtatgtgttattcaggtctaaatcaaagaaaagtattgtcttaaaattaactatgacttttgtagctacaggtatttattataaattatggcatgcaaatagtatcttatttcagtacaaagagcttttgaaaataatgataatccctaccatatacttagtgataatttattggtaagtattttattcctagcaacatagattagtgtatttttcctagttaacatttaatactgactcaaacattatcaagaggaagcaaaagttagtgtcgtagta

SEQ ID NO: 128039 - DNA, 510 bp, Homo sapiens
gtgcctattgaaaggaacatcactccccacactgcaactgaacaaaagagtgataatgttaattgctttattcttgagcttttcttgaataaaagagggtcgtaggatatggaacaaaatagactagaaaatmgggttgataaggtactgattctgccaatactgcttaatgctctccccaagcaattgtcttttagatatgttatttcccagtgtgaatggtgttttttaaatatgtcaagcaattaagaatataagtatattctcatctcagctaaacgtagaatctttacaaagaatttttggtatccttaaccctaatatgtggagggataagattaaaaatgttcaccaccttatttttatttatttatttatctattattttgagacagagcctcactccaccctgactggagtgctgtggtgtgaccttggctcattgcaacctctgcctcccaagttcaagtgattctcctgcctcagcctctcaagtagctagaattatag

SEQ ID NO: 128040 - DNA, 537 bp, Homo sapiens
ggggcctgagagcttgacccacagtccatgaaaccaatgaatacaatagcagtgtctctggtgtaacacagtgtgcatgatcaaagaatgtcctgctgcttgggcgtctgatccaacagccacctgaagagtgatctgctgctgcctgtcatagacaaaggcccatgcagctactaaggagttcatgtagtgatgcccaagcactaagttgtgcagctcaaatagtggtggaatgatagggtagatgagcaagaatctgcccaggcagcagccctaaatttctgctatcacgtattttggatacatccatgcctttgtggttgatgtgccttccaagccagcagccagcaccctgtctgttctaatgatgtacatgtaacccayaaattagagctttatagttatttaaaaatattgatataaaaactttaattacatgtaaacccattttctttatcacaatttatatcagaatgtatttgggaaataaaagaaagaactgttaatatcattgaatataattttaactgttgtaaa

SEQ ID NO: 128041 - DNA, 458 bp, Homo sapiens
aacctgcttttccactggtgtcgcagtgggagggtttgagctgtgtccttatttttatcagcaacacagctgtgactaaagmtatattatgatagtgtagaaacagtatgggttttcaggtcacgcagacttgaactgaaaccccatctcctttctttgattctttcttttcacattaatttattgaagttttactatgtgtcagaccctgtgtaaggtgctggagattcaaaggtaaataaaacacatttcttgccatccagacactctcagtataatgaaggagccaggcacataaaccagtaagtataatgcaaaataggtaacaataatgatgatgtggatgctgatgagatacggataatagctggcagctctatgaatgatgaatcaggaaaggatgagaccagagacaaggagagcagttagtaggctatagcggcaatctaggcaagcaa

SEQ ID NO: 128042 - DNA, 600 bp, Homo sapiens
tgctcaccacagggctgagagggcccagaactgcccgcgtggagcggcgactggccctgtcttctggcttaccccagggatggaccctgrgcactgaccacacgtggcttggctttgccctctttccttgaccttcactgtggtcgggcagagtcacaggtaggcaggaaacctgatggctcacagcagctcctggatgttctgctttgctctcatctttgatgtacttgaacagccattcttgggtcccaaaagccctgagtaggagatggtattttgtactctgtgtctttatataaaggcatgtatcattgaagaccctgtgttctaacaatcaaatcagctgagcccacctaggccaaaggcagcctggaatggggagggctggggtgaggggggatactttccaagggctctgggactggggtgggcagggactctacactgggcttttaggagagttgttcttgctagggagaatgtttggggcatgccaggtggccaggctgcacctctgggttgcagctgggacagatgaccactgggaaagggtcagcaaatcgccagaagacctgggtcagatgcttccctctgtcctga

SEQ ID NO: 128043 - DNA, 600 bp, Homo sapiens
tgctcaccacagggctgagagggcccagaactgcccgcgtggagcggcgactggccctgtcttctggcttaccccagggatggaccctgggcactgaccayacgtggcttggctttgccctctttccttgaccttcactgtggtcgggcagagtcacaggtaggcaggaaacctgatggctcacagcagctcctggatgttctgctttgctctcatctttgatgtacttgaacagccattcttgggtcccaaaagccctgagtaggagatggtattttgtactctgtgtctttatataaaggcatgtatcattgaagaccctgtgttctaacaatcaaatcagctgagcccacctaggccaaaggcagcctggaatggggagggctggggtgaggggggatactttccaagggctctgggactggggtgggcagggactctacactgggcttttaggagagttgttcttgctagggagaatgtttggggcatgccaggtggccaggctgcacctctgggttgcagctgggacagatgaccactgggaaagggtcagcaaatcgccagaagacctgggtcagatgcttccctctgtcctga

SEQ ID NO: 128044 - DNA, 602 bp, Homo sapiens
aactgcagacttaaggataatttattgctatatattagctaaaatgcctttaaaaattttttttaagtatcatttaaattgtggcatgtatggttgaacagaatgtgttgttatcctttgtaacttcacatgtgtgctacagggtaggaatttgtaagtatctctttctttgcagcaagaagaattttctgcgaaagaaccttcttacaccttttccaagaaaagatcctggattgggactacatgttgagcctggagaaatgataggctgtagtatgaatcagaacacctggtagatgctaagtaaacagaaggaatttatmatcttccagccttacccaatggattggacttttctgttatcttaatcacactactttagttttagtgtttaaaaaaattattattttttgtctggtaccaatcatctaaaagggtttagtgttcattgcatattgaataccttagtggtggcgattataatctagtttttactttaagttttcatcatcttaccactcttcagcattgcacagaacagcatctgtaagactatgtatgctatcccaaaggcgtagaggtttgaggaaagaaaggaagaa

SEQ ID NO: 128045 - DNA, 548 bp, Homo sapiens
gacaccaacacaataatagtagaggacttcaatactccactgacagcactatataggtcatcatgacagaaagtcaataaagaaacaatgaatttaaactataccttggaacaaatggacttaacagatatatacagaatattccatccaacaacccgagaatacacatcctattcaacggtgcatggaactttctccaagatagaccgtatgataggccacaaaaggagcctcaataaatttaagaaaattgaaattatattaagcactctytcagaccacagtggaataaaactggaaatcatctcctaaagaaaccttcaaaaccatgcaaatacattgaaattaaataaactactcctgaatgatcactgggtcaaaaacaaaagcaagattgaaatttaaaaattcttttaacataacaacaataatgacacaacctattaaaacctctgggatacagcaaaggcagtgctaagagaaaagttcatagccctaaatgcctacatcaaaaagactgaaagagcacaaactgacattctcaagtc

SEQ ID NO: 128046 - DNA, 487 bp, Homo sapiens
agaattattcacttcagtgctatcacagactgctccatcccagggcaggagcattggggaagttccttatttgaagaagaaaaataaaagactactcatttgcattttttagtccagcttcttttattaaaacacaaactaccggaccatgtaaaggtgttaagttctattttgaactttattgggaaactgtatgacaggctcaggtagaagtgcagctacctacaattcagactctgaaacaatcaagacaagtcacagggaatttaatggggactgggcagccacagatgggcagaggatcactgcttaggccatcggggtctcagagaacagttcagcaagaacccagaatgtaaaggtacacctccctgttacttttaaaatttctttctaayaaggattataaaacaagtacctcagataacaatgcattaaaaagaccaagaaatgcatttagaatgaaaaaaaaaataccactataaaa

SEQ ID NO: 128047 - DNA, 549 bp, Homo sapiens
ccatcaccacaacccagtttcagaacatttacatcacccttggaagctccctcatgcctgtttacagttaaccccagttcctatccccagctctgggcaccattaatctactactctctgtctctatgactttgctttttctggacacttcatataaatggattatgcagtatgtggccttttgtatctgacttatttcgttaacataatgttttaaagatccatctacactgaagtacgtatcagtatgtgttcctttgtactgaggaactgtattccactgtatggatataccacagtttgttcatccattcgacaatggatggacagttggttgtgtccactttttagctattatgaataatgtcactatgaacatttgtgtacaagtttttgggtggacttacgtttttatttctcttgggtagatacatagaagtgaatatagtacatttatatttaactttttgaaactattaaactgttttctacagtgatcgcaccattttayattcccaccagcaatgtgtgaaggttctacaggtctaa

SEQ ID NO: 128048 - DNA, 597 bp, Homo sapiens
ttacagtgagctcagattacaccactgcactccagcctggctgacagagtamgactccatctcaaataaataataataattttaaaaacccagaaattcattgtctcacagttctagaggctagaattcagaaatcaggctgtcagcagggccatgcttcctctgaaggctctagtgaagagtctttccttgcctctgtcagcatctggtggttgctggcattcctacatttgtggacacatctctccaacttctgtctctgtcattatgtggctctccttgtgtgtctgtcagtggcttcacatggtcttcttttaaaaacaccagctgcttagagaagacaaaggataacctggataaaaaaacaaaaagcacacttaaggatatacaaggaaagcacaaaacagattgtctggaattgaaaacataatttacaaatgaaacatcagtagatgaagaaagaagaacatagttcctgtctagagctatgtactgatctgagacatcagatttctcaagacacagagcaaatatttacattcaaaaaatgaaatcatgatggaaaagagaacagacttagagaaaatatctgtggag

SEQ ID NO: 128049 - DNA, 566 bp, Homo sapiens
tacattgcccttacaatgtctctgactcaaaatcttaagctatcatagctcatagctagtgtttactgagcacgtataatattctgggtagtgagccaactgcctaacgtacatccttttcagtgatcaccatgctcctgtgatggtaaagattgctgcattgactgagtgcttacatggtccaggcactgttctaagtattatttcactaaattctcacaacaactccmtagacaggtgctgttattatccttagtttcaaaggaggaaatgagatatagagaggtgaagtaactttcacaggactatacaaccaggaagttgcggatccaggatttgaatgcaagtagtcagattctagaacctccatgctttaccattatgtaggaggaaattgatgcttggagaagtagaaaaactagtccatctgtgcaggacttcaggggcattggttaatgaccctatctctgattctcttatttccttttctagacattcacttctccagatcctcccatgtttactgtaaagtctaattcccatactaaatcctttaatcccctaat

SEQ ID NO: 128050 - DNA, 568 bp, Homo sapiens
gactatttttatggtcttcatggtgacacaattgaaagttcttttgggtcgttttttttttttaagacaaagtttcactctgtcacccaggctgtagtgcagtggtgcgatctccactcactacaacctccgcctcctgggttcaagtgattctcctgcctcagcctccagagaagctgggattacaggcacatgccaccatgcctggctartttttgtatttttagaagacaggggttttgcatgttggccaggctggtctacaacttctgacctcaagtgatctgcctgcctcggcctcccaaagtgctgggattacaggcatgagtcaccgtgcctggcttttgtgtcatcttaattccctggttctaaagttgtgttcggcggagttcaagaatgttgcctgctacaggggtggggtaggaggaaaacgagcagaaacctagcccagggtgctctgagcctccttctctaaccacagcaattctcttctgatctgttttatatactggggatccctagaagattccattcaaataacagggtccattcaaacaatcaacatttt

SEQ ID NO: 128051 - DNA, 552 bp, Homo sapiens
tttctagcacttcatggcacttacatgataataatcctgttccttgtcactctccattggccgcctccttcccaaatgtaagtcatatgagaccagtgattttggcttgttttgttcacttctgcattcccagtgcttagaaaagtgtctttaacatgatgctcagtaaacattgttgaattaaaataagatttttaaaaactttatgttttaagttttcctaatggtaaaatcccttagaaaactctggcaagagctgtttacttttgggacttagaggttggaagaggatttctggacattttgtggtcckgggaaggactgtgtggccaagagcaggctgggtgggtcagaaggaagccagtggccaaaccatgggtctctcaaaggggaagtggtggggccagtggtgggagtttgggataggcaccctctgacttctacactcctgagatcagtcagatctaagtgtggacatggaactcatccttcctgttgtttggtgctgaaggaagtgagtataaaataatgtaagcataaacatttacagtg

SEQ ID NO: 128052 - DNA, 552 bp, Homo sapiens
tttctagcacttcatggcacttacatgataataatcctgttccttgtcactctccattggccgcctccttcccaaatgtaagtcatatgagaccagtgattttggcttgttttgttcacttctgcattcccagtgcttagaaaagtgtctttaacatgatgctcagtaaacattgttgaattaaaataagatttttaaaaactttatgttttaagttttcctaatggtaaaatcccttagaaaactctggcaagagctgtttacttttgggacttagaggttggaagaggatttctggacattttgtggtccggggaaggactgtgtggccaagagcaggctgggtgggtcagaaggaagccagtggccaaaccatgggtctctcaaaggggaagtggtggggccagtggtgggagtttgggataggcaccctctgacttctacactcctgagatcagtcagatctaagtgtggacatggaactcatccttcctgttgtttggtgctgaaggaagtgagtataaaataawgtaagcataaacatttacagtg

SEQ ID NO: 128053 - DNA, 535 bp, Homo sapiens
gtatagcattccacaattactcataggcatgagctagtcctgaaatttcaagatgtatgtactccttagagaaacaatttctatctgaaaacaggttctcttaaaaattttcatcacaaaattgactgaaaattgacgtaaatgtcagggagatgaagactttgagcataaaatataaaaatataaaatataaaaaaacctttctgatttattgcttttgcagtgatgggtttatttttatgacattgactcttaaacagtggcatggtgatgtaattagaataaatcttgtagawctgtctttatggccagaaatcattttgtcaacagtcagtccttccattgtcttccaactttcagtaaattggtaacttttaagataaaaacaccaccttcatttaaagaggcatgatttcagggcactattacagtgagaactgttaacccaaaatgattttttaagtggcatattcatgagcatattgcattatatgtgatttacagccctactgtgcacagtgtcatttggggacca

SEQ ID NO: 128054 - DNA, 532 bp, Homo sapiens
ttggtgaatattgtttcaaattcatatacatctctatatattgacaaaaatttttatctgacttattgtataattttaaaagtaatttgctctatgctgttttctattatttatgtaaaaactatagaaaaagtgtttagaaggcttttttctttctcttgtcacttttcttttaatttgaagatgtgatgagtagacagaaaccatgaaatttgttttataaaaatatttgttaaaattcttcagaaayagaaaatataaatcattgaaataatcttaaaagttattaaaattgttttcttttatataaggcaacaacttgctttttggttgctatttcaattcagatgatacaaaattttttcttctttgaaaaagaagcaatttaaaatacagccctattataattcaagttgatttgtcatcttaactctgctgttctcttccatttactacctttcacccaaatagagtcaggaagcacgtgagcctacagctgaacttcactgtagaaagttgtaaggaaaaggcc

SEQ ID NO: 128055 - DNA, 611 bp, Homo sapiens
cataatgaccacatgccagagtagaaatggccatacatggttatgatcatggagacaactgtaaaagaagtatgcagartctaatcagataccataacaatctctgtaagaatggtagctccgatgggaaagtacaaaaaaaatcctgaattcactcaggtagtagaaatcagttcaaggacattagctatgaatttggggaatggggggtttgaagactctcatctattcaaatgatggtaatgatgacagaagaatgatggacagtaagggtacaacttgatcttacaaaaaaccaaacctagctaaaggacatggtctctgaatttcctctcaccacagtgacaaaaacaagaagctcagtttacacaactgcacacaaatagactctccctggaatgctgttgactctgtactgcatcctaccctcaaatctctggcccataagtgatctcagttgccttgtaatgacaaaatcagcttgcctggcctgatgatgtgctactctccttgaaactaagtatccttaaaaatctcaggcaggtttggaataaaacacagatataatgaagtgaacaaagtccatagtatgaataccaatatgtgaaatt

SEQ ID NO: 128056 - DNA, 469 bp, Homo sapiens
gaatgaagtcatgtggaaaaatacaaattatacaactgaatagactggtaacccctttattacaaaataattaacttatacttaaattttttgtttactttaacaaagtagtggctataatgaagttgttacgatgttccagaaacttttatcctatgaggcagctaactttaatttactaatttgcaaatgagtaaataagtagttaaatcttttctctttcgttttagtatccactattttagtatccaatatttctctttgattagtatccaatacttaarcttactatataaatatataccatttttaacaaaaaggtattattttcacctgcaatttattacaattattccaaataatgtgtctattatcatggtttcttttggaactgctgaggaaaatgagtcctccatatggtatgtcattctgcagcaggttttcacaggcttgttcatatggaacaaca

SEQ ID NO: 128057 - DNA, 608 bp, Homo sapiens
tgtactctgtagatgtaattatgatttgtcaattaaaaatacattttaaaaagctacaaatgcacatattctttgcctcggcagttccccttctagaaacatcctacagatgtacttagaggtgtgccatggtgaatttgtaaggacaatcattgaaccattgctactaagagcaaaatattgacatttccattaataggagactgttaaatatgccatggtatgtccatataatggaatactacaagagcatagaacacatgggaacttttaattttctgatatggaacaatctttaagatttttttttratgaaaaaagcaaggttagaatagtgcatatcataagctgctattgatgtaaaccagaaaaggattggaatgagaatatttttggtctgcatggcacagaatatctctggaagaataagcaagaaagggatggtattggttgcctctgagaagaaatgggtggctgggaaggagagtgaaaacatttcaaaattatgtatgatattgtccattttgaaattttaaccatatgaatgttacctattcaaaccgttaaattaaagcaatagcaaagccagccatcttgatgcctactct

SEQ ID NO: 128058 - DNA, 542 bp, Homo sapiens
ctcctcaaaatgaagccttgaggacaatcagagttacacgtggtttctttctcctctgaatgtcaatagcccctgtctgcaccacttgcccagtaccaaatcagctgcctaagatggctaatttttgtgtatgtagggggttacaaatttactctcagtcaattgagacgtgtagatgaaattggctctcttcatgtctgtagctgatctggtctctttctaagcctccacatattgtgatgaggaaaaaaccaagcracacatctggttatctctgtccaaaccaataatcaattaatctgtaaaccagtctctcttttgtaatgggataggcaatgtttaatgtttatttgctttatcaaaggattcattataggcttatttaaacagagaaatttcctgttaaatatataattatttccttctaaataaatagcttttagttaatatgaccacataatttcctatctaaagtgggacacttttgagaaagaaaggggatactaattggatggaacatgaggatcttaggtaaaaaccgg

SEQ ID NO: 128059 - DNA, 424 bp, Homo sapiens
caatggaaaccaaaacggagcaggagtacctatacttaaatcagacaaaatatatttcaggatgaatagtataagaatagacaaaagtcactatataatgataaagggatgaattcagcaagagaatataacaattttaaataaatacgcatccagtacaggagcacataggtatacaaaacacatactattagtgctaaagagagagatagaaccmaacacaataaaagctggagacttcaacaccccactgtcagcattagacagatcttccagacagaaaatcaacaaggaaacatcagacttaatctgcagtgcagagcaaattgacctaatagatatttacagaacatttcatccaagagctacaaaatacatattcttttcctcagcacatggatcattctcaaggatagaccatatg

SEQ ID NO: 128060 - DNA, 610 bp, Homo sapiens
taaatggtttactgttatgaattattttaatgctaccatgctaccaaccatgaagctctaacagctagcttaaattataacttccagatctttattcaacttaaaactttttactattattaaaacgaggtaactaataaatgatatttgactwcttgaataattttaaggaaaagatacaggcatatgtcaccatacagttttaaattaacttttaaaatttttatatgtagactggctatcaagcaatgctatgtacaaatgtcttgaggattatatattttaaaatttgtttaagttctaaaaaaaaagtgtgcttatagaaaatatagctacaaaattattaatttttcagcttctagttctcttttgcccgaaaagcaagttgattattttggttaaaggtggtaattaatataaaaaattgagataatgctagctataatgcttccataggaataaaaatatgcatacaaattataagtagcttgtaattttaataagctgtaaaggttattaatatgataaatttagtaatatatatatgaatgctgattaatttatttcttaaagctaatgtttagagttttcattttaccctttatttccc

SEQ ID NO: 128061 - DNA, 464 bp, Homo sapiens
atcctaacaagtagttcaactttccacccaatgcagaatcatatgcttattatttctcttgcaatggtcacccaagctctttgtgaatatttttagcaatggaaaaaaatcactaatttaaaggatagaccattatattactggaaagttctaatttttagaaaactctgtaatacgttaatgatgtttgcctatttccatccatctatctatccattcaacacttggctaggagctcagggtgatacaaattattaaggtatgccttcactgaacaagaaactatgcattcatcgtcactgtcttaatccttcaaatatttttaaaaactcaggtacttgcttaagggttctcctttctaagacaagtttccaacttctcttgactatttttcagacattctatctagactcctaaccatcatagttactttctyctgcacagattgcagttgttagcttggt

SEQ ID NO: 128062 - DNA, 559 bp, Homo sapiens
ctcttgcatccttgttcattcattaaatcttcatttctttccaaatgaactcagctctcccttttattagcaaggatcagtcaaaaagggttatgtctaggtacaatgaggatataaaataggaccccttcatcattaagatagtcagttaaacttcctgtgtgtgcaccgtatctgcacaagtagtgctttggttatttatttggttatatttagtgctgaggagacaggaatgcaggcatgaacaaaacagatcctgcccttctgaagtttacgttcaagtgggttgcccattaaacaagwaattgtagatgattaaataagcaattttgtgtgaagatgcattcaacatgaagggcatgcctagagaaggatgcaatccaatctttgtagttagggaaggttttcctaagaagtgataaccagataggaccaaaagaagctagataagattggcttgacatcctgggaaataaggatctgttttgtgaaaggccatcagaaaaatatcttggtcacatgtaaatataaatttcctaagaaatttggtgcctttaga

SEQ ID NO: 128063 - DNA, 618 bp, Homo sapiens
ggaattctccataattcattctagaaagcaagtattatcctgataccaaagccagacaaggacacracaataaaactatagatcaatatccttgtgaacatagatgcaaaaattctcaacaaaatactagtaaacaaaatccaatagcacatcaaaaagatcaagttggttttattcaaagtgtgtgaagatggttcaaaataggcatatcaataaatgcaatttattacataaacaaaagtaaaaacaaaaaccatatgatcatctcaatagatagagaaaaagcatttgacaaaatgcagtatcccttcatgatagaaaccctcaacaaactaggcatagaaagaacatacctgaaaaaaataaagatcatatactacaaacccacagccaacaccacaatgaattgggagtagctgaaagcaatccctgtaaaaactgaaagacaagaatgcccactttcactactctcttcaatatagtattagaagtcctagccagagtattcaaccaagagaaagaaataaaaagcattcaagctggaaaagggaaagtgaaatgatctctgtttactattgatgtgatcttatacctagaaaaccctaaagactcctcaaa

SEQ ID NO: 128064 - DNA, 433 bp, Homo sapiens
agacaactgttacttcatcttttcayccctccactttttctttacattgtctctctttcagtgtatggtttgaatgagctattctttctagcaggcaaagtggtctggctggaagtgaagactgaaaaaagatagtttcattcttccaaaaagatgttactaaagttaatgaaagttcaattagatatcaagtaactaattttacgtctttttaatcatggcaatcggcaaccacaaattgtgcttattgtagtgtaatatgtaagtccacttgaagagaatatcctggaggacagcagcaggattctataaagagagtaactctggaattcacacatagcacatcaaccctaatacatacatatatctatatgtattcatttgcatacataggtacatatatttatcatcttgctctgacatgcattattat

SEQ ID NO: 128065 - DNA, 536 bp, Homo sapiens
gccgcgagtggcatgctgcagcccttttctctgactcagagaacctctcggctggggagctgcaggtgggtcgtctgtcacgcacagttctgaactcctggtgtaaccagagcctaaaaacatatgcaggaactacgctgccagaaacagaagtggagaattttgagttggcgttacaatatgcctctgaactttcagagaaatgacaggcctcagacagaagtgacagatataaatggaaagttttcagggcctggcattaggaattatatctggtcacataccctcaaattcccttcatttctgaactgctgcacagtgtacttgaactagtataatgtgataggaagagctgacagaaatttgatgtcaattttcttccacatagcaaagaaagcaaaaaatgcttcagccctcacacaaactgctgtagtgaggtgtttggaaartcatccctggctagagaaagctgctgtgaaaccaaactctgtatattgaataaagtcttactcaaaaaaaaaaaaaaaagtcttcca

SEQ ID NO: 128066 - DNA, 629 bp, Homo sapiens
cctaggtcagacataacaccaatacttggcccaagtctattccatatagcctgactttttttcacattgttgtgattggactawaaggcacacttcctataacaaagagaagtgagagaaagagagttgtctgggagccatagtgccttttatgacctagttttggaaataaagcagcaatattttattggctttagcttgaaaagtccaccaaggttcaacattatattccaccatttgattgaggaatatcaacaacacactctaaaaaatttgaatatgaaacagacaataatgaagacgggactagaaatagatgttattatttaaaaaggaaaacaatttaaaacatgagaataaagtgtggttctttgaaaaaagtcaataaaattgataatcctttaggcaacgtaactaggaaaaaagagtaaagaaatttccaatatcaggaaagaaatggaggactttgctgaagaccctacagccattacataataataaaaaatagaggagagggaaattgacaatgttgatcaaactttcagttatatgatgattaacttctggggctccaatgtagagcaaggttactatagctaacaacactgtatagtacactagaaatgtgt

SEQ ID NO: 128067 - DNA, 629 bp, Homo sapiens
cctaggtcagacataacaccaatacttggcccaagtctattccatatagcctgactttttttcacattgttgtgattggactataaggcacacttcctataacaaagagaagtgagagaaagagagttgtctgggagccatagtgccttttatgacctagttttggaaataaagcagcaatattttattggctttagcttgaaaagtccaccaaggttcaacattatattccaccatttgattgaggaatatcaacaacacactctaaaaaatttgaatatgaaacagacaataatgaagacgggactagaaatagatgttattatttaaaaaggaaaacaatttaaaacatgagaataaagtgtggttctttgaaaaaagtcaataaaattgataatcctttaggcaasgtaactaggaaaaaagagtaaagaaatttccaatatcaggaaagaaatggaggactttgctgaagaccctacagccattacataataataaaaaatagaggagagggaaattgacaatgttgatcaaactttcagttatatgatgattaacttctggggctccaatgtagagcaaggttactatagctaacaacactgtatagtacactagaaatgtgt

SEQ ID NO: 128068 - DNA, 629 bp, Homo sapiens
cctaggtcagacataacaccaatacttggcccaagtctattccatatagcctgactttttttcacattgttgtgattggactataaggcacacttcctataacaaagagaagtgagagaaagagagttgtctgggagccatagtgccttttatgacctagttttggaaataaagcagcaatattttattggctttagcttgaaaagtccaccaaggttcaacattatattccaccatttgattgaggaatatcaacaacacactctaaaaaatttgaatatgaaacagacaataatgaagacgggactagaaatagatgttattatttaaaaaggaaaacaatttaaaacatgagaataaagtgtggttctttgaaaaaagtcaataaaattgataatcctttaggcaacgtaactaggaaaaaagagtaaagaaattyccaatatcaggaaagaaatggaggactttgctgaagaccctacagccattacataataataaaaaatagaggagagggaaattgacaatgttgatcaaactttcagttatatgatgattaacttctggggctccaatgtagagcaaggttactatagctaacaacactgtatagtacactagaaatgtgt

SEQ ID NO: 128069 - DNA, 647 bp, Homo sapiens
ttttagaatattgacaaagatcattgtatatatttatatatttatggggtacaatgtcatgctatgacacatgtatacaatatggaattaatgaatcacgcttattaacatatctatcacctcaaatgctcatcacttattcctcctaactgaaacattgtaccctttgaccaatatctcctcattcccccctagccccagccactggtaaccaccgttctgctctctgcttctgtgaatttgttttagattccacatacaagtgagaacatgcaataattgtctttatatgcctggattgcctttgtgggcctgcctttcacttagcattatgtcctccaggttcatccatgttgctctcgaatgacagaatttcccttttaattaaaactgaataatatttattgtgtatatrtacacaatttctttattcattcatgaacacattgtttggttccatatattggctatggtaaagaatgttgcattaaacatggaagtgtagatatcgctctgatatgatttcaaatcctttggatttttacccatatgtagggatctgggtaaaaaatgatccataatgtagttttttgagaaaattctatttaagtttttcataatggctgtactaatttacaaccctgcca

SEQ ID NO: 128070 - DNA, 490 bp, Homo sapiens
atgacaaggtttggtgtttcctcccctattttccaaagttgtattttagccttctcgcattttctgaacacttagcagccaggcataactgaaataaaggtatgggctctgaaactccaaaccctttagaaacaacacaaattatctagtttaaagcagaaggacagcaggatctcttacacaaaatcatcccaataagccactggatatttatatttgggtgttcttggaaaagtttctgttaagaggcattacagttaatacagctgggcctgtggctcacgcctgaatcttaacacttctggaggccgagacaggcagattacctgaggttgggagtttcagaccaccctggccaacatggcraaacctcgtctctactaaaaatacaaaacttagctgggtgtggtggtgcgcacccgtggtcccaggttcttgggaggctgaagcaggagaattgcttgaactggggaagtgtatgttgcagtga

SEQ ID NO: 128071 - DNA, 576 bp, Homo sapiens
gggagtaatgacagacaggtttaacctgccactgccaccactgggacttgaggatggtccaactgacatccctgtccccagaaaaaccttcaccacagcctccactaacaatactgccccaaacaacaaaggaaatcacaaaaactactgatgctctttacaaccaaagaaagtatatggaaagtacacactagagtatgtacctagaatcaaagccaaagtgcttgctctacccaatcaacaccataaataatcttaaagaaaaagccccaatgaaagcaaatccaaataattggaagaagcaactgttactcagatatcaatgkaaggaaacaagaaacattaaattataagaaaatataacacctccacaggaacacaataattctccagcaacaagttctaatgaaaaagaaatttatgaaatgctggaaaaaggattcaaaataatgttattaaagaaggtcagtgagatacaagaaaatacaaaaaaaagaaaataaatcaaagaaaaattcaggatgtaaatgagaagtttaccaaagagttagatattatgataaagcacaaaacaga

SEQ ID NO: 128072 - DNA, 574 bp, Homo sapiens
ccaggaatttgttctttatttataaccttatgaccacaagaaataaggagacaatggcttgaattgcgacatgaaaaattaagacattcacataattggaatattcaaaatacttagaaatagatgtagcaaaactcccaaaaactcaccaatttcctcgtactttcaatgtctcacgcacgtgcacgcacacacacaggcactctctctctctctctccctcactaagtgaaacaggtatacatttttttcttacaaagcacagtctaattagacatgggcacaactcttttccctatacaagtgaaaccaacttatctgtcatatcttctatgccyagcacagtgttaaatcaacatttgttgcgtaaatgaatgaaaagtacttaactgaaaatgcagaagattctccatggtttcaatgccaaatgttgaagtgatttcaaaggatcagttagtaccatgcactggtggaatggtgttggcatgcctaaggagacacataggaatggcctacaggtatacacagggacagatgggcagggcagatattggggaaaatgacgaagaagaaa

SEQ ID NO: 128073 - DNA, 642 bp, Homo sapiens
tttgaactttattgaggtataatttacataacacagtatattcatatattttgacaaatgtatataactgtataaccaacataatcaaaataaaaaatatgtccatcatcccagaacgttctctcctgtcactttttaatccctgtgtctcctgccccaagccccaggcaacccctcatctcatttctcacactgtagattagtttgtgggtttttttttttttcaagaatttcatgtacatagaatcatacagtatgtaattgttttgtatttggtttcttttgctttgtgtaatgtttttaaaactcttcatgttgttgaatatgtgagtaatttgtttttttttattgctcagtagtattcactgtatggatatttatattttgtttattcatctattgaaggttatttgggtcatttccagtttggggctattatagatgaagcatctataaacatttatagacaagcctttgtatggacatgkgttttcatttgtcttggggcaaatgacataggagagagctactgcatcatatgtaagtgtatgcgcgaatttccacttgcttaacggtgtcatcagctcttggtattgtcacactttttaaactttagccgctgtagtgaatatgtagtagtat

SEQ ID NO: 128074 - DNA, 623 bp, Homo sapiens
agactggcttttgtggcaatggacactagattcttcagaagaatattggttgaaatcttcctgctgtgacaattccctgcatgcagggcaggagtgtgtgcttcttcccagcaaaggcagaggcagggcctacagaaactgtgcccgcagcctatagtgatggggtctatgaggtaattcaggcagatraggcaggtgagttctttctggaaggcttgtgggaagtctaagtccatttttctgagggaagaaaaccagaagaatttattcttatgccacagagaggcaaagatctacacaaagtttgaatcaggttttgagtaggattcgctcacaggtttaaatctatagcaggatacgattttattttgcacataacaaaaatgaaaaactgaggcatagaattcaagctttgcaaaaaaatgtgttggctccctaaccaacacacacacacacacacacacacacacacacacacacacccctactttccaaattctttcctcctgtatgaaaaaaacttaaggctgggcacagtggctcatgcttgtaatccagcactttgggaggctgaggcagcaggattgcttgatccaaggagtccaagaccagcctgggcaaca

SEQ ID NO: 128075 - DNA, 424 bp, Homo sapiens
agatggttaataatgagtgtcaacttgataggattgagrgatatgaagtattgatccagggtgtgtctgtgagagtgttgccaaaagagattaacatttgagtcagtgggctggggaaggcagacccacctttaatctggtgggcacaatctaatctgctgccagcaaatataaagcaggcagaaaaatttgaaaaggagagactggcctagcttcccagcctacatctttctcccatgctggtttcttcatgccctcaaacattggaatacaaagatctcctttctcatcagtttgcagacagcccattgtgtaacttatgatcctgtaagttaataaactcccctttataaataaatatatatatgtgtgtgtgtgtgtgcatatatatgtatgtgtgtgcgtatgtatatatatatgtata

SEQ ID NO: 128076 - DNA, 548 bp, Homo sapiens
ccacagatctcacaatcctgctgtcgctgagctttctgcactcagtggactggagacaatgccagagagattagaatttgccagcacaagaatgtgccctatctctccaaacccctcactcatatttcctccttatttcattcaaccagcttctatycgcttgcctcctctcccaagcttctggagtctcaaaatgctttcccaaggaaattaaccctatactgactgccttttccaagttttacaaattatctgacaatctgagcacttctggacattttccaaggctggccactactcacatcccatcccaattcctcaggcaatgcttacctagacatttcttacaggcaaaactaaaattaggttatggctaactactctcccacttttctgcaaacctattcaggaatgaggattcagggacaccaatggagcatggaaatgcagttacaaaagccatcaatgacgctgtaagaagctgtacatcaccctggtgaggggtgactggttagtcagagggtcagagccaagtcataggctgagaa

SEQ ID NO: 128077 - DNA, 578 bp, Homo sapiens
atatgtatgaaatataattgatcacagataagctattaaatttttcagtcaatggcgaaagcttttagctcatggtcaaatagaaatggcattagtgtgcatctttgtttcattcctgatctgaggaaaaataatatttcctggtgaatatatttgctattggcttttggaggtaactaytttcaggttgtggaagtttcactcatttctgatttcctaagagcattttccttattaatatgtattgcagttagtcaaaagctttttctgcatttattgtgacagactatttttcttattcaacatctcagataaattaccatatttgattttctagtgtaaaaatgaattgaatttaaaccaagtaggctacaatgtatgttttgatcagtttgctaatatcttgcttaatatttccactgtgttcttgaattagttacctataatgacttttccctgcattgtcttctcaattattggtaaagaggttatgttatgttagcctcagaaaatgaattgtgatatattttctgttttgtttatactctgcaacagtttataagatagttctgttgctt

SEQ ID NO: 128078 - DNA, 550 bp, Homo sapiens
ctttcaaaatgatgtctatctaatcctctgcaattctgcagtttctggatgaattgtgtgcttttatagattgcagaaaataaacatgcttctttctttctcctccttgtccttctcctcttaatcttgctctcatctttcttcattttgaaaagtagttgctgaaaacagtaagagaaaagaaagagaaagaaaatagagttatctctgtttctctctctttgacttttaaaatgtctatttatagataataaatgtctctgttcacaaattagttaattgggcaatgaaagagagakatgtaattttgtaaaacctaatttggcctttgaaagtctcagcactcataggaaacccatgtcaaagtttcagaaaagtctgttaacgtatttagtatataaatgctattgacagtgaactcttccagtgttgccataattactgatattaaaggtcttgtagctatttatatacgtgtttttgtataacacatagtactttttcaatctaatagtgattgttcaaatccttgaatcataaaggatggtta

SEQ ID NO: 128079 - DNA, 623 bp, Homo sapiens
gtaaagagattggcaggattttgaaaaaggggcaaagggaaacataaagtcttgtgtcctaggaaagataaacttggaaatggaggaattgttaaaatttctaagtgtctggagggaagtgactgaagtcagagactgaagtgagtggaagttgggccaagtgtggtgtgtactagatgtattagagcagtgtccagaatcttcttggaaaacaggacaatggagagatcataaacgatgctgaaggaggtgacctctrccttattttccagtccctgaattatagtgttgccagtgatatggtggtcagcatggtgggagctataaaaaccatggagatggatgtataggtttttacatgacccctgaattttcagagctctagacacatcctctcaccaccccaccaatagccctcttaactttcttattagaatttataacagtagtccaggaataatttcagcttcttagtaagaatggtggtaatagtgataaaagtttctccactatttcagtgaacagacagaattattgtaaagtggtaagatgtatgtgtgtatgtgtgtgtgtgtaaatatttaggagccagaaataaatgtattgtttgtaaggcacagaat

SEQ ID NO: 128080 - DNA, 596 bp, Homo sapiens
acaaatattggcaagtgggacctaattaaactaaacagcttctgcgcagtagaagaaactatcaacagagtaaacagacagcctatagaatgggagaaaatatttgcaaagtaggcgtccgacaaaggcataatatttagaatctataaggaacttaaacaattgaacaaacaaacaaaaacaaataaacccattaaaatgtgggcaaaagacctgaacagatacctttgaaagaagacatacaagcagccaacaaacatatgaacaaatgctcagcatcactaatcatcagagaaatatgaatyaaaaccccagtgaaatacaatctcatgccagtcagaatggctattttgtaaaagtcaaaaaacaacttatgctggtgaggctgcagagaaaagtgaatgcttatacactgttggtgggaatatgaattggtccaactgctataaaaattagtttggagatttctcaaagaacttataataccaatcatcccagcaatcccattactgggtatgtattcaaaagaaaacaaatcattctacaaaaaagaaacatgcactcacatgttcattgcaagactattcacaacagga

SEQ ID NO: 128081 - DNA, 603 bp, Homo sapiens
tttgttttcatttatgcttttgtaaatgaggttgtttccttaatttgtttttgggatagttcattgatagtgcattgtaatgcaactggattttatatattgattttttattccgcaattttatcaaattcatgtattagttttaatttagtrgttttttggtggagtctttaagtttttctatgtatacaatcaggtcatctgtaaacataaataattcattttttctttccaattttgttttttaacttgtagagtctttgtctcgctttggtatcagggtaatgctctcttcatagaatgagtttggaagtactttctcctctttaaatctttataaaagtttaagaattactgacattagtttttatttaaatgttcattagaattcaccagtgaagccaactgatcctgggctctttttttaagaggtctttgattactgattcaatatctttacttcttttttgtctgttcatattttatacttcttcattattcatacttactacatttctattgcaaattaagatataggttaggcatgctggttcatacctgtaatcccagcatgctgggaggctgaagcaggcagattgcttg

SEQ ID NO: 128082 - DNA, 559 bp, Homo sapiens
gagacatcacactacctgacttcaaactatgctataaagctacagtaatgaaaacagcatggtacaggtataaaaacagacatataggacaatggaacagaatagaaaactcataaataaagctgtacccttacaaccatctggtcttcaacaaggctgactaaaacaaacaatgaggaaagaactccctattcaagaaacaatgccaggataatcatctagccatatgcaaatgattgaagccaaactcctacctttcaccatatacaaaaatgatctcagaatggattaaagatttaaatgtaagamctcaaactgtaaaaatcctagaagacaacctaggcaataatcttgacattggccttaggaaagaatttatgactaactcctaaaaagcaatttcaacaaaaccaaaaattgacaattgggatctaattatactaaaaagcttctgcacagcaaaataaactatcagagtatacagacaacttacagagaagatctttgcaaaatacacatccaaaaaagccataataaccagaatctataagaaacttaa

SEQ ID NO: 128083 - DNA, 559 bp, Homo sapiens
gagacatcacactacctgacttcaaactatgctataaagctacagtaatgaaaacagcatggtacaggtataaaaacagacatataggacaatggaacagaatagaaaactcataaataaagctgtacccttacaaccatctggtcttcaacaaggctgactaaaacaaacaatgaggaaagaactccctattcaagaaacaatgccaggataatcatctagccatatgcaaatgattgaagccaaactcctacctttcaccatatacaaaaatgatctcagaatggattaaagatttaaatgtaagacctcaaactgtaaaaatcctagaagacaacctaggcaataatcttgacattggccttaggaaagaatttatgactaactcctaaaaagcaatttcaacaaaaccaaaaattgacaattggratctaattatactaaaaagcttctgcacagcaaaataaactatcagagtatacagacaacttacagagaagatctttgcaaaatacacatccaaaaaagccataataaccagaatctataagaaacttaa

SEQ ID NO: 128084 - DNA, 521 bp, Homo sapiens
gcaaccccagccaagttgttgcattttgtttctcccaaggcctggagtcaacatggggagaggcttggagatgctgtgaagcaaagacactgggaacagctgcagacattttcccagaccaggaagtaagagcaagatgccattttcaatctggatgcatgcaaagtcagctttttttttttctttttgtgacccagcagaatgcctgcacaggcattttagtctcaggccaaagattggaacaactgctttggggcttggtagggaccttcacagccatattgtggraaacacctcagcagtatgtgctggaattgtgctttcccccatcgcagcctcggggcaacagaaaagctgctacagctgtaatttctcccaggtgatgaaacttgcagccagggccagcttggagacctacaaccagtctgcaggtgtcattgctgggtgccccagcctgttcccctgagaatgtgatacagcagggctttctctgcttcacccccaggcagaaattcaggcat

SEQ ID NO: 128085 - DNA, 605 bp, Homo sapiens
tccatggacctcctctgacatattaaacattgcagtccattataagctgcaagaggacagggatttttgcctgttttattccctactgtatcaccaggggctacagcaatatctgacaaacagtgggcatgtaatgaatatttgttaagtgaagtaataaattcaatcaaatcacatcacctgtttaaagcacttcattggcttcacattgcacttagaataaagagaaattctttttatacaatataagttcctgcagaatgcagacactttctacttctccagcctcttttcgactcctctcctactagcttctgtatttaagccacattagacctttcttcagttttttatatagactttgtcgcatcacacctcagagattctgtacatgttcttcctcctgcctagaaaggatcgtccctccactttcgcmaactaatccctgctcaacttttcatctcagcaggaggcccattctctttggcaatcctctggcctccagcccatttattatatgctcacatgtcaacatgtacttcgtacagcatgtaacacaattgcacttttatattttaacaaattatatttcccatattgaactg

SEQ ID NO: 128086 - DNA, 609 bp, Homo sapiens
cagtggtcaaggttgagtttgattctgattgaattattaagtaattttaaaaaacactactgcttttcccaatcctaccaagtaaaggatgctagataaaagaaatcccaagtcaggccaggtacagtggctcacacctatagttccaacagtttgagaggcagagatgggagtatgttttaaggccatgagtttgagagcagcctgggcaacacagcaagacctcctctctacaaaaataaaaaaaataaatttaataaaataaaataaatatagccaggcatgatggtatgtacctatggccccagttactcatgtggctgagatgggcagatctcttgattctaggagtttgaggccagcttgggcaacatarcaagtcttctctctctacaaaaatgaaaaaaatgcctgacatggtggtacttgcctgtattcccaggtatgggggcagctgaggcaggagcatctcttgagcccagttggtcaaggttgcagtgagctatgattataccactgcactccatcctgggtgacagagtgggaccctgtctcaaaatacaaatacaaatgaaatctcaagtcagaccagtcccttctaggctatgt

SEQ ID NO: 128087 - DNA, 609 bp, Homo sapiens
cagtggtcaaggttgagtttgattctgattgaattattaagtaattttaaaaaacactactgcttttcccaatcctaccaagtaaaggatgctagataaaagaaatcccaagtcaggccaggtacagtggctcacacctatagttccaacagtttgagaggcagagatgggagtatgttttaaggccatgagtttgagagcagcctgggcaacacagcaagacctcctctctacaaaaataaaaaaaataaatttaataaaataaaataaatatagccaggcatgatggtatgtacctatggccccagttactcatgtggctgagatgggcagatctcttgattctaggagtttgaggccagcttgggcaacataacaagtcttctctctctacaaaaatgaaaaaaatgcctgacatggtggtacttgcctgtattcccaggtatgggggcagctgaggcwggagcatctcttgagcccagttggtcaaggttgcagtgagctatgattataccactgcactccatcctgggtgacagagtgggaccctgtctcaaaatacaaatacaaatgaaatctcaagtcagaccagtcccttctaggctatgt

SEQ ID NO: 128088 - DNA, 589 bp, Homo sapiens
tatgcaggctgtacatatacaccatggaatactatgccgccattaaaaaatgatatcatgtcttttgctggaatgtggatggaccttctattatccttagcaaactaatgcaggaacagaaaaccaaatacagcatactctcagttataagtgggagctaaatgatgagaactaatgaacacaaagaataaaacagaccctggggtctacttgagggtggagggtgagaaaaggaagagaagcagaaaagataactattgggtactaggtttaatacctgggtgatgaaataatctgtacaataaccccctgtgacaccagtttacctatgtaacaaatgcccctaaacttaaaataaaagttaaaaaaaaagaaaattaaaatctccttatcatctacctggtaatatgaaaaacacaaatctttcattcattcctttcaactgatgaggaaaatgaggcatcgggagttagtaaaagtccacattgagatatgagacccaccactggctggacacagtggctcacacctgtaatcccagcactttgggaggccgatgctggtggawcacctaaggtcaggagttcgg

SEQ ID NO: 128089 - DNA, 530 bp, Homo sapiens
ccaatatggttattattagaaaccaattacattttcaacttaaaaatagtaatacttattgcagactcaaatgtgcttattctaaaacaagtaaatgtttgcctatggtctgagattctaatccacggagttcattctaatccacattcaacactatcatgtaccagtgggcctcataacccacctagccctgtgatttttcaggttcacttttctaaacttgtgaattaaatatttattttcttagttcagaagaggaaaaaaactcttgtaattgttgcccatttcaggagaaatcttgcatatgaaaacaagagataaatatacacaactgaggrctgtggtttaaacaaaatcttgagaatgttttttgaccttatacatttgtgctttagtataacaaaatgatatagacaaaggtaacttttaatagaaccagtcactaaattaaaaaaatgacaaattcttctgcttagctaagcaacagagaaggtaaaatactaattcaattcatcaatttaagcaatact

SEQ ID NO: 128090 - DNA, 544 bp, Homo sapiens
atctattcaccaagctcttccaataatagcataaggccctaattaatattaaacttttatcattataatacataggatgtcttctgttttcctgatcaaattctgactactattaaaatataaagaattgtccagaaatatataaaaaaagaatcacacattgatcttctttaaatgaaaatataacaattgtatggactaggatgattacagttgttcagttctgactgttatttgaagaaaaaagcartaagaagcctcagcaacttaacagaaggagctgccatttactaggagaaaagattgtggatgagagtgtagcaaaggtcagaattctgtgaagcttgagatgtttattataatgaattatcttttatactcactacaatttcctaacaattttggggtttatatttttgaaagagatatacctttaattttctttctttgtactattgttaggtaactttgatgtgcagattatactacagtgaaagttgccaatgacaaggcaaagtcacttacatcagacccaaagcaaagt

SEQ ID NO: 128091 - DNA, 619 bp, Homo sapiens
ctagtggaataacataaaaataaaaacaatgcttacataaaatgttgtaactgatttggatgtcattagaaatcagtaagtaaatagatggacaatgtaatgaaagatgctaggcaaataatgtggtagggagaataatggccctcaaagatgcccatgcctaaccctggaacctgtgaatatgttacactgaatgcaataaaggcttatcagatgtgattaaggatgcaaacygagatggagagatcttcctgggttacccagatgggcccagtctaatcacatgagttcttaaaaatggagaacctttcttagctgagtccagagagagatgtgacaatgaaagaatggtcagagaaatgtgacattgccagctttaaaaagagagaggagaggcaatgagaaaaggaatgctgatgttctctagaagatagaaaaggccaggatatggattctaccctagccaccataaagaaacatgcctgtcgacaacttgattttagttcactaaaattcatgcctgatttctgacttgtgtacactgtaagatgacaagtttgtgttattttaggtcacttagtttgtagaaatttgttacagcagtaatagaacaagtggt

SEQ ID NO: 128092 - DNA, 631 bp, Homo sapiens
ttctcctgcctgagcctcctgagtcgctgggactacaggcgcccgccactatgccctgctaattttttgtatttttagtacagacggggtttcaccgtgttagccaggatggtctcgatctcctgacctcgtgatccacccgcctcggcctcccaaagtgctggaattacaggtgtgagccaccacgcccggccagggtacacttttaagcagagacactactttgaaggtcataaaaaatataataagagataaggctaatttcctttaataataataaaatcctttaataaaaatataaaggaataatataataattttctttaataaaatataataagagataaggctaatttcctttaataaaatatagtaactacataccaacagaattccaaaaaaagaaatggagaggaagggagcatgggtcattaatcttgtcaaaaatataaaattatatacgaggaattcctagaaactgttttccttgtctgcrgccgttgtgctgctgctacacaactaccgcaagcagcccttcacgccctcctcccagtacaaagctaattgacttgtgagaaatgttaagcttggaagagtcagcatcgctgcacttattttttattctactctg

SEQ ID NO: 128093 - DNA, 631 bp, Homo sapiens
ttctcctgcctgagcctcctgagtcgctgggactacaggcgcccgccactatgccctgctaattttttgtatttttagtacagacggggtttcaccgtgttagccaggatggtctcgatctcctgacctcgtgatccacccgcctcggcctcccaaagtgctggaattacaggtgtgagccaccacgcccggccagggtacacttttaagcagagacactactttgaaggtcataaaaaatataataagagataaggctaatttcctttaataataataaaatcctttaataaaaatataaaggaataatataataattttctttaataaaatataataagagataaggctaatttcctttaataaaatatagtaactacataccaacagaattccaaaaaaagaaatggagaggaagggagcatgggtcattaatcttgtcaaaaatataaaattatatacgaggaattcctagaaactgttttccttgtctgcagccrttgtgctgctgctacacaactaccgcaagcagcccttcacgccctcctcccagtacaaagctaattgacttgtgagaaatgttaagcttggaagagtcagcatcgctgcacttattttttattctactctg

SEQ ID NO: 128094 - DNA, 590 bp, Homo sapiens
tacctcctactctccccacctacctttgcccccagccttaggcaaccattgattaattttyttgtcactatagatttgcctaatctggacaaatagaattgtacaatatgtgatcttttgtggctctttttccctcttagcacagtgttttcaaagttcctttatgtcatagtgtgtatcaatatttcattccttctatggcagtattccatggtagagacacactgcattttgtttatctgttcatcagttggtggatatttgggttgtttccctgtattccatgtattggtcattatgaataatgctgctatgaagattgttgtacaagtttttgtgtggacatatatttttatttttctgggatatatgcctaggagtgaaattgttgcattataggatgactgtacatttagccttttgagaaactgccagactgttttctaacgtggctataccagttgggtgcaatggctcacacctgtaatcccagctactcaggaggctcagctaggaggatggcttgagcccgtgaattcaagaccagcctgggcaagatagtgaaaccccgtcttgattttttaaaaatc

SEQ ID NO: 128095 - DNA, 590 bp, Homo sapiens
tacctcctactctccccacctacctttgcccccagccttaggcaaccattgattaattttcttgtcactatagatttgcctaatctggacaaatagaattgtacaatatgtgatcttttgtggctctttttccctcttagcacagtgttttcaaagttcctttatgtcatagtgtgtatcaatatttcattccttctatggcagtattccatggtagagacacactgcattttgtttatctgttcatcagttggtggatatttgggttgtttccmtgtattccatgtattggtcattatgaataatgctgctatgaagattgttgtacaagtttttgtgtggacatatatttttatttttctgggatatatgcctaggagtgaaattgttgcattataggatgactgtacatttagccttttgagaaactgccagactgttttctaacgtggctataccagttgggtgcaatggctcacacctgtaatcccagctactcaggaggctcagctaggaggatggcttgagcccgtgaattcaagaccagcctgggcaagatagtgaaaccccgtcttgattttttaaaaatc

SEQ ID NO: 128096 - DNA, 538 bp, Homo sapiens
gactttaatgtttgctttgttcatgagcaccacatattgcctctcctatgcagttaagcaggtaggtgacagaaaagcccatgtttgtctctactcacacacttcygactgaatgtatgtatgcagtttctacaccaaattcttcagtgctctggatattaactgggtatctcatgactttattctgacactacctggagttagcacagaccccacaagttaggggctcagtcccacgaggccatcctcacttcagatgacaatggcaagtcctaagttgtcaccatacttttgaccaacctgttaccaatcgggggttcccgtaactgtcttcttgggtttaataatttgctagaacagtttacggaactcagaaaaacagtttattttctttttttctgagagagagggtcttattttgttgcccaggctggtgtgcaatggtgcagtcatagctcattgcagccttgattgtctgggttccagtggttctcccacctcagcctccctagtagctgagactacatgcctgcaccac

SEQ ID NO: 128097 - DNA, 538 bp, Homo sapiens
gactttaatgtttgctttgttcatgagcaccacatattgcctctcctatgcagttaagcaggtaggtgacagaaaagcccatgtttgtctctactcacacacttctgactgaatgtatgtatgsagtttctacaccaaattcttcagtgctctggatattaactgggtatctcatgactttattctgacactacctggagttagcacagaccccacaagttaggggctcagtcccacgaggccatcctcacttcagatgacaatggcaagtcctaagttgtcaccatacttttgaccaacctgttaccaatcgggggttcccgtaactgtcttcttgggtttaataatttgctagaacagtttacggaactcagaaaaacagtttattttctttttttctgagagagagggtcttattttgttgcccaggctggtgtgcaatggtgcagtcatagctcattgcagccttgattgtctgggttccagtggttctcccacctcagcctccctagtagctgagactacatgcctgcaccac

SEQ ID NO: 128098 - DNA, 538 bp, Homo sapiens
gactttaatgtttgctttgttcatgagcaccacatattgcctctcctatgcagttaagcaggtaggtgacagaaaagcccatgtttgtctctactcacacacttctgactgaatgtatgtatgcagtttctacaccarattcttcagtgctctggatattaactgggtatctcatgactttattctgacactacctggagttagcacagaccccacaagttaggggctcagtcccacgaggccatcctcacttcagatgacaatggcaagtcctaagttgtcaccatacttttgaccaacctgttaccaatcgggggttcccgtaactgtcttcttgggtttaataatttgctagaacagtttacggaactcagaaaaacagtttattttctttttttctgagagagagggtcttattttgttgcccaggctggtgtgcaatggtgcagtcatagctcattgcagccttgattgtctgggttccagtggttctcccacctcagcctccctagtagctgagactacatgcctgcaccac

SEQ ID NO: 128099 - DNA, 538 bp, Homo sapiens
gactttaatgtttgctttgttcatgagcaccacatattgcctctcctatgcagttaagcaggtaggtgacagaaaagcccatgtttgtctctactcacacacttctgactgaatgtatgtatgcagtttctacaccaaattcttcagtgctctggatattaactgggtatcycatgactttattctgacactacctggagttagcacagaccccacaagttaggggctcagtcccacgaggccatcctcacttcagatgacaatggcaagtcctaagttgtcaccatacttttgaccaacctgttaccaatcgggggttcccgtaactgtcttcttgggtttaataatttgctagaacagtttacggaactcagaaaaacagtttattttctttttttctgagagagagggtcttattttgttgcccaggctggtgtgcaatggtgcagtcatagctcattgcagccttgattgtctgggttccagtggttctcccacctcagcctccctagtagctgagactacatgcctgcaccac

SEQ ID NO: 128100 - DNA, 464 bp, Homo sapiens
ttaagcagttacctccatttttccagatttgtttcatctgcttcaatctccctaaaaatttatgtttgtacaggaaagactgaataaatagctaattctccaccctacctctcatcttaagtcacttttcagagtagtaagttagtgacctagtaaccttccctctaatgaccagtagtttttttttctgaataccattatgaactcatagwttattgtttgcatttgatgtatttcaggccattgcagtctttattgttttggatgcttacattgtctcatctaggttaataattatctcttcaagttgactttcatgtctttttgacgtgatcctgttggactttgatggcttccttgctttctggcaaaacagatgttccaggatcaatatactgcaccatacatggagtcagccgtttctctagggaaccttgattccttttagtagagaacacagtttg

SEQ ID NO: 128101 - DNA, 464 bp, Homo sapiens
ttaagcagttacctccatttttccagatttgtttcatctgcttcaatctccctaaaaatttatgtttgtacaggaaagactgaataaatagctaattctccaccctacctctcatcttaagtcacttttcagagtagtaagttagtgacctagtaaccttccctctaatgaccagtagtttttttttctgaataccattatgaactcatagtttattgtttgcatttgatgtatttcaggccattgcagtctttattgttttggatgcttacattgtctcatctaggttaataattatctcttcaagttgactttcatgtctttttgacgtgatcctgttggactttgatggcttycttgctttctggcaaaacagatgttccaggatcaatatactgcaccatacatggagtcagccgtttctctagggaaccttgattccttttagtagagaacacagtttg

SEQ ID NO: 128102 - DNA, 432 bp, Homo sapiens
gaattccccctgattttgagtgtgaatgggtacaaaagaccaggggttgttaaccaaaagcctggaacattcaggtgaatggctgttctgcagggaaggagggaaacagcagggggagatggatggtcaaccttcaaaggccttacacagtcccggccaggataatcttcrcctctcccttctgctggggaaaagtctggattgctaagaccagggtctctatagtggcatctccaacactcaggccgagcttcatggctgggttcctgttttttcatttgctcatgcccctcagtggtatcatctgactcagctcctttccctcctgttgggccagtacttacagtgggtctcctgatgaagctgaggtcatgggttcatgagcccaattatcaccatgctgaccgcaccactaacctggctccgtgtagt

SEQ ID NO: 128103 - DNA, 561 bp, Homo sapiens
cctcactcacttttctccttctgctattgctgctcattcattccagcttttaaaaattcatctttatccaggaacctcgcttctagaaaagtcatacaggtgcttccaggaggctacatgggcacccatatttttctagccactttcattagaccaatgcagcagagaagaaaagcctcaataattattatgacatggcatgttaggataccaagtaaattgcatttgtaaaatgtgattttctgttggtgttcacttckgctctactgacatttggtaagtattattgactgactgactaactaatgtggtcattagtcttcataaagaaaggctctctacaaaaacggagggatgccctttttctggcatttaatacgtaagaaattgcctccgatagaaaccagagttgcctgattactatcagcacaggagaaatgtattaatgtgcctttctagtaacaggtttttagaaagtcaaatataaacaaatctgtctatttgtgtgtgtgcatgtggtagtggggagggaagaaaaaaggagggggagagaaagagaaa

SEQ ID NO: 128104 - DNA, 561 bp, Homo sapiens
cctcactcacttttctccttctgctattgctgctcattcattccagcttttaaaaattcatctttatccaggaacctcgcttctagaaaagtcatacaggtgcttccaggaggctacatgggcacccatatttttctagccactttcattagaccaatgcagcagagaagaaaagcctcaataattattatgacatggcatgttaggataccaagtaaattgcatttgtaaaatgtgattttctgttggtgttcacttcggctctactgacatttggtaagtattattgactgactgactaactaatgtggtcattagtcttcataaagaaaggctctctacaaaaacggagggatgccctttttctggcatttaatacgtaagaaattgcctccgatagaaaccagagttgcctgattacyatcagcacaggagaaatgtattaatgtgcctttctagtaacaggtttttagaaagtcaaatataaacaaatctgtctatttgtgtgtgtgcatgtggtagtggggagggaagaaaaaaggagggggagagaaagagaaa

SEQ ID NO: 128105 - DNA, 535 bp, Homo sapiens
tttacactttgtctctcagaaataaacagatgcttgaattcccacagtgctgcttgagcctcacaccatgtcatcctgccaggcacccagatccagttctagagtttcacatgatcatgagtgttggttaataagtcactgtgaactgggaggggagatttttcaggagtgccacagggctctccctttaatcacatacactccctgctttcattggaaagtgtataatgatgtcagagtgccccagaatggagctagttggaagactgccgtcatagggatgccttagtgaatcaatcaggttttaatttctggctctcaactttgtagatgtaaaagttgatttatcaatatgtgagaaaggatgaatctttctgaaggttatgtcatcacactcactaagcacacagagaataatgtctagaatctgagtgccatgttatcaaattatactgagactcttgcagtcacacgggctgacatgtaagcatygccatgcctagtacagactctccctgcagatgaaattatatgg

SEQ ID NO: 128106 - DNA, 530 bp, Homo sapiens
gctggagtagctcacagaagtcagggaaacacatacgtttaccagtttgttataaaggatatacaaaggatacagatgaacgttagatgaagaggtgtgtagggcaaggtgtagggggaggggcttggagcttccatgccctycctgggcacacaaacctccaggaatctccacgtgttccgctctctggaagctctctggaccccgtcctcttgggtttttagggaagcttcattacgtaggcatgattaattaagccattggccattggtgatcaacttaaccttcagcccctgtccctttcccggaggttcaggagtggagctgttaagtcccaaccctctaatcctgccttattctttccagtgatcagccccactttgaacctatcacacaaaagaaagacagcacttgggagatcccaaggattttaggagttaggaactacaggaactacagacaaaaatagcaccacttaacctcaggctgctcattacatatggggatgaccttagcacctacctgccagg

SEQ ID NO: 128107 - DNA, 612 bp, Homo sapiens
cattagtcactgttctgatttaaaatgtcaccaaaactcgatggcttttctgggcatataggcacagctgtgccattctgtttctgtgatttttgaggttgtttatatgacatgctgcacaatcactctgtaggtaaaatctcaacaaagctgtctgaatgtcatctctaaaaaagaccaaagttggcagctgtaatgacacaagggacagcattctagagacaagcaggcaagaagtactggaagcaaaagagcagagacaaccagggagcagaatccatccaggtggaagcytgggtcccagcaagtcagagaaccttgaaaagggattagacaggaaggttgaactaaaaagtttgccaagcaggctgtggttccccagtcgtagagctgctgttcagggtaagatctgcagtccctgggagtcgggaaaaactggaaggcgaagtgggaagttggccccaagtacaggcaggaacccagatcctcattttggagtacaaaatcaagccaaaattgtccataatctccatttgatcttagtcacttaaactaatgagctaattggggctcctcaaattcttctaactatgagattagtcccagaaggta

SEQ ID NO: 128108 - DNA, 634 bp, Homo sapiens
ggggcttaaaaatatatgtaagtttaatgtaaatgacaacaatagcacaaaagttgtcagaagtaaaagtaattaacttattacatacataataattcaagtatacaagtttaattctctaggataacaaccagttgagtagtcaatacatgtacaactaacaaattaatatagcatgggaaaatggaataacagcaaaagaagataagaaaggagaaaaaaaggcaactataaacgtatgggcaaatagaaaaagcaaaagtacctatacttgtatcatataaaacagactttaaatcaaaaataataaaaaagacaaggaaggccatgtaatgataaaggkatcaattcagcaagaaaaaatagcaattctaaatacgtatgcactcaacactgaagcatgtagatatataaagcaaacattactagatctaaagtaagagatagattttaataaaataatagtgggagacttcaataccccattttcaacattagatggatcatctatacagaaaatcaacaaggaaacattaaatttaaactggacttcagactaaattgacctaacagacatttacagaacatttcattcaaccgctgcagaatatatattcttctcatcaggacaagg

SEQ ID NO: 128109 - DNA, 532 bp, Homo sapiens
cagagagtaagtagaatggtgtttgccagaaattggggtttgggrgaaatagggagatgttggtcaaaaggcacaaaccttcagctgtaagataaataagctctggagatctaatatacagtattgtgacaattgttcatagactatagttaataataacgtattatgtacttgaactatgacagtagatctttagtgctctcaccacacactcacacaaaaggccttcatcaggtgatgaatatgttaattagcttgattgtgagaatcagtacaaaaggtatatttatatcaaaacaccatgttatacaccttaaatatacacaattttttatttgtcaatcatacttcaataagaaaagttaattttgacaggtttttgccagtttttttcattgcttttgtggagggatgaaatgttgaggtccttctttactccatggtttttgctaacattgctgactctcatcctatttttatttaataatatttactatagctcatagtaaaaaaattaagtaataagttattc

SEQ ID NO: 128110 - DNA, 532 bp, Homo sapiens
cagagagtaagtagaatggtgtttgccagaaattggggtttgggagaaatagggagatgttggtcaaaaggcacaaaccttcagctgtaagataaataagctctggagatctaatatacagtattgtgacaattgttcatagactatagttaataataacrtattatgtacttgaactatgacagtagatctttagtgctctcaccacacactcacacaaaaggccttcatcaggtgatgaatatgttaattagcttgattgtgagaatcagtacaaaaggtatatttatatcaaaacaccatgttatacaccttaaatatacacaattttttatttgtcaatcatacttcaataagaaaagttaattttgacaggtttttgccagtttttttcattgcttttgtggagggatgaaatgttgaggtccttctttactccatggtttttgctaacattgctgactctcatcctatttttatttaataatatttactatagctcatagtaaaaaaattaagtaataagttattc

SEQ ID NO: 128111 - DNA, 532 bp, Homo sapiens
cagagagtaagtagaatggtgtttgccagaaattggggtttgggagaaatagggagatgttggtcaaaaggcacaaaccttcagctgtaagataaataagctctggagatctaatatacagtattgtgacaattgttcatagactatagttaataataacgtattatgtacttgaactatgacagtagatctttagtgctctcaccacacactcacacaaaaggccttcatcaggtgatgaatatgttaattagcttgattgtgagaatcaktacaaaaggtatatttatatcaaaacaccatgttatacaccttaaatatacacaattttttatttgtcaatcatacttcaataagaaaagttaattttgacaggtttttgccagtttttttcattgcttttgtggagggatgaaatgttgaggtccttctttactccatggtttttgctaacattgctgactctcatcctatttttatttaataatatttactatagctcatagtaaaaaaattaagtaataagttattc

SEQ ID NO: 128112 - DNA, 532 bp, Homo sapiens
cagagagtaagtagaatggtgtttgccagaaattggggtttgggagaaatagggagatgttggtcaaaaggcacaaaccttcagctgtaagataaataagctctggagatctaatatacagtattgtgacaattgttcatagactatagttaataataacgtattatgtacttgaactatgacagtagatctttagtgctctcaccacacactcacacaaaaggccttcatcaggtgatgaatatgttaattagcttgattgtgagaatcagtacaaaaggtatatttatatcaaaacaccatgttatacaccttaaatatacacaattttttatttgtcaatcatacttcaataagaaaagttaattytgacaggtttttgccagtttttttcattgcttttgtggagggatgaaatgttgaggtccttctttactccatggtttttgctaacattgctgactctcatcctatttttatttaataatatttactatagctcatagtaaaaaaattaagtaataagttattc

SEQ ID NO: 128113 - DNA, 650 bp, Homo sapiens
ttgagtgtctacaatgtgttagtactgggagtaatgtagtgaataaaccagataaaaaaacccagcccgtgtggatcttacattctagtagagaggagaccaatgagcacatgcacaactaaattttgtgatatagcaggaaatttgcgaaagtaagatttttttatttttatttttcttaaagagggttctctttaaacatcagaccccacagaatcgggatctatccctatcgttaggtaattattttaatactatgtatttaaatttagaaaaggaagaaaacagaagtggctgacaactccattttcascagaaatacaccattaacgttataaaacacaacaaacagaagtaaaaattaaattaatacatgcacccactaagacaatgcaacattcaatgaaaatgaagagtaaaaatttctaagcccactcggagtccctgaaggtcctatccttaaaagtaactgttaatttgtttgcattcaaacagaaaaaaatgcatacacaatacaatatgtattatacacattagaaccttttaaatttttatttcacactgccataaaccttgcctttttgtaatgtatatttagaagacatctgcatatttgcaaacatggagcaacctcattcttatcatctgcc

SEQ ID NO: 128114 - DNA, 650 bp, Homo sapiens
ttgagtgtctacaatgtgttagtactgggagtaatgtagtgaataaaccagataaaaaaacccagcccgtgtggatcttacattctagtagagaggagaccaatgagcacatgcacaactaaattttgtgatatagcaggaaatttgcgaaagtaagatttttttatttttatttttcttaaagagggttctctttaaacatcagaccccacagaatcgggatctatccctatcgttaggtaattattttaatactatgtatttaaatttagaaaaggaagaaaacagaagtggctgacaactccattttcagcagaaatacaccattaacgttataaaacacaacaaacagaagtaaaaattaaattaatacatgcacccactaagacaatgcaacattcaatgaaaatgaagagtaaaaatttctaagcccactcggagtcyctgaaggtcctatccttaaaagtaactgttaatttgtttgcattcaaacagaaaaaaatgcatacacaatacaatatgtattatacacattagaaccttttaaatttttatttcacactgccataaaccttgcctttttgtaatgtatatttagaagacatctgcatatttgcaaacatggagcaacctcattcttatcatctgcc

SEQ ID NO: 128115 - DNA, 605 bp, Homo sapiens
ggtgattgaagtctaaccatatcattaatcatataatattaaatgtaaatgtctaaayacccaattaaaatgcagatttttcagattagataaaaaatccaactatatactgcttacaaaaaaatactctttaaatataaagacagagctatatttaaagtaataggatggggctgggctcagtggttcatggctgtaatcctagcactttgggaggctgaagtgggcagatcgcttgaactcaggagttcaaaaccagcctggggaacatggtgaaaccccatctctactaaaaaaaaatcctaaattaggtgggcatggtggtatgcatcagtaatcccagctacttgggaggctgaggcatgagaattgcttgaacctgggaggcagagattgtagtaagctgagatcatgccactgcattccagcctgggtgatagagtaagaccctgtctcaaaaagtaaaaacagtaatagaatggaaaaagatattgtgctaacattaatcaaaagaaagcagaagtggctgtaatagtatttgccaaagtagatttcggaacaaagaagacaaccagaaatagaacaagtcattccataatgataaa

SEQ ID NO: 128116 - DNA, 605 bp, Homo sapiens
ggtgattgaagtctaaccatatcattaatcatataatattaaatgtaaatgtctaaatacccaattaaaatgcagatttttcagattagataaaaaatccaactatatactgcttacaaaaaaatactctttaaatataaagacagagctatatttaaagtaataggatggggctgggctcagtggttcatggctgtaatcctagcactttgggaggctgaagtgggcagatcgcttgaactcaggagttcaaaaccagcctggggaacatggtgaaaccccatctctactaaaaaaaaatcctaaattaggtgggcatggtggtatgcatcagtaatcccagctacttgggaggctgaggcatgagaattgcttgaacctgggaggcagagattgtagtaagctgagatcatgccactgcattccagcctgggtgatagagtaagaccctgtctcaaaaagwaaaaacagtaatagaatggaaaaagatattgtgctaacattaatcaaaagaaagcagaagtggctgtaatagtatttgccaaagtagatttcggaacaaagaagacaaccagaaatagaacaagtcattccataatgataaa

SEQ ID NO: 128117 - DNA, 595 bp, Homo sapiens
aggccaacatttaaattcaggaaatgcaaataacccctgtaagatactacacaagacgaccatccccaagacaaatagtcctcagatcctccaaggtcaaaatgaaagaaaaattgttaaaggcagctagagagaagggtttggtcacctataaaaggaatcttatcaggctaacagcagatctttcagcagaaactctacaagctggaagaaatttggggcctatactcagtatttgtaaggaaaagaaattccaaccaagaatttcatatctagacaaactaagcttcataaggaaagagtaataaaattctttttagaaaagcaaatgctaagagaatttgttaccacctgactgccttacaagaagtccttaagggagtgctgaatgtggaaaggaatgattgataccagtaactgcaaaaacatacttaaatacatatarcattgacaccataaacacacacacacacacacacacaataaaatcatccaaataaccagctaagaacatgaagacaggatcaaacccacacatatcaatattaaccttgaacataaatgggctaaattcccccaattaaaaggcaagttt

SEQ ID NO: 128118 - DNA, 595 bp, Homo sapiens
ctttaataaaatcttctgatctctgggtcctttttatttatacatatattcatgcatgcttatttaaaacccaaaataaccctgtggaccagatagctcatgtattatttttgataaaaatctgggtaccaaaaggttttgcagttcatctatcaccattttgataagggcgacaatctgtgtcccaagatcctttaatattcttgtcatcgaacccagagacttttccaaaatcagaatatgaaaaacaagaggtagaacacaaggtgaatttcaagtgcttgcatttccaagtgatgattgttggaaatgtgattgtaagtctgtactgtgctttttaataacttgattgtgaagctggaaagacacttcctgcctctgcttggtggtctcattagattaccattctcctcaatgttggcaatttattgcagtttccctttccyatctttacaccattcattccaatgcagggaaaagatttcaaaaaccactgcaatgctcccattagtattaaatcttacactttaaatttaagttatttaatatcaaagctgtgaaactgccagatggatagatttttcttattgattat

SEQ ID NO: 128119 - DNA, 582 bp, Homo sapiens
tgggcatgtgacatttctcagttgatttaccatccacgttgactacccatctattaggcagattttggagacaacctctttgtcctcctaactgtgcaatggaattaggcttctcccttatcgacaatgaccccatacctaacttcagccttcctggaactccctttttatctraacacttctcctggccctgatgaagaatgcagtccagaaggaaagccagtgaactttaaggtcaggtgctcctgtcccttgggagcaaacctcggtaaagactagatcccaaatgtgggtgctatatacaactagttccaccccttactatgttaccagtgttcccatggtgatgctgagaatgttacaaggacctttcactcagctattgtatcagttcaggctgcttggtctgggcatgccaataaccatatataaatgttttgtttctctttattctaattaatctgcccacttaacttggctggtatggcttctcatccctggcccaccttttatcatactctcacctttatgtttgctgccccctgttggttgctgtgaatcccagtgaatgctgtatgttag

SEQ ID NO: 128120 - DNA, 620 bp, Homo sapiens
tttactaatggaaatattaagactactcctagacgttaaataactggccctggtcatactctcaagagacagtagcacctagttctgtctgatattccataagccttcacctacagtgctatatcgcttccttttaaattatatttatgtgggatttttgaaggaggtaattgtctttgtctattttctgctgctgtggcagaataccaaagactatgtaataaagaaaacaaagaaaagaagtttatttggcctacagctctggaggcttggaagtccgagagcatggtgctggcatctggtgaggaccttcttgtgttaacccatggtggaagggcaagcaagcatgtgagatagcgagaggaaacggggaccaaactatactttcctgaggagcccacccccacggtacctaaaccatgccctcaataatggcatttatctattcatgaaggctccaccctcatgacccaatcacctcttaaagttcccacctcttaatattgttacagtggcaattaaatttcaacstgagtttaggaggggacactcaaaccatagcaataatatattcacctgcatcaaaaataatatatataggtgtgaagtttaaaaaaaaa

SEQ ID NO: 128121 - DNA, 586 bp, Homo sapiens
ttgttttgtaaaaaggatggctagactgacccaatgcattgaaatgtccaggactcaatctcctgtccaccagctccttaggatcttttcagcctgcagactggacgtgcacacagtggcaggcaatgtatctctggattttcacgctcctggagtagatgagctgtgtttgctataaaatgtcatgtttgctgtgtatctgggaagacttaatgaagcattgtgcacgcagaggcaggatgatgctgacattaatcattgctgctaacttctggatgtgaaagcagrtggcgacacccatggcttctcagacagcacaggttgaggatgtgagttgatcctactggttttcctttagaagcctattttctttttctgttgtcatttctatattcctactgaaggaacaactgttacagaaacacttaaggaatacatggaaacatgtgtgagtgtgtaaagctgtgtgaaaccagctttactttattcatccccttttttcaaaggaagttaataaatatgatcagaaacactctcttgaggaacaagcaacaggaaaaaaataatactttccaagaagaaccaa

SEQ ID NO: 128122 - DNA, 586 bp, Homo sapiens
ttgttttgtaaaaaggatggctagactgacccaatgcattgaaatgtccaggactcaatctcctgtccaccagctccttaggatcttttcagcctgcagactggacgtgcacacagtggcaggcaatgtatctctggattttcacgctcctggagtagatgagctgtgtttgctataaaatgtcatgtttgctgtgtatctgggaagacttaatgaagcattgtgcacgcagaggcaggatgatgctgacattaatcattgctgctaacttctggatgtgaaagcagatggcgacacccatggcttctcagacagcacaggttgaggatgtgagttgatcctactggttttcctttagragcctattttctttttctgttgtcatttctatattcctactgaaggaacaactgttacagaaacacttaaggaatacatggaaacatgtgtgagtgtgtaaagctgtgtgaaaccagctttactttattcatccccttttttcaaaggaagttaataaatatgatcagaaacactctcttgaggaacaagcaacaggaaaaaaataatactttccaagaagaaccaa

SEQ ID NO: 128123 - DNA, 568 bp, Homo sapiens
tgagatgaatgatgccctccctaaaagatgtatctgcatcttaacccccagaacccgtgaatgtgccctaacttatccttgaagatgttaattaagttatggatattgaaatgagatcatcctggattacctggatgaactctaaatccaataacaagtgttcttatgagagacagaagagatcagggataaagaggaagaagaggagatgatcttgtcaagacaagcagagattggaatgttgcacagccatgaagtgaatggaaycaccagaatctagaagaggcaaggaaggattctcccctagagccttcagaaggagtgcagccctggccaacaccttaatttcagactccaggcctccagaaccgagagagaatacatttctgttgttttaagtcgccaactctgttggtgactttgttgcagtagccccaggaaagaatacaagtcccaaactgaaaactgtccacatgttcattaatagtagcatgaatacaagaatggtagtgtagtcacaaagcagaatactttacagcaacgaaacaaaacaaacagcatggatgaa

SEQ ID NO: 128124 - DNA, 631 bp, Homo sapiens
ttaagttatggatattgaaatgagatcatcctggattacctggatgaactctaaatccaataacaagtgttcttatgagagacagaagagatcagggataaagaggaagaagaggagatgatcttgtcaagacaagcagagattggaatgttgcacagccatgaagtgaatggaatcaccagaatctagaagaggcaaggaaggattctcccctagagccttcagaaggagtgcagccctggccaacaccttaatttcagactccaggcctccagaaccgagagagaatacatttctgttgttttaagtcrccaactctgttggtgactttgttgcagtagccccaggaaagaatacaagtcccaaactgaaaactgtccacatgttcattaatagtagcatgaatacaagaatggtagtgtagtcacaaagcagaatactttacagcaacgaaacaaaacaaacagcatggatgaagcttcattaacaaacaccaacgtggtgttaatgaaggaagccagactcagcgtgcataatgcatgatcttgttcatatgaagttcaaaaacaagaaaagcctcattttgtgagagacgtcagaattggatctaccttttagaaggggcattgat

SEQ ID NO: 128125 - DNA, 605 bp, Homo sapiens
gtcatcagggcccattcttctcccagccctcccatttcttctgtacgttttccttttgatgtttactgttataatctccatctcaaaatctaccatggtttttgtggtgttccaggttgtcccggataggaagcatggttcggcaaaccggtctacaccaaacctcagtcattttgtgcttgaattcctttcctttcctgtcatacacaatgaaattatctctgtgtaattactctcaattaggagtagcatcaaatgagtccctactggaaaaatttcaggcatcaatggtagttttggggaatgaaggattaaaaagtcwtccacatacctccaaataaaactggtcctaccttttcctacagtacctgatgtgactatagagcactgaactggctgtccaaatattggttctagttaatacactacaatgctgtgggaccctgggcaggatgactgaccactttggccacagttttcgcaagtgtgaaagaagggaatgtatattaaatggtaaacacattgcttacagatccaaaatgccacatagtagtgaatggaattttcgagaacatttcaaaaactttcccacactttgacataag

SEQ ID NO: 128126 - DNA, 605 bp, Homo sapiens
gtcatcagggcccattcttctcccagccctcccatttcttctgtacgttttccttttgatgtttactgttataatctccatctcaaaatctaccatggtttttgtggtgttccaggttgtcccggataggaagcatggttcggcaaaccggtctacaccaaacctcagtcattttgtgcttgaattcctttcctttcctgtcatacacaatgaaattatctctgtgtaattactctcaattaggagtagcatcaaatgagtccctactggaaaaatttcaggcatcaatggtagttttggggaatgaaggattaaaaagtcatccacatacctccaaataaaactggtcctaccttttcctacagtacctgatgtgactatagagcactgaactggctgtccaaatattggttctagttaatacactacaatgctgtgggaccctgggcaggatgactgaccactttggccacagttttckcaagtgtgaaagaagggaatgtatattaaatggtaaacacattgcttacagatccaaaatgccacatagtagtgaatggaattttcgagaacatttcaaaaactttcccacactttgacataag

SEQ ID NO: 128127 - DNA, 605 bp, Homo sapiens
gtcatcagggcccattcttctcccagccctcccatttcttctgtacgttttccttttgatgtttactgttataatctccatctcaaaatctaccatggtttttgtggtgttccaggttgtcccggataggaagcatggttcggcaaaccggtctacaccaaacctcagtcattttgtgcttgaattcctttcctttcctgtcatacacaatgaaattatctctgtgtaattactctcaattaggagtagcatcaaatgagtccctactggaaaaatttcaggcatcaatggtagttttggggaatgaaggattaaaaagtcatccacatacctccaaataaaactggtcctaccttttcctacagtacctgatgtgactatagagcactgaactggctgtccaaatattggttctagttaatacactacaatgctgtgggaccctgggcaggatgactgaccactttggccacagttttcgcaagtgtgaaagaagsgaatgtatattaaatggtaaacacattgcttacagatccaaaatgccacatagtagtgaatggaattttcgagaacatttcaaaaactttcccacactttgacataag

SEQ ID NO: 128128 - DNA, 556 bp, Homo sapiens
aagaaagtacaggacaaggatatgagtaggtgtcctggaagagagccccaactaaaatcctagccaccagctaccatcaactgccaatcatgtgagtgaaagagtcttcatatgattatagccccaagcttatagctacccaayggatggggagtgtagaacagatgaactgtcctcacctagccatagccaaattgcagattcatgagaaaaataaatgctgttgttgatttaagccactaagttttggggtggttttcatgtgacaatagataaacagacagaaagcagcctgtctaatattagcagatgggcctaacattgccatgcaactacacgaatctttttattcattctttatgttcctagttactatggttcttggtttccactctctgacatgggatattcatacctgctcaagactagtcttacatgctggttgactctactcattcctgtggctcctgtgcccaaatatgaaacctggcaccatctatagccttgcctgggttcttctctcatgctccattttattaatttatgcatattcctg

SEQ ID NO: 128129 - DNA, 617 bp, Homo sapiens
gtattttctgctactcgagaattctggccatcaggctatggaacgttgagcatggttgcacacactcacatgcactcacgygtacacacactttcatagagttattacttttttaaagtctaatgcctagagtggtctggaatgaatgctgacatactgtgagaaataaagaatgagaccggacccacgagtaaccaaatgagcatttcaccagtcagagtgagtgaccaaaggacagctaagaccgttgcattccaccttcccctctggccaagtttgcttcccaatctaagtttggcttctcggtcttccctgaccttcactatcaaaccaagtcttcacaggagatgaaacacctttctgtgaaacacagtagatgttcaccaggtagatgcagggagagggattgccagccaaagcagcagcaatgaagtcacggggctgggaatggagccacatgttggggagttataattagttcattactctaaaaaatagagttactcaactcaaaaaaaaaataaggatggacagatagaccaagttcacctcaagaggaattcatatgttaggtaggagtttgaaattaaatagctatcaaaggtttcaatcaagga

SEQ ID NO: 128130 - DNA, 513 bp, Homo sapiens
tctgtagtcttgagaagtcacaactgggacagggagactgagagacatacaatcttatcactgcaatacattctaacaaatgtgaaaaagaggcttgcataagctggaggtggcctggagtgattagatctgccgagggaagctgggaaatccatgtctaaacaatagcattttctcacatgaaaaattaaggaaaggcatttcaggtaaatcaaagtatgtgtgtaagacattgctgtgtgtaaagcaagttgtgttaggagaatggggcacacatacagtattttaaaattttcaatatgaagcttcactggacccagacattttatttacataatcaactaggggcttttttyccaatcttctaacctgtcttgaatttctatttcctttttaaaatgcttatttttccttttctagtgtaagaataaccttattttacaggggagagagagtgacataaaaattaaggatttgggtgatctcacaatattcttgaacaccagaccctcc

SEQ ID NO: 128131 - DNA, 552 bp, Homo sapiens
ttcacgactgctattcaacatactactggaagtcctagccagagcaatcagacaaaggaaaacaataaagggcatccaaattggtaaagaggaagtcgaactgttgctattcattgattatatgattgtggtgcgtagaaaaccctaaagaatcattgaaaaagctcctagatctgatgaatgagttcagtaaagtttcaggatacaaaatcaatgtacacaaattagcagcactgttatacaccaacaatgacgaagctgagaatcaaatcaagaactcaatctcttttacaacagtacaaaaaataaaatacttaggaacatacctaaccaagaagttgaaagagctggataaggaaaactacaaaacactgctgaaagaaatcatggatgatatgctaagtaaccaaaaaaatgtggtgcacaaaaagataacctaaatggtcaataaacrctaaaaaaaatctgccttgctagaaatcaagcaaatgaacattaaaaccataatgaatgattaggttactcacatgagactgcagttctgaaaatgcc

SEQ ID NO: 128132 - DNA, 570 bp, Homo sapiens
agggattttctggtgtaatgtatatggcacattcagaacagaatctgatacatagcaaatgctcaatagagtatagtaattatcatctccttacctcttccctattctttcaattcctatgttcagccaatcactattttctattagtccttcaccaaaagagtataagctctgtccctttatctatatttctaatacaattaaccaaattactcatttattcattcaatcagtacttaatgagcacctgccgtgtgccaccaactgtactaggagacaaggagatcagcaaaaaagatggagaggtgccatgaggctttcagtctaaatcatattctcttgaatactaaatttggataaatrtccccacagtacctagcatagtaccaaatatggaagatatttcaaaatagccatagacttagtcttgtagaattagaaaagaatctagagataatcttatgtaaaccccttacttttaattaaaatttatggctaagtgcagctcaatattgtaaggtgatgcttcaagtactaagagcaaagtagttttgtttatcacaataatag

SEQ ID NO: 128133 - DNA, 571 bp, Homo sapiens
caactcctggctcaccatcatttgtgagtctcaaaagccagtagaggccaggcacggtggctcacaccagtaatcctagcactttgggaggccaaggcaggcagatcgcttgagcccaggagttcgagatcagcttgagtaacatagcaaaaccctgtctctacaaaatacaaaaaagttagccaggtatggtggtgtatgcctgtagtcatagctactcaggagcctcaggtgggaggattgcttgagcccagggaggttgaggctgcagtgagccctgatcatgccactacactccagcctgagtgacagagtgagaccctgtctcaaaaaattaaaaaataaaaagtatgaatackaggcaattctctctgttatcctcaagtttgcctctctcttctgatttacccacaataagaatgtaaagtttcttttggttaagagggctatattgagaaaaaatattttatgttatattgtcattattatttctaccttcagctttgatgccagtgaaagaataaatactaacaaagtatttcattcaattcccaaatgatagtaaatatta

SEQ ID NO: 128134 - DNA, 579 bp, Homo sapiens
ggcattagcacatgaaactgaagctcacaaaattaaacagtttggccatatctgtccaacttaatacctatgatgcttctattagctaatccttaggattaagatcagtatttgggcctaatttagggagacatctgttaattcattaaaaaaataagattctgcatctatataacagtaatcattgccagaaacttaaaggagcattagcccccatggaaataaagctctggttatggaggagaccaaacaaatagattaaatatagctacatgtgtcaaataaataagtatcaaatgtgatgtgctaaatgagtggtataggtatatgcaacacgtggagggtaaaggatgcaagttgttaatcttagctcatacaaaaggcttcctagtggggatggagcttgaaggaaagcatsagatttcaggcaggagggtggaaagtgatacaaccaaagtgagaatgttcattgcaagttgtaggggcagtataactgaagtaagaattcacataaagtacaagggacttaaatgccagcaggaaacaggaagtaactgaaaactgcagatgtccaggatg

SEQ ID NO: 128135 - DNA, 529 bp, Homo sapiens
catgcaattattttccagtagagaagattctctccaaagtttcctagtccacaagctgcaatcacagctccctcctcctcacatctcctttctgtcatggccctgtcaccatattccaatgaatacctctgaaatatgtaaatgatagatattactgccagcctaaacaytgaaggaactcaatgaggggtgagctttactagaactagtaattttcagcttccagaggccttgtggtagggttgagttagaattagtgcttctaaagaagctctggatatatttgccaacaaattctgagtggaaactttcttttgaagatgtaaaggaatttatcatcagaccaagatcacatgtacctttttagacctttttatgtggatagaagagactttttaaaaaaaattcaaaggtttcttctattgcaggttaaaactagttttggaagatgacactttgagacaataggaatagccttaccccagatgatctctcaatgaatttttcttaataaattaagattaagcca

SEQ ID NO: 128136 - DNA, 499 bp, Homo sapiens
gagagtctgggaaatgtagtctttctgctgagcacatgaccgtgcccaaataaaaccagcattccaattctgtttctaaggaagaaggagaataaggacacggagtggataactagcagtcactgccacagctattatttaagaatgaggacaaaataaaaacattttccgatataaaaatrctaaaaaaatttaacatccacagaccctcactaaaagcactagcaagagtgtattttatttagaaataaaataaagccagagagaagatcacaagaagcaatgatgaacacagaaatttacaaaacatggcagtaaatacaattgcaatttactgtaaaaagataaatatttgtgtttgttttttaaaaggtaaaattaaaagtccaaatgaaaaattataagatagtgggggtgttcaaatgaagcaagatgttaaaattctataaagctggttgtgagtatacagattttatggtattctttatatttgtctatt

SEQ ID NO: 128137 - DNA, 499 bp, Homo sapiens
gagagtctgggaaatgtagtctttctgctgagcacatgaccgtgcccaaataaaaccagcattccaattctgtttctaaggaagaaggagaataaggacacggagtggataactagcagtcactgccacagctattatttaagaatgaggacaaaataaaaacattttccgatataaaaatactaaaaaaatttaacatccacagaccctcactaaaagcactagcaagagtgtattttatttagaaataaaataaagccagagagaagatcacaagaagcaatgatgaacacagaaatttacaaaacatggcagtaaatrcaattgcaatttactgtaaaaagataaatatttgtgtttgttttttaaaaggtaaaattaaaagtccaaatgaaaaattataagatagtgggggtgttcaaatgaagcaagatgttaaaattctataaagctggttgtgagtatacagattttatggtattctttatatttgtctatt

SEQ ID NO: 128138 - DNA, 543 bp, Homo sapiens
gaaatgacacaagggagggtctagggaggttaaggagaacatttcagaaaacaggtgtaacaggcattgtgctttggagaagctgtcaatttgggctgacatgtgggataatatcggggctggcaggaaatttatttattcatcactcagctcatatacatgtgccaggcatggtgctaggttctgagcatgctggaatgagctattcttggtccacattcttaagcagtctatggctggccggctggggagtctcgtgggccatactaaggagtgtaacctttactatgaaggcgctggggagcctctgaacaattttattcaagggagcgatgtgatctgatttgcatttaaaaaagatcactctggagmctgagtgtgggatggacagggtgtgggacgatgaataacaccagagatatcattagggagctcgtggagtagtctggctgataaatgactatggtctgctgaggcagtaggtatggagggaaaagattttagaggtagagtcagtatgacttagagattggggttaaaata

SEQ ID NO: 128139 - DNA, 543 bp, Homo sapiens
gaaatgacacaagggagggtctagggaggttaaggagaacatttcagaaaacaggtgtaacaggcattgtgctttggagaagctgtcaatttgggctgacatgtgggataatatcggggctggcaggaaatttatttattcatcactcagctcatatacatgtgccaggcatggtgctaggttctgagcatgctggaatgagctattcttggtccacattcttaagcagtctatggctggccggctggggagtctcgtgggccatactaaggagtgtaacctttactatgaaggcgctggggagcctctgaacaattttattcaagggagcgatgtgatctgatttgcatttaaaaaagatcactctggagactgagtgtgggatggacagggtgtgggacgatgaataacaccagagatatcattagggagctcgtggagtagtctggctgataaatgactayggtctgctgaggcagtaggtatggagggaaaagattttagaggtagagtcagtatgacttagagattggggttaaaata

SEQ ID NO: 128140 - DNA, 545 bp, Homo sapiens
tgaattccaagatcaatgtatttgcttgaggtgaacttgacctgggaggagaggagtaaccccaaggcagtcacagatgtctctggagagtgaaaatgagaaaaacgtgtccagagggttttatccatccccatccctcctaaaggtgagggctagaagttattttactgtaactcaagcctggggaggaatcataagtcttttagcaccatgagtgtgggagctgcactaacaagaagtcttcttttccctgtaaaagatcccattgtttgtagatggtctcagggaacatagcccagctggagggcctcttcyccggccctgacactagtccggccctgacagtagtcctcctctcaggatcggtagtgcctccttctcccctcccaaatgcagcaacctagctagaaaagcagacagggaatgatacagcacaccaggtgctggccaggagcagatgggatctcaggagaggaagacaacgggttaaatgaaacaggggagggagagggtctgggggagcctgtccattgaccaaggacatg

SEQ ID NO: 128141 - DNA, 674 bp, Homo sapiens
gctactcacccaactcagcctaagggactgggagaaaagtaggtgtatagtggtatttattcccaaatttcagatatgcatttagattcattatccaaaaagctaatgggttttaagatatttggtgcctgctatgttactgctttyctctctccccttttgccgtgaaatgagaacagtttctacaaatcaggtctaggggcacagcttctcaggtgtggggacagattcatttcttaccccaaatgcagccccttcttagctgtcctatgaaatgcccctcccactacttatccatcaccttggctgaatgaggaattaaatgaatgggagggtacttgttgagcacctatcatgtgctggctgctatctctatctcatgagtcaacacattgttctatctcatcttaccactatggcaaccccatgagatcagtgttttctcttctgttcgcagatgaaacttgggcttggagaatgaagtaagttgctcagtgccccaccgatagtaagatcaagctgagatcccaccctctggaacgtgtgtgcatagagcacctattgacttccttgctccagctgcatctggacgcagtgatcaaatccagtggcagcctgtttggtctggtgttttcgctgcttctctatcaactgttccacatccgatgcctcac

SEQ ID NO: 128142 - DNA, 523 bp, Homo sapiens
ccaggaccccagcttcacttagacaccaccttcctcaaagctctcctgcatcagaatcactggaatgggaccagtcctgggatcagtggccttacccaccagagccaccatcccattttcacctgtgcagaagcctctgcaggccccctctcttcacgttacctagggggagcttccccacttggctgcattactcttggccattctgtccctctgcctacagacccagttcacgttcaaggtccagtttcccaacttctctgcctcttcatgcttttgtttatttggttattcttttgtttttgtttttctgttttttgggtttttttgttttgttttgttttaagacagtgtcttgctctttcatccaggctggaatgcagtggcgtgatctcagctcactgcaacctccacctccagggttcaagcaattcttgtgtcttagcctcccargtagttgggattacagtcgtgtgccaccaagcccagctaatttttgtgtttttagtggagatgggttttc

SEQ ID NO: 128143 - DNA, 621 bp, Homo sapiens
gcctacgatggggttgaaaacagtctctgcgctgcctggctctgtgacattggacaagtcactagttccactaggttccggttttctcatctgtaaaatggggataatactatgaaactatctcatagggctgatttgagaatcaaagaataattatatgtaaaatgctctaagcagcgcctgatgtgtagcagctgctcttatttatttatttatttatttatttatttatttatttatttttcgtcgagcagggcatggcctscagcttggtgccaacccccagtcatgttctaacctgacttcaaaatgtgtggtgctggctctgccacttatccaccatgtaacttttggagagttgcctcagtttccccatatatcaaatggggatgaactagatcagtgattctgaaccctagtggagtcctatgagcctctgaggatctgaagggaacagtggatactgttcagaaaaaatcttcatggtgctctgagcttgtcttggccgcccaaagcctgcctacaagccttccaggacttatggactccccaagttccatccagctctggtaagaaggggagggctatgggttgggggggtcactgaacagctccgggtgt

SEQ ID NO: 128144 - DNA, 578 bp, Homo sapiens
tgggggaaagtaggtcccagagttgaccaaaaataattggatgagcaatagtgactgacttggcggagcagtgctgccggggtgtggaggtggaggaggccagctttaacaatcaagcagatgcagaaaccaggctcccaaagactcagacattgaaggtttacaggttcctcagggggctgggggcaaagcatgccttgaaataagaagcttggtccaaaagcctgacgaagagtggctggaaccccagcttctccaccaatgtgctccaccaggcggctcctgccatacacacaggtgggtcctgaagcctctgtcttggcagaagagtaagggttaatctcagaagaaacagccagagagggaagagacccaataccaccagggacarccaagggcagggtgggcatcatattgaaaatgtgggattgaggttggacacagtgactcacacctgcaatcccagcactttaggaggctggggcaggtggatcacttgaagccaggagttggaaaccagcctgactaacatgttgaaaccccgtctctactaaaaatacaaaaattagccaggcgtg

SEQ ID NO: 128145 - DNA, 599 bp, Homo sapiens
ttgccttccccaatgtgtgtgagcatcatccaacattgagcacccaaggaaagagctggcagagcaaaggacagaggagagagggattccccttcaccttttttttttcctgcctgtttgacctggggcatctcaccccagctgactctcaggctgggatttacaccaatggttcccctatttctcaggcctccagactccaactgaattatactatcagttttcctggatctccagcttgcagattgtgggacttctcagccccataattgcatgagccaattcctcataataaatctcttcctatatatttccaattggtctgtttccctggagagccctggytaatgcagtgagctttgcacaaagactcaagacaagctgcttactgagggaaaagaattgccagcagagggaagggctaggaccaaagccctaagcagtgggaaagaagaaggaatgaggatacagaaataataaggtcaaggtcatgaagggacttttagcccatgggtaagaactttgactttaactcagaggaactagggagtcattgaaggtctctgagcagaggatgggcctggtctgatttatgactg

SEQ ID NO: 128146 - DNA, 599 bp, Homo sapiens
ttgccttccccaatgtgtgtgagcatcatccaacattgagcacccaaggaaagagctggcagagcaaaggacagaggagagagggattccccttcaccttttttttttcctgcctgtttgacctggggcatctcaccccagctgactctcaggctgggatttacaccaatggttcccctatttctcaggcctccagactccaactgaattatactatcagttttcctggatctccagcttgcagattgtgggacttctcagccccataattgcatgagccaattcctcataataaatctcttcctatatatttccaattggtctgtttccctggagagccctggctaatgcagtgagctttgcacaaagactcaagacaagctgcttactgagggaaaagaattgccagcagagggaagggctaggacmaaagccctaagcagtgggaaagaagaaggaatgaggatacagaaataataaggtcaaggtcatgaagggacttttagcccatgggtaagaactttgactttaactcagaggaactagggagtcattgaaggtctctgagcagaggatgggcctggtctgatttatgactg

SEQ ID NO: 128147 - DNA, 503 bp, Homo sapiens
ttcaggaggctgaggcagaaggattgcttgagctctggaagtggaggttgcagggagctgagatcacaccactgcaccccagcctgggcaacacagcaatatcttgtctcaaaaatacataaataaataaaataaatttttttaataaaargaaaatataccccccaaaaacatagaaggaaagagacaataaagataagaacagaaatgactgacataggagaaaaagatcaataaggctaaatcttggttctttgaataaaataataaaatagtcaagtttctggtaagactgattaaaaaaagaaagctcacacacacaacaatgttagaaatgaagatgagtcaaaattagagtgacaacagagatttaaaattgatgtaaatattatgcaaatctttacatcaaaaattcaaattctaagatgaaatagtgaaattcttagaaaaaaatgtaactccaaaattgatttgaaaataatttaaaagctcgaatttttatt

SEQ ID NO: 128148 - DNA, 503 bp, Homo sapiens
ttcaggaggctgaggcagaaggattgcttgagctctggaagtggaggttgcagggagctgagatcacaccactgcaccccagcctgggcaacacagcaatatcttgtctcaaaaatacataaataaataaaataaatttttttaataaaaggaaaatataccccccaaaaacatagaaggaaagagacaataaagataagaacagaaatgactgamataggagaaaaagatcaataaggctaaatcttggttctttgaataaaataataaaatagtcaagtttctggtaagactgattaaaaaaagaaagctcacacacacaacaatgttagaaatgaagatgagtcaaaattagagtgacaacagagatttaaaattgatgtaaatattatgcaaatctttacatcaaaaattcaaattctaagatgaaatagtgaaattcttagaaaaaaatgtaactccaaaattgatttgaaaataatttaaaagctcgaatttttatt

SEQ ID NO: 128149 - DNA, 503 bp, Homo sapiens
ttcaggaggctgaggcagaaggattgcttgagctctggaagtggaggttgcagggagctgagatcacaccactgcaccccagcctgggcaacacagcaatatcttgtctcaaaaatacataaataaataaaataaatttttttaataaaaggaaaatataccccccaaaaacatagaaggaaagagacaataaagataagaacagaaatgactgacataggagaaaaagatcaataaggctaaatcttggttctttgaataaaataataaaatagtcaagtttctggtaagactgattaaaaaaagaaagctcacacacmcaacaatgttagaaatgaagatgagtcaaaattagagtgacaacagagatttaaaattgatgtaaatattatgcaaatctttacatcaaaaattcaaattctaagatgaaatagtgaaattcttagaaaaaaatgtaactccaaaattgatttgaaaataatttaaaagctcgaatttttatt

SEQ ID NO: 128150 - DNA, 455 bp, Homo sapiens
tgctgtcttcaactggcctgcgagtgtctgagaattattcagcgttaygtcagggaagccgatggtcaggatgacattcttctttactgcctgatgtatcatgggaaaaactgaatgcatgggaaagtcctcccttcctggctctctctgtccccatgaatatttccaaagagactctttcaccttcagtgacaagagggagaggaggggattgggaggcaactatctagcagtatccagcagacataacacagacactgcatactcacacccacctagacgtgcacacacgacacacacatacccggaacacacacccacccaacacacacactgagcactcacaacacatatgcctacagcacacatagcctcaaagcacctgaaataatggggcaggctcctaaagaatctagactgtggggaaatgcggagtgctggagagagaatgggtt

SEQ ID NO: 128151 - DNA, 545 bp, Homo sapiens
gagactgctgtgggactgctttctcttttgacattttccatgctaatgttcccttgacccagcccttgactctgtgggttaatctgggcaaaagtggacctttactgtggcatgggttcatgcaggaaagtgtccagttgaggaatgatagaagacttttcaggtctgttggcttaggtagtgacccattctgstgagttccatcctaacttacagttttcctcctctaactgctataattctccagatgtgatgatgtattttgatctggctttgccttcctggattaatttacttaataaatatttagaaggccctctatgacattggacatgattctaggctcttgggaatgtagcagggagcaagactgtctaaggtccctatgcagatacagataaacaataaaatctacaactgagaagttagttgcatattgttttaacagttaagaggggagaaacagtgtgatgtgatgagtgaagcagagcgtattcaggagaggatgatcagggacatctcacttcatcagggcagtgacagtt

SEQ ID NO: 128152 - DNA, 546 bp, Homo sapiens
cttaccacaaaccaatctctaatgactcccctaagtcctcagcttgtgatttcatggttgaagagatgaccttaagtgggccactacayctgcattgaagtccttgtaataaaagaaacttggggaaattttgcaacgtgatcactaacaagcaggaaagcatgaaaaaaaactgatttgcaagattctgactgggtgtttggaggggtggacattatcgtacttatgttttctctgatttcaagtcttatcttcaaggcttttttatttgtttacttaaccacaaagaacaatttaatactgaaatgttcttatctttttctaatgtgaggagaatcatgagaccacagttatgaacttaacacaaatggaaggaggctaactaagaaagatggtatctgacaaagagttctatgatttagaagggaaattccaaagagtaaagttctagaaatggcaccaagtcccactgtccatgagggtgattcctgatggatgacaggggtattagggttggggaacaggccaaaggagagcaaagtcagc

SEQ ID NO: 128153 - DNA, 546 bp, Homo sapiens
cttaccacaaaccaatctctaatgactcccctaagtcctcagcttgtgatttcatggttgaagagatgaccttaagtgggccactacacctgcattgaagtccttgtaataaaagaaacttggggaaattttgcaacgtgatcactaacaagcaggaaagcatgaaaaaaaactgatttgcargattctgactgggtgtttggaggggtggacattatcgtacttatgttttctctgatttcaagtcttatcttcaaggcttttttatttgtttacttaaccacaaagaacaatttaatactgaaatgttcttatctttttctaatgtgaggagaatcatgagaccacagttatgaacttaacacaaatggaaggaggctaactaagaaagatggtatctgacaaagagttctatgatttagaagggaaattccaaagagtaaagttctagaaatggcaccaagtcccactgtccatgagggtgattcctgatggatgacaggggtattagggttggggaacaggccaaaggagagcaaagtcagc

SEQ ID NO: 128154 - DNA, 636 bp, Homo sapiens
ggtgttatttaagaggagaggaaggaaattttagagcaggatatgctgtggtttctgtaccagaggtaactaaagccagtcttcttccccaagccagatcagctcaagtggccgaattgattttcctgatccaagcttgtcaattgtcaaaagacaaggcttttgccatttacactgagagccactatgcttttgggttgctcatgactttgggatgctatggaaagagacaggatatttaacctcctcaggaaaatccataaaaaatggacaccaattatgagagctgttagaagctattttgaaaccaaaacgtttggcaattataaaaatcccaggtcactcaaaattagacaccatagaaagtcaggtaaccarctggctgacactacagctaaaagagcagcatccaagccaccagccccagtacaagaaatggccataaaacccaaaaacacttagaaacatgttgaaagaaacccagagctcctacaaaagggaaatctacttggaaacaggcagggaaatacttggctcccaaaactgaaatatgaagtggacctaataataaacctgttattctaattggatgtcaggtgccccttgtggaatatgttcataatctaagccattgga

SEQ ID NO: 128155 - DNA, 571 bp, Homo sapiens
aagtgaatctcctaaaatgattgagacgtgtcttgtcattttcctcaattgacaggtttctgatgagtattaaatgagataatatatgtcatatgtagttcatttcatacatgcctaaaacatagtagagcttattcagtattcatctgccctttctgtacctcctactactctgcccaccccccaaccctggtttcatgctactcttctaagttggagatggtgatagttggaaatgaaaggaaaaggatgaaagtatgtattaacagaaaccatgcttctctccatgttaagcattaaaacatttattgctctttatgttgaactgtgtgaaggaataggagattaaagagaaaagaaatgctttctcatttaasaggggaaatggagctctattagtcaaaagagaacctcaagttaagagagaccacaattgttcagaatcagccactgagatttggtaacagcaaatcatattgtttgtcttctggtgtatgattaggacagaaagttctggttgggccagtgactgtgcagattttgatgacatgaagaagacagtaagttgggc

SEQ ID NO: 128156 - DNA, 571 bp, Homo sapiens
aagtgaatctcctaaaatgattgagacgtgtcttgtcattttcctcaattgacaggtttctgatgagtattaaatgagataatatatgtcatatgtagttcatttcatacatgcctaaaacatagtagagcttattcagtattcatctgccctttctgtacctcctactactctgcccaccccccaaccctggtttcatgctactcttctaagttggagatggtgatagttggaaatgaaaggaaaaggatgaaagtatgtattaacagaaaccatgcttctctccatgttaagcattaaaacatttattgctctttatgttgaactgtgtgaaggaataggagattaaagagaaaagaaatgctttctcatttaagaggggaaatggagctctattagtcaaaagagaacctcaagttaaragagaccacaattgttcagaatcagccactgagatttggtaacagcaaatcatattgtttgtcttctggtgtatgattaggacagaaagttctggttgggccagtgactgtgcagattttgatgacatgaagaagacagtaagttgggc

SEQ ID NO: 128157 - DNA, 596 bp, Homo sapiens
acacatatgaccaccatccatcatgagtgtcacagtagaaaagacagattgagagctatccaataataaccttcagttatctcctctcttcttctcttcttctagtaaatttggaaagccacgctggaaaattgaggcaaatgtagattatttttctttccatatataatttatgatttgattagtttgtcatgacttcttcactgttaatggtgctttgtctcaactgtgaagaactgagctttattttttattttatcaatattcaccacaccaccatttattgagtaccaccatgagtcagatgctctacaaacattgtttcatttaatcttcagtgttcctgcaatgtgcacattaaccttcctattttatagttgtgattaaataactgtcccagaattagtagcagagctgaaatataaggcaaaatctgtctgggttcaaaacgtatgcttttccatgtgttaggctgctttctccttaggggaaggttttacatactttttctttttaaatatgttttgcaccagttcataaaaagtattctacgaggccratggcaggatgagtagttatagattttcttgatcgtt

SEQ ID NO: 128158 - DNA, 546 bp, Homo sapiens
ttggctcttctgttatgcagcattgtgttgcatttttaaaaattatatgtaaatctccatttcagaagagattttgagctcctcagggcacgaaacgtatcacatagctctttattgtctcaagtactagcatagtgctttgtatgcaatatttaattaatattttctgtgtgggtgaaaatgttaatgtcttttttgttggacattcatttccaaagcagaacaattaayatgactggatgtttaaagggtctggatgaataggtgagtgaaggacagaaatgtgctggtaaaaagccctgatctatagtgcttgccaatttccgtggtgtaaatacttccactatagccaattttaagctaccaacagttagagccaactcacaaaattcttgaaaatttcataatcagtggttttgtgtgagccagcataagtcagcttcggtatctctttgagggatttaataatgaactcaactaaggtaaaactgatctggaacaactgaaagcagaggtttaagtaaaataactctgttatttaatcta

SEQ ID NO: 128159 - DNA, 567 bp, Homo sapiens
gggctagtttaatcagttagaatggatgaattccctgagatgggcctaggcctaaatattgaattttggcaaatgtaaacttttaaggccgaaaacataaacacatacaatgagttttattaaaggaaacagaaggaactcagagaaacaaatggagaacacatgacataatgttatggaagccaacgtagaaaagtttcaaaagtgaaagaatgggctataatttcagagacaagagaataatgcaggggtggggagaggggggagagagaaagaagaaggaatagaaacatgaaaagtaggaaacatgtgctttttatttcctggatgtttggcaaccttatgatgatattatttggctaaaggaagtcaataaaaagaatccaaaacatgtactaattttctaatagggaaataccgattttaggtaactctggtgactatctcctttcccaaatacccggctcaaactgtcaccactaaacatttcctattttctcctgtggacttcgtggtgtgawtaattataataactaccagactatatttagaaaacaattgctatta

SEQ ID NO: 128160 - DNA, 501 bp, Homo sapiens
caggctgcactaccttggtctggccactggtagtsgtgcatgagaactactccctggagtatttctcagtccactgacactgatgtaattggctccacttcccctgctgttgagccaggccgacacgccctggacaaaggcatctgtgtgaagtattgaggttcaaatcagtgcttaagatatgtttggaggcaaaatactttttcatctacatgggcagtgtcttggcagaagatggagattctctctaaatggatgtgaaacagggtggctggcatctgggtcaggatgatgccctggtgcatggcaagaacatgcattgggcagcagctgtccttgctaagcagagaggttcactgacctggcttttcccccctcacctgctctccagaaagccagactctagggcagatgctcctgagaccccaggaacaggctggtggggagcgcagctcagagcattactcaggggatgcggcctttgtcatcctactttgaaac

SEQ ID NO: 128161 - DNA, 501 bp, Homo sapiens
caggctgcactaccttggtctggccactggtagtcgtgcatgagaactactccctggagtatttctcagtccactgacactgatgtaattggctccacttcccctgctgttgagccaggccgacacgccctggacaaaggcatctgtgtgaagtattgaggttcaaatcagtgcttaagatatgtttggaggcaaaatactttttcatctacatgggcagtgtcttggcagaagatggagattctctctaaatggatgtgaaacagggtggctggcatctgggtcaggatgatgccctggtgcatggcaagaacatgcattgggcagcagctgtcctygctaagcagagaggttcactgacctggcttttcccccctcacctgctctccagaaagccagactctagggcagatgctcctgagaccccaggaacaggctggtggggagcgcagctcagagcattactcaggggatgcggcctttgtcatcctactttgaaac

SEQ ID NO: 128162 - DNA, 501 bp, Homo sapiens
caggctgcactaccttggtctggccactggtagtcgtgcatgagaactactccctggagtatttctcagtccactgacactgatgtaattggctccacttcccctgctgttgagccaggccgacacgccctggacaaaggcatctgtgtgaagtattgaggttcaaatcagtgcttaagatatgtttggaggcaaaatactttttcatctacatgggcagtgtcttggcagaagatggagattctctctaaatggatgtgaaacagggtggctggcatctgggtcaggatgatgccctggtgcatggcaagaacatgcattgggcagcagctgtccttgmtaagcagagaggttcactgacctggcttttcccccctcacctgctctccagaaagccagactctagggcagatgctcctgagaccccaggaacaggctggtggggagcgcagctcagagcattactcaggggatgcggcctttgtcatcctactttgaaac

SEQ ID NO: 128163 - DNA, 582 bp, Homo sapiens
ctgcctgcccagaacactctggtttaaaaaatgtgcattgctattaatattttgagtgtagatttattttggacagtaaatgttcattttctgcccataaaaccaagtatgagtcacaacggaacatttacttcgagtcaaaaatgcaatgtgtactgacgttcaagagcagagcatcttatcactatgactgtggcaatcagccgtactaaaagtcaccattcctttttcttctttaaaagtaaatttgagatcaaaggccataatcctcaattcataaatcctagcattaacttctatccataaatgacttgcagtaattaagagccataatctgggttggctgcaaagaggctctcattcccctctttacctggttccatagtacatgtgcatagatggaaagtaattcattaaaggcggtacgggcaagctctgcaaagcctatccatcaaaaaattccaggaacaccacagtgagtgagtttaatttcaggatgtctgttatccaaattccaagcatacacaccaccatatatacagtcctcagctcccaarctccatgcagtatgtcccaaagttc

SEQ ID NO: 128164 - DNA, 595 bp, Homo sapiens
tgtaagtaggaaacttacaatcatggcagaaggggaagcaaacacatctttcttcacagatgtcaggagaaagaagaatgagaactgagtgaagggagaagccccttataaaatcatcagatcttgtgagaacttactatcatgagaatagcatggggaaaattgtctgcatgagtcaattatctccacctggttcttcccttgacacgcagggattatgggaagtacaacttaagatgagatttgggtggggacacagccaaaycatatcagactctgacctcatattacttaaaatccatagcactccatgagccaaaatctttatagcttgtagaatcaagttgatgctgaatttttttaatgagaatctagaatcttcaaataatttgaagctttattttcttgcttttagtgataacagaagcagcattgcgaaaaaacacacaaaaaaaattttaagaaagaatattttcatgatcacatcccagtttttcaaatttggaagtttagaacaattcagttaaatattctttgttaggtgcttgatttggaaaaacttgagagtctcttagctaaatctccacggtcatct

SEQ ID NO: 128165 - DNA, 595 bp, Homo sapiens
tgtaagtaggaaacttacaatcatggcagaaggggaagcaaacacatctttcttcacagatgtcaggagaaagaagaatgagaactgagtgaagggagaagccccttataaaatcatcagatcttgtgagaacttactatcatgagaatagcatggggaaaattgtctgcatgagtcaattatctccacctggttcttcccttgacacgcagggattatgggaagtacaacttaagatgagatttgggtggggacacagccaaatcatatcagactctgacctcatattacttaaaatccatagcactccatgagccaaaatctttatagcttgtagaatcaagttgatgctgaatttttttaatgagaatctagawtcttcaaataatttgaagctttattttcttgcttttagtgataacagaagcagcattgcgaaaaaacacacaaaaaaaattttaagaaagaatattttcatgatcacatcccagtttttcaaatttggaagtttagaacaattcagttaaatattctttgttaggtgcttgatttggaaaaacttgagagtctcttagctaaatctccacggtcatct

SEQ ID NO: 128166 - DNA, 612 bp, Homo sapiens
ccttccccacatttgatttgtatggtaggcaggcactcactcgcaaacaagagggatgcatcttggaaagcatgcgtgacttaaaaatccagggatctaaaaggtatttgtttctaggcaattgcagtgaaggattccattgtgccagttgtaggtagtcaactctcaaagagctcatgtaagagacagctttttcctgtcagtgaaaatgagaaccagcaagctgcccacccttgacacttggctccaattctctcagtttagctccccatgttctcaccacaagcccttctgagttttggggttccagagatagtctttggtaaattccctctgaaccactaaaggatacttttctgataatcacaaattgcttacctaaaagcacaaatgacaactctaacagaaaacctttcagtcccggtgtataaactccatgtcccaaatgggagtgccgagtatctggttaaggatgggaggatgggatgctctatggggtattttattcatgactcgccatrttacttacaacattgtctggtagcaatcccactgagtgctgctgtgacatttttaagaattttcctagtcattgatgaacaagttcttttg

SEQ ID NO: 128167 - DNA, 511 bp, Homo sapiens
gagatgatactaaaattcagggaagttcattcattcatttaatcaatttgtattgagtgccaaatatgtaccagcttctgagctagatagggaagaaagagcagtaatgaagatgaaaacaggtccttgaacccatgggatttatattacagttgaaagaaagaaaacagaaaaatgtgtaccacatagaaagtaattagtattctgctgagcattgaaactgagtggctactttagaaagaggttaaagaagaacttcctgagartgtcctgaaaatagagcctgagtgacaggaaggggccaggcatgtgaagaagtcagcaggaagaacactgggctgaggggacagtacacaggaaggtcccgagatgggaataagggccatgatgatggggtgatgagaatcctggattctcatgatgtggatggaactggatatgttttggagttagaaatgatagcttttctgttggactggactggaggtagggcaagggaattagatgaatc

SEQ ID NO: 128168 - DNA, 575 bp, Homo sapiens
attttgtagttttcagtgtacagtatttttctcatttttttggtcagacttatcccaggtatttatgctattgcaaaggtagtattgtttatgtgattgcaaaygttgattttttgtttcaattatcaatttttcattgctaccatatacaactgatttttgtacactactctgtatcctgcaaccttgacaaactcacttatttgttctagtagctcatttgtagagtccgctgaattttgcataaataatcatgtcatctgtgaatacatttttctttctttctttccaacctggatgtccattatttctgtttgttctctgattgcacagtctaaagccttcagtacaatgttgaacagaggcggtaaaagcaggcatccctgatttgttcctgacgttgggaaggtggggaatattgtctttcacaattaagtgtgatgttagctgtagggtttttgtagatgcccttgatcagattgaagaagtgttgtttattcctaaccttcttgattatcagtaatgaatgctggattttgtcaaatgcctttctgtattgattgattatatgatta

SEQ ID NO: 128169 - DNA, 575 bp, Homo sapiens
attttgtagttttcagtgtacagtatttttctcatttttttggtcagacttatcccaggtatttatgctattgcaaaggtagtattgtttatgtgattgcaaatgttgattttttrtttcaattatcaatttttcattgctaccatatacaactgatttttgtacactactctgtatcctgcaaccttgacaaactcacttatttgttctagtagctcatttgtagagtccgctgaattttgcataaataatcatgtcatctgtgaatacatttttctttctttctttccaacctggatgtccattatttctgtttgttctctgattgcacagtctaaagccttcagtacaatgttgaacagaggcggtaaaagcaggcatccctgatttgttcctgacgttgggaaggtggggaatattgtctttcacaattaagtgtgatgttagctgtagggtttttgtagatgcccttgatcagattgaagaagtgttgtttattcctaaccttcttgattatcagtaatgaatgctggattttgtcaaatgcctttctgtattgattgattatatgatta

SEQ ID NO: 128170 - DNA, 602 bp, Homo sapiens
gtacaaacatctaaaccatgacagggagagagagtggccctaggtatcaaccaaggaggccacagcccaggtacttggcctgcgtcatggcactgcacccgctgaccactgggcctatttaaaacattaaatgtgatccaaagaggcttttggtggccttgtatctgtcatgacatttcagcatgctgccatctagtggacgtgtcygtggactgactgactagtcagaggaatttggacccctggatcatcttcttctctatcaaattgagcagtcaacactgggaactttgaagtgaaatgtgatctccttactggaaattgtagtaaaagaaggaagtggagacaacaatggactatctacgatccagtcttccacccaagctccctaggaagatactttcatgggtgggatgtaggtggctggcacgtgatgttaacaatccccttgtgcttggcttgattgctgctggaatatcagtttttccttgctttccctatagggaaatctgctaaagaagttgagtctcttcatcaacatgttccctgcagtgggtactatttcaaagggctcagttttctcatggtgtccacttcgcctc

SEQ ID NO: 128171 - DNA, 602 bp, Homo sapiens
gtacaaacatctaaaccatgacagggagagagagtggccctaggtatcaaccaaggaggccacagcccaggtacttggcctgcgtcatggcactgcacccgctgaccactgggcctatttaaaacattaaatgtgatccaaagaggcttttggtggccttgtatctgtcatgacatttcagcatgctgccatctagtggacgtgtccgtggactgactgactagtcagaggaatttggacccctggatcatcwtcttctctatcaaattgagcagtcaacactgggaactttgaagtgaaatgtgatctccttactggaaattgtagtaaaagaaggaagtggagacaacaatggactatctacgatccagtcttccacccaagctccctaggaagatactttcatgggtgggatgtaggtggctggcacgtgatgttaacaatccccttgtgcttggcttgattgctgctggaatatcagtttttccttgctttccctatagggaaatctgctaaagaagttgagtctcttcatcaacatgttccctgcagtgggtactatttcaaagggctcagttttctcatggtgtccacttcgcctc

SEQ ID NO: 128172 - DNA, 477 bp, Homo sapiens
gaattccatccaggttaccacataacatttagtctttttgtttccctaagttcctctggactgtgacagtttttcaaacttcacttctttttgatgaccttagtacttttgaaaaatactggtcagatattttgcagtgtctctcaattcatgtttgtctgatgtttttctcttgattggattggctggtagatttgggggaggaacgctgcagaggtcaagagccattctcatcacatcatatctaagggtacattatcaacatgacttctcgcaggtgatgttaatattcatcacatgtagcccctctccatgacaccctctttggaagacagtccctactaygtatagcccacatttaagcagtggggagttaatgttccatctccttgagggggaagtacctgtacaaatttcctcaaattcttctgtgtggaaatttgtctcttctccccccatttatttattttttaatga

SEQ ID NO: 128173 - DNA, 573 bp, Homo sapiens
tacaattttatatttcgaagttttaaattttaattactgacaagtcatcattttagagcaaaaatgaatttaggaaaaatctttataagaacagcttcaatggccttctttgacattgaaaaaggtatcattggctgtcatctctaactgacttttaggaacagatgaggtatttgaatgttgactgtaatgataaaaagcggataggtctaacccaagttccagttgccctagttcattttcttttgcwgtaagtgaatatcagagactaggcaatttacaaagaaggtaagtaagtttattttttactgttaaggaggctggaaagtttaaaagcatggctccagcatttggtgagagcccttttgctgagtcataaaatgacagtgggcatcacatggtgagagaacaagagtatgctggttcagctctctgttcctcttcttataaagctaccagtcccataatgagggctccaggccgatgaccttatctaatcctaattacctcccaaaggtccaacctccaaacactatcaacctataatctggagattaagtttccaacacatta

SEQ ID NO: 128174 - DNA, 573 bp, Homo sapiens
tacaattttatatttcgaagttttaaattttaattactgacaagtcatcattttagagcaaaaatgaatttaggaaaaatctttataagaacagcttcaatggccttctttgacattgaaaaaggtatcattggctgtcatctctaactgacttttaggaacagatgaggtatttgaatgttgactgtaatgataaaaagcggataggtctaacccaagttccagttgccctagttcattttcttttgctrtaagtgaatatcagagactaggcaatttacaaagaaggtaagtaagtttattttttactgttaaggaggctggaaagtttaaaagcatggctccagcatttggtgagagcccttttgctgagtcataaaatgacagtgggcatcacatggtgagagaacaagagtatgctggttcagctctctgttcctcttcttataaagctaccagtcccataatgagggctccaggccgatgaccttatctaatcctaattacctcccaaaggtccaacctccaaacactatcaacctataatctggagattaagtttccaacacatta

SEQ ID NO: 128175 - DNA, 575 bp, Homo sapiens
caccgcgcctggcccgcctttgtatcattctaaaaaattaattggagtatgcatttaatagatactataataaaatttttttwaaaaaactataaaagtacattctgctaacaggtagaaattattgaatgacaaaggttttttttctgatatgccaggataaatgcctacaaataggaacttctaaagcacttacctgtgaacaatacacaataccagaatcatataacacgaatctaatctcaagatcattgctggttttcccatgactctttttctaactaaattgagattacccttattcctcctatgaataagatgtggtttttcttgttcagacagaaaatttacaaagcgaaaaattaaaccaaagctaacagtcgaggaaggtgtttacaaacaaaattattataacatatccaagtaaacagtgatacattacccccaggaatcaagaaacaggtcagaaataagattttcctatcaattactacgaatctttcatatataactaaatctccatttagaaaagttgtgtttgttgcttgtttgtttgtttgtttgttttttactgc

SEQ ID NO: 128176 - DNA, 496 bp, Homo sapiens
atgaggcattgctttgacttccttctataattcttcaggtattaaaaatattgatagtccccaataaaatagtccaaagggatagtattttagtggtctctaattctaataatgcattttgtttaaagacaatttttgtgagagaaatttaactcaggctgtatgctctagttgtgttaaaaacatgcataatctcaaaatatttgtgtttatgccatttaaacatgtctgtrtaagcacatactgtcatttggcttgggatctttggttcagactatgaatgatttcaagttttctttttttattttatttttattattataacactaagttttagggtacatgtgcacaatgtgcaggttagttacatatgtatacatgtgccatgctggtgtgctgcacccattaactcatcatttagcattaggtatatctcctaatgctatccctcccccctcccgcaccccacaacagtcctcagagtgtgatgttcccc

SEQ ID NO: 128177 - DNA, 496 bp, Homo sapiens
atgaggcattgctttgacttccttctataattcttcaggtattaaaaatattgatagtccccaataaaatagtccaaagggatagtattttagtggtctctaattctaataatgcattttgtttaaagacaatttttgtgagagaaatttaactcaggctgtatgctctagttgtgttaaaaacatgcataatctcaaaatatttgtgtttatgccatttaaacatgtctgtgtaagcacatactgtcatttggcttgggatctttggttcagactatgaatgatttcaagttttctttttttattttatttttattattataacactaagttttagggtacatgtgcacaatgtgcaggttagttacatatgtatacatgtgccatgctggtgtgctgcacccattaactcatcatttagcattasgtatatctcctaatgctatccctcccccctcccgcaccccacaacagtcctcagagtgtgatgttcccc

SEQ ID NO: 128178 - DNA, 604 bp, Homo sapiens
  misc_feature (1)...(604): n = A,T,C or G
nnnnnnattctatatttcatattacctgctagaattgagcataaagctttgagtayagtttaaattagctactttagggttgactaggaaaggcaaagtttgccttatactgcacagtagtttgttccaagtatgttcttcttgtagcttaataaagacagcaagtttaggagtcctagggagaggttaagaggcgcaaataaataaaagggcagaccaactacaacttgcagtggtctttaaatgtggcccaattttgagtgttagaaacaataggaaacaaacaaaaaagccacagagaccccagaatgagaatgttgtataaagacagaaaccacatcttttggtcatatgtgcctcaaacttgtgcagcatctgacctaaagcagtcatttagtgaggaaacagtcaataaatcaaagaactagacagggaggctgagcagcatagaacctttctataaacctaagcacatcacagtcttgcttaaaaccttcacggtttnccatcaccaagtaacagaattcaaatctatagttggggcaacagtttctgacatagcgcctacctcctctgccgttgcatccctgaccactgccccagt

SEQ ID NO: 128179 - DNA, 547 bp, Homo sapiens
aaatccctctcacagttgggcaatgccatccttcttgctaaatagggtcaccaaacacccttcagacagcaacagccctaagctatgctactgaatcctgtgccagtttcatgtgggccagccttataccccatggttagtctgatactttccctattacactcctcctaatggaactattcaaagacagaacgaatygatattgttgccttgaaaacttatttcagaatagcctaggaaagacatgggatgtgatctaaagtcagtctgtaccttttttatattagcctcctggaatggaaactccctgagagtaggaactgaagtttttgaaggtcatatgcagagctaaacatgatgaagctagagagtgtttaatattaacagtattttcatcaaaagattagcatatattcctctctgattattttttataacaagctggggcatttagataaaagaaatataaagacaacttggagggagttcagaataaaaccataaaaatgagtggttagaggaaagagggaatcagttatgtgctggc

SEQ ID NO: 128180 - DNA, 594 bp, Homo sapiens
gcctccaaagtcctggggccctgggtcctccggagtgggcattccccctgggaccccaaaggctgtcgttggaggggggagatgcctctgaggaccgggtggccgctcagcagctgcagtcgcttgtccgtgtccagggcgcaccggcgttccctccacatagaatgctgctctaccatctccccgtattctggtgctaytgctgctttcaggccggtttaaatgtcccctttctcacctctgcccgcttcacctcttgtcctcactgacttctctcccatgggctggccaactccccacgatgggtgacggctacgtctctgcacaacctatcccctacaactgtactgtgtgttctctgagccaaacacctttgcacagatcacagtattcctgggtgcctctgataatggaaagatgtctcataccatcatcaaccaggggcggggccagccggcgatcactcctctatttgtaggtggtggaggatttcctcacatttggaaaatcattcatgagttcacttgacccttacgaccatcttgggagccaagtacagcagctgattcccaggtttatatattgggtaaattg

SEQ ID NO: 128181 - DNA, 594 bp, Homo sapiens
gcctccaaagtcctggggccctgggtcctccggagtgggcattccccctgggaccccaaaggctgtcgttggaggggggagatgcctctgaggaccgggtggccgctcagcagctgcagtcgcttgtccgtgtccagggcgcaccggcgttccctccacatagaatgctgctctaccatctccccgtattctggtgctactgctgctttcaggccggtttaaatgtcccctttctcacctctgcccgcttcacctcttgtcctcactgacttctctcccatgggctggccaactccccacgatgggtgacggctacgtctctgcacaacctatcccctacaactgtactgtgtgttctctgagccaaacacctttgcacagatcacagtattcctgggtgcctctgatartggaaagatgtctcataccatcatcaaccaggggcggggccagccggcgatcactcctctatttgtaggtggtggaggatttcctcacatttggaaaatcattcatgagttcacttgacccttacgaccatcttgggagccaagtacagcagctgattcccaggtttatatattgggtaaattg

SEQ ID NO: 128182 - DNA, 594 bp, Homo sapiens
gcctccaaagtcctggggccctgggtcctccggagtgggcattccccctgggaccccaaaggctgtcgttggaggggggagatgcctctgaggaccgggtggccgctcagcagctgcagtcgcttgtccgtgtccagggcgcaccggcgttccctccacatagaatgctgctctaccatctccccgtattctggtgctactgctgctttcaggccggtttaaatgtcccctttctcacctctgcccgcttcacctcttgtcctcactgacttctctcccatgggctggccaactccccacgatgggtgacggctacgtctctgcacaacctatcccctacaactgtactgtgtgttctctgagccaaacacctttgcacagatcacagtattcctgggtgcctctgataatggaaagatgtctcataccatcatcaaccaggggcggggccagccggcgatcactcctcyatttgtaggtggtggaggatttcctcacatttggaaaatcattcatgagttcacttgacccttacgaccatcttgggagccaagtacagcagctgattcccaggtttatatattgggtaaattg

SEQ ID NO: 128183 - DNA, 579 bp, Homo sapiens
  misc_feature (1)...(579): n = A,T,C or G
taacttaacactgggtgcattaaaaaaaaaaagcnaaaagagaactaagaaagaccatacactttaatttcatttgcccacatttaaaatcccttttggttgcttttaagattgtcttttggggaaaatatagctattatattttccatactttttttttttttttttttttttgagacggagtcccgctctttagcccaggccggattgcagtggcacaatctcggctcactgcaagctccgcctcccaggttcacgccattctcctgcctcagcctcccgagtagctgggactacaggcgcstgccaccgcgcccggctaattttttgtatttttagtagagacggggtttcaccgtgttagccaggatggtctcgatctcctgaccttgtgatccgcccgcctcagcctcccaaagtgctgggattacaggcgtgagccaccgcgcccagccttttccatactttttaatccacatttatgagcaattattgcacatttttacatctacttgaagttgtaccaccacttatttattattatttcatttttcccctttaatttagaatagtttcttc

SEQ ID NO: 128184 - DNA, 579 bp, Homo sapiens
  misc_feature (1)...(579): n = A,T,C or G
taacttaacactgggtgcattaaaaaaaaaaagcnaaaagagaactaagaaagaccatacactttaatttcatttgcccacatttaaaatcccttttggttgcttttaagattgtcttttggggaaaatatagctattatattttccatactttttttttttttttttttttttgagacggagtcccgctctttagcccaggccggattgcagtggcacaatctcggctcactgcaagctccgcctcccaggttcacgccattctcctgcctcagcctcccgagtagctgggactacaggcgcgygccaccgcgcccggctaattttttgtatttttagtagagacggggtttcaccgtgttagccaggatggtctcgatctcctgaccttgtgatccgcccgcctcagcctcccaaagtgctgggattacaggcgtgagccaccgcgcccagccttttccatactttttaatccacatttatgagcaattattgcacatttttacatctacttgaagttgtaccaccacttatttattattatttcatttttcccctttaatttagaatagtttcttc

SEQ ID NO: 128185 - DNA, 613 bp, Homo sapiens
aaatcattaaattgcacacttgaaatagatgacatattacatgtaaaaaatgcttcaataaagttgaaaaaactcccattctctgagcaaatgccaaatatgaacctcttttagcaagattttattaatcagtctagagattacagaaagcaaagatggttatgaaaataataaatccggaaactccacagcccacttattattttttcattaaatatatttatactatgaatgcaattttctcaggtttgtgagatatttttgtatttagggcatgtctatgactgaggcaggtgsagaagtcaggctgttggagctgtaattccttcttattacctttgggtatggtcacactttgtcacctcctctgaagccacattttcacttggttgaatcagaagatatataacattaggtcacaaggcaatttcttttatctgtgtaatagaatgtcatagccaagaagaatcccaagttcttctggttctagagttttaaaactgtgctccccatatccctgaggaggagtgagggctctgacttctcttgtcctttctgccaaatacactggaacatcctgtttattggccttctccataaacttagtttgaag

SEQ ID NO: 128186 - DNA, 676 bp, Homo sapiens
aaattcattatattggcttaaatcattattttttcagtgaaatcagccaaattgagttgttttgatatggccatgaaataaatttttcacactaaagtttaaaaagcactgcattaattttctctaatttaaagggaaataaacaataacacataaaacaagcttagtttatataaaatatataaatacatgctgtatttttttgctagagctgccacaacaaactgtcacaaactggttggcctcaacaacagagatatattgtgtcacagttgtggaggatagaagttcaagattaaaatatgtcagcagggttggttccctctgagtactgtgagggaaaatctgttctgtgtctctctcctaacttatgatagttttctgatcgtttctggcattccatagcttaaagwtttattactctgttctctgcttttatttcacatgttggtttccttctgtttatatttatgagtacaaatttcctagggaaaccagttgttttaaatgagaccccactctaatgacttcattttaacttgataacctcatttaacttgattgcctctgtaaaggccctattttcaaataaggtgccttagtcagggttctctagagggacagaactaatatatgtattatatgtgtgtttgtgtatgtatataatatactattg

SEQ ID NO: 128187 - DNA, 456 bp, Homo sapiens
gcttcctcaaagcttacaaagtgacagtggtctggcttgtaaagccacaataacgcagggaatttccagggcactagggatacaatatcaccttcactgcgcctggaggccataatcctcagggaagggtgagaaggcaaatgaaacacactcaagaggcacttaaggaaattaacacaagaaactcatctcacatggcctactgtcttgcccatggccttgttgagaatacaaaattctcctcaaaaaatggggctcagtccaatgaaatgctgtatrgacgaccttttctcataaacgacctcctacttgatcaggaaatggccaacttggtcaaagatataacttctttggcaaaatatcaatgaaacctcaaaaacttacctgaaggatgtcacagagaagagggaatggagttgtttcaactgggagatctagtattggtcaaatccctcc

SEQ ID NO: 128188 - DNA, 596 bp, Homo sapiens
cttttaatgccctgagagttcaaggccttagatttggtggagccagactgcttgtgttatcagcaagcatcctcagagattctgatacaaggagtatggaaactctaaactgtaagtacttctgtaagccacatccaatttggaatgagatgaagtgcaagtaaatcatgttaatgaattaaagtatttaatatatcttttccttttaattttaattatttctgcattgcaaattaatggtctagttctttggtttcttgactccctagaagatctccttgtaggatgaatatttatgcccaatattagatatttaaacttgattatttaaatatgaattaacaggaaaataacaagtgttgacaaagatgtggaggcgttggaacctttgtacattactggcaggaatgtaaaatagttcygccactgtggaaaacagtcgtacagtttctcagaaagttaaacacagaattaatttccccaggactcagcaattccactgttaggtatataccccaaagaattgagaactggtactcaaacaaatacatggacacacatgttcatagcagcactattcacagtagaccaaaggt

SEQ ID NO: 128189 - DNA, 587 bp, Homo sapiens
gtgcagcctctacctgtgtctcagtttctggctctctagcccttactaagagtagctttttctttctactcatattgtgttgatgtgtttatattgaagcagtgacagtttgtaaaactttatcctggtttttttttttttttcacttaacaatgttagtgaattcttgagtattagtgttgaataaatacttttttaaraaattgggttgttcacatggtcttagactcctccgtgattttatttcatatttaggatttgaaagatgaaaagaaaaaggcaaaaatggcagcagctagggcagttcttgaaaagtgtacaatgatgcttctcacagcttcaaaggtaagacaattttggttttgctgtgtaataaattaataattagaacacccgactaaatgcatttaacttacataatttacattttaaaaaagatcaaagtgattacttagaacataggcctgaatagttaaatctcagttattatttataagaatgctaactttcttccccaactccaaataataactaatttatgagtcagctttgattgaacagctcagcagaacatggtgtattaggtg

SEQ ID NO: 128190 - DNA, 587 bp, Homo sapiens
gtgcagcctctacctgtgtctcagtttctggctctctagcccttactaagagtagctttttctttctactcatattgtgttgatgtgtttatattgaagcagtgacagtttgtaaaactttatcctggtttttttttttttttcacttaacaatgttagtgaattcttgagtattagtgttgaataaatacttttttaagaaattgggttgttcacatggtcttagactcctccgtgattttatttcatatttaggatttgaaagatgaaaagaaaaaggcaaaaatggcagcagctagggcagttcttgaaaagtgtacaatgatgcttctcacagcttcaaaggtaaracaattttggttttgctgtgtaataaattaataattagaacacccgactaaatgcatttaacttacataatttacattttaaaaaagatcaaagtgattacttagaacataggcctgaatagttaaatctcagttattatttataagaatgctaactttcttccccaactccaaataataactaatttatgagtcagctttgattgaacagctcagcagaacatggtgtattaggtg

SEQ ID NO: 128191 - DNA, 665 bp, Homo sapiens
aacttaaataactatccatatgccagacaatgacgaatgtcttggtctaagaaacaaccttctaaggtgcaattccagatactaggaattccaagcagtaggagtgagatgatgaacttcactgttgttaagttattccataggataatcattttcctgagttaaaatctaagagacattgcttgatcatgactaaagatctatgtctgaggccaggtataacttgtgactgtttatcaactacttattaactttactttcttaagtttgatttgcagggctgggcatggtggctcacacctctaatcccagcagttttggaagtctgagatgggcagatcacctgaggtcaggagtttgaaatcggcttgaccaacatagtgaaaccctatctctacaaaaaatacaaaaattagtcgagtgtggtggagggagcctgtagtcccagctactcaggaggctgaggcaagagaatcacwtgaacctgggaggcagaggttgcagtaagccatgatgaattaagccactgcactctagcctgagcaacagagcaagactctgtctcaaaataaataaataaataaataaaagtaaattaaaaaataaaaagctttgatttgcaagtatatgaaatacattgccaccttggattcctagggaccaga

SEQ ID NO: 128192 - DNA, 509 bp, Homo sapiens
aataccctggctccctgcatccctgattgtaaaaacttcaaaggcgtgacctacactgcctctggaattcctctgaggtattgaaccagagttgcccttcactaggcttggcttgatattgcaccattcttcccttcctggacctacttactctacttctttattttcctgggaacatttcttaaaaaaatcttttacttatgaatccatatctgaaggtctacatttgagaaagccaaactatgacaagaatgtttgttgtctataggacccaaggctaagaaatcgcttaggccttgataggaactaagactacaactagtagatgayaataataatttcagggaaataacctcactttgttttaggcctctgtttttctctcgataactgcttcctttttccttctctactttcaaacctatttgacagaatatgtaattctacagctcgcaagtaaatattttaatttctacatttgggtggtctttagatcaaattcaaaagag

SEQ ID NO: 128193 - DNA, 609 bp, Homo sapiens
atagtcaattagttacaaaaattccttagtgattaatcatttggaagacaagtgctgtcttttccataaaagtttattcttcatattaccatggaaatagttccttgaaaaattcacattttgagattaggtagacctgtgctggactgtccagtatcgtagtcactagccacatgtggctatttatatttttatytatattaactaaaattaaagaaagttaaacattcagtttctttgtctcactcagcacattttaagcgcaaatagtcacaagtggtgtgtggctactgtattagacaatgcaggtgtagaggtataggacattttgtcattgcagatactattagatggtgaggagctagactaaatattttacaaaatatcccttttataattataatcttatatcttgcttgatttttaaaataacaaagagcaaataaatgtgaacaaaaatagtgtgtaataaataaaaatgagtgagttactctaaaaacatgaaatttcactttttattgtggcctatgtgagtttatactaagatgaaaacagattttgtatgtattggtatagcaatacccaaaagaaacttgatgatgtttacaa

SEQ ID NO: 128194 - DNA, 609 bp, Homo sapiens
atagtcaattagttacaaaaattccttagtgattaatcatttggaagacaagtgctgtcttttccataaaagtttattcttcatattaccatggaaatagttccttgaaaaattcacattttgagattaggtagacctgtgctggactgtccagtatcgtagtcactagccacatgtggctatttatatttttatttatattaactaaaattaaagaaagttaaacattcagtttctttgtctcactcagcacattttaagcgcaaatagtcacaagtggtgtgtggctactgtattagacaatgcaggtgtagaggtataggacattttgtcattgcagatactattagatggtgaggagctaractaaatattttacaaaatatcccttttataattataatcttatatcttgcttgatttttaaaataacaaagagcaaataaatgtgaacaaaaatagtgtgtaataaataaaaatgagtgagttactctaaaaacatgaaatttcactttttattgtggcctatgtgagtttatactaagatgaaaacagattttgtatgtattggtatagcaatacccaaaagaaacttgatgatgtttacaa

SEQ ID NO: 128195 - DNA, 624 bp, Homo sapiens
caagtacaaacttatattaaactctaatcattcaatgtggaatagtataatatttagagtagccaacaaaagaagagcaaggaatacataaataacaggataataaggaacaatatatggaatgataaaagatatttgatcaatccaaaagaggacaggaaaaaaaagataacatgtattaggtgtgacactgattaaaaaaatagtaatgttacaaatgttaaatgtatcgacaataacattaaactaaaagaaggctaatattcataagtaagaaactaaaataataattatatggacctcataagagagacaacttaaatatgagaacatagaatgatagaaagtaaaagagtggaaaaagaaacatctaaagactaattgaaagatagctggtataggtatactaaagcatacacagtcgtgtttaaaatatgaggcattattagaaaaagggagccatttataatgatagaaggctccacacaacagaaagatgtaatrattctcaatatgtatgtgccatatatcatagcctcaacagatactttaaaagaagatatattagactactttacattgaataaccacaattcttcaaaagaaaacattaagatagtaaaa

SEQ ID NO: 128196 - DNA, 624 bp, Homo sapiens
cagcagcatcaccatcaccttgaagttgttaaccatgtaaattctttggctctacctcagaccttcttgatcagaaacattacactggagcccagaaatctgtgcgttttgccaaatgtccaggtgattttgatgcatgctggagtytgagatccacggatttagaatatcaatatcatttagcaatagtcattggaatagcattgtcctagttacaaagtcctagtacctctcaaatgcctgatatatcatgccagctggtgccttcccttctactggtgtgctgtccccaatcagctctgctgtgagttttaacaattggaattgtgctagatgtcagaactccctgtacccaatgattgagtactttgtaagctagggctagtttaagttaggattctaccacttgccactaaacaaattctgactaatatacctgaaacacctaatgtatacctgtggggaatgtattttttaaacaatattaataataatcatttagtaccatgtaattacatagtgcattgctgtttaaaaagttctttcctatgttactttatgtgattgtaatgagaaagccatgagaggaagggcaaggctgattcgactgcagatggctatggc

SEQ ID NO: 128197 - DNA, 600 bp, Homo sapiens
ttattaattcaaaatattaaagaaaaaggttctcaggccaggcacagtggctcacgcctgtaatcccagcactttgggaagccaaggtaggtggatcacaaggtcaggagatcaagaccatcctgtccaacatggtgaaaccccgtctctagtaaaaatacaaaaattagctgggtgtggtggtgggtgcctgtaatcccagctacttaggaggctgaggcaggagaatggcttgaacctgggagatggaggttgcagtgagccaagatcgygccactgcattccagcctgtagacagagcaagattctgtctcaaaaaaaaagacattgagaaaatgactaagagaaaggttctgttggtattctctctaatttgattatttaggatacacaccttcctagcctatcttattgttgctgctttgtattgtcttattatgggaaaccgtatctggttgtatgtaaagtagactctaccaatctacgtgatccactctaagggaaaattgactctcatccttaaggatggatcattcaaatgagccccagatatgcctgagtgatgatagaggggctcaaggagaatgcctgttcaaaagt

SEQ ID NO: 128198 - DNA, 505 bp, Homo sapiens
cctcctttctatttcacaaatgcaccagatacacctccatcttagggtatttgtattttctttcctactgcctggaatgtttttctgccaaatatcaacataaataccttcagtctctgctccaatgtcaacttgcctaagaggccctccctgataaccctaaatgaatcttgcataaatgtgccaaattcagtgccttcctcttatccctgccatacgtacacacacaggcacaaacacacggattcagtcatttctctctgaaagcrgagtttcctggtagaaacatgttatttaacaaaagatatcctgggctaaggcagtgtagaatgatgggaatagagagtaagcagtggaaagatgctgaagtcagccttctttggggacgctggtggcctagttctacctaagatagacccactaagagtggctttctcttctttttttaaatatttcattgtactaccactttctaacattgccttctcctgttgaaatggcatgt

SEQ ID NO: 128199 - DNA, 613 bp, Homo sapiens
aataagcccatgttctaaaatcactactgttactaattatgtagaccagataaccttattttactatcttttcctttagaataaaaaaatgaatacagaacaaaatcatcttgagatacaaaagtgaggaaacaccaaaagaatagcgagttgatttttaaaatgtttacatgagctaaacatcccttaggtaataacagctaaatattaacttaatttttactatttccagttgagctatcctaatttactcatttatattactaaagtgcctaaattatataactaattacactgataaattttatcaaccaaactactagagaagttgttcatagtaagtccaaagaataaatacataaatatttcctccaatataactagcaatgyatctttaatagtcatggaacaaaggttttaatattaacatctacaagattatggactaatcatcattcgggtaagtataacagaaaaaactcaacgtggctcactcataagatgcaatcttatgtttggctcactgcactggatcctttgttcataaatcaccgttactggccattccccgaatcaatattcaaattccctcttggtctatatatacaaccac

SEQ ID NO: 128200 - DNA, 593 bp, Homo sapiens
ataaatttaacatttttgcttcaatcttgaataaaatttgttttcaatgtattttattaattgtacgttttgttttttattttgcatatttatttttctcattcatttcttgataaagtagtccaatgacatattcttttgttaatttaaattcatgttttcccatagggcacactaattactatacagtttggatttaaagtccatgatatacctgatgagaaaaacgagaaactctcttatttagcagtctaacttcctgaacataatcaatagcttcatcgaaagggaagatctaaactctgtggttaggacttctacttttagccaggcagagtaacttacggcagaaaaatgcaccctttaagaaaaagtataaaaattggatttaaaaaaacccaaaagctctttatgggtattgggaagctgctaaggcaatgcagaacttgagaggtcaagattctggagagatgagaaccatggagagctgaaaggacattctgcarcaatgttttaccatggggagtttcacaattctgggctcaaggaatgtcgctgaaaacccagtaaagggcctggggaaagggcttttg

SEQ ID NO: 128201 - DNA, 515 bp, Homo sapiens
atgcagttgcatgatgaccttcagcacctctaagcatcctattggttcagaagccacagaataaaaaatcaaaacaaaactttcccaaaatttccaacaaaagttgcaaaattgagtctcactgggctgaccttaggcacaacctaagtcatgtgtccctgctgacctgtgcttagaatagacatgcaactttggggatggggaggggagtgaacctcattgagactatggattgagagagtggttagaggtgattctctagagggaaattgagatgctgcttccaaaagaagggaacagatgctgggtaggcaaaaatggccatacctgcctcctggccctcacgtagcttttgatctagttggagaggaaaagacaaacgcctgaaaaactaaataacaatataaatagatacgtaatagatatgtaagtagtattgcacagcaaacaaatggtgcactcacatgtgtgagtaggaatgagatcatccygaagaagtccttaaaaacgaattc

SEQ ID NO: 128202 - DNA, 640 bp, Homo sapiens
gttggagcatctcagggctcagtcttcagaactcttctgtttaccagtctacattcctcaggtgattttatttaattaaattccatctctactatgatgaattccaaataactccccccagaatgatagttcagttcacccaacagtctagtagacttctaggtttggttgtctaatggacatctcaaaactgcttctctcattgcttttcattctcagtaaatggcgcctctattgtttcaaaagctctggccaaaaatcttggagtcattcttgatgcatttttaagcagcagatgcctcttkgtagaacttctgctaccatcactgcccaactctcacccatattattgcagcagaatctaaatatgttaaatattaaatttggctatgaggagactgtttacaaaagtattcctttttggattagaatgattcagcaagtttatttaatactacaagtgaataatggatttaactctaagatctctttcctagtgcaatcacaatacacttattgattgcttctttttcctaccaccattattcttccctacctttgtgaataatggcaataaaagctaggtctactcctcatttttcctgaaacattgctcctaattcttaacaatgcttcccca

SEQ ID NO: 128203 - DNA, 522 bp, Homo sapiens
cattctacaaggccaatattaccctaatacaaaacccagacaaggacagaacaacaaaaaagaaaactacaggctgatattcctgatgaacatagatgcaaaaatcttcaacaaaacagtagtaaaccaaacccaacagcgcaccaaaagattaatacaccatgatcaagtgagatttatcccagggatccaaggatgattcaatatwcacaactcaataaacttgatacatcacacaaagagaatgaagaacaaaaatacatgatcatttcaataggcacagaaaaagcatttgataaaattcaacatcccttcatgataaaaactctcaacaaattaggcatagaagaaatttacctcagcactataaagtctacatacgacaaacctacaactaacattatgaggaaaagttgaaaggttttcctctaatagttggaacaatataaatgtgcctactttccccactacaatttgacactgtactagaagtcctagccagagcaactaggcaaaactaaa

SEQ ID NO: 128204 - DNA, 522 bp, Homo sapiens
cattctacaaggccaatattaccctaatacaaaacccagacaaggacagaacaacaaaaaagaaaactacaggctgatattcctgatgaacatagatgcaaaaatcttcaacaaaacagtagtaaaccaaacccaacagcgcaccaaaagattaatacaccatgatcaagtgagatttatcccagggatccaaggatgattcaatatacacaactcaataaacttgatacatcacacaaagagaatgaagaacaaaaatacatgatcatttcaataggcacagaaaaagcatttgataaaattcaacatcccttcatgataaaaactctcaacaaattaggcatagaagaaatttacctcagcactataaagtctacatacgacaaacctacaactaacattatgaggaaaagttgaaagsttttcctctaatagttggaacaatataaatgtgcctactttccccactacaatttgacactgtactagaagtcctagccagagcaactaggcaaaactaaa

SEQ ID NO: 128205 - DNA, 539 bp, Homo sapiens
aaatgaaacaggagatatgtcaaccgaaaccacagaagtacaaaagataattaaaggttactatgaacacctttatgtgcacaaactagaacacctagaggagatggataaattcctggaaacatataaccctcctagattagaccagaaataaagagagactcttaacagacaaataacaagcagtaagattgaaatggtaatttgagttaccaaacaaaaaaaaytccaggaccagatggattcacagatgaattttatcagacattcaaagaagaattggtaccaatcctattgacactattccacagatagagaaagaaggaatcctccctaaatcattctatgaagccagtatcaccttaataccaaaaccaggaaagaacataacagaaaaagaaaaatacagaccaagatccctgatgaacatagatacaaaaatgctaaacaaaatactagctaactgaatccaacatcaaatcaaaaagagaatgcactatgatcaagtttgtttcattccagagatgcagggattgttt

SEQ ID NO: 128206 - DNA, 574 bp, Homo sapiens
cattaagcattatatattagaaaaaggacagaaatttccaaaaagtgaaggaaagcataaagtatagaaattaatacattaacaaatatatgtaccatgtaaagatttaacaaagccaaaagttggcacttcaaaaagactaataagaccagtaagtttctaacatgacygatgaagaaaggaaagacacaaaaaaggtatagcctgtttgtgctaaccagagagcaactcataccaacttatcttgggttcctgtcataacacaaagggaaactttcacaatgtgtgaagcgcttgatgctctgtagatgaaggaggagaatgttctcaaattccttacatcaggaacttacttaggtggtatcagccttgacttgcaaatggaacagtacctctgcaagaggaaaagtgatggcatttaaattataactctgaagaggacctgggaagagttctgctggtggctcatgccattgaaaacccagctgatgtcagtgtcaaatcttccaggaatatcagccagcagctgtgctgaagcgggctgctgccactggagccactccaattgctggat

SEQ ID NO: 128207 - DNA, 618 bp, Homo sapiens
ttaatgattaagggacaattccccatatatatgttaactaaacaacaacaataaaagaaatacaatacaaaagtgtatacagcatgattcttttttgagggaatacacaaaaaagacgtgtgcacatggaaaaaaatgaaaacaaatatacctaaatattaaccatgctatttaagattgaatgttgatgggtgatttttctatttttccttacatatttctgtttcttccaattttctacaatgaacattcataatcaagaaaaaaatgctatttaaaaaaatgaactctaatggcacagactgttaaattgagggtaggtcagaaatggcccatgtggccctctatagacacagtctcaaagattcaaaatgaagcagtgaggtgcctctagaggcatgtggcacagaggactagctgtgttttggtgggtattaaattccacagaggtacctgcaaataacataatgtccctttagtgcccccyctaaatcatctccctgcctgagaagtggcgttcactctgagatgcccaagactctgaaggtctgcagtgctgacatgtagaatgtgcaggtgtgctttatagctctcctccccaagaaggtagcctgtgtg

SEQ ID NO: 128208 - DNA, 584 bp, Homo sapiens
gattaatggaaaggaatgttcaggttaagacaaaggattgtggcaaccaagttttacagtgcagaggaatctctcagcagacttcaaagagagagcaggttgtaaaatgtttcttttcagacctaaaagggtgcctggctcttagttgattatctcctggatcaggaaggaaaggaaggaaaacaaaggggagaagggattccctatagaatgtggatttttcccacaagaggttttgcagggcaatttcaagtcatggcaagaagatatattttggrgtgaaatattttcttccttgtctcataatgttatgccagagtcagattgaaaagcaagtcacaatatacagggtcaaataaaacccatctgatgagaatccatggtttgcagggcatgactccccagaccccttagagaggaacttgggcaagataaaaaatcagagcttagtcctcataccttaaccaaaggatcaaagttcacattactagtaatgagacaagggttcagcaggtgcctcctgataagctgcaccgagaggaacccaacaccactcctacagcattgccactgaaagcatgcaa

SEQ ID NO: 128209 - DNA, 584 bp, Homo sapiens
gattaatggaaaggaatgttcaggttaagacaaaggattgtggcaaccaagttttacagtgcagaggaatctctcagcagacttcaaagagagagcaggttgtaaaatgtttcttttcagacctaaaagggtgcctggctcttagttgattatctcctggatcaggaaggaaaggaaggaaaacaaaggggagaagggattccctatagaatgtggatttttcccacaagaggttttgcagggcaatttcaagtcatggcaagaagatatattttggagtgaaatattttcttccttgtctcataatgttatgccagagtcagaytgaaaagcaagtcacaatatacagggtcaaataaaacccatctgatgagaatccatggtttgcagggcatgactccccagaccccttagagaggaacttgggcaagataaaaaatcagagcttagtcctcataccttaaccaaaggatcaaagttcacattactagtaatgagacaagggttcagcaggtgcctcctgataagctgcaccgagaggaacccaacaccactcctacagcattgccactgaaagcatgcaa

SEQ ID NO: 128210 - DNA, 605 bp, Homo sapiens
cctctctgggagcacagactagtgaagagcaagtgacaatggtctggttcagcttgggtgtctcctgaaggtgggrggtgcggagacagcctccaatcccagtgagggagcatgggcagtgggaagaccctgcaacatgggattcctgaggctgggtcccaggaaggacaggctcattttcccacttcatatcaggggccaagtgctccatgtccatgcatttctctgagcctgcttagttactggtgaatcaaataaataaaatcaagacaatatttaatattcattgagtacttattgtgtgcccttcactgtgctaaccaccctaatagaaaatctcatttaatcctatgcaggtgttagtagtcccattttagagtcgagggtattgaagctaagagaggcaaagcaatttatcaagcctcctttgagagagtgaaggagcaactaaatttaccattaaacagggaagccaagtataaataaccacatgaaatatgaaatagcaatgaaagagccatcttagaaaaggctatcttcatggacttttcatcagtgacctcatccaatctcaagactccaaacatctcctccatcaggggatc

SEQ ID NO: 128211 - DNA, 605 bp, Homo sapiens
cctctctgggagcacagactagtgaagagcaagtgacaatggtctggttcagcttgggtgtctcctgaaggtgggaggtgcggagacagcctccaatcccagtgagggagcatgggcagtgggaagaccctgcaacatgggattcctgaggctgggtcccaggaaggacaggctcattttcccacttcatrtcaggggccaagtgctccatgtccatgcatttctctgagcctgcttagttactggtgaatcaaataaataaaatcaagacaatatttaatattcattgagtacttattgtgtgcccttcactgtgctaaccaccctaatagaaaatctcatttaatcctatgcaggtgttagtagtcccattttagagtcgagggtattgaagctaagagaggcaaagcaatttatcaagcctcctttgagagagtgaaggagcaactaaatttaccattaaacagggaagccaagtataaataaccacatgaaatatgaaatagcaatgaaagagccatcttagaaaaggctatcttcatggacttttcatcagtgacctcatccaatctcaagactccaaacatctcctccatcaggggatc

SEQ ID NO: 128212 - DNA, 605 bp, Homo sapiens
cctctctgggagcacagactagtgaagagcaagtgacaatggtctggttcagcttgggtgtctcctgaaggtgggaggtgcggagacagcctccaatcccagtgagggagcatgggcagtgggaagaccctgcaacatgggattcctgaggctgggtcccaggaaggacaggctcattttcccacttcatatcagggsccaagtgctccatgtccatgcatttctctgagcctgcttagttactggtgaatcaaataaataaaatcaagacaatatttaatattcattgagtacttattgtgtgcccttcactgtgctaaccaccctaatagaaaatctcatttaatcctatgcaggtgttagtagtcccattttagagtcgagggtattgaagctaagagaggcaaagcaatttatcaagcctcctttgagagagtgaaggagcaactaaatttaccattaaacagggaagccaagtataaataaccacatgaaatatgaaatagcaatgaaagagccatcttagaaaaggctatcttcatggacttttcatcagtgacctcatccaatctcaagactccaaacatctcctccatcaggggatc

SEQ ID NO: 128213 - DNA, 578 bp, Homo sapiens
gttagtgtgacatttattttgttaacgttgctcatccatattttctaaaaaattcaacaatgaatatgcatacatctgcatatatatagctgcttttaataagggaaaaagcttaaacctagctatggtttccctctgtaaacccgtgaagtccctgtgcaactgctgtaggaaccacagkgtgttccctttccttatcttctccctgacccttctccacccttccagctttatttccaccaccaacagagtacgagaacatggcccagatccaaaccaacgtgtcaacctctgttgagccacctccaagtcccaagttagccattttcaggaaataaaaactaaatgtatgagcacacagcactttaggaaaacctgagacttccactaaatagctagattcccaaaaacagttaaaatggaatgtgagtcataatttttcagaaacctgtctatgcttagccttcagaactgtcttctcaataaatatatacagacagcctgaccacctaagaaaacggagcaagggcatttgcaggttttaatactgcacagcaaagatcattctgacaatattt

SEQ ID NO: 128214 - DNA, 563 bp, Homo sapiens
atcttaacggttttgaggtgaaaatattgtggttttgattttcattgccctgctgattagtgatgatgattatcatatttttcatatacctgttggctatttgtatggttttttttttttggctaaatgtctattcaagtcctttgcctatggcttaatctrctttttttaaattattgcattgtagttcatatattttacatattaacatctaacagatacatggtttggaaaaacatacattttccctgagttcatatgttgtcttgtcactctgttgattggttcctttgctgtgcacaagctttttattttaatgtagttctgcttgtctatgtttgttttggttgcctgtgcttttgctattacattcaagaaatcattgccaacaccaatatcataaagtgttttttctatattttttctaggagttttacagtttcaggtcttacattacaaaatttaatccatgtggagttgatgttttttgtatagtgtaagataaggatccaatttcattgtttgcatgaggttattcagtttttccaataccatgtgttgaa

SEQ ID NO: 128215 - DNA, 563 bp, Homo sapiens
atcttaacggttttgaggtgaaaatattgtggttttgattttcattgccctgctgattagtgatgatgattatcatatttttcatatacctgttggctatttgtatggttttttttttttggctaaatgtctattcaagtcctttgcctatggcttaatctactttttttaaattattgcattgtagttcatatattttacatattaacatctaacagatacatggtttggaaaaacatacattttccctgagttcatatgttgycttgtcactctgttgattggttcctttgctgtgcacaagctttttattttaatgtagttctgcttgtctatgtttgttttggttgcctgtgcttttgctattacattcaagaaatcattgccaacaccaatatcataaagtgttttttctatattttttctaggagttttacagtttcaggtcttacattacaaaatttaatccatgtggagttgatgttttttgtatagtgtaagataaggatccaatttcattgtttgcatgaggttattcagtttttccaataccatgtgttgaa

SEQ ID NO: 128216 - DNA, 563 bp, Homo sapiens
atcttaacggttttgaggtgaaaatattgtggttttgattttcattgccctgctgattagtgatgatgattatcatatttttcatatacctgttggctatttgtatggttttttttttttggctaaatgtctattcaagtcctttgcctatggcttaatctactttttttaaattattgcattgtagttcatatattttacatattaacatctaacagatacatggtttggaaaaacatacattttccctgagttcatatgttgtcttgtcactctgttgattgrttcctttgctgtgcacaagctttttattttaatgtagttctgcttgtctatgtttgttttggttgcctgtgcttttgctattacattcaagaaatcattgccaacaccaatatcataaagtgttttttctatattttttctaggagttttacagtttcaggtcttacattacaaaatttaatccatgtggagttgatgttttttgtatagtgtaagataaggatccaatttcattgtttgcatgaggttattcagtttttccaataccatgtgttgaa

SEQ ID NO: 128217 - DNA, 563 bp, Homo sapiens
atcttaacggttttgaggtgaaaatattgtggttttgattttcattgccctgctgattagtgatgatgattatcatatttttcatatacctgttggctatttgtatggttttttttttttggctaaatgtctattcaagtcctttgcctatggcttaatctactttttttaaattattgcattgtagttcatatattttacatattaacatctaacagatacatggtttggaaaaacatacattttccctgagttcatatgttgtcttgtcactctgttgattggttcctttgctgtgcacaagctttttattttaatgtagttctgcttgtctatgtttgttttggttgcctgtgcttttgctattacattcaagaaatcattgccaacaccaatatcataaagygttttttctatattttttctaggagttttacagtttcaggtcttacattacaaaatttaatccatgtggagttgatgttttttgtatagtgtaagataaggatccaatttcattgtttgcatgaggttattcagtttttccaataccatgtgttgaa

SEQ ID NO: 128218 - DNA, 607 bp, Homo sapiens
atatgatgacttagatcaatattagttagactgatgtggtcagcataattccatgctcgattttagatccagtggaagtaagtgccaggattgggggctaccacaccctctttcttctctggcctcatctcctactgcctaacctcttggttrctccattcattcacactggtcgtactgtttttcaaagatccaggcaaggtatgatttctttattagatcttggtgttacttctgtccaaaacagtctcctctgagatatcctcccttaaatatttgtttaaatgtccttatatttgtaagggatgcatcagaaaacagatttcatcccagacgttcaaatggatataatttaatccgtaagattagagaaagatgtaaaaaatggcacaagagcaggaagcaaggcttagaggtagagtcacagtactctgggataagagaccaaggggagagtcacagtagttgagtgcagattaagagtggaatagacagtggtgaaggggtagaaaggtgtgagatatctttcttcacacatcataggtcatggctgacattcctgtaacaaaagacagagattaacaagagaaaaggatagcaatttatt

SEQ ID NO: 128219 - DNA, 607 bp, Homo sapiens
atatgatgacttagatcaatattagttagactgatgtggtcagcataattccatgctcgattttagatccagtggaagtaagtgccaggattgggggctaccacaccctctttcttctctggcctcatctcctactgcctaacctcttggttgctccattcattcacactggtcgtactgtttttcaaagatccaggcaargtatgatttctttattagatcttggtgttacttctgtccaaaacagtctcctctgagatatcctcccttaaatatttgtttaaatgtccttatatttgtaagggatgcatcagaaaacagatttcatcccagacgttcaaatggatataatttaatccgtaagattagagaaagatgtaaaaaatggcacaagagcaggaagcaaggcttagaggtagagtcacagtactctgggataagagaccaaggggagagtcacagtagttgagtgcagattaagagtggaatagacagtggtgaaggggtagaaaggtgtgagatatctttcttcacacatcataggtcatggctgacattcctgtaacaaaagacagagattaacaagagaaaaggatagcaatttatt

SEQ ID NO: 128220 - DNA, 451 bp, Homo sapiens
gtgatcttctgaaactaacctccgggtgtgggaatttgaaggttagtggatagaagatggccaaataggarcagctctgatctgcatgcagctcccagtgagaccaacacagaaaacaggtgatttctgcacttccaaatgaggtacctagttcatcatcattggcactggttggacagtgggtgcagcccacagagggcgagttgaagcagggcagtgtgtcacctcatctggaaaatgcaacgggtcaggagatttcctctacctatccaagggaagctgtgacagactgtacctggaaaaatggtacacttctgcccaaatactgtgcttttcccatggtcttagcaaccagcagaccaggagattccctcccatgtctggctcagtggatcccatgcccatggagccttgctcactgctagtacagcaatctgagattgacctgaga

SEQ ID NO: 128221 - DNA, 451 bp, Homo sapiens
gtgatcttctgaaactaacctccgggtgtgggaatttgaaggttagtggatagaagatggccaaataggaacagctctgatctgcatgcagctcccagtgagaccaacacagaaaacaggtgatttctgcacttccaaatgaggtacctagttcatcatcattggcactggttggacagtgggtgcagcccacagagggcgagttgaagcagggcagtgtgtcacctcatctggaaaatgcaacgggtcaggagatttcctctacctatccaagggaagctgtgacagactgtacctggaaaaatggtacrcttctgcccaaatactgtgcttttcccatggtcttagcaaccagcagaccaggagattccctcccatgtctggctcagtggatcccatgcccatggagccttgctcactgctagtacagcaatctgagattgacctgaga

SEQ ID NO: 128222 - DNA, 570 bp, Homo sapiens
tgaatcaatctttcaccgaggtagtgggcataagatccaaaaaatagttttttggcccttgcctctcaccctctttccatcctctagtagtcccagtgactatcctttccaccattatgaccatgaatacacaatagttagctcctgcttataagtgagaacatgcagtatttggttctgttcccatgttatcttgcttaggataatggcctccatatgcatccattttgctgcaaataacctaatttggttcttttttatggctgtgtagaattccagtggtatacatgagccactttttccttatctaccagaagatatttttaataactactttagtggagaatgaaataacctttggtcagaaaggatggactctcagcaaaattttagaaagagatacagaaggagatttggagcatgtgaaaatgcataaaataagaacaccattgtcataatctaaattgcaggttaaycagattgccagcagatccaatttattttgatttacaagaagtaacataagttttccatcagattattggcaaaaatgtatttattgccaacctt

SEQ ID NO: 128223 - DNA, 570 bp, Homo sapiens
tgaatcaatctttcaccgaggtagtgggcataagatccaaaaaatagttttttggcccttgcctctcaccctctttccatcctctagtagtcccagtgactatcctttccaccattatgaccatgaatacacaatagttagctcctgcttataagtgagaacatgcagtatttggttctgttcccatgttatcttgcttaggataatggcctccatatgcatccattttgctgcaaataacctaatttggttcttttttatggctgtgtagaattccagtggtatacatgagccactttttccttatctaccagaagatatttttaataactactttagtggagaatgaaataacctttggtcagaaaggatggactctcagcaaaattttagaaagagatacagaaggagatttggagcatgtgaaaatgcataaaataagaacaccattgtcataatctaaattgcaggttaatcagattgccagcagatccaatttattttgatttacaagaagtaacataagtttyccatcagattattggcaaaaatgtatttattgccaacctt

SEQ ID NO: 128224 - DNA, 618 bp, Homo sapiens
atatttccactaagactggaagtgagggggagcatcatatttggggcagggaggaatcaaagtttctgttttgagtagttaaattcagaatgcttctcagatatcccagaggaggtgttaatttggcagtcaggtatctgaatctggacacagagggggaggtcaaggctggatgtgttagtttagaaataaccagcatttgggtaagattaaaacctatgatataggataaaattatctagagagagcatttactcagagaactctcaatattcaggaacacaagcctatccagactggctcaggataaataaagttttatgtagragacaaatagttgcccatgtagaaccaaagaaaaggcgcaaataaataaaagcccatcatctctcttggttacatagaatacatgaggcagtaaaggataaggattaaactttcaagatgtgaatgtcttgaattcagatgtcaaacagaactgaatttgaatctgtttcccaccagccaaatgagtgtttggtgaagatgaccatgatgatgataatgacttacatttcttaatgtttcccctatgtgtgtaggacttttaaacttgttccagtacaggtagggaaagga

SEQ ID NO: 128225 - DNA, 618 bp, Homo sapiens
atatttccactaagactggaagtgagggggagcatcatatttggggcagggaggaatcaaagtttctgttttgagtagttaaattcagaatgcttctcagatatcccagaggaggtgttaatttggcagtcaggtatctgaatctggacacagagggggaggtcaaggctggatgtgttagtttagaaataaccagcatttgggtaagattaaaacctatgatataggataaaattatctagagagagcatttactcagagaactctcaatattcaggaacacaagcctatccagactggctcaggataaataaagttttatgtagaagacaaatagttgcccatgtagaaccaaagaaaaggcgcaaataaatamaagcccatcatctctcttggttacatagaatacatgaggcagtaaaggataaggattaaactttcaagatgtgaatgtcttgaattcagatgtcaaacagaactgaatttgaatctgtttcccaccagccaaatgagtgtttggtgaagatgaccatgatgatgataatgacttacatttcttaatgtttcccctatgtgtgtaggacttttaaacttgttccagtacaggtagggaaagga

SEQ ID NO: 128226 - DNA, 542 bp, Homo sapiens
ctgtcatgagatgggggcaggctctgggccaggagagcaatggccagctttggaagctatatctcaggtcacattcaaaagcacacatttccaattcttttcccaacgctgcttttgtcacattagaatgaaatttgccctctgtgttgaaatattctataaaaaacacaatcttgcytaagttaaaatttaaagttagcttgtctgacagctgggatgtaaagagacagtgaaaggattctgacttttggcattgtcagcagtttcccttgagagtggagccatgtctttctgcaacctgcagctctcgctttcctgctgtgactgagccagtgggatcgtcggccaggagagggcgcctcactcaggtgagacataaatccaactgcaccctatgagggcactaggaaggtgaaactcaatcctcacctacacttgctctgctctctgccgtttcagcattccaccttagggcgtcaggcttaactttgcaggtgttaaatctccgtgtgtccatgaaacacttcaagtactatttcagc

SEQ ID NO: 128227 - DNA, 542 bp, Homo sapiens
ctgtcatgagatgggggcaggctctgggccaggagagcaatggccagctttggaagctatatctcaggtcacattcaaaagcacacatttccaattcttttcccaacgctgcttttgtcacattagaatgaaatttgccctctgtgttgaaatattctataaaaaacacaatcttgcctaagttaaaatttaaagttagcttgtctgacagctgggatgtaaagagacagtgaaaggattctgacttttggcattgtcagcagtttcccttgagagtggagccmtgtctttctgcaacctgcagctctcgctttcctgctgtgactgagccagtgggatcgtcggccaggagagggcgcctcactcaggtgagacataaatccaactgcaccctatgagggcactaggaaggtgaaactcaatcctcacctacacttgctctgctctctgccgtttcagcattccaccttagggcgtcaggcttaactttgcaggtgttaaatctccgtgtgtccatgaaacacttcaagtactatttcagc

SEQ ID NO: 128228 - DNA, 542 bp, Homo sapiens
ctgtcatgagatgggggcaggctctgggccaggagagcaatggccagctttggaagctatatctcaggtcacattcaaaagcacacatttccaattcttttcccaacgctgcttttgtcacattagaatgaaatttgccctctgtgttgaaatattctataaaaaacacaatcttgcctaagttaaaatttaaagttagcttgtctgacagctgggatgtaaagagacagtgaaaggattctgacttttggcattgtcagcagtttcccttgagagtggagccatgtctttctgcaacctgcagctctcgctttcctgctgtgactgagccagtgggatcgtcggccaggagagggcgcctcactcaggtgagacataaatccaactgcaccctatgagggcactaggaaggtgaaackcaatcctcacctacacttgctctgctctctgccgtttcagcattccaccttagggcgtcaggcttaactttgcaggtgttaaatctccgtgtgtccatgaaacacttcaagtactatttcagc

SEQ ID NO: 128229 - DNA, 535 bp, Homo sapiens
tttttataataactcctccattacttttgatatatctaattatttctttaataactggatcaaacacttaatattaatgaaggtagagccaataggatatcctggtagattggaagagacagtgagagaaacagaggcataaaggatgatgctgaagtttttggcttgagcaagaagaagcagggctgctactagggtgagccaagtgagatgytgagggcatacaatttaaggaggcccttgcatagccatgcaaaagcaaggtcagcacttccttgatgctctgaatgccttaaagtttgtgcctaagtggttggcttacttcactcttgtcctagtcctgactggatcaatggtatcaccatccactgagttggggcaggctgagcagaagcaaatttggggaggctggattgaatatagaagcttggttccggacatgttgactttgagatggccattgaacattcaagtggagacatccggtactcagctggatctctgagtctatatctcaggaaagaggctgagacta

SEQ ID NO: 128230 - DNA, 535 bp, Homo sapiens
tttttataataactcctccattacttttgatatatctaattatttctttaataactggatcaaacacttaatattaatgaaggtagagccaataggatatcctggtagattggaagagacagtgagagaaacagaggcataaaggatgatgctgaagtttttggcttgagcaagaagaagcagggctgctactagggtgagccaagtgagatgttgagggcatacaatttaaggaggcccttgcatagccatgcaaaagcaaggtcagcacttccttgatgctctgaatgccttaaagtttgtgcctaagtggttggcttacttcactcttgtcctagtcctgactggatcaatgrtatcaccatccactgagttggggcaggctgagcagaagcaaatttggggaggctggattgaatatagaagcttggttccggacatgttgactttgagatggccattgaacattcaagtggagacatccggtactcagctggatctctgagtctatatctcaggaaagaggctgagacta

SEQ ID NO: 128231 - DNA, 535 bp, Homo sapiens
tttttataataactcctccattacttttgatatatctaattatttctttaataactggatcaaacacttaatattaatgaaggtagagccaataggatatcctggtagattggaagagacagtgagagaaacagaggcataaaggatgatgctgaagtttttggcttgagcaagaagaagcagggctgctactagggtgagccaagtgagatgttgagggcatacaatttaaggaggcccttgcatagccatgcaaaagcaaggtcagcacttccttgatgctctgaatgccttaaagtttgtgcctaagtggttggcttacttcactcttgtcctagtcctgactggatcaatggtatcaccatccactgagttggggcaggctgagcagaagcaaatttggggaggctggattgaatatagaagcttggttccggacatgttgactttgagatggccattgaacattcaagtggagacatcmggtactcagctggatctctgagtctatatctcaggaaagaggctgagacta

SEQ ID NO: 128232 - DNA, 535 bp, Homo sapiens
tttttataataactcctccattacttttgatatatctaattatttctttaataactggatcaaacacttaatattaatgaaggtagagccaataggatatcctggtagattggaagagacagtgagagaaacagaggcataaaggatgatgctgaagtttttggcttgagcaagaagaagcagggctgctactagggtgagccaagtgagatgttgagggcatacaatttaaggaggcccttgcatagccatgcaaaagcaaggtcagcacttccttgatgctctgaatgccttaaagtttgtgcctaagtggttggcttacttcactcttgtcctagtcctgactggatcaatggtatcaccatccactgagttggggcaggctgagcagaagcaaatttggggaggctggattgaatatagaagcttggttccggacatgttgactttgagatggccattgaacattcaagtggagacatccggtastcagctggatctctgagtctatatctcaggaaagaggctgagacta

SEQ ID NO: 128233 - DNA, 597 bp, Homo sapiens
tcaaaatgtgggaaaaacaggggccttttagtgttctatatgcagactagtcyttgtagacttgcacccccattgacagtggaggcagtcgtgcgatcttggtttgatctagtaattgacatgtcatttagttaacacaatctgttttagatgcttttcagactttcagattctgtctcctactcctgaacttccctggaatgacaccaagttgtatgaggggtttactgtgtccttgtgatagtggagagaaaaaaaattcagatcatgtggaatctttagatgccctctatgcccagctgtggacaggctggtccacctctccttgtctgaggattgctgagctctgtctagctctgcctatccttttggagtgaagctttggcttcctggagtccaaggtttcaggcatttgtgtgtattcaagtccacccccactttatcctatccactctgaccccaagcttctgacagttgcccactcctttttcaacacttccacatcccttctggggcatttgggaaatcttaaatccctgtcataacaagtgcagacaatggagagccagggctccatagtggactcaccacctgaac

SEQ ID NO: 128234 - DNA, 576 bp, Homo sapiens
cgaggacccaaactgcctgtgcccatgaacgctcagaatgcatcgcttattgtattcatattttaatactctactgatattaatggaattcatattccagaaggagaggcagatgtgcaaacagacaattgcactccagtgtgacatactcatggtcgtggcatcgtacaaggcactggttgctgcctgagctgctgaaaaaatgggagtgagagtgctgggaaaactaagtgacacatgctcaggcaaggagttttagtccttagagctaaacctgtctctgcagcctggaaaccccactccctcagcttcctgcggggatgagaaggggagtgcccagctacgagcatttctcctcctggctgctaccatgactccaagtagggccatccctggaatggaagacacagtcactcctgcctcggtttacagtggtgtttcccgacatttgttttcaaggactccagcagggctgagactagggtgaagctagccaggtgcacagggggtaacattcaaagaggyacccactcactctcaggatggtgcaatgagacggtgtcctttaattttgca

SEQ ID NO: 128235 - DNA, 545 bp, Homo sapiens
gaattctactgccccagacatctgctgcgcctgccagtgctcctaacactaccacccaatcaccagagctgcaaccactcccctacttgccctccccgccacygccacacttacacttgcaattccctcatggcttgccaacaaatggtgaccctccatcctgccctgcctgcctcacaggcacacaccatctgcacccacctcgggctgctcaaagatttatgcatctgagaatatgtccttccctcctctttccagtgggaggaggaccttcatgagccttgatctcatcagccatctggactgatgaggctcaactcataactatatctgcaaaggtgagagagagcccaggggagggcagcctcactggaagattgagccacgtggctcagaattgtggccatggggtcaggtcctcaactcctatcacagttcctgccacaatgcccatcctccatctttagggctggaagaaaaaagtatgcaggctgcagatgtacagtgtttgccactttctctcacctcttccgagaggctgtaat

SEQ ID NO: 128236 - DNA, 641 bp, Homo sapiens
tctgagcacctctctccacctccactgatatcacccaaactcaagcctgcatcatgcctgtcctgggccatctggcagcagcccctagcaggccttgctacatctactcttgccaccccagcaatcagatctcctaaaggaatagtatttttgaaaatattaatcaagatacctcattcctctgctataaatcctctaaggtcttcctattgcacttagaataaactcgaaattccatacctgacttccttcataagacccacccccctgccaactgttatgtagtgtcactggcckctttgctttttcaacacattaagctcattcatgtctcagattctgtgcattgctgttcctactgattactcagcttccagcacccacacacagacatccccaggactcattccctcactcattcagctataaatgtcacctcctaagacccatctcttacctaaaatagctcctgtcttgctctctgccttcatcctatgccattttcacatatccatgtttggcatgatcttgtgtgtgtgtgtgtgtgtgtgtgcatgtgtgtgcgtgtgtgtgtgtaaatttagttgttcactgtctgtccctgtagtagggtaaataatggtctcaaagatgtccacatc

SEQ ID NO: 128237 - DNA, 422 bp, Homo sapiens
atctaagctggaaaagggaatacagaatggccaagaggggctagaataaagttggaggggtccrctggataaaacaaactccagtgtacattagaggccaggtatgatggctgacacctgtaatcccagtgctttggaaggccaaggtgggaaggctagcttgaggccaggagtctgagaccagcctgggcaacataaggagatcctgtctctaaaaaaatgtttttaattcactgggtatgggggcacgtgcctaaagtgtcagctactcagggggctgatgtgagaggcctgctggagcctgggaggttgaggcggcagtgagctgtgaccgtgccactgcacttcagcctgacagacagagtacgactctgcctcaaaaaaataaaaaagacattagaataacaaggaagctcctcata

SEQ ID NO: 128238 - DNA, 604 bp, Homo sapiens
atctacctatgtttggttcttatgcatgatgatgtccttgagagatcaccttgaatatcatcatgaagcaggatgaaataggattttcaatgcccttctttaataagccaaataacagctcccaaagatagcaggccctaattcctggaatctgtaactattaccttatttggaaaatggtcattggcaagttgattaaacaaaggatctaaagatggggatatcatgggttttctgggtgggccctaaatacgatcacggatgtcttctaagagagcaccagagggagatttaatatagaacaagaggagaagacaatgtgaccacagacattagaagcagattggagtgatgcagacataggccaggaatgccagtagccattgraggctgaaggaggtaaggaagggttctcctcacgagcacctggaggtggcgcagccctgccaacaccttgatttcaaactctggcctctaaaacacagagaataaatttctgttgttttaaaccactaagtttgtgataatttgttacaggaactataggaaatgaatacaccctctatctcctttctgtaacaattcctccattctcaatactact

SEQ ID NO: 128239 - DNA, 637 bp, Homo sapiens
acaaatccacattgaaaaatagcatggttgtcttttcatgcacacatgcaatctctgaaatcacgaattctagaaactagttttacagatggggaaaatgaaacagagaggtgatatgaattccccaaaatgacatagtccattatttaaagtataagagtaaatcctagatctactgattaatagtttagtgccaagtaaggaaacagaaccacatataatgagaaaagtaattttcacgttagaaaatttccagcttccagagatattttgctattgcagagccagtgtgcaccatcattggcttgtattttggcagagggaaagtttataccatcacggcccatgcattttccatttacycacctctttcaaacaaaaaaaaaaaacatattgccaggaaagacctcatagcatattgggcaggcagtcatgaataaggttggtacttgagatatgttaggacttgggcttaaattccggctttgttattggcaatgtcacttaatgtcttgaatcaatctcattatctgtaaagtctctttttctctgctaagcttcatacaaggacaaaagagaatatacagataaaattgctttataagttgcataatgttctacagattgaaaaagtcat

SEQ ID NO: 128240 - DNA, 637 bp, Homo sapiens
acaaatccacattgaaaaatagcatggttgtcttttcatgcacacatgcaatctctgaaatcacgaattctagaaactagttttacagatggggaaaatgaaacagagaggtgatatgaattccccaaaatgacatagtccattatttaaagtataagagtaaatcctagatctactgattaatagtttagtgccaagtaaggaaacagaaccacatataatgagaaaagtaattttcacgttagaaaatttccagcttccagagatattttgctattgcagagccagtgtgcaccatcattggcttgtattttggcagagggaaagtttataccatcacggcccatgcattttccatttacccacctctttcaaacaaaaaaaaaaaacatattgccaggaaagacctcatagcatattgggcaggcagtcatgaataaggttggtacttgagatatgttaggacttgggcttaaattccrgctttgttattggcaatgtcacttaatgtcttgaatcaatctcattatctgtaaagtctctttttctctgctaagcttcatacaaggacaaaagagaatatacagataaaattgctttataagttgcataatgttctacagattgaaaaagtcat

SEQ ID NO: 128241 - DNA, 641 bp, Homo sapiens
tgttgccctttagacaccatctctggaagttccactgactttaaaactcactacatccaaaatttatctcacaatattcccctgaaacctgctcatgtaaaaatgcttggcagagcagctacataaatattttcttcctctcgtcctgtccccttccctctcttcttcctccttctccatccctttctgtttttctccctaattatcccatcacctttctcttggtgttctaaaattaatctcttgcctctccttcccctcaacacaatatttcactgattcccatgatatttttgaaaggtgtctgggttgcatgtatttctgtgtcattctcatggccctttctttgcagagtttcacctgccacctggatcatttcctatttttctgcagccacttcagggcggggacccagtatcaygaagctgcaaggtaaaaaggatcaaaccttaactgcctacatgtgctcacaggaacataagtgagtgaggctcaccagcaaccaggaagtgagctgagcctaacatatgggagagatcctgtctcatctgcagggaagagctgctatataggaaagtatctgctcattgctgccatgtgggaatgctggtattgctggactttctgatgttttaggagaa

SEQ ID NO: 128242 - DNA, 643 bp, Homo sapiens
actgcatctgacaaacttctaatatctagaatctataaggaacttaaacaaaataacaagcagaaaacaaacaatcccattaaaaattgggcaamggacatgaatagacacttttcaaaagaagacatacacacagtcaataagcatgaaaaaatgctcaacattactaattattaaagaaatccaaatcaaaaccaaatgaaattgggcaaagggcatgaacagacacttttcaaaagaagacatacacacaagccaataagcatgaaaaaatgttcaacatcactaattattaaagaaatccaaatcaaaaccaaagaaattgggcaaaggacatgaatagacacttttcaaaagaagacatacacacagccaataagcatgaaaaaatgctgaacatcactaattattaaagaaatccaaatcaaaaccaaaatgaaataccatcacactccaatcagaatggctaatattaaaaggttaaaaaataacagatgctggtaaggctgtggagaaaataaaacacttatacactgttggtgggaatgtaagttagctcagccattttagaaaacagtttggcaatttctcaaataacttaaaatagaactaccatttgacccagcagtcccattattgggta

SEQ ID NO: 128243 - DNA, 640 bp, Homo sapiens
cttatttcacttagcttaatatcctcaaggttcatccatgctgttgcatattgcagggtttccttttctgatggccgaatatcagccaactctcttgagtgattgtacccataacctctacaattttaaggttctttaaagtgaagcaagctataaaggcacttggagggaatttgaatgtttaagccttttagttttttataattttcctccaatcttttaccgtggtctttatcatgactaatttgacaagtgtcttttaccaagttgactttaattactggtcttgatacagttgtattaaatatttgtattgagatagtkgtatgaactttatcatataaatacaaatgtctttataaaacctcaagttttatcgtttctcagccttttggctaagatcaagtgtaaaaactcacattttattagcttacatgatatttcattcaatcttattacattaaaaaatacaacagaggacaatgaggacaaatacaactgacttttgcttagcatatcactgtactgctgggagataagattctggcatgctgaacactaacccaacagcactagacaccctctattctgtaggcataactttaaattttttacaaaatgaatggaagctattggatat

SEQ ID NO: 128244 - DNA, 418 bp, Homo sapiens
ttttatttttatttaaatgaaaactgctgcaagagtcaaaggcaaagcttctggattgcagacggtgcaaccatggataaatataaatcctagctttccaggcggctttgtgagtgggataaggagcacacggcactaactaaaacgattatacaaggyatgtgcttgcaataagacttaaacgcatatgggcttcttcagaatccactttataaaatctctcattctttcccatcagccccactggaatctgtttgagtctttcagatcattggttggggcaatattgtttccatacaattcctcatcatatgccaatacattgttattgagtggttaccttgtgagctgagaattgcccacaactagaggagttcaagtagaggacaaggagaggattctttaatgactatgcttc

SEQ ID NO: 128245 - DNA, 620 bp, Homo sapiens
cttctattgaaaaatatattgaaatattgcatttaaaaatggcagtagggagaccagaagacagaatgatggccagcaaactgaaatggcccatagttgttcattttcttctttgaatgtcttgattaactgttgagctagaaccattatatcaaaatttacactgagtacaacaatggactttagattcaagctctgatattcagtgtgtccttccagggccctctcaggtttctactgygggaggcaaggcacctatttcccacacaatgtcctaccaagacacacaatggtgtaagctaatgaaatttccccaatgaaattgagtgctgttaggaagtagaaatcaatgctgggaagctaaacaatggcaaatgtccactccatcactgatgctgctatcgtcccaacttataattccaaccagaacctctctcctttacctcctatggagctgggactacagtgaggtaagcaaggcccccagggtacaatatttagggagacactcattctcacatgctaacctgtgcttacaggaccctgagagtgagtgcctccttaaattttggtccctgtgtgcctgcttgcctaactctagtcctgacacttaaccctca

SEQ ID NO: 128246 - DNA, 635 bp, Homo sapiens
ttgaatctttaaaattataatacataataggtgaattatgtgacaataattctgttttcaagttatttttaatggatgtggttcttgagaactgcatgaaacataccagcagggaatatcaaaatggctaaaaacaatacaactccaattttaaagaaaaaatgattcccatgcttttcccaggtatttgtgtatctgctagttatcagggttaattttccctattaacagaaagcattaacaggcaacactgttcatgctttcaatacttttaaaagtctgctaaataaaatgtggaagctggtagatgatatactttattggctgctctattctgtcttagcarcatgtcctggaaacaatgagttctaccaccacgcagttgaatccagggtccaggactccatgtggatgctttctggagcaccctgtgaccccgggacctctagcacaatcatggccacccagccaggctgtgatgtccaggccaggggacaccaagggaaggagaagagtggttgccaaagtgggagaggagagaacagcatatgtcagaaaacttccatgtccaaaaatggcaagaggaaggatttgattttaatgggaaaatagagctttttctgctgtcctcctcc

SEQ ID NO: 128247 - DNA, 608 bp, Homo sapiens
caaaatttgggtcattaacttactgagtgatcctgagaaagttacttaacctttctgtgtctcaattttctcttctgtaaaatataatagataatgccttttggcaggattgtcctgatgattagcaatgatctgagcaaaacgtctccccacatttactcgagttttccctggtctttgtgtagctgagccaaggaatgggtaaataaggctaatggccaagagcatcgacagcttgggttcagataccctggctagccctgggcaccttgctaactttcaatgtctcaggttatctggaaaatatgaataatccaagaacctgyctcaaggggctattgaggggattgaaagagttatatatgtgaagggctcagaacagtgcctggttcttacttattacttattacagcaaatacttataagtatttgctgcttttatgagtagtagtagtagtagtaagttgcctgaattagaaaaacatatggacatacctggaggtgtgggtggaggtaggtcttccgcatctgaatgcataaaggtgacaggttactctatttggggtgacaaggtataggaaaccagaatactggaattaccccttggg

SEQ ID NO: 128248 - DNA, 610 bp, Homo sapiens
gccctgggcaccttgctaactttcaatgtctcaggttatctggaaaatatgaataatccaagaacctgtctcaaggggctattgaggggattgaaagagttatatatgtgaagggctcagaacagtgcctggttcttacttattacttattacagcaaatacttataagtatttgctgcttttatgagtagtagtagtagtagtaagttgcctgaattagaaaaamatatggacatacctggaggtgtgggtggaggtaggtcttccgcatctgaatgcataaaggtgacaggttactctatttggggtgacaaggtataggaaaccagaatactggaattaccccttgggctacttcaaccctcctctggcagggtccttggcctaggaggctgggggacagcagctgggtcaactctgtcccatagcagccagggctggattgcctttgtcccttcttatgcagaatccctgaaccacttgttaagatgcagattccagagactttttcctacttagtcataatctctggaggtgggaccctagaatctacattgtaatgcccagatggtgctcatgccaagtaattagtaatttcctgtgcaaccag

SEQ ID NO: 128249 - DNA, 633 bp, Homo sapiens
gtataggatagactgaagtagggaacagataggatcatgatccagatgtcaggtaatgaacccacaaacaagtgtggagattgtggatttgggaaagaacgggaagaggaaagagatagacaaaaggttggctgcaagaaagaaggaaaaggctaaattttcacacttgggagaagaaggaaatggtgataacttttggagaatttgaactttggagatgattttaggaaaaataataagtttagtttgtgccatcccgggtttgaagtgacaacaatttaatctaatggtagtgtggtgtagtggaaagggctgtagttttcaaatagacctggctgctgattctggcttgacatcttacagggtgaggggcttttctgagtaacttaaactctctaagcctcagtgtcyacccctgtatcagccctcaggattgtgaggactgtgtaggtgggtagtgaggtaggcatcggtgggcatttggtcttcttagcatctttcctgttgagaatgccactctgctggttggtgggtctgtaatttacatgaccaacttctgtgccaccatgacggatccaggcatgggcacatgacccaaccagccaatcagagtccattttggggagatggata

SEQ ID NO: 128250 - DNA, 633 bp, Homo sapiens
gtataggatagactgaagtagggaacagataggatcatgatccagatgtcaggtaatgaacccacaaacaagtgtggagattgtggatttgggaaagaacgggaagaggaaagagatagacaaaaggttggctgcaagaaagaaggaaaaggctaaattttcacacttgggagaagaaggaaatggtgataacttttggagaatttgaactttggagatgattttaggaaaaataataagtttagtttgtgccatcccgggtttgaagtgacaacaatttaatctaatggtagtgtggtgtagtggaaagggctgtagttttcaaatagacctggctgctgattctggcttgacatcttacagggtgaggggcttttctgagtaacttaaactctctaagcctcagtgtctacccctgtatcagccctcaggrttgtgaggactgtgtaggtgggtagtgaggtaggcatcggtgggcatttggtcttcttagcatctttcctgttgagaatgccactctgctggttggtgggtctgtaatttacatgaccaacttctgtgccaccatgacggatccaggcatgggcacatgacccaaccagccaatcagagtccattttggggagatggata

SEQ ID NO: 128251 - DNA, 427 bp, Homo sapiens
cttaccctacaccaactgaaagagtctatctaagtcctgaagatcacaagtcatcctcatattcccatgaatgtgaatggaagttgggcctgctcagagaatcatcagggctctttattgtggcctggagccaactgccaaggagtgcctaggaacacactcagtaagagtgttgccctcaggccagatcagacttgaacctgcagagaaatcccctaggtatgtcagcaattgctcatttggatgctataaacttgaagttgtgaaaaatataaagacttacattatccagtctctcctggcaaaatatgtaggtttaatcattcctgaattttccttagttcacacagatatacaratatatatcctaaaaattggcattggtaggcgtgtcaagttatcattttaaaaacatagaaacctgaac

SEQ ID NO: 128252 - DNA, 640 bp, Homo sapiens
taaaaatagaaaacactaaggaaaaattaatgattacctaaataaatgcagaaagatacatttttaatgggttggaagataatattcttaagatgtcagttgtccccaaattcatctatagcttccctgtaatcccagcaagctacattgtggaaattgacaagctgaatttaaaattcctatgtaaacgcaaaagaattgttacagctgtaacacttttctaaaagaacaaaactgggaataagtatatttttaagacagttattagcattaagatagacaaatcaataggataaaatagaaagtaaaaaaaaaatagacctatacatatatggacaactgattttggccaaggggcaaaggaaacttgttgggagaatagcaatatcatattttcaacaaatgaygttggaacatctgggtattcattacaaaacggttaatctttgatccatatttaaaatttaactcaagttgaattatagatgttggtgtaaaatctttaactataaaactcatggaagaaaacatatgagactaacagtgtcaattagcgttaagtaaagatgtattagatgcaacagaacaaaacatgatccatgcaagaataaatgtgataaactggacttcataaaaatta

SEQ ID NO: 128253 - DNA, 464 bp, Homo sapiens
tctacattattgttaataagaagatgggcaagtaacttattgcctggttaggaagataaaataattgtatatatctgtgcagtatggagtaaaaagtgtatgtaatgaaaataaaggcgtggctagtatgtcattctttggccaatctattttcgtcattgaaactcagatcaaggtcaagaatcagaatgaccctaagtgccctctgtgtcacgttatattttacatgatatattttatacattcggcttctaagcctgcttaaaatgattctgggacctcatgtcacttatctctggggtaagaggcactgttayttcagtcccagtatatccccgtgttattttttccttgttttgctgaaatatattctcagaaatctatttctccagacatttatataaagacaatttccttagttcttataattacaaaatatcattttttgttattttagaatgata

SEQ ID NO: 128254 - DNA, 564 bp, Homo sapiens
ggctgttaatcatatttagaaatacttaacaatctacttgagcatttgcagtaaatgttttttaacatttttttccaaaagcaaggacataggtctcctcaatcatataattttctctattttcactgatwttttttaccattcattaataggttactttccatagttctaccacttctagaattcagttatgtaatatataaaaagcactctgttatagagaagaatgagaggactctaattctggagagtggcttctgtatgacagtacactttgttcattctgggtacctcattatttttgagaagccctgcagagcctgggctatgcaaacatattcattaaatgacactgtcaattcttttttctgtaaaataaattgctgacattagtgtatctcaacttttaatctaaagccccatataatcataaattgttcaagttttacatttcaatagggctggatatgaatcctgactctaacactgtctttgagaacttgaggaagactttttttttatgtttgagtgtgtctattttcttctatgtcaattgggacagaa

SEQ ID NO: 128255 - DNA, 622 bp, Homo sapiens
ccttttactggaatagattcaattttattcccaaccaatgcagaaaaaaggaagacatataaacgatctccgacagctgaagcagtttcaatacaatttgctctcagttcctgcttgagggttcagctgtgctttagtctagctctactgcattagcccagcctggccttaaggagaccagcagtcacaagacaggaacaagcactgactcatgctcctcagcactttcctcactcctcccctgtgcactgagcacatgcttcctgttctctgaactccatgtgcttcagttaaccctttcccaatgcggttctccgatcattttgttttaaaaactaatgttttcatgatgsagactgctaggtcacattccccaggtaaagatattcaaattatagaaaccagccaaaggtttccatgaggaaggatatactgattttggacttagactttttcaaatccttttttttaacttgatataacaagagaggagatcacacttctgagaggcaggctcacatgtaagtattgcatttttttaaattataaagggtagtgatgggttaaatggtctcaatagaacagatacattcattggctaaatgtacatatcttgaattta

SEQ ID NO: 128256 - DNA, 622 bp, Homo sapiens
ccttttactggaatagattcaattttattcccaaccaatgcagaaaaaaggaagacatataaacgatctccgacagctgaagcagtttcaatacaatttgctctcagttcctgcttgagggttcagctgtgctttagtctagctctactgcattagcccagcctggccttaaggagaccagcagtcacaagacaggaacaagcactgactcatgctcctcagcactttcctcactcctcccctgtgcactgagcacatgcttcctgttctctgaactccatgtgcttcagttaaccctttcccaatgcggttctccgatcattttgttttaaaaactaatgttttcatgatggagactgctaggtcacattccccaggtaaagatattcaaattatagaaaccagccaaaggtttccatgaggaaggatatactgattttggacttagactttttcaaatccttttttttaacttgatataacaagagaggagatcacacttctgagaggcaggctcacatgtaagtattgcayttttttaaattataaagggtagtgatgggttaaatggtctcaatagaacagatacattcattggctaaatgtacatatcttgaattta

SEQ ID NO: 128257 - DNA, 634 bp, Homo sapiens
tctaatttatctaatgatattatttattattttatagtgcttcatggtactataattagtatatatttctcttcatatacacacatgtacagacatcactacacacatatatgtgtgtacctgtttgtatacatgattatatatacatatatttgtgtgtgaatgtatattatatatacacataacatrtatgtgattgtgagagcactacaaagaaaaaaaatttttttttttttttgagacagagccttgctctgtcacccaggctggagtgtagtggcacagtctcggctcactgcaacctctgcctcctggttcaagcgattctcctgcctcagtctcctgagtagctgggattacaggcacacatgaccatacccggctaattattgtatttttaatagagacagggtttcgccatgctggccaggctggtctggaactcctgacgtcaagtgatccgctcgccttggtctcccccaaagtactgggattacaggcatgaacctctgtgcccggccaaaaaagcaaactttataataggagatttcagtttatgcttcaattactaaatgaacaaggtgaaaaaatctgtaatgatataataaatttgaacaacgtaattaacaacatt

SEQ ID NO: 128258 - DNA, 600 bp, Homo sapiens
gagcatggacatggacgcccatcccttaagtcttgccatactcctctaggtggctttagcctttgttggctgcaagggctggatagaaatgaactatctgctcaaagggtggggctggtttgatcagagtgtccccatctgctggcctytctcagagtttctgcctcgctgcaccaactttcagcatggccttggcagcactgacccacaattgctgtcccaccaaagcatttttgccagcatgtccccacatagatggtttagacagtagactgagaacacctcagccccttcagtgcagcaggtcctttacctcaagtggtcagaaaaaaaggtgttggcctagtttcagacccctaggggtagagcacacagcctaacagtgctgagctgatccttggacccatgaaattatccagaaacaaagccgatcaactaaacccaacttatagcacagctagacactcaaggacatcaaagaatataaaataaaagagccccatccaaagaacagcaactgcaaagactagcaaaatattagcccacacagatgggaaagaaccagtgcaagaactctggcactgtagaaaccagagtgtc

SEQ ID NO: 128259 - DNA, 553 bp, Homo sapiens
ctaactctgcaatgcccagacatagatggacatcttcaagcatttagatcatctaggtagataagacctcagcagacaaagtaaggcaccaaggacagtactggaagaacagagatatgtgacctttcagatagtaaactcaaaatagctgttttgatgaaattcaaagaaattcaagataatagagaaggaattcagaattttatgagataaatttaacaaggagattgaaataattaaaagaatcaagaaaaaattctggagttgaaaaatgccattgacatactctagaatgcatcagtctcttaatagcrgaattgatcaagcagaagaattaatgagcttgaaaataggctatttgaaaacacacagtaagaggagacaaaaaaaggaataacaaacagtgaaatacacctacaagacctagagaatagtctcaaaagggcaaatttaagaattattttccttaaagagaaggaagataaataggggtagaaagtttattaaaagggatactagcagagaactttagaaacctagagaaaggtattaa

SEQ ID NO: 128260 - DNA, 479 bp, Homo sapiens
gtctgggatgcaagtattgctaaatatgttacccctccaggttaaagatgattcagctttaagatgttacccttccagaggtacagaagaaacgcatttccaaaaaaggttctttcagtggtagactcggggagaacttggtggcccctttgaggtgccaggtttctttttcatctagagatggctgcgagtggaagctgataatatgtaggcactttgtaaattcatattgagtaaatgaatgaaattgtgatttcctgakaatcgaaccatggtttcctaaccctaattgatgagaggctcgctgcttgatggtgtgtacaagctcacctgaatgggacttttttagacagatcttcatgacctgttcccaccccagttcatcatcatctcttttacaccaaaaggtctgcagggtgtggtcactctttcttttgtgccattttggggtggagaaggtagatgtgatgaaaccaata

SEQ ID NO: 128261 - DNA, 606 bp, Homo sapiens
gaatcacagagaggaaagagaaagagagagagaatatttgaagaaataataataaaaagagatctcaaatttgattcataaaaatcaacaaaactcaataaaaacacatttggatacatcatatctaagctacaaaaagtcagaaataaagaaaaaatgttgaaagcaacaaaataaaaattacatggaatggagaaaggaaatgacgactgacttcccatcagacaatggatgccagaagacaccggtgtttatattcaaactgctgaaagaaaaaacatgtcaaaaaagaattttaggccaggcacagtggttcacacctgtaacsctagcattttgagaggccaaggtggaaggatcactggagctcaggagtttgagacctggataggcaacatggtgaaaccctgtctctacaaaaaatacaaaaaatagccaggtgtggtggtgcacacctgcagtcccagctacttcagagactgaggtgagaggattgcttgaacccaggaggttgaggctgtagtgagccatggtcacaccactgtattcaagcctgggcaacagagtgagaccctgtctcaaaagaattttaaatcctagaagact

SEQ ID NO: 128262 - DNA, 587 bp, Homo sapiens
caggcagctcatgtctcctaagtgccctcagacagcagtgacgggacacttcacatgacgctagcatgttggctcygtccgcatggcggaatgcattccctgctgttagttatctgaatttttctcctgaattacaaatatatggatttggctcccctgatgctgggcttctgctgagacctgttccagtacattcacgtatgctttgctccccttcattgttaagaaattaattcaagaagttttttgctgttaaacataaggaataagcatcacaattgcctcatctcatcactgaggaaagctggtttaaagtatctgagtgaaataagaggaaaaccccaaatacttcacctaacccagtttccctttcccctcctccaggcagagcaaggaaaagaacagttgtaatttgtgtaaactcagccttagaaaatttcaattcattacacacaaaaatatttatgaagcagtttggaaccaaaggggtagtatggtagacgagtgtcttacagagcctgtgtggggaagcaaaaggcaagggtgtagttcacaggcagaagcgagctgtgacattgtcagtgcag

SEQ ID NO: 128263 - DNA, 587 bp, Homo sapiens
caggcagctcatgtctcctaagtgccctcagacagcagtgacgggacacttcacatgacgctagcatgttggctctgtccgcatggcggaatgcattccctgctgttagttatctgaatttttctcctgaattacaaatatatggatttggctcccctgatgctgggcttctgctgagacctgttccagtacattcacgtatgctttgctccccttcattgttaagaaattaattcaagaagttttytgctgttaaacataaggaataagcatcacaattgcctcatctcatcactgaggaaagctggtttaaagtatctgagtgaaataagaggaaaaccccaaatacttcacctaacccagtttccctttcccctcctccaggcagagcaaggaaaagaacagttgtaatttgtgtaaactcagccttagaaaatttcaattcattacacacaaaaatatttatgaagcagtttggaaccaaaggggtagtatggtagacgagtgtcttacagagcctgtgtggggaagcaaaaggcaagggtgtagttcacaggcagaagcgagctgtgacattgtcagtgcag

SEQ ID NO: 128264 - DNA, 582 bp, Homo sapiens
cttggcctcccaaagtgctgggattacaggtgtgagtcattgygcctggcctgtgcacactttttataatgggatttctcttccttacttttgatgtcccctctctcatacttagttaaccattttgaattccacttagtaagaaaagtttccattttctttttcttcgggggacttagatatgatctgcacctagatggtaagaagattttccatattttgaagtagaaactttctgtatgcctgaatcttgctgtcaagaatgtcttggctaattatgaaggaagaatataagaatgtgagtaaaaacaattcaacagtccctgagaacaacgtcaataaatattcaaaattgcataaccattttagtgactaaagcactgagactcatccaataatactgtggtttgataattacacagttgtgaatttatgatactgttaaattggggagacatcttggtgcatacaggtcaaccttttcatacatcattatatacaaaaagtacacacctacttaggaattgaagtgtaatacttcctagcataaaatgcttaaaagaagattttaagggagtgata

SEQ ID NO: 128265 - DNA, 582 bp, Homo sapiens
cttggcctcccaaagtgctgggattacaggtgtgagtcattgtgcctggcctgtgcacactttttataatgggatttctcttccttacttttgatgtcccctctctcatacttagttaaccattttgaattccacttagtaagaaaagtttccattttctttttcttygggggacttagatatgatctgcacctagatggtaagaagattttccatattttgaagtagaaactttctgtatgcctgaatcttgctgtcaagaatgtcttggctaattatgaaggaagaatataagaatgtgagtaaaaacaattcaacagtccctgagaacaacgtcaataaatattcaaaattgcataaccattttagtgactaaagcactgagactcatccaataatactgtggtttgataattacacagttgtgaatttatgatactgttaaattggggagacatcttggtgcatacaggtcaaccttttcatacatcattatatacaaaaagtacacacctacttaggaattgaagtgtaatacttcctagcataaaatgcttaaaagaagattttaagggagtgata

SEQ ID NO: 128266 - DNA, 582 bp, Homo sapiens
cttggcctcccaaagtgctgggattacaggtgtgagtcattgtgcctggcctgtgcacactttttataatgggatttctcttccttacttttgatgtcccctctctcatacttagttaaccattttgaattccacttagtaagaaaagtttccattttctttttcttcgggggacttagatatgatctgcacctagatggtaagaagattttccatattttgaagtagaaactttctgtatgcctgaatcttgctgtcaagaatgtcttggctaatyatgaaggaagaatataagaatgtgagtaaaaacaattcaacagtccctgagaacaacgtcaataaatattcaaaattgcataaccattttagtgactaaagcactgagactcatccaataatactgtggtttgataattacacagttgtgaatttatgatactgttaaattggggagacatcttggtgcatacaggtcaaccttttcatacatcattatatacaaaaagtacacacctacttaggaattgaagtgtaatacttcctagcataaaatgcttaaaagaagattttaagggagtgata

SEQ ID NO: 128267 - DNA, 571 bp, Homo sapiens
ttcaaaattgcataaccattttagtgactaaagcactgagactcatccaataatactgtggtttgataattacacagttgtgaatttatgatactgttaaattggggagacatcttggtgcatacaggtcaaccytttcatacatcattatatacaaaaagtacacacctacttaggaattgaagtgtaatacttcctagcataaaatgcttaaaagaagattttaagggagtgatacagtgagcattcctatatgaattttcctgcttatctcaagcatagcagaagatgtgaaatttctaggtaagttttttttttttttttgacagggtcttgctctgtcacccgagctgaaatgcagcagtggtaacatggttcactgcagcctcaacctcctgggatcaagtggtcctcccacctcagcctcccgagtagctgggactagagacatgcatcaccatgcccagttagttttttaattttttgtagagacagggtctcactttgtggcccagcctggtcttgaactcctgggctcaagccatccttctgccttggactcccaaagtgt

SEQ ID NO: 128268 - DNA, 491 bp, Homo sapiens
  misc_feature (1)...(491): n = A,T,C or G
nnnnnnnnnnnnnnnnntgtgcaaacttgaggaagtgaggtatatcatcagtaatatgggctaataactgtgctagtagtaacatttcatgattgtttacgctgcatcagcttccagtgctaagcacttttgtcttttattgtatgattctcacaaatcctcataaggtaggtaatgcttttatycctttctcccttctcaaaggattcttaggaagcctaggtgtgacactaattatagatgcactttgtaaccattaagggttaatgcaaaaaatgaaatattattgtgatgttcaataatagtaccatgatgttcaacaagtacatatttaacgaataactgcacttgttgaatgccatgacagttgtgggctataattaaatgagtctcaaaatattttgtgtctgtctcctgaacaaaccaaataaaaagcaatagaaggaatgaaaaacgttgtcatcaccaatttgctaattgtatgccatgcc

SEQ ID NO: 128269 - DNA, 576 bp, Homo sapiens
ccatctagtgtattctctgtctaagttagaaaggctagaaacttcaggaagcccgatggttttttcttcctttcaactttttcatcacacaattacttaccaaatgcctattttattctcaacaccaccctaggcattgtggaaatttttaaaaaccaaaacatgatttctgccctaacaacatttacagcctagtaaggtgacaataaaataacgcagtttaataaagtattagaaagctacaaactgcctataatagtgtaggcttatttaggggaggttttctgaagaaggtagaatttgagtttcgaagaaggaaagagatttcaataggcacacaaaggtgatctcaaaatccctactttcttaaactcaggtggcggagccaggagggcacccaggccctcgctcacacttctctgggactctgctccttctgttccctagggaggagggtggcctcagccacagcactggggatcctcaaagggctccagactgatgtctatgtrgccatatagccccatcttttaaaaaaaatttcagttaacttttgtggatacatagtaggtatat

SEQ ID NO: 128270 - DNA, 605 bp, Homo sapiens
caaatctctcaactagaggtctgtgagagagcgtctcagatttatagactataaaataaaatataaagttgctgcttaaatgcagaaaggcattttggggggatcaaatccaaagctatattccatgtttaaggagttccatgaccaaaaagatatccacccactgatggaaaagaagcacattacccacccttctgcctcaacacaacatctgtgctagtcctgagcactgcgagtggcatgtgtatatcagattcaagggcacacagttagtattgaaccaaagggccaagggaaaggaactttcttatcagattgagaacctttcttatgatcttatgagwtttcttgctatctcttttttagttttcttcctgtgtagctggcgtggagagagagccttgtgtaggctaccatttgagggaaggcttctgctatagaaaatcctaggaaggcatcctagaaatgttccaccttacacaatatggaaatgttcctgtacctttgtgagggattgttcctggattcatctttctctctctttcttggatttggacataagacaataattgctattattagaatgtaaaacgaagaaaaagggg

SEQ ID NO: 128271 - DNA, 596 bp, Homo sapiens
gacagtatgttaatgagcctattcatgcaaccaggtatgaatgtagaagtatgcataaagttataactcttatttgtataaagttatattgcagattagaagttcgtgaaaaacataatgcatgttaaagtatcaaattttctctactgatgccagcacatgctctccattctagtactatatctagttttaataatctgcactttgacaaaaaatatttaaaaggcaaacttcaatgtttctatttccagatatatatatgacaattgtattttcaaaaacttatatctaaaagcttggttttccaaattaaatatgttttgttgtagtttaataggatactatgargcataaagggctggtttccaacagcctctacctcaattatgactgacctggtgatgatctttttccctgttactcagcttccaccttgtaataagcaatatagaatattggggaaaatgaaaattcaagtattataagcagaacatttaaggttgtggagtggtactggtcttgggtttatgcaatgaaatttaaaatactactactaataataattaatgaatccttactatatgtttggcacttca

SEQ ID NO: 128272 - DNA, 537 bp, Homo sapiens
tcctttatgcttacctgtgatgattctgcaaaacctcttttctaaccctgagaaattcttcagtattctgttcaacatgctcaattttgcacctcaaagctcggtatttggccagggatggtgggttgggtttggacaaattagtttcacagacattaaccatgtctcttattagctgtaggtggaaataatacacagatgtcagaatcaccacatrtcaaaattaatatttatatcacattaacactttctcaaaaagataggaaaagtccattttcccccaaagcttgttttactttatttatttttgagatgggtcttgctctcacccacgctggagtgtagtggcatgaccatagctcattgcagcctcaacctcctgagttcaatagatcctcctaccttagcctccagaattgtatttgaatgggcactatacgttccctcttagcaacactcatgactgacattttttttttttttttagatggagttttgctcttgttgaccaggctggagtgcagtggcatgatcttg

SEQ ID NO: 128273 - DNA, 537 bp, Homo sapiens
tcctttatgcttacctgtgatgattctgcaaaacctcttttctaaccctgagaaattcttcagtattctgttcaacatgctcaattttgcacctcaaagctcggtatttggccagggatggtgggttgggtttggacaaattagtttcacagacattaaccatgtctcttattagctgtaggtggaaataatacacagatgtcagaatcaccacatatcaaaattaatatttatatcacattaacactttctcaaaaagataggaaaagtccattttcccccaaagcttgttttactttatttatttttgagatgggtcttgctctcacccacgctggagtgtagtggcatgaccatagctcattgcagcctcaacctcctgagttcaatagatcctcctaccttagcctccagaattgtatttgaatgggcactatacgttccctcttagcaacactcatgaytgacattttttttttttttttagatggagttttgctcttgttgaccaggctggagtgcagtggcatgatcttg

SEQ ID NO: 128274 - DNA, 657 bp, Homo sapiens
tttgaaacaccccaaaattgttaaaggctttaattagagaaaagcccattgaagagttcaagatgtttgcatttctttctttttcagcaaggggatcagagctgattatgaataaagatgaaagactatgtgctactttaacctgcactaaatcaaaacttttcatccgtgtagcccagaatcattaaaaggtagtgatgaatatgtgtttgagggaatattgctatggctttaatggaaagatgcacaggcgtcctggtacaatgctagctgttttattctctagcctgggcgaacagtactatactgtgtacctatgaatgcatttatatgtgtctgagataaaacagtatgatgggaaagataaatcagaacttagctttctatgttagtcttaaagcattccaactgcataaatcaggaaaataatcyacttgagtttaaattattagtattgtatttttaagttaattgaaataactggatacctgtctattctatttagagttggttttgagaagaaatattttggggggagttcggtggtttcaaataagtcataatattttgtgtttggtaagactctgagtattgtaatatgcaagctgtgagaattttgaattctatcttatgggtgtatacaatgtgaagagttag

SEQ ID NO: 128275 - DNA, 573 bp, Homo sapiens
tctctgttatttggtaggttggatgatcaacaatggttgtagccagatatcctttttgtgaggaaatcaatatttttatttccatgtataatctccatctatgcctccrtggctactttgtacattagtccattgagcaagtggctgggctagctgggcaaaaaagcaagttgttattcacagaatatatttttccatctgatggataaaaatctttattacagtggatgcacataggtaaacatctcactggacacaaatattcttacactttgcactcattccaagattctatccacacactattctccaggattctatgtcaccagttctctaatcttgttatttccatgtcctttgatatttgaaacatttgttagccacttcccaataattgatataattgatgtagatctatctctagacttcattcattccagataaagtgaacaagcagttatctatcatcatttttgctcataaggaatgtttgccttcactactgtctttcaagtccaccactgaaaaactgtaatgctgcagctgtttacctctggctggcaccggcaaagg

SEQ ID NO: 128276 - DNA, 573 bp, Homo sapiens
tctctgttatttggtaggttggatgatcaacaatggttgtagccagatatcctttttgtgaggaaatcaatatttttatttccatgtataatctccatctatgcctccgtggctactttgtacattagtccattgagcaagtggctgggctagctgggcaaaaaagcaagttgttattcacagaatatatttttccatctgatggataaaaatctttattacagtggatgcacataggtaaacatctcactggacacaaatattcttacactttgcactcattccaagattctatccacacactattctccaggattctatgtcaccagttctctaatcttgttatytccatgtcctttgatatttgaaacatttgttagccacttcccaataattgatataattgatgtagatctatctctagacttcattcattccagataaagtgaacaagcagttatctatcatcatttttgctcataaggaatgtttgccttcactactgtctttcaagtccaccactgaaaaactgtaatgctgcagctgtttacctctggctggcaccggcaaagg

SEQ ID NO: 128277 - DNA, 599 bp, Homo sapiens
cacatgcattctatttatataaagtattttttccctttaattaattcttgcaatctacaatgataggcaagtcaggtataatttttctctttgttattgcactcagacactcatgcaaaaatagtaaaatgttttatttttatttttttttactttactgaaattggtggcttacatcatactgaggggcccacatgaatatttgtttttaaattaggaccatattctcaattcgctacacaataaagggattatacatttaaaagaactgtatgcaatcaagaagaaattttaattaatcacaaatagaactggcccaatggaaataatttgacccgacastttgaggtttgatcagcacaacacagagattaagaagacttttgacctgaacagagtcggagttggttcaagtctggaactttagaaagggaacactaatgggttcaaatcacacaatatcattgtttcccataatgctaccatcccattagcaaccagtgagaaacttgcttagttttctgtagaaaccatccagtagcatatatagctcttgtccacaatgaagcaacagagattacgccacaacaaactatact

SEQ ID NO: 128278 - DNA, 548 bp, Homo sapiens
acattgctcctgtaactaatttcactggtcgtgtttggaattgttaccatttctgtgaatagagaaattcgtttctctacattggaattttaggtcaagacaaatgaaagctaagtatttgaatatagagagtcatttgtggtaaataacttaaaatataattttcaaagccatcatgaatcaaagcaaacatacraatcaataatctaaaggacataatacactatgaagtacttatggactgttagaagtacttacgggctgttaaaactctttaataatagactgtaatatacaaataatcttggttgttgttcttgttttttgaaaatttaagccacgctactaatatattgtaatggggttatactaacctcccctcaggctatgtctacacacacacacacacacacacacacacacacacacacactcagaacattactagagaatattagggctggacaggaccttagaggacccagggtcattagctataaggcatacaagttgtcaatccctcctacttcaatccagtgtaggcatct

SEQ ID NO: 128279 - DNA, 548 bp, Homo sapiens
acattgctcctgtaactaatttcactggtcgtgtttggaattgttaccatttctgtgaatagagaaattcgtttctctacattggaattttaggtcaagacaaatgaaagctaagtatttgaatatagagagtcatttgtggtaaataacttaaaatataattttcaaagccatcatgaatcaaagcaaacatacgaatcaataatctaaaggacataatacactatgaagtacttatggactgttagaagtacttacgggctgttaaaactctttaataatagactgtaatatacaaataatcttggttgttgttcttgttttttgaaaatttaakccacgctactaatatattgtaatggggttatactaacctcccctcaggctatgtctacacacacacacacacacacacacacacacacacacacactcagaacattactagagaatattagggctggacaggaccttagaggacccagggtcattagctataaggcatacaagttgtcaatccctcctacttcaatccagtgtaggcatct

SEQ ID NO: 128280 - DNA, 634 bp, Homo sapiens
aaatagccatttttcatagttcctggctcttaatcatttaaaacacaccacaactttctatgtattttaaaattttaacgttaaaaaggtatatttgacactgtgggaagatagaacatattttattcaacaatgttgctagcttgatttataacttttaaatatttagacatatggtatgtgaacctctacttgtactcatgccccaagtcctataagtgttaagggtaaccagtacccatcaatgacacaacaaatgaaacctaaatctataaacagaaaccaaacgaaaatatcacgcttgttcctactgtaaactaaaatatcattctgaaagcttcatgtggaaacctgatgcagtccctcaaaggaagtgacaagtgcctttctgggccatagtcccaagggtccctacaagcccttcccaggcaggagttgtgtatccctgttrcctcagtggacctcagctctcaccaggtttcatatgtctaatgtatttcacagtccttacgttctgaatgttagagttggatcatagatgctccttttatttcttttgcagtaactctatgccactttcaaataaacagagcaatttataactgtatttcattcctcttttggaaatagtagt

SEQ ID NO: 128281 - DNA, 582 bp, Homo sapiens
ctgacatcaccctgtgagaccttattgacaacaccatgttgaaaaaagaaaacagactcacatggaaatgaagtaaatttcaaagattgcttagtttataaatggtagagcctggataaagtccaaatttctcaacttggtaggtagttttctgtatgatctgcgttcaggctttgcatcttaatagttactaagttgaactatataaaagttccaaattcaaccatttttatacctacaaaagagaaatttcccaagtttccacctatttttattctcatatttcctgtcaatatttttcttcctattgcattgtaacctacagcctatgtaagtatttgaaatttcactatcgtatcacggcracatgcacctagatccttgagaatgttgctacaatagagaatgtatcacacttccctgtaactgttcccttggtctatatttattactatccctggatctaacttttatctccagctctgagaaggttttcttgatttctcagatagtattaaatacctgccatacattctcagttagtgtggtctattactacatctatcattatacattgtaaac

SEQ ID NO: 128282 - DNA, 538 bp, Homo sapiens
tgatgagggaaacatgccaaaattattcaggaaaagaaacgttttttggtttatgggaagaaatatgaggaaaattttaaatgacaagttcattcatatctatatagaaaaaatcaataataactgataatatatattgaaaattcactgtaagtcatgcactcttttgaccactgaatccccataactctaagagaaaaattatcttcattgtaaataatttagaagcaaagaacagagacattatgtaacatgcttgagttaatctagaaagtaagttgcaaagcaagcattcacaaccaagaagattataactatcactctaacatttgtattatttttgctagaatttaggtctagtggatatggcacagactttgaaaacaaatgttatattctttttactgtttggtacaagtacataaaatttattcttatatcttattaaataayggaccattttacaattaagatttttaattcatagtgggtaggagccatgtacctaaccatcatctttgtattgtttataaatggt

SEQ ID NO: 128283 - DNA, 513 bp, Homo sapiens
agaaacaaaattgcctttacttgcagttaacatggttgtctatgtagacaatttcaaagaatcaataaaacattctggtgtgtgatgttccccttcctgttgtggggaggggggagggatagcattgggagatatacctaatgctaaatgacgagttgatgggtgcagcacaccagcatggcacacrtatacatatggaacaaacctgcacattgtgcacatgtaccctaaaacttagagtataatagttaaaaaaaaaacattctggaacaactaaggtagtatagcaaggtggaaggatacaagttaataaaataatgttaattgttttcctatctgctagtctcagaggagtttaaatcagagcagctccatcttgaacaggggctgcgtaaaataagactgagacctactgggttgcattcccaggacattaggtattctaagtcacaggatgagataagagttcagcacaagacacaggtcataaagacggtgctgataaaacaggct

SEQ ID NO: 128284 - DNA, 568 bp, Homo sapiens
ataactcctattcagcataatgctggaagttatgtttcgtacaagaagacagtaaacaaatataaatttgtgctgattgaaatggaagaaacaaaattgcctttacttgcagttaacatggttgtctatgtagacaatttcaaagaatcaataaaacattctggtgtgtgatgttccccttcctgttgtggggaggggggagggatagcattgggagatatacctaatgctaaatgacgagttgatgggtgcagcacaccagcatggcacacatatacatatggaacaaacctgcacattgtgcacatgtaccctaaaacttaragtataatagttaaaaaaaaaacattctggaacaactaaggtagtatagcaaggtggaaggatacaagttaataaaataatgttaattgttttcctatctgctagtctcagaggagtttaaatcagagcagctccatcttgaacaggggctgcgtaaaataagactgagacctactgggttgcattcccaggacattaggtattctaagtcacaggatgagataagagttcagcacaagacaca

SEQ ID NO: 128285 - DNA, 606 bp, Homo sapiens
aactcctacatttgtgttgttgattcatttaataattaattcatatatttaggtattagaatgattaattatctaaatattaaagttgctgataataggctgggtgcggtggctcatgcctgtaatcccagcactttgggaggctgaggcaggcggatcacgaggtcaggagatcgagaccatcctggctaacacagtgaaaccctgtctctactaaaaatacaaaaaattakccgggcgtggtggtgggcgcctgtagtcccagctactcaggaggctgaggcaggagaatggtgtgaacccgggaggtggagcttgcagtgagccgagattgcgccattgcactccagccggtgcgaaagagtgagacttcgtctcaaaaaaaaaaaaaaaaaggaagttgctgataataagtttggatatttaaaggtcatgatgacaataaagtatgtctactgttgaaaacttttgtatctggtttgagtaacaggtaataatttgttcatgtcatttttatattgaatataagcatgaaactcctgagcattatataaatataaaagagcattattaattcacacagactccttgtacaaaaacggagag

SEQ ID NO: 128286 - DNA, 598 bp, Homo sapiens
taccagggctgcgtctgtgcaactgacttcatactaggctctttgtgtctgtacttgggttgtagttgtttttagagccacggactcatgttctctggtaaggagttttcatggccaagcccatctgccatgccctggaaaatataagaacagagaccttagccatggtccaaattgctaacttttggggataactgctagctcaggattcatagcctatgatctcctataggctgggggttgttggctggaggaaaagaggtagtttcacaamaagtagatttgaagatgggaagataattactcggatataccttacgattgatgtaacatctgactgagaaatgatccttggactataaaatatttgagctctttcaaaatatagcaagtcatattttctctgactgactgagtacatcatcttaaaactacactccctgagattggtttcacataagccacatttggatggctttagaactaactgtagggacagcatttctagacataacagaacactatgtttataaatccaaatgtcaacttccaaggttatattcttgaagaccagatatgaatgagattagcaaagaga

SEQ ID NO: 128287 - DNA, 521 bp, Homo sapiens
tattaaatcatgtctgtatagttaaagaaaatatgtatttttaaaaatcattgtgcgagtactatattctgtgtgagtaaaatgaggcaataatgacagttctgtgaattagagcttcgtttrtggaaaatacttttttctaatattttaaatgcttttcactttctattttgtatagctcaattaatcacatgtaattgtagtatttcagatttttggaaataattatgcctttatataatattttataaaagttgctgaataatcatatcaaacaagtattattgaaacaaactaattacattcaaacatgtatgtttatgcatgagtaatatttaatgaaatatacattaagtataaaagaaaacatgatgttataagttattacaatatttttattttaaatataaatttagaagaacatgagttcacatgctatatatttcatgtttataaaaattacattatattaagaaatgtacaatatttttctttattgatttatttttctaaagctagac

SEQ ID NO: 128288 - DNA, 552 bp, Homo sapiens
actgcagcagacttatgcctagatatctagatgttttcatacatcctctgaaatcyagacagaggctcccaagcctcaactcttgcccttggtgcacttacaggcttaataccacgtggaagcagccaaggcttacagcttgcaccctctggagcaacagcctgagacatatctgaggaccttttagccatggctgcagtaacagcagctgagatgctgggaatagtgtcctgggcttgcccaggacagcaggacactgggacccatgaaaccatttttccctcctaggcctccaggcctttgatgatgggagagactactgagaagatctctcaactgccttcaaggcattttccccattgtcttggctgttaaactttggatcctaagtacttatgcaaatttatgcagccagcttgaattcctcatcagaaaatgggatcttcttttttaccacatggccaggttgcaaatttttcaaacttttatgctctgctttccctttacatataagtttcagtttcagatcatctctttgttcacacacataag

SEQ ID NO: 128289 - DNA, 552 bp, Homo sapiens
actgcagcagacttatgcctagatatctagatgttttcatacatcctctgaaatctagacagaggctcccaagcctcaactcttgcccttggtgcacttacaggcttaataccacgtggaagcagccaaggcttacagcttgcaccctctggagcaacagcctgagacatatctgaggaccttttagccatggctgcagtaacagcagctgagatgctgggaatagtgtcctgggcttgcccaggacagcaggacactgggacccatgaaaccatttttccctcctaggcctccaggcctktgatgatgggagagactactgagaagatctctcaactgccttcaaggcattttccccattgtcttggctgttaaactttggatcctaagtacttatgcaaatttatgcagccagcttgaattcctcatcagaaaatgggatcttcttttttaccacatggccaggttgcaaatttttcaaacttttatgctctgctttccctttacatataagtttcagtttcagatcatctctttgttcacacacataag

SEQ ID NO: 128290 - DNA, 618 bp, Homo sapiens
tctgtcttccattaaacctgtatccccattttattatatagttgagccagttatatatgactcactgggaaagtgcattttatgatcttgttagaagaaatggtttctctgggatccttttaagccaataattttatacctagctcctcctaaatatctaggacattaacttattagccattccggtgtcaagcctaatgctttttaaatacttaaaacaaataccaggaaactgtgggggttggagaatagattttccrtaggcatttagtgctttcagagatcagggggatcgatctcaggggatttagtaggaaaagacttgattctctgcttcctctgcacacagagctttcattttatgcaacaggagggacagcatgcatgtgggataaagccaggctgattatttcaaaaccaggctcacatctatttgactgacaaggtcctggcccccggccagggttacagcaccggaacatggtctcttctctgcggctctgctggctgggcctgtgtggaggcgggtggatggggggatgtccaggctgcagctgacagggcacttggagatctcagaaggcagtggaggcttggggactgaaggggacccggctt

SEQ ID NO: 128291 - DNA, 427 bp, Homo sapiens
agttttcatgttttttgcataaaattgtccataatatccaattattaccttttaaaatgtctgcagacttacaatktgatagatttgggaggaaaaaaagtctgcagaatccatagttatgttttcctttttattattgttattgttaatctttgccttattttttcttaaaaaaccttaccaggattatgcaaattttgttagccctttcaatgaacaactttatctttgttaacctttcctattttccctctagcctctatatcttttaccttctcttttatgtttttcatctctttgtgtctctgcactgaattctggataatttcttcaaatataacttccaactttctatttttctcttttgctgtgtttaatctgttgttaaatcatccatataattttaaatttcaattattacattttt

SEQ ID NO: 128292 - DNA, 538 bp, Homo sapiens
ctctcaaaattgatttatttacaaagtgcgatgatctgattttcattaaaagcagaagataccagccgggcatggtggctcatgcctgtaatcccaacactttgggaggccgaggtgggcagatcacaaggtcgagagatcgagaccatcctggtcaacatggtgaaaccccgtctctactaaaaatacaaaaattagctgggtgtggtggtgcacgcctgtagtcccagctacttgggaggctgaggctggagaatcacttgaaccctggaggcagaggttgcagggagccgagatcatgtcactgcactccagcctgatgacagagcaagactctgtctcaaaaaagaaaaaaaaaaaggcgaaagatgaaatacagaaatggtcytctgtatttaatatgtttttctttccattacctacttttcacctgaggttttttcccgttactagcttggcatccctctcccctcttctaattagctcaagtccctgatataaaaaggcatagtgtttgcatatagcctgtgcacatcct

SEQ ID NO: 128293 - DNA, 242 bp, Homo sapiens
ttttctcctggtgtatgggttatgctttcctgtttctttgtatgactcacatttttttgctgaaaactgaacagtttaggtaattgtgatattgtgaaatatatatttgttcctcatccctgtctccctgcatacracttttaaaatccttgcagtctccaaaatgttaactgcctttttgtatgctaatgagttgactagcggctgtcagcccctagatggcttcaagatggggctggtca

SEQ ID NO: 128294 - DNA, 566 bp, Homo sapiens
taactaggggacatttacagaatactgcacttttagagtgcagaaaaatcattctttttaagctgacacacacatttacaaaactaatcatattctttgccataaatcaagtctgacagttattaagagtatgttctctggaattaaatgaggatatagattattaggaagtgctcatatatgtctatacatacttagaagcaatatacttcgaaataatctataggtcaaaggaatcctaatggaaattagaaaatattctgaattgaatgtagtaaaatatattgaaattttgagaatgcaactaatgtcatacttagaggaaaatgtatagatttaactgtatatatatatatatatatatatatatgatggaaggagaagcaaaaaaatgcaggtgaagcatacatctcaagaagatagaaaaagtaaaacaaataaggctgagacacagtacaagagaaacataaagaacataaattgacaaaattaaaaaaatcatttrataaagaagatgaagaagctgaaattttttctttgagaagactaaataaaatgagaaattc

SEQ ID NO: 128295 - DNA, 442 bp, Homo sapiens
  misc_feature (1)...(442): n = A,T,C or G
nnntcttccaagagtcccaagcaaaagtttctgtgcatttcttaaatctgattaggttacaggacttcttgtgaactggttatatagatgattgctctgatgggccactccagattcagaatagaaacaatccacctgaagcgtgtgaactaaacatggatatgcatggatcccttaaggaattttaggatgataaatttgggatgatggaagacaagggtctagaacgtttttctgttttatgtctagacccagtgatagtgaggtgtatttactgaataatactttgtgcctagaatattgtaatcttgtaatttttttttaattcaggaaattcagcaaagcagcattttgtattagaagtaatttgtatacttgacatttgaaaaaaayagggcttaagtggaaactgtgtcattaatatttaatttttggaattgat

SEQ ID NO: 128296 - DNA, 589 bp, Homo sapiens
gcctgtagtcccagctactgggtagcctgaggtgggagaatcacttgaacccaggagtttaagattgtagtgagctacaatcacaccattgcactccagcctgggctagacctgggtgagaccctgtctctaaaataataataataataataataataataataataataatacccctcatctgttccttgctagagtcacagattctaaggtttttttttattttttatttattttttcctcccttcacactgtctaatcccacattaataggacctatagtgcttttggaatcttccttttacttaatttggtcttcaagtgtttgggcccaggaaaaacacaaaaacaaaaactttttcttatttctgtttttcctaggagacacttcttgggggaataaaaacaacccaaacccctacatttacccaagcacaacaaagcttaattcacagagcccaccttccagtctatatcagcccctatatagaattgacatcggctgacagatgagagggcctcatgctttccccartgaagcagaaagttgcatcctgaatcctgagcgcctgtgtgagttagtgatcac

SEQ ID NO: 128297 - DNA, 609 bp, Homo sapiens
tttccactactgttaaaactgccatcttgattcctaatctctgtattgttgaccaaagctcatggtaaattcctttataagaaatgataccgaaagcttttttgggcaagccaagcccagcttttgagacatgggcttcaatttgggaagtccctatggttctctttttgaaacaaatcctagctatgaagcttaatcttcaaagcaggaatttcttgtgtataaagttgtgtattcttgctgattatacaaacatttgaccaaaatacgattttcatggcacttcactaatcaaatgctgaaaatatgaatttttaaatgtattcgcttgtttcttttttaattgctttttttggtttctttgacccagagtatattctttgttctcaccatggtaggttttacataccagaagatcacacttttccttaacatattctaaagaatgtgaagcacaatagaaaacawgtatcataaattgtttgtattgttcaattgttgagacatttgaacaaaggtaagcataggaaattatacaattacagctttctttcagcaaaaactatctgttaaatgtatttgccaaataataagaatgaatatagataa

SEQ ID NO: 128298 - DNA, 578 bp, Homo sapiens
tattctaaagaatgtgaagcacaatagaaaacatgtatcataaattgtttgtattgttcaattgttgagacatttgaacaaaggtaagcataggaaattatacaattacagctttctttcagcaaaaactatctgttaaatgtatttgccaaataataagaatgaatatagataatatatactgtgtagcctgtctatagaaattttaacatttacaagtaaacaaatggctctctgaaattcccaaatctcccttgtcttgacaatgagtacatatccttaatatacagttaaggttagcaaagtaagtaaactactgtccaaatgagatcaatgtaaactatatttytgtgagtcatttatagtcatcaagggatgatttaatttatcacaaataccttcatcatgtttattttgaagttttaactttcacactaccaatttctttctgtcaactaattttaaattgtccaacccaattgtctgaatttgggctaagctgaccttggatcagagtacaaaagaaaatatttttcacagaccagttatttgatatataattttcacttgttgagact

SEQ ID NO: 128299 - DNA, 649 bp, Homo sapiens
ataattaaaataaaaagtcaagtcttgggagggatcataaggttggcagtggctactggaaaaaccacatgtcacttagcttggaattrcagtcaaagtgacatagactgatggagagatgtcaggctcagaaaaagcatttccttatagcctcttatttggtaattagtggcagatctgctttagaaaccagattcactctaatttcagctaaactacactatcccttttgcagttgaatgtttagacttaagcataagacttcacattcatacttatttaatattgtgtttaaattaccctgttctcttaagctaatccagatggtttggggattttggttaaacaaaacaacatagtctcttcatagttttaggtcacattacagatttatctaagttactgcttaaatgttttcattgtatagaacaaaggataggatatcagtctgagtttttgtatcgaaagtctccttgttttaaggatatggatgttaaaggtagactttcacaaaactgtgctgtcagccacctgtccttgggatgttcccatgttcctatctttccttttgttgctttgccttccggttgtatcttccactctgaacccacccagaagcattagactcgcattcttccccagcttttcc

SEQ ID NO: 128300 - DNA, 649 bp, Homo sapiens
ataattaaaataaaaagtcaagtcttgggagggatcataaggttggcagtggctactggaaaaaccacatgtcacttagcttggaattgcagtcaaagtgacatagactgatggagagatgtcaggctcagaaaaagcatttccttatagcctcttatttggtaattagtggcagatctgctttagaaaccagattcactctaatttcagctaaactacactatcccttttgcagttgaatgtttagacttaagcataagacttcacattcatacttatttaatattgtgtttaaattaccctgttctcttaagctaatccagatggtttggggattttggttaaacaaaacaacrtagtctcttcatagttttaggtcacattacagatttatctaagttactgcttaaatgttttcattgtatagaacaaaggataggatatcagtctgagtttttgtatcgaaagtctccttgttttaaggatatggatgttaaaggtagactttcacaaaactgtgctgtcagccacctgtccttgggatgttcccatgttcctatctttccttttgttgctttgccttccggttgtatcttccactctgaacccacccagaagcattagactcgcattcttccccagcttttcc

SEQ ID NO: 128301 - DNA, 602 bp, Homo sapiens
aaattagctgggtatggtgtcctgaacctgtagttttagctacttgggaagctgagsaggatcagttcaccccgagtttgaggttacagtgaggtatgatcatgccactgcactccagcttggctgacaaagtgagaatctttctcttaaaataagcacagcaagaagctgaaatgaaaaaaaaaaaaaaaaaagtactgggaggctgaggcaggagaatcacttgaacccgagaggcagaggttgcagtgagccaagatcctgtcactgcactcctgcctgggctacagagtgaaaccccgtctcaaaaaaaaaaagaaaagaaaagaaaagaaaaaagccaccaaaatactcgttatttccgggtgacttatgtattttcctaattttctgtaatctgtaggtactgacctttactaagtgcaaaaataacctttgataactgcagtggtcactgaatggggaactttgtggctagtcactagaacctggggaacactagaaagcacccctgctccttagtccgtatgtggagatgtgtgatgctagagatcaaagatgccgtccagaagggagatagactgaagcttccttcttcctag

SEQ ID NO: 128302 - DNA, 631 bp, Homo sapiens
ctgaatctacctcttctcccctatccatagagtcttatgctattcttggttgcttgaaatctttacctcagctctcactcaaaccctttccatttcagagtgttcataattctagttatttttccctgcttccctcgctatggccaactccaaattacacttcaagatttacctaaaatctttggtcctcttttaagcctttacccaatgcccagggcagtgttggcggttcctccatgcaattatcacttattaaaattacaattgtatttcttccctcaaccagcatatgagtcagacaagtcttactcattttagaaacaagttaacatataayaggatgctaagtagataatggctgaatgagtgaactagcctccccagggtagctcatctctgctagttatttaaagaaaaatgatacgatgaaataattttaactgaggtgtaaatgactgatggaccttctgctttgtcctcacagggacatttgaatgtctaagacacataaagtgttggcattttaggcaaagtgactctggagagtgtctctaaactcttaacacataggcaaacaggtcatcttggtacacagactggtctatactcgaagtataaggcagctagaata

SEQ ID NO: 128303 - DNA, 639 bp, Homo sapiens
tataagtttgttttgtaaatacttccttttttttctggctaccataaatcatttgatattttattgtcataaaattctatggcagtcagatttgttgcagacatagattagagatgtattgaagattggaggtgtattccatattgctggtttttcttatattttactttaactagtgaacttttattccttttgagaaatttaaataaacccactttaaaagtccaagacaaattcatgttgagaatttaaaaatatctgaagtatgtctttcaaatcatactcattaagatcagtttactttccratatcatgtggttcctaatgtagtaagcttcaaaagcaaattttgaaaggctgagcattgttgggactttgatgtgtcatatacttattcagttttctttgtttaaaccaaaaatgtaagagtgttttcattattgtgacttttttcttagcttttgcagttaaagtgtaaaactgctgcactgtgagcctctttaaaaccagaacgttctgtaaatcccaactcatacattctttcagtttcacctctcacttaaaatgacacccatgtcatatctgaggaaaccgaggcatagaagaataaagaagtattaaagtttattcactgggttg

SEQ ID NO: 128304 - DNA, 550 bp, Homo sapiens
cacacagtaggtgcttggtcagttgttgttgttggagttgaatgggaacagcatgctggctgggttaggagtcagggatggggtgggggtgggaggtgagtttgtaggggaagcttggctgcactgggtgaatcttgccygtgtcagttgcagaaagttatgaagttggtaaagttggtctttgattcttaggctgttgactctctagactggcatcccaatcccatatctgccagatggcagctcatgctcactaaggtcttatctgatgagctgtctctgcctcttacagatacacacctgtagtttaacaagatccaaggggaatataaagtactgaggatccaaagggaagtgctaatggtatttcagacattgtgaaacactacgggagacatattttggggcgattagtgtgtaagcaggtgcacaaagccctccaggtgtgcagtgactcactccagaggaggacagctacctgacgttcagacccacccatctcgaccttctcatttgaccaaaatggtcctaaagcccagagaggggagtg

SEQ ID NO: 128305 - DNA, 650 bp, Homo sapiens
caaatatatatctcaacatgggctaaaagattcaagtttaaaaagaatgatcctttgctgggggtggggtggtgcggattatataaatcacatcatatttagaagacttcattggttgttctctaggtaatggtcacagtgggcaccctcatgagcaccttccctcatcatagaccaaacccaccacctcagcgtccatttattcttcaaaaggatgacaattagcacaaaattggacctctggtgtccatttattctgaatgcatgtgactttatttcagtttctggtttactatttgaaccccagcttagatacaggctctgttatytgtgtatttcctaaattaactttttgagatatttattattattacaactattagaacattctctattcaaggagcataacagaagactacagtttaaaaatccccaaagacattttgaatgcatacataatcagagagtaaagttttcaccagttgaagaatttctgaaagaatacagctgtaaaatgcaattacttagtgttctataaattagtgataaataattaaagataaaaataaaataatagtcaccaataactatttgtacatgtcacatgtggcttcggcaaattaactgatgattagatcaacattttcttc

SEQ ID NO: 128306 - DNA, 584 bp, Homo sapiens
acccccattcccaagagccagttgttaaacctttgccagcacaccactgggtttagctacaaactacgtcgagattctgatcacttctcactaccttcacagccaccaccctagtcccagcactattgttgcaatagtctctcaaagggtttccccgcttcctctcttgcttctcttcatttcagtctcaacacagcagcaagaacaatcctgttactccagtggcttccartctcagaggaaaacccaaggctctgggccctttggcttccccgtccccactcctcttacttctctgactgttaatcctattactcgcccttcattcacccagaccctctcactcccttcctatttctcaaccaatccagcactcccctttgggcctcagggtctttgtattaggttggttgcaaaagtaattgcagctttttgcccttgaaagtaatggcaaaaccccacaattacttttgcaccaaactagtacgccctactccctccttctgggtgttcttcctaagatccttcagggctttatcacatttcaccttcttagcaaggctgcctctggccaccctacctga

SEQ ID NO: 128307 - DNA, 583 bp, Homo sapiens
gtttctggccatttccctctttcctgcctaggaaagaggatactcagtcatcgtttcctttcctctctccagggagggtcttgcctagccaggttgtatatgcagggcttttgtgttgcagaatcaggaggaaaagggagaaaagaaggagaaagcgtgtgtggttagagctggaaaaggagtttgggaggtgggagttttggaaaggagaggtgccagatcagatctgatatgtayagaaataaatgggagagaaaaattaggaccttgagaagtactgttctggcctaccccatcctcttcattgcatcagagaaggtgtaccaataacttgagtttttctgaaatattttttggttgctggactgagtttatttggtgacaaccactttgagactggaccatgtgggtgatggggctctaagtgtctctgcaatgagtagcagagaggaatggggtgtggtgggtggctctgggcatatgagacagtcggtcagtggctatgaggggaagaggatggaagccaaggaactgttcatttgttccagaattggaagtcagcgtgacttatgacctgcagaat

SEQ ID NO: 128308 - DNA, 623 bp, Homo sapiens
ttttcccatcattctcaataccaaatactaaagaaaattattataatagaaacttttctaggtcctcatcaccacctccaacccctgagtcaagtaaaactgtaaaactgtgaaggactccattccacttcatttttattcttaatcacaaggaggttatattgccttaacccttttagtaaatgattgagcatcccagatgtgtaatggttttggaaaaggtcagaaaaatgtcaaaagaaaggcaagcaacaagaaaatgattaatcagcttttcttctcatcaaagtcttgaactatttgctgaattggggtttttaattttttatatatttaaatttttaggtagctatcctttggrgtaggaatgccatggcataaagagtcataacatttaaaacatgtttatgaagtctaaaccactaacttggctgcggttgaaatgcattaggctcctttgtgctgtgctcacacccctcccaaaggttgtgctggcaaagctttctcctactgctgctgcctcctccctggatggcaccatgagctgtaagacaaatgtaggcatataacccacattaaagggcattgagaagtattagaagttgtgcttcttcaggctttga

SEQ ID NO: 128309 - DNA, 608 bp, Homo sapiens
  misc_feature (1)...(608): n = A,T,C or G
agaaatgtcaaagccttagtagagctttcagtgggcatgttttttccacctaaggtgtccaaattaaatgtttgtaggtgacatgctgttcttaagagtagataatccccattccaaaccctgtgaactctgacagctgcatcatgatttctacaaatgtcagaagctcctatatcctcgtggtcacatttggctccgtcttccagtcttcattgcatctgcytctctgctctgtctcagggcagttgcttagtcttttgcctttgccactggttcatggaatatagcccttttccatgattnnnnnnnnnnnnnnnnnnnnnnnnnnnnnnnnnnnnnnnnnnnnnnnnnnnnnnnnnnnnnnnnnnnnnnnnnnnnnnnnnnnnnnnnnnnnnnnnnnnngggggtttatattgcaacagtgcctggaattcctggtgttaaaagagctctggttcttttgctctctctttatttctcaggaacatcccccctactcctgctcaccaacttctgccattttcttatgcagagcaatcagctgcctccaattcttcccctgaacagcactgggccaggtgcatttctctgcccattcaaggatttta

SEQ ID NO: 128310 - DNA, 608 bp, Homo sapiens
  misc_feature (1)...(608): n = A,T,C or G
agaaatgtcaaagccttagtagagctttcagtgggcatgttttttccacctaaggtgtccaaattaaatgtttgtaggtgacatgctgttcttaagagtagataatccccattccaaaccctgtgaactctgacagctgcatcatgatttctacaaatgtcagaagctcctatatcctcgtggtcacatttggctccgtcttccagtcttcattgcatctgcttctctgckctgtctcagggcagttgcttagtcttttgcctttgccactggttcatggaatatagcccttttccatgattnnnnnnnnnnnnnnnnnnnnnnnnnnnnnnnnnnnnnnnnnnnnnnnnnnnnnnnnnnnnnnnnnnnnnnnnnnnnnnnnnnnnnnnnnnnnnnnnnnnngggggtttatattgcaacagtgcctggaattcctggtgttaaaagagctctggttcttttgctctctctttatttctcaggaacatcccccctactcctgctcaccaacttctgccattttcttatgcagagcaatcagctgcctccaattcttcccctgaacagcactgggccaggtgcatttctctgcccattcaaggatttta

SEQ ID NO: 128311 - DNA, 618 bp, Homo sapiens
aagtcattggttttcaatttgtgtgtgtgtgtgtgaacaaaaagcttcttcacaccaagtcttacttggaagaccctggccccccaatatataacatgataatagtgaagttcatcttgttcacataaaatggggaggccgtgggagcctcagtaccacccacttgccatcccctcagctaaaatcctccacatatataagttcttttacttttctctgactcaagccaaatctttctcccctcgtggcagcttctctctgatcatcccagccacgggggccctgcccgtttctgaactcctaggagtcctactgtgtactcttgtaacatatacagagtttgtaccaatgaacactcacattcactaagtcttgctgaaggccaagtccagtgacatgcactttacatacttatctcatttaatcctcagggcaatcctrggaggtatatactctcactatctccactttactcatgagaaaatagaggctcagagaggttaagcaatttgccagggtcacatagctatgaactagcagcactaggatttaaaccccgagctaacccatttactgtttctacttttgatgtgccattatttgatcttttcaagtata

SEQ ID NO: 128312 - DNA, 523 bp, Homo sapiens
ctatggctccagggaagcccacagagcaagagctctgtgccccgggcgagggctggagaggcaaactcctccatgacaaagagtagacgccagccggggcatggagtccaatgtgggctcctgctgtagacaagcagtgtggttggagaatgcactgtcctcttctccagattgttcataagcactggctggagaggaagtggtgggaagggtacaaatgggtttctctattgagggaaatctagctgcagaaagagtccccttctggtctcaagtactgtatatttgaaactatagtttgaaattcatcagaatccacaaatatcaattccatttgacttttcagtctttattcactttgttccatgatggggagaaacaaagkgggacagttcagccactcttctcaggattgagtacctagtagaggtctgaacccattcatttgggaaagactgatggagtcagtgtctgctctaaaacttatgggatcgatcccttcccagaaccccaagagcccaca

SEQ ID NO: 128313 - DNA, 523 bp, Homo sapiens
ctatggctccagggaagcccacagagcaagagctctgtgccccgggcgagggctggagaggcaaactcctccatgacaaagagtagacgccagccggggcatggagtccaatgtgggctcctgctgtagacaagcagtgtggttggagaatgcactgtcctcttctccagattgttcataagcactggctggagaggaagtggtgggaagggtacaaatgggtttctctattgagggaaatctagctgcagaaagagtccccttctggtctcaagtactgtatatttgaaactatagtttgaaattcatcagaatccacaaatatcaattccatttgacttttcagtctttattcactttgttccatgatggggagaaacaaagtgggacagttcagccactcttctcagrattgagtacctagtagaggtctgaacccattcatttgggaaagactgatggagtcagtgtctgctctaaaacttatgggatcgatcccttcccagaaccccaagagcccaca

SEQ ID NO: 128314 - DNA, 395 bp, Homo sapiens
ggaattctcccagaggcaaactgccagatgtgaggctgctcttcctcagtcactatctctggtcgtaccgggcgatgcctgagccaactgaccctcagacctgtgagccgagccggtcacaccgtggctgacaccggcattcccaccgcctttctcctgtgcgacccgctaagggccccgcgaggtgggcaggccargtattcttgaccttcgtggggtagaagaagccaccgtggctgggagagggccctgctcacagccacacgtttacttcgctgcaggtcccgagcttctgccccaggtgggcaaagcatccgggaaatgccctccgctgcccgaggggagcccagagcccgtgctttctattaaatgttgtaaatgccgcctctcccact

SEQ ID NO: 128315 - DNA, 547 bp, Homo sapiens
tacctacttaccacttgggagtatttatctttcaatgccccttcggtaatgttattttcccaatctttggtctccggtctgttgggaagaaacctccaattgctacttaagattctcttggggaattaggatggcaacatgaattagcactaagtattccctcatctttgcaggctgataactcagaaaacctccaggggcagcaagtcccgtctcactgtaccttgaatttacttggccctggtcccttaattgataacgctcctccatattgagtgaggctaatggaatacaccatgtaatcagcctrcttctctcaacatcttgaggtggggaggcagtagacatgagcattacaagttacagatgaatcataacaaatacccaacaccagattcacaacacaagcttgagaagggtgttttgtagccacctgcagatgagcttgaattagatggattcagcttaaaagcaaaaccctaaatgtaacctgatcttgctaccatctgcctcattccctcacaaactcaccaccacccagaacagc

SEQ ID NO: 128316 - DNA, 550 bp, Homo sapiens
atctatgaaaaacaaaagccagtataattttatataaatcaggaaaatgtttatccttttaattcctcaccccaataccttcaatgacgcagccaggaaattattcttccaactgtcagagacagaacattatttacaacttgacagctctgtctccctacatttggatcagaaataatagttttgaattggaattttttaaaatccttgtttattttataccaagaaaaattttgtatactataaccataagatataaagtattttgttttatcrtctttaatgcagtggtgtatctgtcaaaattatatgcaatccctataccatgaggaaattcggttgggaattggagtggacatgacaattgtaaagacttggtagatcttagagacttttcagttagcaaaagagatggaatcaatgaaatttagccatcccgatatgaagtgatgtattcccaaaagttattaacaaacagaggattaatactttaaaaaagttcctgtgctgaaatgagactccacaactttaaaggagataactgaattat

SEQ ID NO: 128317 - DNA, 557 bp, Homo sapiens
aaaagtaattactctttctctgcattcttgcagacttctttttttctgtctttttaatagccattcttcctggtgtaagatgatatctcattttggttttgatttgcatttctctgatgattagacatgttcagcattttttttttttttttgagacagaatctcgttctgttgctcaggttggagtgcagtggcatgatcttggctcacggtagccttcatctctctggctcaagtgatcctccctcatcagcctcttgagtagctgggactacaggcacgtgccaccacactgggctaacttttttaacttttaagttcaggtgtaaaagtgcaggcttgttatatatgtaaacttgtgtcacggggtttttttgtacagattatttaatcacctaggtattaagctggtgcccattagttatgcttcctgatccgctccttcctctcacccttcaccytcagataggccccactgtctgttttttccctctatgtgtccatgtgttttcatcatttagctcccacttatcagtgagaacatatggtatttagtt

SEQ ID NO: 128318 - DNA, 618 bp, Homo sapiens
gctctgaagagctttggaagtatgaggtaagatatggcatttcaatatagttgactgtacatgattttttaaaacacataaaatggtgttaagttagcaagaaaggatattattaattaacacagatagtaaagtcaatgatctattgggagaagagaacccaagacttcttggaggagatagcataggcttcccttacctattttattgttgattatacagagtaaagcaaaatctattcatgaattcttctcagggaaaaaatagcctaaactcactataagaaaacaaaaaggcaaccagagtccaatggtttaaatctatgtgaaccaactaycattgcactatgaacatttattgaggttctactatttgacactactggaatttataccagactgaaaaaaaccttaatatttatctgtctttgtggatcccacttttcagtgggagagacagacgtctaagaaatagtaatgtcaattataattatgcaacaatgtagtgaaggccgtggtcaaagtacatttgaatactatgaaaacaggaggtggcaaaggatttgctctgcccaaggactaaaaggggttttgttttacaaaggaagccaagaaaacc

SEQ ID NO: 128319 - DNA, 618 bp, Homo sapiens
gctctgaagagctttggaagtatgaggtaagatatggcatttcaatatagttgactgtacatgattttttaaaacacataaaatggtgttaagttagcaagaaaggatattattaattaacacagatagtaaagtcaatgatctattgggagaagagaacccaagacttcttggaggagatagcataggcttcccttacctattttattgttgattatacagagtaaagcaaaatctattcatgaattcttctcagggaaaaaatagcctaaactcactataagaaaacaaaaaggcaaccagagtccaatggtttaaatctatgtgaaccaactaccattgcactatgaacatttatkgaggttctactatttgacactactggaatttataccagactgaaaaaaaccttaatatttatctgtctttgtggatcccacttttcagtgggagagacagacgtctaagaaatagtaatgtcaattataattatgcaacaatgtagtgaaggccgtggtcaaagtacatttgaatactatgaaaacaggaggtggcaaaggatttgctctgcccaaggactaaaaggggttttgttttacaaaggaagccaagaaaacc

SEQ ID NO: 128320 - DNA, 616 bp, Homo sapiens
tatgccttctcttcatcaggactgtgatggttaatattgagtttcaatttgactggattgaaggatgcaaactattgttcctgggtgtgtctgggagagtgttgccaaaggagactaacatttgaatcagtggactgagggaggcagacccaccctcaacctaggtgggcaccatctaatcagctgccagcatggctagaataaagcaggcagacaaacgtggaaggacttgacttgctgagtcttccaggcttcatctttctcctttgcgggatactttctgccactgaacattagactccaagttcttcagcttttggwctcttggacttacaccagtgatttgccaggggctcttgggccttcggccacctactgaaggctgcactgttggcttccctacttttgaggttttgggacttggactggcttccttgttcctcagcttgcagacggcctattatgggaccatcaccttgtgatcgtgtgagtcaatactccctaataaagttcctcccatttatacatctatcctattagttctgtccttctagagaaccctgactaatacaagacctaatcagggtgttgaccttggccacatcagtgtcataga

SEQ ID NO: 128321 - DNA, 574 bp, Homo sapiens
atcaaacattagaataaatgcaagtgaaagaatgcaccaaatttttgytcaatctgtgagtgatggcaatggtagtggtggtgggttaaatcaaggaataaatgtttgcaaagcaaaaattggaaggagcctcttctaccatgtagttcaaaaacaaacaagaataaatacggcaggctcactgaatgccttcataccatattgtttattggtgtgcatcggtataagtgtcatatacttcaagaatttttattttaaaatagtgtatattaattaattaaatcattcatctgccactctgcttattctagttaaggttagcaggaacctgtcccaaaagctcagggccatggcgggaaccagcctcggacaggacattatcccactctaggacgtactcacacacacccactttcactcagactggcaccatttagacatgccaggtcacctaaggggcacagctgtgggatgtgggagaaaactggacttcccagaaaaaaacccactcagaaatggggggaaagtgcaaactccagcagactgtggtcctggccaggaatcgtgttttttc

SEQ ID NO: 128322 - DNA, 627 bp, Homo sapiens
gacataaaattaagggatgcattaaatgaaaaaatgtgaaactgtatattatagcatttgctcaactatgtaaaaatattcataaaaagtgaaagagatatgttaaaattataacaatcattattattgcatgttaggattataagtgaccattatattcttttttatgatgagttttccaaatttctacaatgaaaatgcaatcagcattaatcaaccccctgaacaaataaaatgtttatacacaccactagaaattccctgggatagaacatgaarttggagttaagaatgagtaatgtttaagtatttattatgtgacaaaaatgtgatagggctttatgtatgttatttcctttagtcttagaacaaccatttgagatagatgtcagctctaatgattgcttcacaatatggctttgggtttgggataacatattgctcaaaagatgccaaatgaataaatcagatattgtttagaaaagagaatgattaaagagcttcaggtattgatttatgatgcaagacagagtgtatacacagttctgtcaggcataaatgtggtcaagaggagacaaagtaggagcataaaatggcaaaattatttagagtatagattgggtaaaa

SEQ ID NO: 128323 - DNA, 581 bp, Homo sapiens
tatgtgcacatataaacctgcaaacaatgcttataacagtgttactcataaatcatcccaaactgaaagatgtacttaaataagtgaatgcataacaaaactgtggtacatccatacaatattgttcagtgataaagacaaatgagctcttaagccatgaaatgacatgaacaaatctcttctgtttctaatatgtgatgctttatttttaggtttatttttcctgaattttcaaaattaaattttattttttaaaaatattttatttttgaaatttgtgggtacatagtaggtgtatatatttatgggatacatgaaatgttttgatacaggcatgcaatgcataataatggcatcatcaacaatgggagtagccattccctcaagcatttatcctttgtgttacaaataatycaattatatttattttaaaatgtacaattaagttgtacatttattattgtatcagtgaattgtttcatatatttataatgcagttatactttttgccaagttctgcaaatgtacaaagttgcacatttgattattgattatagtcaccctgttgtgcaaccatatag

SEQ ID NO: 128324 - DNA, 519 bp, Homo sapiens
acagtaggcagaaattgatggtggactgaagaagaaaactgtaactttccattttgtcttctttcaggatatctttctggtttagaaagggttaaatcactgggtttgaccttaatccaattcagaacctcaacaaaatgagaacrtatgtacaaagaaagcagtgggtaagtgcagggtgcattagatggcctgcctaagaaacagctgctgcctccttttgccaccttccccactgtcctggggtggtgagaacccatgaagtggagagcctctggccctttggtgtggagacaaaggcaatgaatggaattccagggacttgagttctgcttccagttctgctccattgcaagaagtcaggcaggcaattccattctctgagtctcagtttcattgcttgtaaaacaagggtcttggagggaaaagtggtttttaagcaggttttctttttctgggtcttcaagcgtctgtggaggtgataggagccactgaagaaaaagaagggcaaggagaagc

SEQ ID NO: 128325 - DNA, 608 bp, Homo sapiens
tcactctcaattataaatgtaaaaatgatttaatctgcctactaaaatgtaagcttctctatattatctccatcatatactcagtttctagcatagggtacagcacatagtaggtactcaatatatttcaaatgaatgaaatccaagtgcctagcactgtatgggtccttcagggaaaaaggagaatgagacttgtactaccttcattgaagttataattgtttggaaacctagatgaaaaaataatttaacaacaaacaaatagacaatggcacaaaatcatccaatcaagtatcaaagagccacaacaagccatgaggtattagcagtaactgaacaaggggaaagtgagtgttggctaatgctacataggatgatattccaagtggactagagtgtttgttaatacyccagagcctaggatgttgccttgagcaattacaaagtctttaaacattcaatcaagtggctttgttttcaatcaataagcttttcattttttccaaaggttaaagtaagcgaatttcaatcaacccatctaatgtatgagttattagtaatggcatgcaagagtgtatgctgtgttccagctttggacttagaataaa

SEQ ID NO: 128326 - DNA, 626 bp, Homo sapiens
atagccaatggcagccctcaggtgcctactcttggccccacaggacctgagagttcacccacatttccgttctgcctgccttagctctctccatggatcaggtgggcatatggcaaagttcacattttgaagtgagaataacatttattttgaacccatgctccactgaacaagagtctgagaaggcagcatgtacgtcctgcttcccagagggctgcccttgactcatggaaaaacactcagaggaaaatgccgagctagrgtaccatgacctcccattagatgcgctggctggaaaacatgacacacaaagataaggagtaggaaggccgcaggggagcaggcctcgggggcaccatgctgcatctcacatcagctcaaatgacatagaccgcaggcccaaggaagcagatctttcttactggtgactgaggggtggcattgacccagaaacaggtgggtgggcaactcaagaacacaggtctccagagggacaatgggctcaggagagctgattctgcacccaaccccacacatctcagcattttatctttctctaattgtttaaaacaggacttttgaaactgagcctgtggttagacttccagcagggcaagaatcccctg

SEQ ID NO: 128327 - DNA, 626 bp, Homo sapiens
atagccaatggcagccctcaggtgcctactcttggccccacaggacctgagagttcacccacatttccgttctgcctgccttagctctctccatggatcaggtgggcatatggcaaagttcacattttgaagtgagaataacatttattttgaacccatgctccactgaacaagagtctgagaaggcagcatgtacgtcctgcttcccagagggctgcccttgactcatggaaaaacactcagaggaaaatgccgagctagagtaccatgacctcccattagatgcgctggctggaaaacatgacacacaragataaggagtaggaaggccgcaggggagcaggcctcgggggcaccatgctgcatctcacatcagctcaaatgacatagaccgcaggcccaaggaagcagatctttcttactggtgactgaggggtggcattgacccagaaacaggtgggtgggcaactcaagaacacaggtctccagagggacaatgggctcaggagagctgattctgcacccaaccccacacatctcagcattttatctttctctaattgtttaaaacaggacttttgaaactgagcctgtggttagacttccagcagggcaagaatcccctg

SEQ ID NO: 128328 - DNA, 484 bp, Homo sapiens
gttaacaggatgcagaagtctccaggcaagagagtgtttatagtttagctttgccctgggcttgatataagatactgcctacatttgaccttgttccagctccactctgacatcatctcctggtcattattgacctttccgctcagatcaggcatggaggaggaggtggagggagtgggggtgcctcatctgcaggggaaaacagaaagtaagagtgatttgtagatcaaragacagcctgactagggccacctaaattgaattcccaaatggaaactgggagtctgcttgagaatgcagtttaattaactgtgatgttcagattgctccccatctgagtgaacatgatggactgctctgagagcatagcttggcagggctgtggtgcaggagctgaagaatcatctttcacaaggaagcaaggggtcatggactcaagccaggtgcacaggcacctgccttcgcgacctggcaaagagaaggt

SEQ ID NO: 128329 - DNA, 657 bp, Homo sapiens
tattattgaactatgtcatcttgaamaagttataatacttaactccccccaaacccatctgtttctctgtaaaatgagataattattttacaatccttgttgagaggattaaatgagctaatatatataatatccgtcatagagcatgggctcagtatggcccctgtccccccagtttcctatgaggcttgagggtatgaaaatccaatctgtctggagtggtgtggggagtttatacactatggatctctttatataattgggagcaatgtggcctggatggctagagtgatgggtaagagcaccttccccaactcaggactggcagcaggaaagtaaaaaccctgatgagctttcatctttgtcccctctaaggcaaacaaaatggaaaactcatgccctgtgtatttcaaattctcaacctgatacatcaaccatagttatagatattagttatagcaataaccctgctggttccacagaattaagaaagtcagcagaaaacttctgcagttccttaagagaggcaaggtagaatttgccttagcagaaaaactaaatcagacttgcaaataaaagtaaaatctgtaagaccacattttttaaaacatttgtttattcattcattcattcatttatttacccattgacatagtt

SEQ ID NO: 128330 - DNA, 594 bp, Homo sapiens
tcttggtgaatgtctttttggagatacatttggttggagatctctgatcttcctttccctatatgttggcttattttctcacattagaaaatgttattccattatttaaaatatatattttatggcacatctayttatattccttcttgagtgtctgttatgcatatgctagtttcttgatgcagctccataattcctgtaggttttctccattgtttattatttctacttctctgattggattatttcaaatattctgtcttcaatttactctcaactcaacttcatcaagtcagctgttagagctttctattgtgtttgtcacctcagtcattatattcttcagctctaggttttcaattgggtatttttatgatacccatttctatgtcaaactactcatgtttgtatattgcttattaaattttgtttaatttttattaatatgctcttgaagtgtgttgagcttgtaaattaatgcataataattgtacctatataagggacacttgtgatatttgataaatgcatatgttgtataataattaaataaaggtaatttaaatatccataaagtaaaaaaatcctttgtgt

SEQ ID NO: 128331 - DNA, 616 bp, Homo sapiens
gactgtaaaaaataaatttcattcttttttaaaattgagacataagagatgtatatattttggggttacatgtgatcttttgatacatatgtataatgtgtaataatcagattagggtaatcggaacatccactaccttaaacatttatcttttctgtactctgggaacatttgaattattctctactagctattttgaaatatacaatgaattgttgtttactatagtcactgtactgatttattgaacattaggtcttatttcttgtaactgtattttttctatcaatcatcctctatccacttctcccctctactctggcctcyggtatccaccaatctactctctatcttcatgagatccgctttgttagctcccacatatgagtagaacatgtggtgtttgactttctgggcttggcttattctacttgacataagttcgtctctgtcgctgtaaatgatgagattttattctattttaggactgaataatatcctattgtgtatatacaccaagttttctttaaccattcatccattgatgcgcacttgggttaagtccatattttggctatcatgaatagtgctgcaataaacatgagggtgcagatat

SEQ ID NO: 128332 - DNA, 616 bp, Homo sapiens
gactgtaaaaaataaatttcattcttttttaaaattgagacataagagatgtatatattttggggttacatgtgatcttttgatacatatgtataatgtgtaataatcagattagggtaatcggaacatccactaccttaaacatttatcttttctgtactctgggaacatttgaattattctctactagctattttgaaatatacaatgaattgttgtttactatagtcactgtactgatttattgaacattaggtcttatttcttgtaactgtattttttctatcaatcatcctctatccacttctcccctctactctggcctccggtatccaccaatctactctctatcttcatgagatccrctttgttagctcccacatatgagtagaacatgtggtgtttgactttctgggcttggcttattctacttgacataagttcgtctctgtcgctgtaaatgatgagattttattctattttaggactgaataatatcctattgtgtatatacaccaagttttctttaaccattcatccattgatgcgcacttgggttaagtccatattttggctatcatgaatagtgctgcaataaacatgagggtgcagatat

SEQ ID NO: 128333 - DNA, 484 bp, Homo sapiens
attggggataattctgttttctgtgaggtatgagtgagaatgaatgagtgataaggaggtggcccagagagtcctctgaaagtctcaggaagatgcaggcccacctgtcttcgtgccagagttcaataggtttatttttctggccaccttggacttyccattggcattttgctgtctttgatgaaacaaagagtagtatggaaggagggtccaggctctttcatgggatggtaaaaatggatatggatacatccaaactctttaacgaagtttactgtgcaccgtaaaatagtatcactatttatatttcttactgttttaaacacgtgtgttttcaaggtttgtaccattcattctagaataaaactaagtcttacccgctgagttgaattttaatactaacttctgacacaataatcaaatagaagaaagaacttgttttcctgcagacgttatttcttttcttggatgttaaggaacttaa

SEQ ID NO: 128334 - DNA, 484 bp, Homo sapiens
attggggataattctgttttctgtgaggtatgagtgagaatgaatgagtgataaggaggtggcccagagagtcctctgaaagtctcaggaagatgcaggcccacctgtcttcgtgccagagttcaataggtttatttttctggccaccttggacttcccattggcattttgctgtctttgatgaaacaaagagtagtatggaaggagggtccaggctctttcatgggatggtaaaaatggatatggatacatccaaactctttaacgaagtttactgtgcacsgtaaaatagtatcactatttatatttcttactgttttaaacacgtgtgttttcaaggtttgtaccattcattctagaataaaactaagtcttacccgctgagttgaattttaatactaacttctgacacaataatcaaatagaagaaagaacttgttttcctgcagacgttatttcttttcttggatgttaaggaacttaa

SEQ ID NO: 128335 - DNA, 606 bp, Homo sapiens
ttagtgttaattctttaaacatttggcagaattcatcagtgaaactttctgggcctggacttttcttatctggaagttttttgatactgattcattcttttctcgttatagatttcagattttgtgtttctttttcagtcagtgttggtagtttgtgtgtttctaggaattcrtctattttatctaagttatgtgacttgttgatatcccattgctcattttcttataattgtttttatttctgtaaggttagtagtaatgtcctcatttttatttctgattttagtaatttagtaacttttctcttggtcagtctaggtaaggcatgccaatattatttgtctttttaagggtccaacttttggtttccttgatttgctccattgtttttctgttctctattttgtattatctctgctctaaaacattattatttctcccttctgtttgctttgggtttagtttgcgctctctgtctctctcttaactgctccaagctggaaggttaggttattgatttgagatctttcttcttttttaatgtagacatttacagctatagatttctgtctgatgcagcttaaactgcatcccagaagttttggt

SEQ ID NO: 128336 - DNA, 588 bp, Homo sapiens
tgaattgttgcaatctcatgataaaactttaaggaatgaagaattgcttcttgtggtttcttgagacggaaagtattcctggtgaacatgctatgaaccctgtggaaatgacaacaaagcacttagagtagtacacaaatttagtagataaagcaggaacagggtttgagaagattggtccaattttgagagaaattatactgtgagtaacatgctatcaaacagtattacatgctacagagaaatatttcatgatagaaagagtccactgatgcagcaaacttcattgttgtcttgtttaaagaaattgccacaaccaccccagccttcagcraccactaccctgatcagttagcagtcatcaacatcaaagcaagaccctccactagcaaaaagattaggatttgctgaaggctgagatgattgctaacagttcttaacaacaagtatttttaatttaggtatgtacgttttttagagacaatgctattgcacacttaacagactacagtatagtgtaaacataacttttatatgcactggaaaacacaaaagttgtgtgacttgctttgttgcagtggtctgaaa

SEQ ID NO: 128337 - DNA, 414 bp, Homo sapiens
tgatcttatcagtctgctggtcaaaagactttcattgtttttcattaccctgaaacactgaccacatctcttagcccacaatttaaggccctcccagaccttagcctacctcagtagtctcatttcgccacttcttggaacaacccmtttcccagctgaatcaaaatcaactgcaagctcattttttctaccacccccatgccaccaataacatccttcaatggaaaagaattatgtctgctttggaatactgagagccacacaaggaagtttcaccacagtgcagtccaaatcagaatgtgctacatcaaagtggaaacatttctgcattatttgtttttctcctgaaatcaatattccctcagtaacaaattcagcagggatgcctccattccctggtcttcgggcttccct

SEQ ID NO: 128338 - DNA, 610 bp, Homo sapiens
tttatgcttttaatctataaaagattaattcttaaacaataaactcccatgagatgttattagttactgaatattaactttagctactgttaacaatcctatcttaaataatgaacttayagagagagatactaattttaatatattaatacatatatatgagaccaacaaataaaatttatttgctccattattccacaaggaaaccagattttcttaaacttagaaaggactatatccactttgcaaaagatggtacactgagcacgtatctggtacataggagtctgtatctttgctattcgtctattttaataaacctcaagttgtcagttttctctgctcttaaaattcaaaatcaaatgcttttcatttggccagaagaaacaagattaaaacactttttaaaagttggtagaatattttttaaaaaacaaagcttttaaagtattttttctacccaccattttagaaactatctttaattacaaatcaaaaaaatatgttaggcttaacaagaaatatgacataaactaagaactagatatgacatactgtgatatactatgatatctgatacattataataggtggttatatttttcaatag

SEQ ID NO: 128339 - DNA, 557 bp, Homo sapiens
cttggctttggaaatgaacartccaggcttgaatcttgaatcttatttcctctatgttctcacatctgatcttggtcaaggcacttaatagctctgagcctcaattttccaagctataaaataggaataatgacagctttccttcagtaattttatgaaaaatagagagaatgtaaaaaagtgcgtgttaaagtccctgacaaatgttatgtcctccataaacagtagctattattaaactaggttaaacgaaaattgagaagtataggaatacctgtttcagagatataaactagatttgggaaattatttgggttataaaatgcaaaggaaaaattaattatgttcagttttgatttaattccatccacaaaattaaactttcagagtcttttcttccgtctggtcttcaagtttcttatactattaattgattgattttttcccattagctctgctgaatgtttaacgcttatttgatccagttttgttttaaatctaatatattcatgaagtctcttatagtattttattgcacattgtcaattccctagctt

SEQ ID NO: 128340 - DNA, 494 bp, Homo sapiens
tctaatcttaaaatggctttgacccattttatatttatattttatacttatatttgatttcctggagcaccaacaaaggaagaactgacttgtagccttccaactgcaggaattctctgaggtactgtcctatttgccttcatgggtttgtgagttagtttcttacaggtaactaaagtctctcccttcaggcctgtcctcttgcctaagtatcaaagttggatttctggatggttgctggrtatctgcttgttcatcttctataccagactctcagtatgaccatccttatctaagtagcttctgtctaagattgctggatattggcttcattgtttacgtatatcacaccctcaacatatccaaccacatctaggaagcaacctttcaagtgacattcctatatattctgttcacaacaacactattgctttgttaactgacacttcaattattccctttcctttgttgccaaatccaatctgttactaagt

SEQ ID NO: 128341 - DNA, 539 bp, Homo sapiens
taccctgtataagtattttttaaaaacatggttttgagaaggcatctatagatttccagaatctccagaatacatagcacaaaacaagtcatgaactcttgaacaagtttgcagtgggaccaaatactataaatccctcatgattataatacctcttaatcttacttctttgtttacattctgcttattagttaatattttattatattttacattattatttgcctccctccccacaaagaaaaggatgtagcctgtgacatctttctagttataagcaggagtttaattttttgggaaccacggctacatcacacaatttcttctttgtagagaaagccaaaatacctccctgtatgagagtggcttgattgagaaggggatctgaataaatgggaggatttgaaatatttattcaaaataatctttttgaaaatgagtgaaaaatacaggtatgtaggggtgagcaaaacttcaccctccgaargttcactgaaaatcaacggaaaaaaggcagattaatagaaaagtcaaacttc

SEQ ID NO: 128342 - DNA, 617 bp, Homo sapiens
accctgttatatgaaggtctggtatcccacatcactcaccacctctctgtgttgtctctgctactctatattagtgaaggctactaatgtcaaggtacagaaatctccaaattttgaggcccctagtcccaaaaagagatctttcartataatcccacttaacctttaccaacagaaatatatctaacccggaaaaaatgatcttgttatctaaactgaaaaaacatattatacattttcgtgtatagattcctttctggtgaattgatagcatcagcacactgtaaactaaggagagcagttgtaggatttattagtttagctacagaaaaatcagtcttttcccatgagtgtgggtacttttttattctcagcccactactatcaattctccttaaagctggggtatttgtttgtagacacctgattttcagtctgtaagaaacacaatgattccatcatgtttctgtccttgaatcacttgttgaattgtatgttaggacagtgactgtctttaggactccgagcatgcacattaaacagccacgagacatacagtctgtatcagtcttttctcacgttgctgataaagacatacttgagactgggcaattcta

SEQ ID NO: 128343 - DNA, 489 bp, Homo sapiens
ctttagcaaatgctaatggtgttgactttgacggagagtattaaattcctttgattcacaaatccaacaatacatttttccccccaaccttctcattataagaaagctgcctgtcctcccagrctttaagcataaaacatcatagctaaacttctctatccacttctaaaccattgtatagtttctcaagttatatttatataatgtgcaaagggaggaaaggaactggctaaactaacaaattttacctgtactttataaaaacaaatgtaatcaaattagtaacatgtattaagactcctctctctcattttttccctcttcatttcttttactttataccatttcctttgctactacattacattgtgtagtaacagcaacacagatttatgttctcaagagagttaaacacccacctttctttttcagtggcaatgactaagtaaggaagttacattttccaaaaaaaatgtgaagttcagttca

SEQ ID NO: 128344 - DNA, 489 bp, Homo sapiens
ctttagcaaatgctaatggtgttgactttgacggagagtattaaattcctttgattcacaaatccaacaatacatttttccccccaaccttctcattataagaaagctgcctgtcctcccaggctttaagcataaaacatcatagctaaacttctctatccacttctaaaccattgtatagtttctcaagttatatttatataatgtgcaaagggaggaaaggaactggctaaactaacaaattttacctgtactttataaaaacaaatgtaatcaaattagtaacatgtattaagactcctctctctcattttttccctcttcatttcttttactttataccatttcctttgctactacattacattgtgtagtaacagcaacacagatttatgttctcaagagagttaaacacccacctttctttttcagtggcaatgactaagtaaggaagttacaytttccaaaaaaaatgtgaagttcagttca

SEQ ID NO: 128345 - DNA, 361 bp, Homo sapiens
aactataagctatttataagggtcacactcaaaacaaaatgacaggaaagattaaatgtaaagtttagacaaaaatatatcagcaaacaagaagaaaaaaagaaatcaaacattaagataatattatttaagaattatttcctcttgccagggtgaggggtctgctagccccatggcaggccctagattaaaaaataaataagtaaaataataaaaagagtttttataaaatataaccttttaaaagyatgtttggctgggcacggtggctcatgcctgtaatcccagcactttgggaggcagaggtgggcaaatcacttgaggtcaggaattcataatcggcctggccaacatggtgaaa

SEQ ID NO: 128346 - DNA, 604 bp, Homo sapiens
agtgggcaaataatttaaaaactttttttwtaatttttttattattatactttaagttttagggtacatgggcacaattttttccaaaaagaaaaacagatctgtgaaaagatgctcagcatcactaataatcggggaaatgcaactcaaaaccacaatgaggtatcacctcttatctgtcaagatggtcataatcagtttttttaagtgttagcaagtatgcgtgctaataaaaaaaaagaaaactgttagcagggatgtggacaaattagaacctttttgcattgttggtaggaatgtaaaatgtgcagccactgttttctaacagtatggaggttcctcaaaattttataaaaagaactaccatataatccagcaatcccacttctaggcatttatccaaaacaattgaaatcaggatctcaaaaatatatttatgcccttatgattatttcagcctttttcacaatagccgggaagtgacaacatcttgagcgtccacagtataatattacttgccataaaaaaggaaagcctgtcacgtgcaaaaacatggatgaactttgaggatgttattctaagtgacataagctaatcgcagaag

SEQ ID NO: 128347 - DNA, 604 bp, Homo sapiens
agtgggcaaataatttaaaaacttttttttwaatttttttattattatactttaagttttagggtacatgggcacaattttttccaaaaagaaaaacagatctgtgaaaagatgctcagcatcactaataatcggggaaatgcaactcaaaaccacaatgaggtatcacctcttatctgtcaagatggtcataatcagtttttttaagtgttagcaagtatgcgtgctaataaaaaaaaagaaaactgttagcagggatgtggacaaattagaacctttttgcattgttggtaggaatgtaaaatgtgcagccactgttttctaacagtatggaggttcctcaaaattttataaaaagaactaccatataatccagcaatcccacttctaggcatttatccaaaacaattgaaatcaggatctcaaaaatatatttatgcccttatgattatttcagcctttttcacaatagccgggaagtgacaacatcttgagcgtccacagtataatattacttgccataaaaaaggaaagcctgtcacgtgcaaaaacatggatgaactttgaggatgttattctaagtgacataagctaatcgcagaag

SEQ ID NO: 128348 - DNA, 604 bp, Homo sapiens
agtgggcaaataatttaaaaactttttttttaatttttttattattatactttaagttttagggtacatgggcacaattttttccaaaaagaaaaacagatctgtgaaaagatgctcagcatcactaataatcggggaaatgcaactcaaaaccacaatgaggtatcacctcttatctgtcaagatggtcataatcagtttttttaagtgttagcaagtatgcgtgctaataaaaaaaaagaaaactgttagcagggatgtggacaaattagaacctttttgcattgttggtaggaatgtaaaatgtgcagccactgttttctaacagtatggaggttcctcaaaattttataaaaagaactaccatataatccagcaatcccacttctaggcatttatccaaaacaattgaaatcaggatctcaaaaatatatttatgcccttatgattatttcagcctttttcacaatagccgggaagtgacaacatcttgagcgtccacagtakaatattacttgccataaaaaaggaaagcctgtcacgtgcaaaaacatggatgaactttgaggatgttattctaagtgacataagctaatcgcagaag

SEQ ID NO: 128349 - DNA, 390 bp, Homo sapiens
atgaattccttgatgacctgaaatagtctgaaacaagtggatatttaaagaacgtaagagcttcaaatgggamcaaagtgaataatgttcagtagaaatatttggaacatgaaatctgtagaatgttggattattgactttgctgatgggatctttgatttaactaattgcatccaatatccttttgtattgagaaacatttttggctggaaacatgttggaatgtgtgatggttaaatttatgggtcaactggctagatcatggtgcctatatatttggtcaaacattattctgtgaagttgttttttggttgagatgaacatttaaatcaatggactttgaataaagcagattacacttcataatgtgggtgggcctcatctgattag

SEQ ID NO: 128350 - DNA, 536 bp, Homo sapiens
aaccagttggaaaatggcatgatcttttcatcaggcatatagttgtattcatgtttttgatacaaaagcatggatcactcacttggagtgattgcagtacttaagcttcaatctcaaggtgctgtagacagtctctcagmtcatttaaaaaaaaggggggcaggggaatcaaacaatttcagatagacactctgaacatttttcaaccacagcccccgctttgaaaataccacttctgattggggctttcagcagcagcctctgccataaacaaatagtgactcattctgatattgtgttcttgggtttttgcagatattaaagtcttagtaatatgtgtccaatagagtcaagctagcaataaaatgatccagaatgatggtgaaaactcctttttatttaattccacctggaaccacaagaaagcggtaatttgaaaactcagtgcgtatgcctttcactgaagagaatatcttcatttccctttacacattaaaaacatttccccagatgccctgaaagtcaaagctgcaggg

SEQ ID NO: 128351 - DNA, 536 bp, Homo sapiens
aaccagttggaaaatggcatgatcttttcatcaggcatatagttgtattcatgtttttgatacaaaagcatggatcactcacttggagtgattgcagtacttaagcttcaatctcaaggtgctgtagacagtctctcagatcatttaaaaaaaaggggggcaggggaatcaaacaatttcagatagacactctgaacatttttcaaccacagcccccgctttgaaaataccacttctgattggggctttcagcagcagcctctgccataaacaaatagtgactcattctgatattgtgttcttgggtttttgcagatattaaagtcttagtaatatgtgtccaatagagtcaagctagcaataaaatgatccagaatgatggtgaaaactcctttttatttaattccacctggaaccacaagaaagcggtaatttgaaaactcagtgcgtatgcctttcactgaagagaatatcttcatttccctttacmcattaaaaacatttccccagatgccctgaaagtcaaagctgcaggg

SEQ ID NO: 128352 - DNA, 586 bp, Homo sapiens
ctgatgtaatcttgatgatattctatagatgagaaaactgagacttaagagtggctaagcaacctgggaattcacatagttgctaaattggagcttacatggagcttacatcctagtaggggaattcagacaactaatatgcaagtaaatgtgaaatatgttagatagtaataaatgctaaggagaaatgaagcagagaaagagggatggaaggaggactgtctctattttttatagggtagtcactattaagataatgcattagtaggtatgacgacaagccttgcagatatctggggaaatatcattgtagacaaaagcaaaggaaaatgcagaggctctgaggggggaatatggctgatgtgttgagacagagcaaagaagctcatgtagctggagcagagtaagcaagaaagaaaggctaagagaggagtttagagctgaaacaaggcytagatgatgcaagaccttgtaaattacaggagaaaatttgtgttttactgtgaataactagtgagaacattgaaggcttttgagcaaagaaatagtatgatctgactcaggctgttatgttagtaatagatta

SEQ ID NO: 128353 - DNA, 579 bp, Homo sapiens
  misc_feature (1)...(579): n = A,T,C or G
actaaaaaatacaatatctgaaataaaaatttaactggatgagctaaacaaaattggtgataaaaatatttggataaatcatggccaaggattccccacatacagaaaaaaaatgtaaacctttagatccttgaagttcagtggaacaaaatggaaataaattaaaagaaaaccacatttatgtacatccaagtcaaactggtgaaaacaaaggataaaaaggaaatttcagggaagccagagaccgcattacatagaggcaaaatacatacrgacagtctatgacttacaatggttagacttataattttccaactttacaatggtatgtgaaagcaatacacattcaataaaaactttactttgaatattttttcaaccatcctgtttttcactttggaggcagtattcaataaattgcatgaaatagtcaacattntattataaaacaggctgtgtgtcagatgattttgcccaactatagactaatataactgttctgagcacatttaaggtaggctaggctaatctataatgttaggtagggaggtatattaaatgcatttctgatgtgatatt

SEQ ID NO: 128354 - DNA, 505 bp, Homo sapiens
tctccttagaatgctcttgccttctctaccacatggccaagctgcaaaatttccaaacttttattctctgcttcccttttaaatataagattcaattttaagtcattcctttgctctcatatctgagtgtggacagttacaagcagctatgccacaccttgaacattttgctgctaagaaatttcttctkccagatactctaggttataattcataagctaaagcttccacaaatccctaagacatggacacaatgcagctaagttctttcctggggtgtaacgtgggtgatcttcactccaggtctcaataacttcctcatttccatctgaggcttcatcagcctggccttcactgttcatatttatatcagcgttttggtgataattacttgacaagtctctaagaagttccaaacttccccccatcttcctgtcttctgagccctccaaactcttcctacttctgcctgttgcccagttccaaagctgcttccacattatca

SEQ ID NO: 128355 - DNA, 505 bp, Homo sapiens
tcttatagatttcttttgttgctgttgttgtaatttagagatcctcagcctctgtaatctggatgtcttgtttactgtctcagtctttgctgttcccagaatcctaattttccctaagttccaagtctcctcatgccacctaaaatccagaggggtttggaaatttacaaaaatcacaaaagcgatgttrggatggtttatggaagtggagacagggttgcgtaggtggttggagggtggataatgtgttatccaaagcttaggctcaaaccccagctctgccactgaccaactatgcatgcaaatttgggccttagtttcctgatctgcaaaatgaggactttagacacacacacacacacacacacacacacacacacacacacacctctaatagctttgttgctaggattaaatgatctaatacataaaaaggtgtggctctcattgcaggaactttccttatttaggtcatggaagagttatgcaccaagttttttcaaaa

SEQ ID NO: 128356 - DNA, 592 bp, Homo sapiens
atggtcaactcttctttgaaaagggtaccaagaagacacagtagggaaagaatagtctctttgagactagtaartgatgtgggaaaacaagatatctgcatgcaaaagaatgaaataagacctttattttgtgctgtacacaaaaatcaatggaaatggattaaagacttaagtgtaagacctgaaactataaaacccctacaaggacacataggagaaaagcttcttgacattggtctcaacaatgatttcatggaaactataggctgaatgtttgtattccaaatttgtatgttgagacctaatcccccatgtgtgagtatttggagatggggcctttgggaggtgactagttcataaagatggagccttcatgaatgggaatagtgcccctgtgaaagagaccagagagagctcttacccctgttggttatgtgaggttacatatggaacacatggaagtaacagtggaagatggccatctatgaggaagtgggctctactagatattgaatctgctggtgccttgttgtaggacttcccagtctccagaactgatagaaataaattaccattgtttataagcaactca

SEQ ID NO: 128357 - DNA, 522 bp, Homo sapiens
attctccctccctgcctctccctctctgcctctccttctctcactcttcccctccctctctcactcttcccctccctctctccatctctstagcctatatagatagatagatatggataggtacatataaagagatttattttgagggattggctcctgtaattgttgggcctgagaagtttcatgatctgccatctgcaagctggaggtccaggaaatcttttggtgtggtcacagtccaaatacaaagcctgagaaataggaacactgatgtccaagggcagggaaagagagttatctccgctcaagaagagaaaaaaaatgtgcccttcttcagcctttttctcctattcaggcccttaatggatcgaatgatgctcactcacattggtgaggacattcttccttactcagccgtgaaatccctttcagaagcaccctcatagacacatccagaagtaatgttttcccagctatctggacatcccttagctcagtcaggttgacacataaaattaaccg

SEQ ID NO: 128358 - DNA, 608 bp, Homo sapiens
tacaggcacacatcaccaagcccagctaatttttgttttttagtttttattttggtagagatggggttttgctatgttgcccaggctggtctcaactcctgggttcaagtgatctgcccacttcagcctttcaaaatgccgggtttacaggtatgagtcaccattgcctggcttgatgtcctgttttcataattctctatcagtactgcttagggttatcttgagcactgtgtctacttaacagtacatatggttagtcatatccatcaacattcctcagaagattagattaagttctgtttcccatgagaggcaagttatctggtccccactccccacacccaacatagaatggtggtatagatctattataacagctataaacattcccattcaaaaggagccaaaataaaagatataaataagtgacttgtgagtagaaattctgaaatccaatcaagcaaatattgggagtttcttttttagatttcaaggcttgagaataattctttgtagcacttggctccacccatcggattcttggttctrccctctgagtcatccttttttcatgaaaggtaacgtgtgtttgcaactgaatagtttta

SEQ ID NO: 128359 - DNA, 571 bp, Homo sapiens
gaaacatagcagaactcagaatctctgcaatgtattgacaatgttcaggatacagttcaaaattattcaatattcaaagaaacaggaagacactactcatatcaagaaaaagaataaaatcaatgaagatcaaccctgaaatgattcatacattggaattagtagacagggttatatgaaacaattattacaactaagctcaaggacttaaaggaaaatgcgcttgggaaatacacttgttaataaatgaaaaaataggaattgtcagcaggtaaatagaaactctaaaaaakaactaaatagaaattatagaactgaaaaacacatctaaaatttaaaaattactagataggggccaggcatgatggctcatgcctataatccaagcattttggaaagacggggcaggaggattgcttgaagccaggtgtttgagactagtctgggtgacatagagaaacctagtctctacaacaaattttgaaaaattagccgggcatggtggcacatgtctgtagttcttgcagtcctattcaggaggctgaggcagtagcattgcttgagcccagga

SEQ ID NO: 128360 - DNA, 580 bp, Homo sapiens
attttctaccaagtactctattacatacactctttctctttctaccatgaggctgccatagtttctcttccagaaaatagaatgtggctattctatttcgtgttcctaagtcacatgttccatcttcagacacccacactggttttcagttccatttccaaattcctagggaagagagtttgatcattccattttaggtcataggtactctgttagtccaatcaagtgtggctaagaaagcagggtcatgtagtacaaaatcgttgctagggcttcattgcccaaaattattgttacgtagaatagacaccccaaatgttgcttcctacaaatagatggaatttargtagccaaggaggaaaaagaatgaattttaagaaggaaaacatgaattgatgatgcatagaagctggaatggttgtggcattttcaaacaataggaaagattctggccaaaccagagcagaggcatctgataggaagtggaggaggtgtgggcttgactgggaagtgtgaagccattctatggaggccctgaacatccggcagaaaagtttcaacgtgtgaagaaaattggaag

SEQ ID NO: 128361 - DNA, 414 bp, Homo sapiens
agcaaatattgtacaatttatattatttcaaatgtgataaggtatgatttatggcccagaatttgatctttattggtgaatattccacgtgagcttgaaaagaaggaatattcttctggcttcagaagaaacagtccatagatgtccatcatgtaacagctgattgatattatagagttcaactgtgtccatattggttttctatgtgaagtatgtgtccatttctgacaaaagcctgttgaagtctccaactataacggtggattgattcattyatttctccttccacttttgtcagttttgcctcacatattttgacactatattgttagatggattaaagattattgtgtctatttggggaattgattcttttatcattagacaatgcttctcttttttcttgatgaattc

SEQ ID NO: 128362 - DNA, 536 bp, Homo sapiens
catcctgtcactttcacattgagtaggttgcagaggagaaggaagaggaggggcgagtcttgtgttatttgaggataacagaggcaaaacaaaatatccatatctaagtggacccacacagttcaaacccatgttgttcaagggtcaactatatatgtgtgtatgtgcgtgtgtgtgtatacacatacataagcatacataagtgaatacataactgaatattactattttaacaaattgttatctgcttgctcaattaagagtaaaaaatgtttttattttaccttcacttatttcttcccttatgttttccttttctttatgtagatccaatttctgacctatactsttttccttttctttgaagttttttaaacatttcttgcaagacaagtctattggcaaaaaagttcctcaatttttgtttgagagtctttatttcttcttaacttttgaaggataatttcacagggtaaaaattgtgggttagtggggcttttttcccttaatattttaaatattatactctccctttg

SEQ ID NO: 128363 - DNA, 536 bp, Homo sapiens
catcctgtcactttcacattgagtaggttgcagaggagaaggaagaggaggggcgagtcttgtgttatttgaggataacagaggcaaaacaaaatatccatatctaagtggacccacacagttcaaacccatgttgttcaagggtcaactatatatgtgtgtatgtgcgtgtgtgtgtatacacatacataagcatacataagtgaatacataactgaatattactattttaacaaattgttatctgcttgctcaattaagagtaaaaaatgtttttattttaccttcacttatttcttcccttatgttttccttttctttatgtagatccaatttctgacctatactgttttccttttctttgaagttttttaaacatttcttgcaagacaagtctattggcaaaaaagttcctcaatttttgtttgagagtctttatttcttcttmacttttgaaggataatttcacagggtaaaaattgtgggttagtggggcttttttcccttaatattttaaatattatactctccctttg

SEQ ID NO: 128364 - DNA, 596 bp, Homo sapiens
tatgttaatgctggagttgagtaagataaagcaaggttttcatcaactatagccactgtaaagccattaatgacttttgcaatgatagtttcaatgaagaggtggagaaatgaacaaagaaaaagattagggcttaaarttgaaaatgaagagggacaatcgatagaaaattaaagcagtcttctttctgaaacttggtgagattggagtttggtaggaaaaaaagtacaatagaaaattagttaaaagaatatgtgaaatgaatatgtagcgtggaacttaacatatgaaagacaaggagaatgaattcacaaatatattctgaagagaaagagggataagttgaagatacagaaagagcaaaaaaaagaagatatatcaaactctcagaagagattaaagcaaatgtaaaccagaatatgtgtagatatatttatctctaatgtagtagggaggaatcacatctcccactgaaatatgaaggagtgaggttagaacaaatctgatcacagtccagactactgaggaaaatggtagagcagggagctaaaaatatcagtgaagctctgatggaactgacaaaggaatgtgaaagg

SEQ ID NO: 128365 - DNA, 481 bp, Homo sapiens
tgtacctgaaaaagctgcagacactcaatgccagcccacgaacacagctaggataggtctacaccctgcaaagccacaaggttggagttgcccaaggctgtgggagcccagctcttgtatcagcatgccctgcatgtgagacgtgaagtccamggagatcatttgggaacttttgtgtttaatgattactctatcagattttgaacttgcatgggcctgcaggcccttagatttgccagtttctcccattcggaatgggtgtatttcccaatgactgtacctgcattgtttctaggaagtaactaacttgcttatcattttacaggctcataggcagaagggatttgtcttgtttcatatgagactttggactgagacttttggcttattgctggaatgagctaagaatttgggggactgttggaagggcatcattgtgttttgatatatgaggacatgagatttgcgaggggccagagat

SEQ ID NO: 128366 - DNA, 524 bp, Homo sapiens
gaacacagctaggataggtctacaccctgcaaagccacaaggttggagttgcccaaggctgtgggagcccagctcttgtatcagcatgccctgcatgtgagacgtgaagtccaaggagatcatttgggaacttttgtgtttaatgattactctatcagattttgaacttgcatgggcctgcaggcccttagatttgccagtttctcccattcggaatgggtgtatttcccaatgactgtacctgcattgtttctaggaagtaactaacttgcttatcattttacaggctcataggcagaagggatttgtcttgtttcatatgagactttggactgagacttttggcttattgctggaatgagctaagaatttgggggactgttggaagggcatcattgtrttttgatatatgaggacatgagatttgcgaggggccagagatgaatgatatgattttgctgtgtctacacctaaaatctcatcttgaattgcaattcttacgtgtaaagcgtgggataggtgaa

SEQ ID NO: 128367 - DNA, 552 bp, Homo sapiens
ggaattacatgactgtaaattaattatacttaatacayatagagaaataaaatcagtaattaaaaacatgagaaagaggaagatatcgttaaaaaggatctggctgatgttgaaaataacttaattctgagtagctggccattcatgttcataacagaaagggtacaaaatggtcaaatatgtctctccagcaaacatttatctgcagaaacatttatttgaaaaactaaaaacatgtacaaaaataccttcacgggagctaataagaccacgtaagaggtcacagtacctggttataataaaataataagaaaaagcacattaaagaaggtgggaaggatagttttacattatgtggaccctcctccaacctcaggaagcacagcatggacagagataccatctgactggggaagagagagggaaatgagcataggggttaattagttggaccctaacaccaggcttgctacagtaaaacctaggttggtcagactctcatggcctctgactccaggccagtacccatggactgagcttttagatctgcct

SEQ ID NO: 128368 - DNA, 552 bp, Homo sapiens
ggaattacatgactgtaaattaattatacttaatacacatagagaaataaaatcagtaattaaaaacatgagaaagaggaagatatcsttaaaaaggatctggctgatgttgaaaataacttaattctgagtagctggccattcatgttcataacagaaagggtacaaaatggtcaaatatgtctctccagcaaacatttatctgcagaaacatttatttgaaaaactaaaaacatgtacaaaaataccttcacgggagctaataagaccacgtaagaggtcacagtacctggttataataaaataataagaaaaagcacattaaagaaggtgggaaggatagttttacattatgtggaccctcctccaacctcaggaagcacagcatggacagagataccatctgactggggaagagagagggaaatgagcataggggttaattagttggaccctaacaccaggcttgctacagtaaaacctaggttggtcagactctcatggcctctgactccaggccagtacccatggactgagcttttagatctgcct

SEQ ID NO: 128369 - DNA, 552 bp, Homo sapiens
ggaattacatgactgtaaattaattatacttaatacacatagagaaataaaatcagtaattaaaaacatgagaaagaggaagatatcgttaaaaaggatctggctgatgttgaaaataacttaattctgagtagctggccattcatgttcataacagaaagggtacaaaatggtcaaatatgtctctccagcaaacatttatctgcagaaacatttatttgaaaaactaaaaacatgtacaaaaataccttcacgggagctaataagaccacgtaagaggtcacagtacctggttataataaaataataagaaaaagcacattaaagaaggtgggaaggayagttttacattatgtggaccctcctccaacctcaggaagcacagcatggacagagataccatctgactggggaagagagagggaaatgagcataggggttaattagttggaccctaacaccaggcttgctacagtaaaacctaggttggtcagactctcatggcctctgactccaggccagtacccatggactgagcttttagatctgcct

SEQ ID NO: 128370 - DNA, 629 bp, Homo sapiens
tcatctaaattaagagtgaatataaagggtcctataataagtatagattttgttcatcaaattgaaaatttaacattccagtgataaactcccaggagcctacagaagtaaatctaacctttcttggacaaacaggtgctctactcagactatgcagaattatttcaaatacartttctgttaaagatagctttgtaatccacaattacacatgaagtaataaatctataagtgataaataaaaaagcatgggtgcacactaataatgtgagaaacttgattaaatacaccagaatagaaatgaaaacataaaaccaaagaaagtatgtgaaaatttccagcaatattttaagaaaaaactaatagaaattcaggaaataccaagtgtagtaatcacaatcagaaaggtcaaaagtcagggcacttacccattctgctctacggttatggctggtgcctggaggttctagcctgttataaacttcagacctgaaaggtaggagtgttgtactacccatcttctctaacaatatctaatttaaccacgttcccaggatcccagtctagagcttgtgcgcttgagaatagttattctaaaattgttcttcttgtgacttgttgcaggcctt

SEQ ID NO: 128371 - DNA, 350 bp, Homo sapiens
tttacaaagtgcgggaaacaagcaagtgagcaagggagaggaggagggaaagggaaagtgaaaggtgcctcacaaggagccacctctgaggatgacgagagctcaagcccacatasaaacacaggaaaaatgcctctgttattccacctgagaggtgagggagctgcgggatgtgtacacctcccttgtcatcactgattgacagccgtcctaggggatgctaattccaggccatgaggtctgcctcatttgcagcctgagctgcttccccaggttcagacagagcagtgaaggggagaaagggccatagagagtcagctgaagtataatgactagaatccccaaggcgt

SEQ ID NO: 128372 - DNA, 350 bp, Homo sapiens
tttacaaagtgcgggaaacaagcaagtgagcaagggagaggaggagggaaagggaaagtgaaaggtgcctcacaaggagccacctctgaggatgacgagagctcaagcccacatagaaacacaggaaaaatgcctctgttattccacctgagaggtgagggagctgcgggatgtgtacacctcccttgtcatcactgattgrcagccgtcctaggggatgctaattccaggccatgaggtctgcctcatttgcagcctgagctgcttccccaggttcagacagagcagtgaaggggagaaagggccatagagagtcagctgaagtataatgactagaatccccaaggcgt

SEQ ID NO: 128373 - DNA, 350 bp, Homo sapiens
tttacaaagtgcgggaaacaagcaagtgagcaagggagaggaggagggaaagggaaagtgaaaggtgcctcacaaggagccacctctgaggatgacgagagctcaagcccacatagaaacacaggaaaaatgcctctgttattccacctgagaggtgagggagctgcgggatgtgtacacctcccttgtcatcactgattgacagccktcctaggggatgctaattccaggccatgaggtctgcctcatttgcagcctgagctgcttccccaggttcagacagagcagtgaaggggagaaagggccatagagagtcagctgaagtataatgactagaatccccaaggcgt

SEQ ID NO: 128374 - DNA, 574 bp, Homo sapiens
gggagggatacagaaattaaagggttaagtgcagtttaaagggattttttattgtgtgggttttactatcttgtgacttgtggagtaactactgggatggaatgtctctacaagcactggttttaattaaaaagaaagaagattagacctcaaaatatatatcttattgctctaatttaactgcttttgggttacagaatattgtgagcataagctctggagaagcagcataagccacctcccaaatctctggactcctcttatgagttctgtgaggagaaactccagagtgggaccaracctgaatgagcctcagaaaagggtgaatctggacagagatggggtagagaaacggtccaatgttgaattatgatctctatgctgctggagtacttcttgttctgtctttactaagcctgtccaagagaaacttaagagtttgtataattttaatccatttagccactaatctattttataacatataataacaagcaatttaaccaaaacttttagggcttcctaggataattttattagaaaatatgtattcttagcaaggtaaaagcagtag

SEQ ID NO: 128375 - DNA, 586 bp, Homo sapiens
agggacccaactagtacttgttcttttcttactcatcttgttgtaattgatcatattttctaataaaaaggggaaatttggaacataaggcrggagaggtgtcagtcttatccactatgacatttcccttcatgtttaactttatcatatagcccccattatcaaccccatgatataacatttggaaaattataggcactcagtatatatttgttgaataattgagtagctgactgaataaataaatgaataagtgatttacaggtaagccgtgatgagaataggagctgactggagcataagcagtgactagtagtggcatggttgtgctcagaggaagggcatcaaatcaatgggtcctgaaaatgaagagggaggagtagaacctatgaaagatgactgccttgtgcctcaccttttttgtcctgtgattgactaagctgctaagtaggagcttgaagtaaccacttggctccccaggtggagcccagctaatcaagctgactggctcaggtctacatttctaaaaaaaaattcagcattataggaacagaacttgcaagtaatgttgaggtatcaaaggaat

SEQ ID NO: 128376 - DNA, 586 bp, Homo sapiens
agggacccaactagtacttgttcttttcttactcatcttgttgtaattgatcatattttctaataaaaaggggaaatttggaacataaggcaggagaggtrtcagtcttatccactatgacatttcccttcatgtttaactttatcatatagcccccattatcaaccccatgatataacatttggaaaattataggcactcagtatatatttgttgaataattgagtagctgactgaataaataaatgaataagtgatttacaggtaagccgtgatgagaataggagctgactggagcataagcagtgactagtagtggcatggttgtgctcagaggaagggcatcaaatcaatgggtcctgaaaatgaagagggaggagtagaacctatgaaagatgactgccttgtgcctcaccttttttgtcctgtgattgactaagctgctaagtaggagcttgaagtaaccacttggctccccaggtggagcccagctaatcaagctgactggctcaggtctacatttctaaaaaaaaattcagcattataggaacagaacttgcaagtaatgttgaggtatcaaaggaat

SEQ ID NO: 128377 - DNA, 638 bp, Homo sapiens
gacccactaaagaaacaagagtgcaacgtggaaacagagacagtaatcccagttatgtacacgggctaaacataacaggaaatggtaaggaagttgaggttcataaagtacatggtaactaattctgagcttgtcctagacacactggyattaggtttaggacagataaaacaattcaaaatcttctcaactgtcagtgaggctcaggaacgtgatggacttcagtctgcaattttaaaggccttcagcctctatagcaggcaggcatggagaaagcagaggctgaagggtcttgtaggcagaaaatcagttcaaaacagtctttaactctggaggaaatgttacaacacaagcatccatttcaaaaaggagaaagtctaattacaacaacaatagtaataataatagtaacagcgtaactatagtaataacaacatctactgccctttaacgagtatttatcatactccaggcctgtattaggcagtttacatatattatctcatttaattcttacaacaaccctaagaaataaattccagtattatcctaattttagcagcttgtagagattaagtaatatgcccaaattcacacagctagtaaatggtagggctaggacttgaagccagtttgat

SEQ ID NO: 128378 - DNA, 638 bp, Homo sapiens
gacccactaaagaaacaagagtgcaacgtggaaacagagacagtaatcccagttatgtacacgggctaaacataacaggaaatggtaaggaagttgaggttcataaagtacatggtaactaattctgagcttgtcctagacacactggtattaggtttaggacagataaaacaattcaaaatcttctcaactgtcagtgaggctcaggaacgtgatggacttcagtctgcaattttaaaggccttcagcctcyatagcaggcaggcatggagaaagcagaggctgaagggtcttgtaggcagaaaatcagttcaaaacagtctttaactctggaggaaatgttacaacacaagcatccatttcaaaaaggagaaagtctaattacaacaacaatagtaataataatagtaacagcgtaactatagtaataacaacatctactgccctttaacgagtatttatcatactccaggcctgtattaggcagtttacatatattatctcatttaattcttacaacaaccctaagaaataaattccagtattatcctaattttagcagcttgtagagattaagtaatatgcccaaattcacacagctagtaaatggtagggctaggacttgaagccagtttgat

SEQ ID NO: 128379 - DNA, 507 bp, Homo sapiens
ccagcaatattccttcggctcttacccctctgctgtgcsaaacaccgagttaacgtttgctggcctctatatgcacactgaggtctgcatttgtaaccgcatttttacatctttcaggacaggacaatcctcctttgtcccctatggttttcatcacggttctatatacacctgaaaatctctgccgcctacatcagacgttttgtctaaacccattactgtgacttaccctaaatttacaaccattgatttcaattccaagtccaaagactcatttccacagtaattattttactcagaaattaaattccagattcctgatcacacttaaagtcaactgctttcaacttctgggttatagatacaactggtctaattctgtaacctgagaggatttcatggaaatactctctcttcatctcacgacacacacaggtggtaactgcagccttcaacctaactgccttcctaaccagagcatgaaagagcaataaagagtatttatcc

SEQ ID NO: 128380 - DNA, 424 bp, Homo sapiens
gaattctttacctaaaatagtttaataattgtaktggtctaggtgtgtttgtggttaacatagagaaaggaaagaaaccacaggtgcttatttcctgattttatcatgattaattataaggatagcatctctgcaaattactggttatgttagtgagtgaataataatcttaaattagagcatgtttataggaattttataatttgaagaagtaaaaggtatcacagacacctcattttgctggtttttgttcatttaaatatagagcatcttgaaggttaaaattccaaagcctgatttgttttgtctgtgtttatttacaagtatgtttaatcctactcttgtttttgagctttttaatactgcatggaatattaatcattaggtggtcttaatgtagatatcttcagtgcttctacagaaa

SEQ ID NO: 128381 - DNA, 603 bp, Homo sapiens
ttagccttcaatgtgaatatacaatatgcttcacagatggattttatatttaagtcttatccaaaccaaaaaagtaagtgagacaaataaagcttctgaaaatggcaccaaggctaaaatgtatgtaaacaatgaagagttctggtacaaacaaacaaggaaggaagaacaatccttctgccatccattttccacttgcacattgcgtaagtagatcatataacctacctttggtgcaaatacatgtctctccagtttaaatatataatagacacacataattagggaacaatctaaatgtccaatagaggaatggttaaattactttctatcaatgggatattagccgttaagaaatacacttatgcatcattttagaaaaatgaagaaatgtacatgtattaatgytaaaatagtaggatacaaaatttgtaaaagaaccccaactttaaaaatgcaagaatattgcaataaaatatacaaaaatattagcaagttacctcaaaggttttactttcatatacagaattctctgactcttccattaatagtttttacgtagccctgctttttacaatcacaaaataatgcacatttgaaaag

SEQ ID NO: 128382 - DNA, 658 bp, Homo sapiens
ggaatgttagtgatattttgtacattgattttgtatcctgaagttatttattagcagctgaagttgttgtttattagcagaaggatcttttgggctgaaactatggggtctttttgatatagaatcatgtcatctaccaacagggatagtttgacatcctcttttcctatttggatttccaggatttccaataccatgttgaataggagtggtgagagaggrcatgctcatcttatgccagttttcaaggggaatgcttctagcttttgcttattcagtatgatattggctgtgggtttgtcatactaagaagactcattatttttaggcattttccttcaatacctaggttttttttttagagttttaacatgaagtgatgttgaatgttatcaaaagccttttcaacatctattgaaataatcgtggtttttgtctttaggtctgtttatgtgataaatcacatttattgatttgcatatgttgaaccaaccttgcatcccagtgatcgtggtagatagctttttgatgtgctgctgtattcagtttgccagtattttgttgaagatattttgcatcagtgttcatcaaagttattggcccaaagttttctttttctattgtgtctctgtcaggttttggtatacaaatgattttg

SEQ ID NO: 128383 - DNA, 527 bp, Homo sapiens
actgcctgggtattgctggtgattattcaaagcccaagggctctttagttatgagatgataaatcctgccaggactgggtccttcccttcaaggcagtgacttcccttctggcccaggatgtgtctacagatgtcatcaaggagctagggcatagaatggaggattcagaacttctstgtggtaccctatcctactgtggctgagctgatatccaagtcacaagacaaaatcctcttttctctcaagtgaagagatggagttttgcctggagctgcaagctgtggttcttgatgttgggtgaggggtaaggcaagtactcccttggctgctccagctggtgtctcactcggtcatatgcccccaattccacttcaagcccagcacagcaccaggatgtgcccagggattgcagtccttctggcttagactgcctttcaagtttatttagaaccccacagcactttagcctgtggtggtagcagggcttgccagaactcagattttgactgctggagtgggtgattcc

SEQ ID NO: 128384 - DNA, 499 bp, Homo sapiens
ggtcctttcctgaggaaggaacacaggtaaaacaaatgcaagtttcaagctttaacagcagaagggtcattttctatgtttatcaaaaagaacagcctatgggattattgggccagtttcagtccctcgtttctatttatcagttcctcaatcattaggaatccagttgtggctcattctggctgcttcacactgaggaggggtgttgttggcagctccataccatgaatgaccatgtggccactgaggaatcaaaggttaatctaataaaaagttttcttctgaaacacatttctccctatggtctcccacttgcaccaaagacaaatcacaccatcaccaaattacctgcaaaataagcktcagtcccatatacttggcctgattactcacataaagtgcagtaagaatcattgtccacaaaagctctcctaaattggacttgatgaacctctcacaaggctattccagtcaaagccctgggaaaataaccagttct

SEQ ID NO: 128385 - DNA, 553 bp, Homo sapiens
  misc_feature (1)...(553): n = A,T,C or G
nnnnnnnctaaacttgttcctgaatgacttttggggaaacaagtcaattaaggcaggaatcaaaagtttcaaaagtcttttgaaacaaatgaaatagagacacaatataccaaacttctgggattaagcaaaagcagtgttaagaggaatgttatttgcaataaatgtctacattaagaaggcagaaagatctcacaytgacaatccaacatttcacctaaagggactagaaaagctagaacaagctaaaaccaaagctagcaaaaataaatgaaataactaaaattagaagagaacagcatgaaattggacccagcaaaaacatacaaagatttaataaaactaaaaattggttttttgaaggttaaacaagatttataaagtgcttgctaggttaataaagaaaaagagagaagattcaaataagcacaattggaaatgacaaagatgacattacaactgatcccacaggaatacaaaagatcctcagagactacttttaacaactctatgtacactaaaaaaaactagatgaaatggataaatttctagt

SEQ ID NO: 128386 - DNA, 576 bp, Homo sapiens
taggtgtcatacctggagagactgtgtaaacgtgcaaaggcatgaaagtagatgggctgtttgggttgaagtggaaacaggtggaagaggtggagagggtggggagtcacaggtcaggtaacattagagaagaaataatgagccaggcacggtgactcaggcctgtaatctcagcactttgggaggccgaggcaggtggatcacttgaggtcaggagttcaagaccggcctggccaacatggcgaaaccccatctctactaaaaatacaaaaattagctgggtgtggtggtgcacacctgtaatcccagctacttgggaggctgaggcaggagaattgcttgaacccaggaggcagaggttgcagtgagctgagatcgtgccactgcactccagcctgggtgacagagtgagactccctctcaaaaaaaaaaaaragagagagagagagaagagatcatgggcagcccacacagtgtggtatggcctagagggtgagagaatgggagcctggctgcttggatgctaaacctggttccacgacttactagctgtctctccatttcctcatcagcaaa

SEQ ID NO: 128387 - DNA, 595 bp, Homo sapiens
gtcatcttggactggccccatttccaacatcccatggtcacctgtggctggtggctgtggaactgcacagccgaagttagggtgtgtgtggagatggggagcagtgatcagatgaggggagtagatctgttctgcaggaagtgaaatagaatggagggtggagagagatgggtgccaccggaccctggtcagggaggtctctatgagactggaaaggtgagaagccctgtttagacaggaaacagctccaggcagcaggaacagccagtgcaaaggccctgaggtggggctgagtgtgcctgttccaggaagaggaagcccctggagggaacgtgagcagggaagrgaaggacctggagtctcacagtaactgggggtggggccaagtggaaggtgcagggagaccccctggcaggtggtaagagttggcagtacagggatcagcagccgcgggatgaatgtgggagccacacttcgggctcctttcctctcttcactgcttggaaaactcatctgactttatgacattacagtgaatgaggtcggatttacatacaataaaatgcccaattgcaagtgcccaacttgggggatt

SEQ ID NO: 128388 - DNA, 579 bp, Homo sapiens
ctttgtcctgcctttagcaagaatattgttaggtcaatttagcaagaaactcccacatttgatgtctctgcttagtaattttttttaatcyattaaccctgctccctgctccttggctatatatcctcacttgccctttttatattcatagttgagctctctctcttttattgtgagagtgttgaccctattgcaattgtcttgagtcatctcaaccaagctcaggcttccagcagtgaagctcctcattgccctgcccatgatgttatcactggatgtcctgcaggcatcaccagttctgtatgtccattgaccttcattttgcccatagacctacccttcgactagtgtccccatctgtgttagtagccccatccttgcccatggctgtgacaagagatatatttgtgacaagatattcattctcttggtgcttctgtttcctgatttgtaaaacaggaatgacaatgattacaataggctgtgtaataaggaactgcatgatctcattggcctatggcaatgaccagttattttgctcacatctgcagtccagctgggagtcactgacctggaatg

SEQ ID NO: 128389 - DNA, 579 bp, Homo sapiens
ctttgtcctgcctttagcaagaatattgttaggtcaatttagcaagaaactcccacatttgatgtctctgcttagtaattttttttaatccattaaccctgctccctgctccttggctatatatcctcacttgccctttttatattcatagttgagctctctctcttttattgtgagagtgttgaccctattgcaattgtcttgagtcatctcaaccaagctcaggcttccagcagtgaagctcctcattgccctgcccatgatgttatcactggatgtcctgcaggcatcaccagttctgtatgtccattgaccwtcattttgcccatagacctacccttcgactagtgtccccatctgtgttagtagccccatccttgcccatggctgtgacaagagatatatttgtgacaagatattcattctcttggtgcttctgtttcctgatttgtaaaacaggaatgacaatgattacaataggctgtgtaataaggaactgcatgatctcattggcctatggcaatgaccagttattttgctcacatctgcagtccagctgggagtcactgacctggaatg

SEQ ID NO: 128390 - DNA, 575 bp, Homo sapiens
aaataataatgcaaatacaacataccaaaacctatgggatatagcaaaagcagtattaagaggaaaatttatagctataagtgcctacattgaaaaagagaaaaaacttcaaataaacaacctaataatgcatcttaaaaaaatgatagaagagcataccaaatccaaaattattagaagaaaataaataataaaatcaaaggagaaataagtgaaattgaaatgaaaaaacaatacaaaggatcaatgaaataaaaaagttagttttttgaaaaggcaaccaaaattaacaaaattttggccagactaagaacaaaatagagacgatgcaaataaaaaaatcagagttggaaaaggagacattacaactgagactgcaaaaattcaagggatcacaaacacaggcaagcaaaagcaaaatggtcaaatgggatcacacaaagttaaaaaccttatgcgcagcaaaggaaagaaccaaaaaagagaagcaacattccacagactggggagaaaatcactgcaaactacacgtctgaccccagattaataaccasaatatataaggagctcaaaca

SEQ ID NO: 128391 - DNA, 642 bp, Homo sapiens
taattattgttttactgggacaaactgttggtagctgatagtattaatcttcaaaatctcttggatatttttagtcttttctttattacatttaggaaaacttgtctcaaacttagtgtgaaatcctattgggattttttcttttttgaggcagggtcttgctctgttgcccaggctggagtacagtggtacagtctcagctcactgcaacctccacctcctgggttcaagagatcctcccaccccagcctcctgagtagctaggactacaggtgcacatcgccaagcctggctcatttttgtatttttttgtagagacagggtttcaccatgttgcccaggctggtctcgaactcctgggctcaagcattctaccctcctagacctcccaaattgctgggattacaggcatgagccactgggcccagtccctattgggattttgattgagattgcatttaatagtgcaggaacaactgtctattcatatggaaaaatacaatattagatmatgccctaacaccatttgcagtaaattccagatggaaatgaggctattagattgatttgatgattatgaagtcgttgagaacttttgtctgagcagtttctgagcagtgtcttctcagaggtacataagtt

SEQ ID NO: 128392 - DNA, 487 bp, Homo sapiens
ggaagtcccccacacttcaaattgtcctgcctttctggaccaaaccaacgtattgctcgaatctgattgaagtctcatgcctccctaaaatgtataaaaccacgctgcaccccaaccaccctgggcacatgctctcaggacctcctgagggctgtgtcaggggccatggtcactcatatttggctcagattaaatctcttcaaatattttagagtttgactcttttaatcaacaacttccttcaataaacctttgcttactttactaattgtctcttggccaaaktctttctttcaagtaagacaagagccaaaacctccacacttcctagtaacaccagggtgtgtgtgtgtgtgtgtgtgtgtaaacagtaactttatagtatgcaacataaaataaatttctactttaaaaacaaaattctgttacttactggaaagtataggagcagagatccaaaaaggatcgtttccaacaggataaggcc

SEQ ID NO: 128393 - DNA, 487 bp, Homo sapiens
ggaagtcccccacacttcaaattgtcctgcctttctggaccaaaccaacgtattgctcgaatctgattgaagtctcatgcctccctaaaatgtataaaaccacgctgcaccccaaccaccctgggcacatgctctcaggacctcctgagggctgtgtcaggggccatggtcactcatatttggctcagattaaatctcttcaaatattttagagtttgactcttttaatcaacaacttccttcaataaacctttgcttactttactaattgtctcttggccaaattctttctttcaagtaagacaagagccaaaacctccacacttcctagtaacaccagggtgtgtgtrtgtgtgtgtgtgtgtaaacagtaactttatagtatgcaacataaaataaatttctactttaaaaacaaaattctgttacttactggaaagtataggagcagagatccaaaaaggatcgtttccaacaggataaggcc

SEQ ID NO: 128394 - DNA, 596 bp, Homo sapiens
tgattaatgtcgtaagcagttcaggggaatatggaatccacaaataggaatcatattatactagctaatgtgagatgaatttttaatatcctatgtgtatttgaagacagattgaagggatttccggaccatttcaagagttaccaaaggagaatgtatcactgctttcagttccgtacctttgtccttatgggggtaagaagacaagtaataattaataattaaaatttatgtcatttacaatgaaatatttgattatgtaacgcgacgcttgattttatttgcataacagtttattttcatgcagtaaattcagatgtatatatgaagaaacctgaagtgctaggcttgaagtttagagcagtataatcatgctttttgaattaatttccaaattatcttcttcggagcctgtgaaatatgcgtagggccatctttagcrttacagttgggtataagcagaaaaatcagcatggccaacggaactgttctgtttagggatagcccacctgaagaattatattaacattcagggtttctacagaggatgaaatactatatctatccaagatatattgaatttactgggagttatc

SEQ ID NO: 128395 - DNA, 537 bp, Homo sapiens
ctttcttattttctaaatgcttttctgagttttggttgccttggagacaggacagttgtttcaggattagacytgaatgctggagagcatcagttggtgacccctcctccttttgctaggattcatctgcctttctttcctcgacctcctatatatcaagaagatttgttttatatacatatgctcatcacggcatttttatttcgtggacttgaatttatcattcattcattctctaattcattcaacaaatatttggttaccagttattcccagtccacttgactatagataaatgatttaaaacaagttttatgaggggttataataaaaatgcaaccaaaatgctaggagaaaatagtccactctctctaggtgaaatggagattccttttcagaagaggtgacacctatacagcctgtgagcctgaacgcgtggctatttatagagaagggcaggcacccccttctctataaacatataaactctcaacctttcctaatatacctagatatacctgagaaggtgggggattc

SEQ ID NO: 128396 - DNA, 654 bp, Homo sapiens
agtcacatggctaataaaaatattgctattggcactccaaaacaaatatagataattgagagagagagagagcgagcaaataagcaacyatgtagatgtggttgggaactaagatttcactgtcaaatgtaaaatcaaagttaattaactcgcaacatacttaatatttaatcttttacagtcttagatttgtccattgaaaaggtcttgagccaatgaccacccatgagcaatcagtgctgcaaacaccagaatgaggtctttaaatatcattttggaccagcaagaaccagagctccttggtgatgggtaattctagttctgggccaggaaatttacaagttggcagccaacagcaagaaagctgtcaaagacagctgggtttgcataaaagggactcaggagcgaactgcacaaacccccaggggccaaacaaaggaacaatttgagcattaccaaatataataacaactagggatttaaacacagcacatatattaaattcatgagctattagtgattaaaaaaacacacacaaatgaacataggaaaaccccttccttggtcacctttaaggatactaggaactcattaatttgaaaggtgatgaataacctcttcctcaaaacaaccaaatagttgatgtgaaaaagt

SEQ ID NO: 128397 - DNA, 480 bp, Homo sapiens
ctaaccctacatttccagcatctacctactggaactttttcaaaggaaggatttcgacttttgggaagagtcttcctgaaccagtcaatcagaaattgtttgggagattttccagttcagcgttgagcagtacagtcaaaatttcttacatcatgaggttctttttatctttctcttcttcagtagcagctgcagatttttcaaataactgaaaagttcaatgcactttctccttctatggccacaggaggctttttttctttcattttgttgatgtgaaatctttatggctggattaaatactggatcatcttctaaagtttcaatttctctttgaaatttccttattttttcctgagcctccttttggtcttgcctggttttttttttttttttttttkgtttttttttttttttttgttttttttttttttccagtttaaaggcagctgctggctcctttgcatctagcagttttgc

SEQ ID NO: 128398 - DNA, 480 bp, Homo sapiens
ctaaccctacatttccagcatctacctactggaactttttcaaaggaaggatttcgacttttgggaagagtcttcctgaaccagtcaatcagaaattgtttgggagattttccagttcagcgttgagcagtacagtcaaaatttcttacatcatgaggttctttttatctttctcttcttcagtagcagctgcagatttttcaaataactgaaaagttcaatgcactttctccttctatggccacaggaggctttttttctttcattttgttgatgtgaaatctttatggctggattaaatactggatcatcttctaaagtttcaatttctctttgaaatttccttattttttcctgagcctccttttggtcttgcctggttttttttttttttttttttgktttttttttttttttttgttttttttttttttccagtttaaaggcagctgctggctcctttgcatctagcagttttgc

SEQ ID NO: 128399 - DNA, 637 bp, Homo sapiens
gtgttgcagctgtggcagaagatcattcgcggtgcaggccctggtgctgccaccaagagctcttcacatttcctggctcctgtgacaccaccctgcgccctcgattccaagaaaagctttcctgaaagaaggtaacaaacatatcttcttgtctttccttctttatgttttttacttgccatatatgagtctgctttgtgtatcttgcaaattagctattctgctttacttttctccatgtcatggatctgtttttacagcagtacgcactaarcaatgtttccccactggtgtctcctttcatctatatgatattcacatggatctatttctgaaacctctgttctgttccatttatttgtttggggctagagcatcatagtttgataactattgtttagttgcatttcttaaaatctggcaggataagtcccctcctcttttaaacaaaattgatttagatattttgacatttaatctttcataaaatttttactccttgaaccatcttgctgaaatttatcttgacattgcagtggttttataaataatctgggtgcaattatgtttttaaagaagacaaattttgtctttaaccttattcttcttttatctattttggtttagatttttattc

SEQ ID NO: 128400 - DNA, 637 bp, Homo sapiens
gtgttgcagctgtggcagaagatcattcgcggtgcaggccctggtgctgccaccaagagctcttcacatttcctggctcctgtgacaccaccctgcgccctcgattccaagaaaagctttcctgaaagaaggtaacaaacatatcttcttgtctttccttctttatgttttttacttgccatatatgagtctgctttgtgtatcttgcaaattagctattctgctttacttttctccatgtcatggatctgtttttacagcagtacgcactaaacaatgtttccycactggtgtctcctttcatctatatgatattcacatggatctatttctgaaacctctgttctgttccatttatttgtttggggctagagcatcatagtttgataactattgtttagttgcatttcttaaaatctggcaggataagtcccctcctcttttaaacaaaattgatttagatattttgacatttaatctttcataaaatttttactccttgaaccatcttgctgaaatttatcttgacattgcagtggttttataaataatctgggtgcaattatgtttttaaagaagacaaattttgtctttaaccttattcttcttttatctattttggtttagatttttattc

SEQ ID NO: 128401 - DNA, 625 bp, Homo sapiens
ctttcagtatgtgaaataaacaaaatcaagagagtatccaaagtaatgtttgatagtaaccatgtgttactatcaagctatagctctcctttcttttcactaatttttctttagcttctctacctcctatttctatacctctttagtactgagccaaacagaaaaagaaactactattagcgtatctgctattcttccaggccagactgaatgtgtctgtgggagttggcagtgaaggactataaaaaggtgttggaaataactgtcaaaagtcagaaatttgttgaatctgccttcagcatgcaaaattttgaacacatgcaaacatttctctaaaatgatgtttggagwcatgggggattggtggcatctctactagatatgggtcacaaacttcagataattctatagatcacttcaaaaatgttgtctttaactcctctctctggcttcttccctctgtggtgttacattgtagcaatactaaaagcagcaactatttttgccaacatctctgaattgccattatttctattgtctactcaaggtaatgtgcatttctgatgattgacagcaaggagtacatagtctgcaccaaaagaacacctccccattgttgcagaaa

SEQ ID NO: 128402 - DNA, 604 bp, Homo sapiens
gtgggtctctatctgcctagtaagtactggacttgatagtggttctgctgttccttttcattagtacccacaggaatatgaaactgatcaaaaatggtgaagaaaaaaaggaaatgctttgatgtggatgaggctgactgtcaccytacaacactctgatccttcagaacagtttgcgtacaggagtcttgccgtgccctcagcattgtgtctgtatcatggagaattgccaaggcatcaataaaaggaaaggctggttgcagatgtggagtagttgacaaagcagagatgcccatctccatgccagaggtcacacgaccatatggttcatcatcccaactgaacattactgaaaattaggctggtaaaacatgtgcaaactgggacatatggtcaccccagtcagagaaatctttcttctaagtggccactcaataacaattcatgcttgggcaatgccgccctgagaaaagagcaactggttctgccctttcattctgctccatgatcccagctacaacatcatgaaatatctaccccataccatgtgtttataccatgctacacttcactggagaaaatcaaggaagaatatgcctggtcc

SEQ ID NO: 128403 - DNA, 546 bp, Homo sapiens
gaattcgcttaagtggttgttggcaagaaccattttatcacaggctgttagactgatggcttcagttcctcaccagctgttggcaagaggcttcccttgagtccttgccatatgggtccttccatagggcagctgacaatatgacagccagcttcatgagagcaagcacgcaagagggccagagagagagtgtgagcaaggcagaagtcacatccttttgtaatctaatctcagaagtgatatcccatcaattttgtcatgctctatttgttagaagaagttgctgggtccagttcacacttaaggagagaagattacagaaaggcatgaatatcaggaggcagaaatcttagggagccatcatagaagctgtctagtacaaaggatataacaaacaatgytgccttacagattttcgtatatatattgtggcatatgagcatatcaggttatgcacctaggcatggagttcctaggtcttagggcatgtgaatcttcaagtttccatgacagtgccaaacttctaccaagtggttataccaattc

SEQ ID NO: 128404 - DNA, 465 bp, Homo sapiens
tctgcccccagcatatcctctttagcctcatcttccaccagctcccaccttgagcccacaaatctaccttctgagccactgcagccccaggtagctccccaggcctaggctctctcttctcctttgtccatgctrtttggcagccttggccaggaatgcctactgctctccctagctaattcctgatcattaatactccagatctgaatcccctatgtgcagaggcccctcaggctgggttttcaaattctcctctgtgctccatagcaccctgcacagcctctaacagcatttatcacaccctcttatggctgctggttacttggccatctccctgctgggatggctccctgaaggcagtgattgagttaatccttgatgtatcccccatcagctaacattgttcctaggagatggtgtccaataagcattggatggtaggctgaaccagagtgataaaaatat

SEQ ID NO: 128405 - DNA, 626 bp, Homo sapiens
gacatctgcccagcaactgcctgttcaaacttggactgacctcaaacttgttattaatccttacagccaaggataattgtttcaaaacaactcatgtaactctcctcatttttcctttaaaaactcttgtcttcctttacctccctgaatgtacccattatattcccactgcaatgctcaatcccaaataaatatcattttcttttagacagccactttgttatttgggctttacagtagtatatactaaagccaaacaagctcctgccatgttttccaacttatctcccccactaagcatatctccaatagaaatgtagtcatatgggcaacaaaatacatgcacgaacatttttattgaagccgtctttgtagtagctaaagcctggaaacaactcatatgcccatataatagactagaaaaataaatagtgctatgtcatataatgaaataacatacaacaatgaaaatgaacaaattgcttctcattacaccaccacctatgaatctacaaacacaatgttgaatgaaagaaacctgatacaaaccaaaaagacaaaacyaatctacgatgatggagataaaaacagtagttacttttggggaaaagggatagtgacttgga

SEQ ID NO: 128406 - DNA, 615 bp, Homo sapiens
cattaaaatagtattatatacatataccttggagtttttcttaaatcactattaaaatggcaatttgattcttagaaaaatactgagctatgatgatttaaaaaaagaaagaaatatataagaaggtgtagcaataaatgaattcaggaagaaaaaagatgagagaaaagacattagaaaggggaaaaaagtaccaaaatgatgtctgcgtataytcttttcttagcagtccccagtgactcattttgattcaccaagttctttaattttcctttcttttaaagttggaatagtaatatttctcacatcctatatttatagcatcagaaacatcagtagacttttgtaaatgcactaaaatagcaataaaatgatgacttgaagcagttaatctccttctaaattttgacacatttaaagaggtgataccatcttcatgaatttggtagattatagaatcaataaccactttgagtgattcaattgcttttctaaacaataatgaagttaaaaggaagaagaaaatttccacacataattgctttcttaggacaattgaaaaaatcatacaaaagcatataagtaaattctttgtgactgtgcatgaaggacata

SEQ ID NO: 128407 - DNA, 531 bp, Homo sapiens
agaatttgcatgaaatctgtaaatagctttggaatagtattgccattttaacagtattaattcttccaatctatgagtatgaaacattttctactgttttgtgtatcctcttcaatttctttcatcagagatttatagttttccttctatacatcattcacttctttggttagattgcttcttaggtatttcatatttttgtagctattataaataaaatagtttccatgatttagattttagattatttgctgttggcatatgtaaatgctactgattttcgcatgttgattttctgtcatgcaaatttactgaattggttatttgttttaacaggtttttttgctggactttttagyggtttccaggtataaaatcatgccatatgtgaacaaggataatttgacttcctccttttaaagttagatgtcctttattcctttctcttgcataactgctctgaccaggatttcgtgttatgtcaaataaaagtggtgaaagtggccattgttgccttgtttcaatccttac

SEQ ID NO: 128408 - DNA, 566 bp, Homo sapiens
acatttcttctatttgtggtaagatatatttgttttcagatggataaaaggttcttttaaatatttaagtttagaaaatgactgtacttctctggaaaaacttgtgaattagtgatgtttggaaaatactggctggttcatgctcattaaatcagaacgttttattagaggactgtgttctccgatcaagtcttcataagcaaaatgagtaaatagtatatcaaatcctgcctcctcagtataacragtgttagaatttatatatatatgtaagagtttataactgattatacttcccccaggagtctctacgacccactttcaatgagtccatgaagttaaactattttcgtaatactattattaagatgttacttgctgttttcccagtatgttgttgacatttgcactgctgatgcaaaagcaatggggggtaaaatgccggcatcttaggatgagtccaggcagtggccctgggctgtgcgagtggtcattgtatacttcactacactccagagaagtgaaaagccagggttccctataaatgaccttgataaagcagtaca

SEQ ID NO: 128409 - DNA, 593 bp, Homo sapiens
tcgaactcctgggctcaagtgatctgcctgcctcagtctcccaaagtgctgggattatgggcgtgagccactgtgcccagcmtgcaaccacattttcaatgtctttgttttttaaaaggcattccacgatgaatcgttcatcacggaatacagagaattattttctaatgtacaaaactaccttgaaaatatgtgagagttggggtttttatgttcaaagaagtatctttcatattaaagctttaaacaggcgattgtctctctgatatgtggtaattaatttctgttaatttcttacatttagttctgtttaatgttggtttcagttttaattgtgtttaaggcatatctgcactgtggaggtgagacagtgggctcagggcctggaagacacttagaaagcataagaaccataaccttcagcttctcacgctcccttcctgtatggctgatatagtttggccccgtgtccccacccaaatctcatctagaattgtaattcccataatccccatgtgtggagggcggggtctggtaggaggtgattggatcatgggggtggttttccccatgctgttcttatgacaggagtg

SEQ ID NO: 128410 - DNA, 619 bp, Homo sapiens
ttgctttattcgctgtataacctccagacaatttctgagagtttaaatggatggtttttaaaataattttctccagttatggtagtttcactggagagaagttcttcaaatcccctcacactgcatctccagaagtagaacctctcaagcaagttcctgaacttagttttgctgggtatgtaagtggaggttgatatttacttcctgtcagtgtgcaaagatattcctgtgctctgtctttcattatttcttttcagaagtttaatcctagtctaattgcttatagattacctgtctctatcaattatcttcctggttgtttttaagactttcccttcttcctaggcactgtgcattttactgcaatgattttagctattgattttctttatatttactctttgcaatttgttgaactttctgaatctaattgatgtatttcttaaaatgtgggagattcttagtgtatgtcttctcaatattgctttctcctaatctttttaattttttttgcaacacsaattagacatatattagcttctctcagtgtatcacaaacaccattttcccctttcagccttccatgttcattaatatttcttttatattttctacgtct

SEQ ID NO: 128411 - DNA, 619 bp, Homo sapiens
ttgctttattcgctgtataacctccagacaatttctgagagtttaaatggatggtttttaaaataattttctccagttatggtagtttcactggagagaagttcttcaaatcccctcacactgcatctccagaagtagaacctctcaagcaagttcctgaacttagttttgctgggtatgtaagtggaggttgatatttacttcctgtcagtgtgcaaagatattcctgtgctctgtctttcattatttcttttcagaagtttaatcctagtctaattgcttatagattacctgtctctatcaattatcttcctggttgtttttaagactttcccttcttcctaggcactgtgcattttactgcaatgattttagctattgattttctttatatttactctttgcaatttgttgaactttctgaatctaattgatgtatttcttaaaatgtgggagattcttagtgtatgtcttctcaatattgctttctcctaatctttttaattttttttgcaacaccaattagacatatattagcttctctyagtgtatcacaaacaccattttcccctttcagccttccatgttcattaatatttcttttatattttctacgtct

SEQ ID NO: 128412 - DNA, 465 bp, Homo sapiens
agaattctctctcatccactgtaytgtaggcttctcaaggcccagtatcacatttgattcagttcatagcctcccacacagttactgcctattgaagtgaaaagtcaaatatctccaaactaggaaggaagccctagtaggaagatagaaactactaaatgaattgcaatgatgaagtttgctagtagaacactgtattggtccattttcacactgcagataaagacatacctgagactgggcaatttacaaaagaaagaagtttattaggcttacagtgccacatgccaccacagtcatggtggaaggcaaaaggcatgtctcacatgacagcaaacaagagaagagagcttgtgcagggaaactcccatttttaaaaccatcagatcttgtgagacttactcactatcataagaacagcatgggaaagacccacccccatgattcaattacctcactccaggt

SEQ ID NO: 128413 - DNA, 497 bp, Homo sapiens
tcaccaacagacatcttgaaataaaaaaattattattgttgttttaagtcacttagttttggagtagttttagcagcaacagttaactaacataggtcaatataaaaatcaatgcattttataacacattcagaaacaaaaaataggattttttttaagaagtagtgctgtgtctccatatggaaaaataaaaattattatctcccaccatacacaaacaacaattccaggtagattatagatctacatgtgaaagacaaaagaataaatattctagaagacaaaatagaaaaatgtcttcaagaccttgacacaggggaaaaggtctcaataaaacacacacacacacacasacacacacacacacacacacacacacagagagagagagagagagaaagagagagaggagtgggatggaggaagagagaaggaagagaataaagttgactgcagtcaaattgaaaacttctgtttatcaaaagataccattataa

SEQ ID NO: 128414 - DNA, 598 bp, Homo sapiens
ttttattcactaccacgagaacagtatgggggaaactgcccccataattcaattatctcccacttggtccctcccacaacatgagggaattatgggagctataattcaagatgagatttgggtggggacacagcaaaaccatattaggtacttagattattgatcttctttgtccttttctacatatttcaagctctgctttcttctaagttctgctttacctgcattccatgaattggaaaatcactgccttagactcactcccaagttacaccttaggccagtgattctcaactaggagtgattttgtccccttcccctgccaggaacatttggcaatatctggaggcatttttggttgtcayacttgaaagaagggagctactggcgtctagtgagtagaggctaggtgtgctgccctaaattctataatgcacaggacagctttttacaaaaaagaattatgtggccccaaatgtcaatgttgctgaggctgagaagccttgtgggctagacctacattgccagtagttatacacccccttgccatagtgccctccacatgacttgttcctcgttctttcaaattccagagatg

SEQ ID NO: 128415 - DNA, 632 bp, Homo sapiens
taaatacaaagacctgctgtctcttttcaaattttggggttacacgaattattctgagcctcctctgtcttctttcatagctcgttggctcatgatttgatcttctacactgctgtgggctctgtttgtcccaagcagataagaaggaaaggtatttcttctgtttgccaagtgtattattctgttctcatgctgctatgaaaaaatacctgagactgggtaatttacaaagaaagaggtttaattgactcacagtayagcatggctggggaggccacaggaaacttacaatcatggcagaaggggaagcaaacacatccttcttcacatggctgcagcaaggagaagtgaagagttaagtcagggaaaagccccttataaaaccatcagatctcatgagaactcactcactatcacgagaacagtatggaggtagctcctctcatgatttaattacctcccatcgagttcctcccatgacttatggggattatgggaactacaattcaagatgagatttgggtgaagacacagccaaaccatatcaccaagactatgcagcactcacagacagggcatcttattgctagtaaacctggataatggacaaagaaggaaagggagagggaaag

SEQ ID NO: 128416 - DNA, 637 bp, Homo sapiens
taattcgtactgatggtggtgttagtttccctttacatttcttacttttcagagataacttttcaaaacactataattgcctatttattcttgggatggacatcagaatattttttaaattgccctctctaacggaaaaatcctattgatactttaattggaattttgtcaaaatctacagttagtatcagaattgaactttgaaaatagaattaggttttcctatccaggaataatattcttctttccattcattgcagggcttttttggtatggttttgtggttttatagtttcttcatgtggatgttttgttcaaattatttcttaagtattatattttgttgctattataaattaaatccttttttaaatctagtttctttcttttaaatactacagtttaattacacatgtaataattaaagacatcccctgggtggggtgaaggaccatcrttacatgtaagggtacacctttgactctccgttgttaatcctagcaccaacaccagaggtatgtgtagtaatcacacttggtcttagccaaaaggccaagaagcgtattgagtaatcaaatgaccatacagattaccatgcaggtatcatcatgctgtttcctatggatttatattgtat

SEQ ID NO: 128417 - DNA, 643 bp, Homo sapiens
tatttattataatttttattatgtaaagatgacagtaggatatgtagaatgtatgactaataaatcactagaaaagaagaaaaacctaataaaagtcaatgcagcaaaatatatgattatacataagggaaaagacaaraagtaaaaaaatagaaagcatataataaaatgatagtagtcacatctgacatattcaaaatgtccctattataagacaagtatccctaggctgggctctaaacacaaaattcaaatattactatttacatacaataagtatacctaaaactaagtgactagacagttccaaataaggaatgagcttggccattttataaaagtgtgtgtaatatacgaagagagaagatacactttccatgagtaatgaaaattgacaagtcattaagagaactatcgatagtctataaaaatatcttggatcctcagagaggttatcgaaaggagtatgctcctctcaaaaaagaagaaaaaccgagagaaaatctaaagcattgggagaatttcttgtaaataaagtgtcttgtacttttttggagaacagagctatgcagcatcactaacatatgagagatgataaaatatactattataattaaatatattactgcttaggatgtggcaa

SEQ ID NO: 128418 - DNA, 619 bp, Homo sapiens
acaaacttatttaatatcatggcaaggtagccttcataaagaaatgaaaacaccaagaaatggttaaacctgagcatgtttatgaggagtgaaaaactgggaaaatttgatggaacaaaccggtatgagcctgtaaactggggaaaacttagcaaggcctattcattcagattcctctccatatccctctgccttgggaaataagggtgttcctttygcctgggtatagggagggcacctctcacataagggtcttttgaccagcttcagggaaagatcagagagtcgtaagtgcacctgccattgctcaaataccttcagcttaaaatattcaatatgccaagttgccatatttgggggtagagtgtcctgagccctatcaatttttctcatgtacttttacagtaggttgtcgtatagtactctcttttcacatgtgagtttctgccttctggttcaatgttttcctgtggtcatttctaatgtccttaaaacatttttatatttgatcctaatcttacaagtaaaaatagttctaataagaaaataatgatgttatatttatatagttcaaaattatttgaatttatagcatctcatttaatcatcacaacagcca

SEQ ID NO: 128419 - DNA, 619 bp, Homo sapiens
acaaacttatttaatatcatggcaaggtagccttcataaagaaatgaaaacaccaagaaatggttaaacctgagcatgtttatgaggagtgaaaaactgggaaaatttgatggaacaaaccggtatgagcctgtaaactggggaaaacttagcaaggcctattcattcagattcctctccatatccctctgccttgggaaataagggtgttcctttcgcctgggtatagggagggcacctctcacataagggtcttttgaccagcttcagggaaagatcagagagtcrtaagtgcacctgccattgctcaaataccttcagcttaaaatattcaatatgccaagttgccatatttgggggtagagtgtcctgagccctatcaatttttctcatgtacttttacagtaggttgtcgtatagtactctcttttcacatgtgagtttctgccttctggttcaatgttttcctgtggtcatttctaatgtccttaaaacatttttatatttgatcctaatcttacaagtaaaaatagttctaataagaaaataatgatgttatatttatatagttcaaaattatttgaatttatagcatctcatttaatcatcacaacagcca

SEQ ID NO: 128420 - DNA, 619 bp, Homo sapiens
acaaacttatttaatatcatggcaaggtagccttcataaagaaatgaaaacaccaagaaatggttaaacctgagcatgtttatgaggagtgaaaaactgggaaaatttgatggaacaaaccggtatgagcctgtaaactggggaaaacttagcaaggcctattcattcagattcctctccatatccctctgccttgggaaataagggtgttcctttcgcctgggtatagggagggcacctctcacataagggtcttttgaccagcttcagggaaagatcagagagtcgtaagtgcacctgccattgctcaaataccttcagcttaaaatattcaatatgccaagttgccatatttgggggtagagtgtcctgagccctatcaatttttctcatgtacttttacagtaggttgtcrtatagtactctcttttcacatgtgagtttctgccttctggttcaatgttttcctgtggtcatttctaatgtccttaaaacatttttatatttgatcctaatcttacaagtaaaaatagttctaataagaaaataatgatgttatatttatatagttcaaaattatttgaatttatagcatctcatttaatcatcacaacagcca

SEQ ID NO: 128421 - DNA, 546 bp, Homo sapiens
attgcttaacccgagaaggggagtttgcagtgagccaagatcacgccactgcactccagcctgggtgacagagcaagactccatctcaaaaaaaaaaagatgtcaggagtaggcatatgtgagaacagattaaagataatgaaaatgttttacatttgcatattacyttgtaattttatatatcatgttgactgcatttagttatttgaccagtatgggccgtcactcaccccagttgaagtttttgttatattttgtgtatggttgtttaaggtgtttttttttttttaaatcaaaacaatatgatagcacttgaaagcagaatatgccactttggcataaggattattttgagctgaaggcaattgagaagtagatacaagaaaaactctctgctctgctcttatttacctaaaaaagcaggacctaaatttgtaaaggcatcctcctttcccctctaccaagaaggacaaaggtttctcaatggagatgacttaggttcttagcctgaaaatcagtaccagaggaatttacataacaaacttt

SEQ ID NO: 128422 - DNA, 556 bp, Homo sapiens
cctactcattaaagttctcccaaatgatacatcctaaactttaagttccttaagtggctgtaactttccattaattaaaaaggaacaaagtttcctttttaaaaaatttctaggaaatggggccttgaaattcatcttctctgaaaaaaatggtcaattcctttgtgactaattatctaaggtatttttctctttycttttcttctctgtctcccattattggagtggaagaaagagtgtgagtagagtcgtcctctcctttatttctaggcttctccaggagtttatatggatcagtgaagactagtaaggattcaaaaaatgtgaagacataacgagtgttgaaaccattattatttatatcttttttgctactgctgttaccttgctaatttccatttcacatgttaactttccattttcagtcagtggttttcacgtgctcaaaagtcttagtttctttcaatgctcagtgttaaatatcagataagtaaaaaaagttcttaaatttacatggaggtaaaaataaattagtaaagaacggccgggtgccgtg

SEQ ID NO: 128423 - DNA, 556 bp, Homo sapiens
cctactcattaaagttctcccaaatgatacatcctaaactttaagttccttaagtggctgtaactttccattaattaaaaaggaacaaagtttcctttttaaaaaatttctaggaaatggggccttgaaattcatcttctctgaaaaaaatggtcaattcctttgtgactaattatctaaggtatttttctctttccttttcttctctgtctcccattattggagtggaagaaagagtgtgagtagagtcgtcctctcctttatttctaggcttctccaggagtttatatggatcagtgaagactagtaaggattcaaaaaatgtgaagacataacgagtgttgaaaccattattatttatatcttttttgctactgctgttaccttgctaatttccatttcacatgttaactttccattttcagtcagtggttttcacgtgctcaaaagtcttagtttctttcaatgctcagtgttaaatatcagataagtaaaaaaagttcttaaatttacatggaggtaaaaataaawtagtaaagaacggccgggtgccgtg

SEQ ID NO: 128424 - DNA, 662 bp, Homo sapiens
tatggttctttccacacagttaattgaaaatgctcagttacgatttcatacagatgaacaactgaagacaaaaacaacaaagggggagaaagagggattatgggacagcccatatacaattgaatctagcattattaactttaaattttttgagtctgcctaaaggccagatgttatcagcagctgaacagcatttacagaaaccggctgcaaagacagaagcagaacaactggtttggtggagagatccgataacaaaaagttgggaaataggtaaaataataacttggggtagaggttatgtttgtgtttctccaggccaaaatcaataaccaatttggataccatcaagacayctgaaaccttatcatgagccagatgctgaggaagagattccaggaggatcctgaggaccccctggttgcagccacgtcgaggctgacactgaggaggaccccaactgtcatgagcaacacccgtcgaacacagccatccacctggggacaaatcaagaagctgtcacagatgatggaagaaaacctgaggaaagcgggacaaccaatcacaatgagtaatttggtgatctatcacagtgatgatcaccattgccatgagtattccttcaacaagggctgacacagagaacaattatacttattggg

SEQ ID NO: 128425 - DNA, 609 bp, Homo sapiens
ttactaccaagtaaattagtattttttacatattgattttaaaataaaatgtgtgataagactaagtgttggcaggttatgtagccacagacatcattacatayggccagagcgagtctaccctggtaatctccaccttagacaaataattataatctagcattgcaaaaaagaaataacacatatctaccagagatatacacaacaatttcataccagcattgttagtaattagaagaattataagcaatctatgttgcaacagtaggaaaatggataaatgagctgtagtatatgtataaaagagtcaaaacagagaaaatgaatgaactagaactacatctttaacatatatgaatacttttcaaaagaaaacaatctgcttgagattatatacaatattttcctatttatacaaggtttaaaacagagaaacaatattataaatgtgcagtgatacctgtgttgcaggacttttcctcagtcagctaaaggcatctttgtccgtcccacagccacaaaaatttaggcttgcagatggtttgaagggtgagtgaagcagggttttattgggtgaaaagggaaaaacggggaaacagggatgctctg

SEQ ID NO: 128426 - DNA, 572 bp, Homo sapiens
ctccctcacaaacaaacaaacaaacaaaaccaaaagaaaacaaaagatcactagttgccaggggtcaaggtggaggtggcggatgaagaagtaggtctcacacaggatttttagggcagtgaaactactctgtatgatactataatggtggatacgtgtcattatacacttatrcacttatccaactccatctcttatggagatactgttaacagcaaaggctattcatatgtggagtcaggtgatatgtgggaaatatttatccttcctctaaattttgctgtaaacctaaactgttctaaacaccaaagtcaattaaatagtacaaaaatcttaggcaaaaacaataaaataaagactatactaacttccagattttcttcattgctttgatgaaaatatgttttcatgtatttgtgaatttctgctcctctcttgtgtgcttggcaggctttcaggtactagagacacagcagggagtagaacaaggactccccatggcatttaattctagtccagcaaacaaagaaaaactgaacaaagaaatgggcacaaagtttactcttagtaat

SEQ ID NO: 128427 - DNA, 572 bp, Homo sapiens
ctccctcacaaacaaacaaacaaacaaaaccaaaagaaaacaaaagatcactagttgccaggggtcaaggtggaggtggcggatgaagaagtaggtctcacacaggatttttagggcagtgaaactactctgtatgatactataatggtggatacgtgtcattatacacttatgcacttatccaactccatctcttatggagatactgttaacagcaaaggctattcatatgtggagtcaggtgatatgtgggaaatatttatccttcctctaaattttgctgtaaacctaaactgttctaaacaccaaagtcaattaaatagtacaaaaatcttaggcaaaaacaataaaataaagactatactaacttccagattttcttcattgctttgatsaaaatatgttttcatgtatttgtgaatttctgctcctctcttgtgtgcttggcaggctttcaggtactagagacacagcagggagtagaacaaggactccccatggcatttaattctagtccagcaaacaaagaaaaactgaacaaagaaatgggcacaaagtttactcttagtaat

SEQ ID NO: 128428 - DNA, 609 bp, Homo sapiens
ttactaccaagtaaattagtattttttacatattgattttaaaataaaatgtgtgataagactaagtgttggcaggttatgtagccacagacatcattacatacggccagagcgagtctaccctggtaatctccaccttagacaaataattataatctagcattgcaaaaaagaaataacacatatctaccagagatatacacaacaatttcataccagcattgttagtaattagaagaattataagcaatctatgttgcaacagtaggaaaatggataaatgagctgtagtayatgtataaaagagtcaaaacagagaaaatgaatgaactagaactacatctttaacatatatgaatacttttcaaaagaaaacaatctgcttgagattatatacaatattttcctatttatacaaggtttaaaacagagaaacaatattataaatgtgcagtgatacctgtgttgcaggacttttcctcagtcagctaaaggcatctttgtccgtcccacagccacaaaaatttaggcttgcagatggtttgaagggtgagtgaagcagggttttattgggtgaaaagggaaaaacggggaaacagggatgctctg

SEQ ID NO: 128429 - DNA, 620 bp, Homo sapiens
ggaggttctggctgtatgctgaaaaagagagaaaacatcagtgacgaggtggagtgttgagggctaagtccaaccttaagaaacatcacataaatctgggtcagatgagggctttgtaggaattgaatatcaccatgcaaaaatttttcagataaagagggcaccggaaatgtgatggggctctgccaatggagaacagyatagaagatgtcaacagtatatatacgtcaatttaaaatgactgttactcagctaatggcttcctatatcgtatgcctctatgacaaatttgtggaggctacgagtatgaaatgactcacctcctaaggatgaagtaccatttctaatgaactcttgatgactgatcatcgtaaaatcgatgctgcatgacaatccaacttccttcttgcaaaggttttggagggtcatttcttaaactttaccccttatgccgaaagaaagttaaacttttggtttaacttttaaaatctatgtttttaaaaaaaatacgatttaaatacagaagccactttggaaagcatttgcttaattaaattaggctgtaggccaaagacaaaataagggtcaaagatctcagactggaaaagcagcagagcatg

SEQ ID NO: 128430 - DNA, 620 bp, Homo sapiens
ggaggttctggctgtatgctgaaaaagagagaaaacatcagtgacgaggtggagtgttgagggctaagtccaaccttaagaaacatcacataaatctgggtcagatgagggctttgtaggaattgaatatcaccatgcaaaaatttttcagataaagagggcaccggaaatgtgatggggctctgccaatggagaacagcrtagaagatgtcaacagtatatatacgtcaatttaaaatgactgttactcagctaatggcttcctatatcgtatgcctctatgacaaatttgtggaggctacgagtatgaaatgactcacctcctaaggatgaagtaccatttctaatgaactcttgatgactgatcatcgtaaaatcgatgctgcatgacaatccaacttccttcttgcaaaggttttggagggtcatttcttaaactttaccccttatgccgaaagaaagttaaacttttggtttaacttttaaaatctatgtttttaaaaaaaatacgatttaaatacagaagccactttggaaagcatttgcttaattaaattaggctgtaggccaaagacaaaataagggtcaaagatctcagactggaaaagcagcagagcatg

SEQ ID NO: 128431 - DNA, 620 bp, Homo sapiens
ggaggttctggctgtatgctgaaaaagagagaaaacatcagtgacgaggtggagtgttgagggctaagtccaaccttaagaaacatcacataaatctgggtcagatgagggctttgtaggaattgaatatcaccatgcaaaaatttttcagataaagagggcaccggaaatgtgatggggctctgccaatggagaacagcatagaagatgtcaacagtatatatacgtcaatttaaaatgactgttactcagctaatggcttcctatatcgtatgcctctatgacaaatttgtggaggctacgagtatgaaatgactcacctcctaaggatgaagtaccatttctaatgaacycttgatgactgatcatcgtaaaatcgatgctgcatgacaatccaacttccttcttgcaaaggttttggagggtcatttcttaaactttaccccttatgccgaaagaaagttaaacttttggtttaacttttaaaatctatgtttttaaaaaaaatacgatttaaatacagaagccactttggaaagcatttgcttaattaaattaggctgtaggccaaagacaaaataagggtcaaagatctcagactggaaaagcagcagagcatg

SEQ ID NO: 128432 - DNA, 620 bp, Homo sapiens
ggaggttctggctgtatgctgaaaaagagagaaaacatcagtgacgaggtggagtgttgagggctaagtccaaccttaagaaacatcacataaatctgggtcagatgagggctttgtaggaattgaatatcaccatgcaaaaatttttcagataaagagggcaccggaaatgtgatggggctctgccaatggagaacagcatagaagatgtcaacagtatatatacgtcaatttaaaatgactgttactcagctaatggcttcctatatcgtatgcctctatgacaaatttgtggaggctacgagtatgaaatgactcacctcctaaggatgaagtaccatttctaatgaactcttgatgactgatcatcgtaaaatcgatgctgcatgacaatccaacttccttcttgcaaaggttttggagggtcatttcttaaactttaccccttatgccgaaagaaagttaaacttttggtttaacttttaaaatctatgtttttwaaaaaaatacgatttaaatacagaagccactttggaaagcatttgcttaattaaattaggctgtaggccaaagacaaaataagggtcaaagatctcagactggaaaagcagcagagcatg

SEQ ID NO: 128433 - DNA, 537 bp, Homo sapiens
tccttctccgctggataattgcaaacaacctaaaagcatactgcagcatctttcatctcaaaaacagataagsaaacacaaactccatttcctccagcctttgtcctatctgttttgccccaatccctgcaacaaaactccatgaaagagttagtgttatggcatttcactattctaactcgtctcctttctcgattgcattccagttaattttcctctttctctttctgtcaaactgttcttttcatcatcaccctaacacctatgttgctaaatccaataattaatttttctctttgtgacttgatttctcgtcatgatgcatgtaactagtacctctcaggcccccttgaaagactctttttcactcggcttccaggacatcacagtcttctatttttctcctactgatctggttttgcaggtttctcctcatctcttctaaatgctcaagtaccatagtgttgagtccatgaatttctgattgttttcctttatccatgctcactctcatggtgaccacatccaatctaattg

SEQ ID NO: 128434 - DNA, 601 bp, Homo sapiens
gcactgcaggaatgtggaggggatcccagtatgtggaaaggatctacttcaattccatacctcagtccttcacctccagacatgcagggtgacagaatcaasacatgacgctatttgtaaattaaatattggcgtatcacaacaccacggtcaagctctcagcatcaaaaaatcagctttgaaagagaaaaggcaaattcacacacagtggccctggtatctggcctgtgctgatgtgtttagggaacaacattttggctccctgaaatattttaacacacgcatatatttaaataaattataataaggcaaatgtcatcatgccaaagcatcattatgctaagacaataggttaatttatttagtgaatagagtctaaatggcatttggtgcaaagtggatccagaatattgataaagtacagttctcaagcaaaaaggtatttgtttgtgcttgtcaacactttatgtaactcattaatgaaagaaccagagggtagattaaggggaatatccaacagcatttgaaaaaattgagatctatatagtcatttgtgtaagggatgtgtaaacaaaattgctaaattagaagactggttgac

SEQ ID NO: 128435 - DNA, 601 bp, Homo sapiens
gcactgcaggaatgtggaggggatcccagtatgtggaaaggatctacttcaattccatacctcagtccttcacctccagacatgcagggtgacagaatcaacacatracgctatttgtaaattaaatattggcgtatcacaacaccacggtcaagctctcagcatcaaaaaatcagctttgaaagagaaaaggcaaattcacacacagtggccctggtatctggcctgtgctgatgtgtttagggaacaacattttggctccctgaaatattttaacacacgcatatatttaaataaattataataaggcaaatgtcatcatgccaaagcatcattatgctaagacaataggttaatttatttagtgaatagagtctaaatggcatttggtgcaaagtggatccagaatattgataaagtacagttctcaagcaaaaaggtatttgtttgtgcttgtcaacactttatgtaactcattaatgaaagaaccagagggtagattaaggggaatatccaacagcatttgaaaaaattgagatctatatagtcatttgtgtaagggatgtgtaaacaaaattgctaaattagaagactggttgac

SEQ ID NO: 128436 - DNA, 601 bp, Homo sapiens
gcactgcaggaatgtggaggggatcccagtatgtggaaaggatctacttcaattccatacctcagtccttcacctccagacatgcagggtgacagaatcaacacatgacgctatttgtaaattaaatattggcgtatcacaacaccacggtcaagctctcagcatcaaaaaatcagctttgaaagagaaaaggcaaattcacacacagtggccctggtayctggcctgtgctgatgtgtttagggaacaacattttggctccctgaaatattttaacacacgcatatatttaaataaattataataaggcaaatgtcatcatgccaaagcatcattatgctaagacaataggttaatttatttagtgaatagagtctaaatggcatttggtgcaaagtggatccagaatattgataaagtacagttctcaagcaaaaaggtatttgtttgtgcttgtcaacactttatgtaactcattaatgaaagaaccagagggtagattaaggggaatatccaacagcatttgaaaaaattgagatctatatagtcatttgtgtaagggatgtgtaaacaaaattgctaaattagaagactggttgac

SEQ ID NO: 128437 - DNA, 601 bp, Homo sapiens
gcactgcaggaatgtggaggggatcccagtatgtggaaaggatctacttcaattccatacctcagtccttcacctccagacatgcagggtgacagaatcaacacatgacgctatttgtaaattaaatattggcgtatcacaacaccacggtcaagctctcagcatcaaaaaatcagctttgaaagagaaaaggcaaattcacacacagtggccctggtatctggcctgtgctgatgtgtttagggaacaacattttggctccctgaaatattttaacacacgcatatatttaaataaattataataaggcaaatgtcatcatgccaaagcatcattatgctaagacaataggttaatttatttagtgaatagagtctaaatggcatttggtgcaaagtggatccagaatattgataaagtacagttctcaagcaaaaaggtatttgtttgtgcttgtcaacactttatgtaactcattaatgaaagaaccagagggtagattaaggggaatatccaacagcatttgaaaaaaytgagatctatatagtcatttgtgtaagggatgtgtaaacaaaattgctaaattagaagactggttgac

SEQ ID NO: 128438 - DNA, 607 bp, Homo sapiens
ggttggcattctagtgtgagagataggcagtaaataaggaaatataactgaaggaagtgatgagtgctaagaagaaaaatgaaacaggtaaactaatgtgaagctacccacccaaatggaggaaatgttattttacatggtgtcctcatggaagaccactctgaggaaacaatatataaacagagactgaattaaaataaaagaataaactagataatgatctagttcaggggaagaaagttcaggcagtgagaagagccagcccaaaagtcctaagcaaggaagtgttaaaggaaccaacagaaagcccacaaggctgggcaagagctcgcatgtggcataagatgtctggaatttaggaaaggacaactttatgtagaatttataasctatgtgcacagtttggatttttttccccaaatatgctggcaaacctttggagagttttgaaaaagcaaatgatgtagtttgatttacatttttgaaagatcgctctgctgctgtgtatgaaaaagagtatagaagagaacagaagaatggatgcagatgagaatgttattaggtaagaataatggtagattaattcaaattttggctatgaagttaa

SEQ ID NO: 128439 - DNA, 607 bp, Homo sapiens
ggttggcattctagtgtgagagataggcagtaaataaggaaatataactgaaggaagtgatgagtgctaagaagaaaaatgaaacaggtaaactaatgtgaagctacccacccaaatggaggaaatgttattttacatggtgtcctcatggaagaccactctgaggaaacaatatataaacagagactgaattaaaataaaagaataaactagataatgatctagttcaggggaagaaagttcaggcagtgagaagagccagcccaaaagtcctaagcaaggaagtgttaaaggaaccaacagaaagcccacaaggctgggcaagagctcgcatgtggcataagatgtctggaatttaggaaaggacaactttatgtagaatttataacctaygtgcacagtttggatttttttccccaaatatgctggcaaacctttggagagttttgaaaaagcaaatgatgtagtttgatttacatttttgaaagatcgctctgctgctgtgtatgaaaaagagtatagaagagaacagaagaatggatgcagatgagaatgttattaggtaagaataatggtagattaattcaaattttggctatgaagttaa

SEQ ID NO: 128440 - DNA, 607 bp, Homo sapiens
ggttggcattctagtgtgagagataggcagtaaataaggaaatataactgaaggaagtgatgagtgctaagaagaaaaatgaaacaggtaaactaatgtgaagctacccacccaaatggaggaaatgttattttacatggtgtcctcatggaagaccactctgaggaaacaatatataaacagagactgaattaaaataaaagaataaactagataatgatctagttcaggggaagaaagttcaggcagtgagaagagccagcccaaaagtcctaagcaaggaagtgttaaaggaaccaacagaaagcccacaaggctgggcaagagctcgcatgtggcataagatgtctggaatttaggaaaggacaactttatgtagaatttataacctatgtgcacagtttggattttttyccccaaatatgctggcaaacctttggagagttttgaaaaagcaaatgatgtagtttgatttacatttttgaaagatcgctctgctgctgtgtatgaaaaagagtatagaagagaacagaagaatggatgcagatgagaatgttattaggtaagaataatggtagattaattcaaattttggctatgaagttaa

SEQ ID NO: 128441 - DNA, 580 bp, Homo sapiens
tgtgttattttaagccagtaagtgcgggggtaagatgttacactgcaataggtaactaaaaaagtcaatgatttatccttttatctgaytaaaatgttttgcaaatggagaactcacagtctgccatgattccattttatacattctctatttcagttaatgccttcatgttccgataagaaacccaaagtctacctgaatcctctgttttattccaagaagtatctcactaaaaaatgttacaataatctattccttcctcttcatttcaactactgttaggttaattcaggcactcatgatctcccacccatcctatgtcctctgtgctgagaaggttgattggctgacccaactcaatttcaacttttttcttcaatctgactgaagaatttagaaagctgaaaatacatttcctagacttccttgaagccaggagtctggaatctccatgggatcagccaactggatgcactcacatgatcttaggaaggcgaaagtgtggcagaggcaatatcccttacttttagcagttggttagtgttgctgtcaatcaaggacaatgtgggctagaggcaat

SEQ ID NO: 128442 - DNA, 590 bp, Homo sapiens
acagcaagtcttctttgtttcctcatataaacatttttaaaaagtgccagtgaactcttgcctctctctccttccctccctccttctcattaaaacatacccattgttggcctaccatatatatgttcccagcatggtgctaggtaatgggcatattgttgagaaaaacagacatggcccctacccttgaagatttactggatgataatgaaggcatacatcaaataaatgagatcaggaggaatatcacaaaccaagagggaaagcatgtgtgaaggtcctgagatcagaaggagcatgaacaatttttcaagactccagtatttagcaacatttatagccattaaattgaaaactaaattgacaatgaaaatgctgaaagggaaattcccactatctccagatggtaattcaattattatattagcataaactatttgaaaaaattacctgcattttccattcatatttttgacccactgcctgcaatcaatgaacctaataaaactatatgaaaatatgatcatcaaatacatgcacaagcatatcaagyccatgacaacataatcaatgctttcagttatgaaaca

SEQ ID NO: 128443 - DNA, 320 bp, Homo sapiens
atttaaaaccaatgtaaatgttttccatatagatcaatgctttatataagcatatttccagtatataatccacatggtcttgctcacagggcatattggaattagacctgctcagtggcgatggccaayataaataacaatgatgatatttacaccagaaaattgcaactctagggagtggaagagtaaaggaactttagcgttggtacccagggcacctacccaggtctccttagggctgagttaatgtctatggagttttatttttgacctgggctacaaatcatgggtctctaagaagaaaggacatgtacatgcaa

SEQ ID NO: 128444 - DNA, 384 bp, Homo sapiens
gaattcactgatatatatgaagagcttggttgtgacaaacagaatgacatctggccgggtgcggtggctcatgcctttaatcccagcactttgggaggccgaggcgggcagatcacgaggtcaggagatggagaccatcctggctaacacggtgaaaccttgtctctactaaaaatataaaaaattagctgggcgtggtggtgggtgcctgtagtccctgctactcgggaggctaaggcaggagaatcgcttgaacccaggaggccgtgcttgaacccaggaggcaggagccgagatcrcgccactgcactccagcctgagctatggtgagactcatctaaaaaaaagaaaaaagaaaaaaggaatgacgtactagaggaagtg

SEQ ID NO: 128445 - DNA, 547 bp, Homo sapiens
gaaaaccctaatgatgcatcagaactacactttaatatttcaataattagcagtatttatttctgcatagttttggcctgagaatcctgctcttctggttgtcagaggctgtagcctgagtgttacttacactgttctgtagtgtaagtcacagagaacttctaggtacagaatacatgtttcacctgcagaaggaagtgttactataatcatagtgatgaagcatcactataatggctctcctcaccagagaggctattaggtatcagtcagtctcatmctttcaggttgttgcttcttttctgactctttggaacaatgagcaaatatttgtctctattacttcctttctcataattacatttccttatggtgcatggaactttgaagggggactcatcaattggatcaaaactgtcaaactgatcttattaaaattttatcttctattgctattcaggaaaaagttttcaatctccattagtttgtactaagtaatgttataaccagctctgtttccttttcaaactggattacccagtgataa

SEQ ID NO: 128446 - DNA, 547 bp, Homo sapiens
acagcacatcaaaaagattgtataccatgatcaagtgagatttatcctaggaataggaaggcaagaatatttcaacatacacacatcaataaatgtgacaaatcacattaacagaatgagaaacaaaagccytgtaatcatctcagtaaacgcagaaaaaaaacatttgacaaaattcagcatgccttcatgatgaaaactgaacaaatcagatctagaaagaatgttcctcaacacagcaagggccatatgtgataaacccacagctaccatcatattgaatgagaaaacattgaaagcttttcctctaaggactagaacaagggaaagatgctcacttttactatggttattcaatatagtagtggaagttctagccagagaaattaagggaagagagagagagaaagggagggagggagggaggaaggaaggaatggaggggagagagaaagaaagaaaaagaagaaagaaagaaaaagaaagaaaggaagaaagaaagaaagatagatggatagtgaatcagaattggaaaggaggaagtcaa

SEQ ID NO: 128447 - DNA, 590 bp, Homo sapiens
gggttgtttggtttttaatagtcatgttttaagagtgtatggtatatgatggataacagtcttcttagatatgccttttgcaaatattttctcccaatctgtagcctatctttttatttttttggcagtgtccttcataggtcagaaatttttagttttaataaaacccagcttatcaattccttatttcgtgtgttgtatataaaaagtcatcaccaaattcaagatcatctagattctaaacataractttacattcttcacaaaaattaagtcaaaatggagtacagttaataaaaatgtattgtattttgaaaatgagagagacttaaagtgttatcaccacaaaaaaataagtatttgaggtcatgcttatgttaaatagctcaattgagctattctacaatgtatatatatttcaaagaatcacattataatgataaatatatacagtatttttgtcaactaaaatcaattaataaataatggatgacagatctaaatgtgaaacataaaattacaaaattcctaaaagataacataggagaaaattttagtttttatcatataatgaaattgtctttgtatgt

SEQ ID NO: 128448 - DNA, 590 bp, Homo sapiens
gggttgtttggtttttaatagtcatgttttaagagtgtatggtatatgatggataacagtcttcttagatatgccttttgcaaatattttctcccaatctgtagcctatctttttatttttttggcagtgtccttcataggtcagaaatttttagttttaataaaacccagcttatcaattccttatttcgtgtgttgtatataaaaagtcatcaccaaattcaagatcatctagattctaaacataaactttacattcttcacaaaaattaagtyaaaatggagtacagttaataaaaatgtattgtattttgaaaatgagagagacttaaagtgttatcaccacaaaaaaataagtatttgaggtcatgcttatgttaaatagctcaattgagctattctacaatgtatatatatttcaaagaatcacattataatgataaatatatacagtatttttgtcaactaaaatcaattaataaataatggatgacagatctaaatgtgaaacataaaattacaaaattcctaaaagataacataggagaaaattttagtttttatcatataatgaaattgtctttgtatgt

SEQ ID NO: 128449 - DNA, 505 bp, Homo sapiens
ggaaaagtgagctggaacagaaaagaactgtctcaatgggaaacagactccaaaggacgctattgggggaaggaaaacacaaaatatttcttgagaagaatgtggaaatggcaaagtctctagcctccagaaaccttaaactctaggggaagaaagcaaaaatttagaggtaagagtgttcatattaaaattcaaataataagtagtttttctataaactatctttttttctaatcatgaaagtacacataatcattctctccaaactctgacattttagacagatagatagatagatgacagatagatagatagatagatagacagatagatagatagatacacatgcatacatactacatayatatatacctacatatgttggcacatagatgttcctttaccacagattaagttattctagatgcatatcttgtagcctacatttttatacattttcatcatttttaataactgcatactgctctattatattctgtatttt

SEQ ID NO: 128450 - DNA, 569 bp, Homo sapiens
actttagccatgagataaacacaaattcaccagcttgcaaacaaaacacctgttggatccaaacagtggtttttatcttaatagaaaaataacagcagatttaaagcaggcagaaaataaaatagagaaaaaaagagaacttatgaactctatactttgcaggttgaccttagggctctttttctcaatgtaaatgtgcacaaagaccatactacttccattttacataaactctggcaagtagagatgccataaaacctacagagtgctcacagaggagtcattctctttgttttctcctcattcttacatcatttgtttcccactttttttttttttcctaaaaggaggaactgagctgtggcttagggtttttgtgtggtggatcaatgtgtgcttgcttgtgggcaggactccacagtgtgtcaccactgagttgtttccaccctcttacatgtctcagtttctctctccagaggtctaggacttcagagagggctcaaaacgctgggcaatcagcccttatatgagtttcctggatgagcctyattctttcaaattaattgttg

SEQ ID NO: 128451 - DNA, 544 bp, Homo sapiens
tgcatttctttgtctagaaagtttcatttaaaaatgtagtctactaacttgagcctcaatttttggcaataaactaaaaaacgctacacaaaccatcacagaattcactttgtccttgcaggaaagaaaaaagaagaaaacaaacctccctgtgagagggggtctaaaagaactctccaaacctccatgattttgcaagagacaagacaagggtaattacctgcagcacctggacccatctagattaactaaatttaatgaggctccagaggaaggtcttcaagactcagaccttagttatgattagaaattaatcacctgtgtcttcagatagcccccgttccatgtttagagagagatctttgagcacccatcttcattcatttgagaacagggtcactgagagggagtctctgaggtcacagagtgtattagttcactttcacactgccrtgaagaaacacccaagactgggtgatttataaaggaaagaagtttaattgagtcacagttccacatggctggggaggcctcaggaaattta

SEQ ID NO: 128452 - DNA, 438 bp, Homo sapiens
aacattttaaaatatatacataggcacgtgtaggttcaactagacatttttctggcaaattactgtctgataaaataattgtttaatctaatatcctacattgcctcactgcttgaaaaatgaaataagatcaaatgacatcaaaatatacatttatttttctgtttctactaaccacgctaaccaaggacacatgtcagagrcattaagtgagctttacaccaagttacacaagaattcacctcacacatggagatcctgatttagtaggctggggaggaagcaagtgtttgagttctgtagaagctccccagctgttactaatgataacacctgtggttattaaccactgtgcaagatctctcttttttttttccccctttcaacacggtcttgttctgtcacccaggctggagtgcagtggcacaatcatggctc

SEQ ID NO: 128453 - DNA, 438 bp, Homo sapiens
aacattttaaaatatatacataggcacgtgtaggttcaactagacatttttctggcaaattactgtctgataaaataattgtttaatctaatatcctacattgcctcactgcttgaaaaatgaaataagatcaaatgacatcaaaatatacatttatttttctgtttctactaaccacgctaaccaaggacacatgtcagagacattaagtgagctttacaccaagttacacaagaattcacctcacacatggagatcctgatttagtaggctggggaggaagcaagkgtttgagttctgtagaagctccccagctgttactaatgataacacctgtggttattaaccactgtgcaagatctctcttttttttttccccctttcaacacggtcttgttctgtcacccaggctggagtgcagtggcacaatcatggctc

SEQ ID NO: 128454 - DNA, 476 bp, Homo sapiens
gaaattttgcctatttctttttaactgcttatgcttcactggatagataccagttcactgttgttaccattcttttgctgttacagatagctctgcaaacaatagcttgtgcttacgtaattttgatagtgtatctttgagatagatttctgtacttgsagttgctagggcaaaaggtaaatgtatatgtagctttgtaggtattgctgtatatttgaaattactctccgtataggggttgtgccattttatgacctcaccaacaatgtaatagtttccctgtagccttgattaaaaaggtataatgtcaaattattgggtatttgtcagtctgatgggtgagaaatggtatctcaatgtattttaatttgcctgtctttaatatgagtgtgatcaagcttcttaggtgtaaaagtcatttgcatttctttttgtgtgaactgtcttcctgtctagcctggttttctgtagaattg

SEQ ID NO: 128455 - DNA, 540 bp, Homo sapiens
agttttatgctacttgcaccacccctcccccaaccccaggcagcacagtatggagagagatacccttcatgtggggaaaggagaaggaagttagcactgaacttttcctcagacccaaacacttggcttgtcctggtaaaacccagtgccagaaaggcttctgtggccccagactccaggctggtacccatgaactgagcatttagtcccatcctggtgccaggcaatatctccaagccccaggctggattccaaagctgcaggcccgaggcctgcccagcagactcagtctctggacctattccagcaccaggccaaacccagtggcttcaggctscagaccagctgcccacagccctgatcatgaggctagcactcacagacccagggttcaggcttatcctagtagactccagtgatggaccagcctccatggacccaagttctaggactacacttgtggatccaggtttcagactggcccctaaagccccaggacccaggctagactttgcagacctgacccccaggccagcacct

SEQ ID NO: 128456 - DNA, 602 bp, Homo sapiens
ctgtttgcagttgccctgcatccctgctagctccatcctcatgtccctgtatgtgtctgccatctcccagaatggctggcagctagccagyctctgctcagctgtgcaggcatgggagctcataatttggaagcatgaactttaggatatcatctctcattcccctgcacactttaaatttggatataaaatattgtataggtgtgcatgtccaacgctttcttcaagtggtcctcgacctacaagaatgttacaatcctgcggatgacagtcctcaatactcgtgatcatacattcacctttatggtcaaaggcaggcctgtgtcttgttcacctttgtatcagttgttcttagcccagtgtctgacacatcataggcttagcccagtgtctgacactcattaaatattcattgggtgaataaatgatcaatgaatgaatggactaagagatggtacatcctgaatctagtggggaaggaaagaacttcctttccaaggcccctggaagacaaacatgcacctttgcacagacattgccagtaacaggaaggtcctttgtaagacaacttgttacactgttttttctatatacagctgagt

SEQ ID NO: 128457 - DNA, 602 bp, Homo sapiens
ctgtttgcagttgccctgcatccctgctagctccatcctcatgtccctgtatgtgtctgccatctcccagaatggctggcagctagccagtctctgctcagctgtgcaggcatgggagctcatartttggaagcatgaactttaggatatcatctctcattcccctgcacactttaaatttggatataaaatattgtataggtgtgcatgtccaacgctttcttcaagtggtcctcgacctacaagaatgttacaatcctgcggatgacagtcctcaatactcgtgatcatacattcacctttatggtcaaaggcaggcctgtgtcttgttcacctttgtatcagttgttcttagcccagtgtctgacacatcataggcttagcccagtgtctgacactcattaaatattcattgggtgaataaatgatcaatgaatgaatggactaagagatggtacatcctgaatctagtggggaaggaaagaacttcctttccaaggcccctggaagacaaacatgcacctttgcacagacattgccagtaacaggaaggtcctttgtaagacaacttgttacactgttttttctatatacagctgagt

SEQ ID NO: 128458 - DNA, 594 bp, Homo sapiens
gtctgtgacatctctggatatacaagtgtggacgtcaaaggagagtttggtctgggaatatagagagtcttcagcctctgacagcaaagctgtcagaagctctrgaaaaggatgagagtgagaggagagttcagagagagccaaagccctaggtaagtccaggggaacacacagaagaaagttgatgaaaccacgaagaagacagagaagtggccagaggataggtgaaaaagagaagacatcgatgtcatggagcgcattttgaggagggaagtatcagctgtgttaaagaagctgaaagggtcagtaaaagtacagtgtctacagaatttaataacaaggatattgctggtaacttggcaaaatcagtcacacttggagcaggggtagctgaatccatactacaccaagtaaaggagcatttactatgaatggagccatgaaaattgtggccataggaggttggcaagagagaaagcatgaaatagacctctgagtgagtgggaaatctggacgctgggattgccagctactgatgagagtcctcctaaagacaggcttgtgtggcaccagtaagatatttcttaatgtaag

SEQ ID NO: 128459 - DNA, 579 bp, Homo sapiens
atccatggcctctggagaagaaggcttcagagaagagaggtcaccatgggcttagtgcttaccccaagagatggcttttgcaaggagacagggcattctggttggagaaagtagtgtgggcaaacacattgagacatgaaggctgaaaaaggtccatggtgtgattgtggcaatacagaaaatttggggttacttccgttgtgcaatctctataacattgcatgtaaatggaatatccattaatcatgtcatattttgtatgtaggaagggaacctgatatttacagtcattttagttaagctttcttgactaatttaagccaaaagggcacttattggaaacttatagggggtgggcacaaaattgcaaaggagtgagaaaaatcatgtttctaattggcaggatctggacatgtcctgcaaattgtggtgacagacacctctctgccttcctctggtcaccactgctggaatgaatagagttgagctgtgtgcagcaggatgcctccagagacgtgcaagccagacatgaggtgagggcaggattcactsgttctcaggaaacttgtcccacaatta

SEQ ID NO: 128460 - DNA, 549 bp, Homo sapiens
tattatctctcattcacagatgaagaaagtcaagtgcagagaggttaagtaacttattcaaggtcacacagctggtaagggatcccagcaggctttgaactctggaagctgacttcagagcttttgcacataaccactaccctgatcctctcccaccatgctgtctcaagcaactcttgctgacattcctatggtatctcctagctggcataagtgccctggtcttactcttctgtaaaccattccctgcacagctaccagagaattcttcctaaaagacaactctgatcaagtcactctctgcttgaagattttcaagggttccccattttccacaggataaagtccaagctcctccaatcggctcataaatccctgggtggtctggcccstgtgaacctctctccagcctgcttcccactgcactctgtacattttatattcagggacgctggattgttctatgctccttcattctgctatattttggtgtcttaatatttaattccttatccctcctgatagcctcttcatcagctgaaaactcct

SEQ ID NO: 128461 - DNA, 549 bp, Homo sapiens
tattatctctcattcacagatgaagaaagtcaagtgcagagaggttaagtaacttattcaaggtcacacagctggtaagggatcccagcaggctttgaactctggaagctgacttcagagcttttgcacataaccactaccctgatcctctcccaccatgctgtctcaagcaactcttgctgacattcctatggtatctcctagctggcataagtgccctggtcttactcttctgtaaaccattccctgcacagctaccagagaattcttcctaaaagacaactctgatcaagtcactctctgcttgaagattttcaagggttccccattttccacaggataaagtccaagctcctccaatcggctcataaatccctgggtggtctggcccgtgtgaacctctctccagcctgcttcccactgcactctgtacattttatattcagggacgctggattgttctatgctccttcattctgytatattttggtgtcttaatatttaattccttatccctcctgatagcctcttcatcagctgaaaactcct

SEQ ID NO: 128462 - DNA, 644 bp, Homo sapiens
aggagacccctcaggccctcggagaaatagatatcccaccccgggccacactgtgtttccccaactcacctagatccccagatgagttcgctccagggactgtgccttgtaaaggcattctaagcacttttacaaagactccatggtaaccttatgaggctggtgytctcatttccccaatttgctgatggaaacactgagacacagacagagtaagatacttgtccaaggccacaacataataagtagtagagtcagaagtggcatctcagcagttcctataaagcccagggattccaccactactatgcatacatgctgcgtctcaagccacacaaataccacagaaccctgggctttgctgtttatctcagtgcctcatgcaaaatggcagattttctaaatttagataccagatgggaaaacatattcccacttatagcctaatttataaaaggctctaacttagctcaagttctggaggcaacatagtctaacagaggtattctaacccaattatggagttggaaaagggaggaatgatggctggtaattcacagccagcctgccttaatttgttggcaaatgggggtgggagaaagtttgcctcaatttctaaacttcctcataattaacaatattgt

SEQ ID NO: 128463 - DNA, 644 bp, Homo sapiens
aggagacccctcaggccctcggagaaatagatatcccaccccgggccacactgtgtttccccaactcacctagatccccagatgagttcgctccagggactgtgccttgtaaaggcattctaagcacttttacaaagactccatggtaaccttatgaggctggtgctctcatttccccaatttgctgatggaaacactgagacacagacagagtaagatacttgtccaaggccacarcataataagtagtagagtcagaagtggcatctcagcagttcctataaagcccagggattccaccactactatgcatacatgctgcgtctcaagccacacaaataccacagaaccctgggctttgctgtttatctcagtgcctcatgcaaaatggcagattttctaaatttagataccagatgggaaaacatattcccacttatagcctaatttataaaaggctctaacttagctcaagttctggaggcaacatagtctaacagaggtattctaacccaattatggagttggaaaagggaggaatgatggctggtaattcacagccagcctgccttaatttgttggcaaatgggggtgggagaaagtttgcctcaatttctaaacttcctcataattaacaatattgt

SEQ ID NO: 128464 - DNA, 581 bp, Homo sapiens
ccctcttctaaattatatgctaatgtagttatgtatttgaattctcactatatattttttaatgcacaaacattattgattaaaacaatcaatttgcatttatttttacctaaatgcccatttatcaatatttatcaatatgcatttctcagcaccctcctaaacactctttaactgctttctacatctcttgtgtctgttttcttttacctaaagaacattcctgggtgtctgtttttttttttaggtacaggttctttggcaacaaattactcaagttttgcttgtccgaaatgtctttacttcaccttgatgtttcgagggtgtttttttctaggcaggcctctaggytgccagccatttttcttcagcactttgatgatattatttttctatctttgtcttccatgtggctgttgagatgtcggctgtcagcatgattgtgctccttctgtgttagccttgacgcagggcaggtgagccccacagtggggcttagcccggagggttcttggctttgcccaggaaagtattcaagggtaagctggaggtggaagaaaacagctttattgaagaggcag

SEQ ID NO: 128465 - DNA, 581 bp, Homo sapiens
ccctcttctaaattatatgctaatgtagttatgtatttgaattctcactatatattttttaatgcacaaacattattgattaaaacaatcaatttgcatttatttttacctaaatgcccatttatcaatatttatcaatatgcatttctcagcaccctcctaaacactctttaactgctttctacatctcttgtgtctgttttcttttacctaaagaacattcctgggtgtctgtttttttttttaggtacaggttctttggcaacaaattactcaagttttgcttgtccgaaatgtctttacttcaccttgatgtttcgagggtgtttttttctaggcaggcctctaggctgccagccatttttcttcagcactttgatgatattatttttctatctttgtcttccatgtggctgttgagatgtcggctgtcagcatgattgtgctccttctgtgttagccttgaygcagggcaggtgagccccacagtggggcttagcccggagggttcttggctttgcccaggaaagtattcaagggtaagctggaggtggaagaaaacagctttattgaagaggcag

SEQ ID NO: 128466 - DNA, 581 bp, Homo sapiens
ccctcttctaaattatatgctaatgtagttatgtatttgaattctcactatatattttttaatgcacaaacattattgattaaaacaatcaatttgcatttatttttacctaaatgcccatttatcaatatttatcaatatgcatttctcagcaccctcctaaacactctttaactgctttctacatctcttgtgtctgttttcttttacctaaagaacattcctgggtgtctgtttttttttttaggtacaggttctttggcaacaaattactcaagttttgcttgtccgaaatgtctttacttcaccttgatgtttcgagggtgtttttttctaggcaggcctctaggctgccagccatttttcttcagcactttgatgatattatttttctatctttgtcttccatgtggctgttgagatgtcggctgtcagcatgattgtgctccttctgtgttagccttgacgcagggcaggtgagccccacagtggggcttagcccggagggttcttggctttgcccaggaaagtattcaagggyaagctggaggtggaagaaaacagctttattgaagaggcag

SEQ ID NO: 128467 - DNA, 546 bp, Homo sapiens
ggtcaaaaccagctgaatattggcaatttcatgtggttcaacctaatagtctgcaggggtctggggagatcatagcatgtgaatataatgttgaatgagacataggaagaaagaaacaagatagctgggacaaagggtattgaatgagtagaaaaaaaagtagtaatctttttgtttgggttaggtgtgtgttcccmagggaaataatttttgagcatgtagcttgaaagtaataataccacttttaggtagtacaaatggctcaggggatcaattgggatttagggagcggggcttttacctgcaatctgtccaatttagtcagactaacttgcaatttttacactgttaaacatcttataaatctgagaccaacagatcaaagaaaagctctttcaattgagtgtctgggtaacttgtggcaaattttttatccccgttgtaatgtgattcctccatctctaaagtgaaggcatggattacccactcattctcaatccaatgtgaaaggtccagaattctgtgtcagagttaagagagtcctgg

SEQ ID NO: 128468 - DNA, 609 bp, Homo sapiens
aaaaaaaaaaaaaaaaaaaaatgctgggtggggtattcagtcctcaggtaattcacgctgactggatgctgaagaaattaacattgtttgagaacacaccacagagtatccaccagtggcaccmaaggctgtcaagaccttccaagaaaaaaaagaatttaaccacttcttttgatgagaataatcctaaagatactataatagaaactgcgcaaaatatactactgatatcaaggaatctatttaatttagatcttctttaaagagtaatatttctcatacaccctgagattatagggtacccttaaaattactttgcatagatgaaacttcactaacaaggacatgaaaaactataacatgtcaaggactatggatgtaatcaaattaattgagattattcacaacagtgataaattagacatagaagcttactaaccttcattttattatttaccctacatttttatgtgcaaaatcaaaagttgtttttatcacaatatctcagagaaagattattaatattaatacagttttatagaattcaattgacaaaaaatacatattgagcttcccactctctccaaaggacagggtacaggaacttct

SEQ ID NO: 128469 - DNA, 629 bp, Homo sapiens
ttgcgtgccatgtgcctagtatagtgccttttatgctcaagaaatgatagtgctttatcatactttaaaatttgatgacttgtttgaattgagtaaactggttaatagaaatattcatacagtcagcacatacacagaatagcaatgtattaatcctttttcatgctgctataaacaactgtccaagactggttaatttataaaggaaagaggtttaattgactcacagttcagcatggcttgggaggcctcaggaaacttacaataatggtggaaggtgaaggagaagcaaggcaccttcttcacaaagtggcagaaaggagaagtgccaacaggggaaatgccagatgcttataaaataatcagatcttgtgagacttactcattatcacaggaacagcatgggggaaactcccatgatccaactacctccacctggtcccacccttgacagatggggattattacaattcaaggtgagatttgggtggggacacagagccaaaccatgtcaagcaccctttgtgtattataatactctggagatttaaaatatttcyatggccttagattttcactaaagctctgcaaggatttccatgttttatttctgatctaaaaatgaaatc

SEQ ID NO: 128470 - DNA, 605 bp, Homo sapiens
atgctcttggtagttaaatgagcatgttgattaagggtgaagagggtgagaggaggactaatgctacaaatataatattgtgctatggcttaaccttggcagatttttcttttaaagtttttgttgttaaatattacacaacttttagataagattttttttccaatattttcagttttgaatatacttgttttccaagtagcatgatgagtaccttgacggtagcatatagcatgatgggtgctttcagatttatctaattttttataactctgtgaagtgggwgctattatatgctcatgttacagatgaggagagtgaggcacagaaaaattaagcaatttcccagggttatgcagtctatagttatggacactaaaaagatgtacaacatgcttctggttcccagcagggtgagtaaaggtgatggggatggcaccaggtaagagctgggatagcaacaccgatggccatcttctggtgagcacaaattacgtcatttgatttagcatcactatctgaagggtaacctgagctgagtgtgaaggaaaaggatcttggtaattactactcttaggatttgatatacattatgaagttccatt

SEQ ID NO: 128471 - DNA, 605 bp, Homo sapiens
atgctcttggtagttaaatgagcatgttgattaagggtgaagagggtgagaggaggactaatgctacaaatataatattgtgctatggcttaaccttggcagatttttcttttaaagtttttgttgttaaatattacacaacttttagataagattttttttccaatattttcagttttgaatatacttgttttccaagtagcatgatgagtaccttgacggtagcatatagcatgatgggtgctttcagatttatctaattttttataactctgtgaagtgggagctattatatgctcatgttacagatraggagagtgaggcacagaaaaattaagcaatttcccagggttatgcagtctatagttatggacactaaaaagatgtacaacatgcttctggttcccagcagggtgagtaaaggtgatggggatggcaccaggtaagagctgggatagcaacaccgatggccatcttctggtgagcacaaattacgtcatttgatttagcatcactatctgaagggtaacctgagctgagtgtgaaggaaaaggatcttggtaattactactcttaggatttgatatacattatgaagttccatt

SEQ ID NO: 128472 - DNA, 605 bp, Homo sapiens
atgctcttggtagttaaatgagcatgttgattaagggtgaagagggtgagaggaggactaatgctacaaatataatattgtgctatggcttaaccttggcagatttttcttttaaagtttttgttgttaaatattacacaacttttagataagattttttttccaatattttcagttttgaatatacttgttttccaagtagcatgatgagtaccttgacggtagcatatagcatgatgggtgctttcagatttatctaattttttataactctgtgaagtgggagctattatatgctcatgttacagatgaggagagtgaggcacagaaaaattaagcaatttcccagggttatgcagtctatagttatggacactaaaaagatgtacaacatgcttctggttccyagcagggtgagtaaaggtgatggggatggcaccaggtaagagctgggatagcaacaccgatggccatcttctggtgagcacaaattacgtcatttgatttagcatcactatctgaagggtaacctgagctgagtgtgaaggaaaaggatcttggtaattactactcttaggatttgatatacattatgaagttccatt

SEQ ID NO: 128473 - DNA, 586 bp, Homo sapiens
actttcaagtttagagagctcttccttaccatagctcatttgattctcacaagaatcctgtaaaatgtgaaggacatatatctttagtcttgtcattgccctgtctctaccatcacacaccatgtatcattctggagggaattaaataatatatgcacattaaattatattgttatgagggagaatcacaaagttatgagagccttggcttctgggatcacactgggagaccacattgaygtaatccttccatggtcttatgtttctggccagatggagtgaattgcacaggaggcagcccaagtccatggggatggatagacatggctcccgatggacgtggattggtgggaagacaggctgtaaggttgctttcctccctgaattcaactactctgaagaatgatgaaagccaagctggtccttaataaggacctggggaatggggcagagaaaaggccaatatctctatacagaagtttatgttcctgaggcttgtgtgttaccaaggtcttctctcactgtctctgccatgtcctcccttctgtgcctgatgcttgacttggcagtttgcatctaaaagatg

SEQ ID NO: 128474 - DNA, 548 bp, Homo sapiens
agtcaatttacataattccatatttttttgaagactttgttcattaaaaaaattcttttttcttgatttttgtctgggttagctaaagagactagtcttcaagctctgaaattctttcttctgcttgatccaggctattgataaagctttcaattgtacgttgaaattccttaagtgagtttttaaattccagaagctctgattgatttcgttccatgatgtttatcttttccttcatttcttagattgctttagaagtttctttgtgttgattttcaatcttaccttggagcttgttgagcttccttgcaatccatgctttaaatgctttatctgtcatttccgagtttccattttgttggtgaccattgctggagagctagtgtgatttttttggtggtgttactacattcagatttttcatggtgccagaatttttgcactgattccttctcatctggagacacyggcacttctaatttttgtaattatttttgtgcaggagggattttttctttttctttctttccctgtaatatatatgtttt

SEQ ID NO: 128475 - DNA, 524 bp, Homo sapiens
atacttgatgtaaacaggatgaatctcttttgcctacagcctttaaaatatggttatctagttttggtcaaaagtctcaccattaagttcattgttaaattgaataaactatctgaaatctgggggaatgagaaaatggatattttgggtaattacatactctgttggataaccaaacataacatatatgggctcttcaggtttcaagtyagtagaaggtaatgtgacattttctgatcagactgttgggattttttgttagttgcacctcatgtttacctctgtgactagccttcaccaagcagccatcccttccttgaaccgatccctctctctcatgcccctttccttggtacattctcttccttttgtccagaaatactttttctcttctttctgtttagatgtcacctcttctgtgaagcccttagttccttcacaagaatctccccaatccaattgcttgctcttttatactcctataacatttttttggtaattttttcatagtggtaaaatataca

SEQ ID NO: 128476 - DNA, 524 bp, Homo sapiens
atacttgatgtaaacaggatgaatctcttttgcctacagcctttaaaatatggttatctagttttggtcaaaagtctcaccattaagttcattgttaaattgaataaactatctgaaatctgggggaatgagaaaatggatattttgggtaattacatactctgttggataaccaaacataacatatatgggctcttcaggtttcaagtcagtagaaggtaatgtgacattttctgatcagactgttgggatyttttgttagttgcacctcatgtttacctctgtgactagccttcaccaagcagccatcccttccttgaaccgatccctctctctcatgcccctttccttggtacattctcttccttttgtccagaaatactttttctcttctttctgtttagatgtcacctcttctgtgaagcccttagttccttcacaagaatctccccaatccaattgcttgctcttttatactcctataacatttttttggtaattttttcatagtggtaaaatataca

SEQ ID NO: 128477 - DNA, 524 bp, Homo sapiens
atacttgatgtaaacaggatgaatctcttttgcctacagcctttaaaatatggttatctagttttggtcaaaagtctcaccattaagttcattgttaaattgaataaactatctgaaatctgggggaatgagaaaatggatattttgggtaattacatactctgttggataaccaaacataacatatatgggctcttcaggtttcaagtcagtagaaggtaatgtgacattttctgatcagactgttgggattttttgttagttgcacctcatgtttacctctgtgactagccttcaccaagcagccatcccttccttgaacmgatccctctctctcatgcccctttccttggtacattctcttccttttgtccagaaatactttttctcttctttctgtttagatgtcacctcttctgtgaagcccttagttccttcacaagaatctccccaatccaattgcttgctcttttatactcctataacatttttttggtaattttttcatagtggtaaaatataca

SEQ ID NO: 128478 - DNA, 557 bp, Homo sapiens
tgttttttttccccttgaggagcaagtttttttttttaagagaggaggaagaaagacaggaaagttgtttgcttgagtgtagaaatgccatcgtgaagtaagacattttaaaaaattctcttatttctggcrtgctgcgtagttgtaattccacagtatatagattactttaacatagctagaagcagcttgattacattttatatcggggtaaaaatgcccctggctattggtatacagctgggaaggaattttatggctgaactgaagcaaatctgaaaagtgaggaggcctgactaaaccctctttcatcatgccactaaaatcactgtttagtgttagtttctgaaccaaggtatgagtcacaaatttaaaaagcctcaagaatatgtgcttgcaaaataatgtgtaccactttcctttactggaaaaaattagctgatatacatttaagacttataaatgagatataaagtcaaatagtagtgcatgcctgctatgtctaaggactttgctgggccctgtaagaaacacaaggaagggtaagttaggtgtct

SEQ ID NO: 128479 - DNA, 557 bp, Homo sapiens
tgttttttttccccttgaggagcaagtttttttttttaagagaggaggaagaaagacaggaaagttgtttgcttgagtgtagaaatgccatcgtgaagtaagacattttaaaaaattctcttatttctggcatgctgcgtagttgtaattccacagtatatagattactttaayatagctagaagcagcttgattacattttatatcggggtaaaaatgcccctggctattggtatacagctgggaaggaattttatggctgaactgaagcaaatctgaaaagtgaggaggcctgactaaaccctctttcatcatgccactaaaatcactgtttagtgttagtttctgaaccaaggtatgagtcacaaatttaaaaagcctcaagaatatgtgcttgcaaaataatgtgtaccactttcctttactggaaaaaattagctgatatacatttaagacttataaatgagatataaagtcaaatagtagtgcatgcctgctatgtctaaggactttgctgggccctgtaagaaacacaaggaagggtaagttaggtgtct

SEQ ID NO: 128480 - DNA, 557 bp, Homo sapiens
tgttttttttccccttgaggagcaagtttttttttttaagagaggaggaagaaagacaggaaagttgtttgcttgagtgtagaaatgccatcgtgaagtaagacattttaaaaaattctcttatttctggcatgctgcgtagttgtaattccacagtatatagattactttaacatagctagaagcagcttgattacattttatatcggggtaaaaatgcccctggctattggtatacagctgggaaggaattttatggctgaactgaagcaaatctgaaaagtgaggaggcctgactaaaccctctttcatcatgccactaaaatcactgtttagtgttagtttctgaaccaaggtatgagtcacaaatttaaaaagcctcaagaatatgtgcttgcaaaataatgtgtaccactttcctttactggaaaaaattagctgatatacatttaagacttataaatgagatataaagtcaaatagtagtgcatgcctgctatgtctaaggactttkctgggccctgtaagaaacacaaggaagggtaagttaggtgtct

SEQ ID NO: 128481 - DNA, 596 bp, Homo sapiens
attaggggtgctgacccacatgcggttgaaaatccacctgtaacttttgactcccccaaaattttactaatagrctactgttgaccggaagccttactgataacataatcaattaacacaaattttgtatattatatgtactatatactatattcttacagtaaggtaagccagagtaaagaaaatgttattaagaaaatcataagtagaaatttagtaacaattcattaagaagtagatcatcataaaggccttcatcctcatcatcttcatggtgagtaggctgaggaagaggaggggttggtcctgccattttaggggtggcagaggcagaagaaaattcacatataagtgcaactgcacagtttaaacccatgttgttcaagggtcaagtgtactttgtattgttaaatttttgaatcttttccaaattgacagattagaaaatggtagatccctgttactttggcctgaatttctaagggaaattgagcatctctttttgtgtttattggccattaatgttttttttttttctgtgactctccatgtaataagaaattacatttttctacagagaaaggccatagattcat

SEQ ID NO: 128482 - DNA, 520 bp, Homo sapiens
aatatgaaaaatttaaaagatagcatctatttagggaaatattattttcagaggctgaatagagaagggattcataggagtcctcctaaagcagctggtccaggaaagacgggaagagcttggtttgtggaaatgagaaccagagagattcaatcaacaaatatgcctgaataagggctgcaaatgccaagagtgaggaatgtaaaggggactgtggaatggttcattttggctgaactggagtaaggatagggcaaagagattagtaggaaatgaacacggctctagattgtgttcttaaccatagaaaataataatgccaatttattaataatggtaaagttaagcttaggaattgagaaagcaataaagagtgtaatagcactttagattccatttcaccaaattcatcaygtttaaaagcattttgatacttaaataaattaattattctctgaaatattcatatatatggaacccctgaaaaatactgactatacattgggctttattgcttcac

SEQ ID NO: 128483 - DNA, 545 bp, Homo sapiens
tgtggactttttcttaacacctaggatggaagtttcttaacaaaaaatttgccccttatacactgttagaggaagtaatccaggagtcagctaatactaagagaatatcagagttcaactgtctaagacatgtagccacttctactcatcagtgttggcattcctgttctatgagtcatttcaggaaatcttagctgctttcatgagggcacagtccctgcaccctgctctccttttcccttgcttttcttcctctgtctgtttggcaatggtctgtcctgtagcatgttattgaatagatcggaagatatttatcaggggttccatgaagtgccctgctctatgctgggacactggaattcacgatggttgacagctgtttcaccctgtgaaacatattctggctgaggagataagacccaagcacgtgaaatcttagcaaataacataaaagaatatatagtgaygttccaaactgagaagtaaagacaaatactctaggatttcagcagtaacaggtcatcatagacctgtagagcaagtgg

SEQ ID NO: 128484 - DNA, 606 bp, Homo sapiens
tgaggttgcagagtcagctgctcagattgccaaaccacgtgcactattgactcttccagatactctcagggatttgccatattatgttaaaaacagctctttgcaatttttattgcacacttgttatgtgttgataagcatgcattccaaaatagcatttcttctgcccataccttttacatgttgcatataaaaccatattgcaatcagataaaactatattctaaaatgggatggcaatgcctttccattgatagcaatgcgaagctgggtttgaggtgggattatacttcargaagagacaaaattctcactagaaagttagtgtagataactctaggactgaggagggtgggcagcatatgacttaatttaaacactaacccaggatcctcaaaatgtatacgattgactctatgcactgaccttggaactgcaaggttcagactcacagtgtgctgggataatcatcacttggctgcttatgtcctcactaatttgtatttcttaaaatgcagaatgtttcaggtggagagtgaatcttcctgcatagcactctttgggaaactgtcagaatagaaaatactttgacagtttccattttta

SEQ ID NO: 128485 - DNA, 606 bp, Homo sapiens
tgaggttgcagagtcagctgctcagattgccaaaccacgtgcactattgactcttccagatactctcagggatttgccatattatgttaaaaacagctctttgcaatttttattgcacacttgttatgtgttgataagcatgcattccaaaatagcatttcttctgcccataccttttacatgttgcatataaaaccatattgcaatcagataaaactatattctaaaatgggatggcaatgcctttccattgatagcaatgcgaagctgggtttgaggtgggattatacttcaggaagagacaaaattctcactagaaagttagtgtagataactctargactgaggagggtgggcagcatatgacttaatttaaacactaacccaggatcctcaaaatgtatacgattgactctatgcactgaccttggaactgcaaggttcagactcacagtgtgctgggataatcatcacttggctgcttatgtcctcactaatttgtatttcttaaaatgcagaatgtttcaggtggagagtgaatcttcctgcatagcactctttgggaaactgtcagaatagaaaatactttgacagtttccattttta

SEQ ID NO: 128486 - DNA, 547 bp, Homo sapiens
aaatctggaccttcagaatgctctcttctaatattcttttcccctcctcacttgcccttcagatmtgttcatccttcaaatccaagtgatctcattcttcagataattctttaacatctagaacttcactatcctatataaatgacactagctggctatttaaatctttttttgcccattttatttttatttattttttaaaattggcacaaatgtataaggtacatatgcaattgtgttatatgcatagattgcatagtggtcacatcagggcttttaaattaaattaaatgaaaaatttagttcctcagttgcattagccatatttcaactattcaatagccacatgtagctagtggctatcatatagaacactttacagatatagaaaattctattgaacagcattgactagactacagatctctgtaaaacatagcttcttttataatggtcagtgtacttgaattacttatattgccccatcttgcccaccagattgtacatcccataaagtagggacttttctatcttcctaactaaacat

SEQ ID NO: 128487 - DNA, 591 bp, Homo sapiens
aacttgtagttaatcctacttaagagtgatatctagtagggttttattcaaaagatctatacatttgtcaaattaaagactttacctcaaatcattttcacttcttagatgttagctcacgaaccataggcaagtcgaatttcaatatagaagaaagtagataatggaaaatctatttgtccagcaattctaatgctgctaaacttcaaaccctaagtggcatggtgcttaaaactgaacttttaattctgtttttttttttaaaaaaaaaggtgaattttagaaattataaagtttgggggggaatggatcaactatttgtcaagctaaattatacattcagcagttttatactgaaaatttagcaattggcaatggaaatggatwtcattgtataaaaaccaatgcagagcttccacatacaaatgtttattacatgattgtaaccatatttctgcatctgactaaccacactaacacacaccatgtacctactagtgcatatgcatacagaaattggataacaaagaatgaatgtcatcttttacacagttctattattagacaatgtaacagctaacccttaactct

SEQ ID NO: 128488 - DNA, 591 bp, Homo sapiens
aacttgtagttaatcctacttaagagtgatatctagtagggttttattcaaaagatctatacatttgtcaaattaaagactttacctcaaatcattttcacttcttagatgttagctcacgaaccataggcaagtcgaatttcaatatagaagaaagtagataatggaaaatctatttgtccagcaattctaatgctgctaaacttcaaaccctaagtggcatggtgcttaaaactgaacttttaattctgtttttttttttaaaaaaaaaggtgaattttagaaattataaagtttgggggggaatggatcaactatttgtcaagctaaattatacattcagcagttttatactgaaaatttagcaattggcaatggaaatggatatcattgtataaaaaccaatgcagagcttccacatacaaatgtttattacatgattgtaaccatatttctgcatctgactaaccacactaacacacaccatgtacctactartgcatatgcatacagaaattggataacaaagaatgaatgtcatcttttacacagttctattattagacaatgtaacagctaacccttaactct

SEQ ID NO: 128489 - DNA, 579 bp, Homo sapiens
acaccaccaccacggcaaacagacatctaaatatttcctactttctatggaaatgttcaccttggatgccagacatgaagtttaaacttcgttggtgattgtaccgtattgtgaaagatgaggctacatggttgtaacattgagatcacgacacatgttttcagtatctttctagaagagatgaaaattgggttcattatgcataagaattaggtagagatctactcatatcgaacatgctcttggcaactagaacttcctgtgagctacacactaaaaaagtataatctcagctgagaaactattttaaaaagaattttcttcagatatgtctcttctaaacatatgaatgaaagtgtcagtgcaattgcagttgtttacacaactttctgcatcttttttggatcctccttgctagctgtgagcaagcactctgaaacctacccaaatttatcataccggtactcttgactattataactagacagatgttccttcccagtgtaaccaacacactagacgagaattagagcccttaacccatttcagtamaactcaaatttgtttcccatttgctgg

SEQ ID NO: 128490 - DNA, 652 bp, Homo sapiens
aatttcctagacacaactaatattgttaattatataaacccaaaggaaacaagattgaaaagtgaaatacaggatcaagtatggggaagcttatctgacatctgtaggcataggtgcactttacaaaaatgactttatatagctgatgtcaatctctctattggtttgacttttaaaatataaactatgttttaaaaattttcaagaacaattaaaacatttctctaacttcttaaggacagtatccattagataatttaataggactattatctttgataattactgattactatacataatgatcattctttttggttgaaaaagagagatgccccaagatgctactgagactgtagtgttgtttgcccaaaaggtaagcaaagacatattctttatgctccagctcactatttatggctatcttgtccctcaggattgtgagctattatatcaggtttcactgagatcaatgtacctataatgcacccatagttttacctttctaatatactatttctgttatattttggataagacactaagtaaataagtctgtgatcatttgacacaagtaggtgaaggacrttatgtcatgggtttgatggcaaataattatgtttcttgctatcagtttcttgtgttctgccta

SEQ ID NO: 128491 - DNA, 583 bp, Homo sapiens
tgtttgctgcaggagtggagcccccatggagaacctctgctagggtagtacaaaagggaaatgtagggttaaagcccccacatagagtccccactgcctagtggggctgtgaggagagggccaccatcttccagaccccctgacagcttgcaccattcacctggaaaagccacagacactcaacaccagcccatgaaagcagccaggaytggggggctgtactctgcaaagccacaggggtagagttgcccaagatattgggagcccacttcttgcaccagcatgacctggatgtgagacatgtagtcaaaggaggtcattttggaactatgaagtttaatgagtgccctgttggatttcagacttgcacagggtctatagcctctttattttggccaatttctcacatttggaacaggcgtatttacccaatggttgtacctccattgtatctaggaagtaactaacttgcttttgatttcacaggctcatagactgaagggacttgccttgtctcagatgagactttggacttggacttttgtgttaatgctggaatgagttaagactttggggtactgta

SEQ ID NO: 128492 - DNA, 583 bp, Homo sapiens
tgtttgctgcaggagtggagcccccatggagaacctctgctagggtagtacaaaagggaaatgtagggttaaagcccccacatagagtccccactgcctagtggggctgtgaggagagggccaccatcttccagaccccctgacagcttgcaccattcacctggaaaagccacagacactcaacaccagcccatgaaagcagccaggattggggggctgtactctgcaaagccacaggggtagagttgcccaagatattgggagcccacttcttgcaccagcatgacctggatgtgagacatgtagtcaaaggaggtcattttggaactwtgaagtttaatgagtgccctgttggatttcagacttgcacagggtctatagcctctttattttggccaatttctcacatttggaacaggcgtatttacccaatggttgtacctccattgtatctaggaagtaactaacttgcttttgatttcacaggctcatagactgaagggacttgccttgtctcagatgagactttggacttggacttttgtgttaatgctggaatgagttaagactttggggtactgta

SEQ ID NO: 128493 - DNA, 590 bp, Homo sapiens
caaatatgtgtgataccgggttcctgtcytaaagaagtttgtaataggtttcaagtgacaatacctgtattttactaaagatttggccaaataattaaagcaacaaacaaacaaaatacgtggcatgctttgcttgatgccctctaacaatggccactgctaaatgcaacaagtaccaggctacaagtgggaagggaggtttaaagctcaacctctttgtgcttgtcaggataaaccaccctggtgaagaggaaaacttaacctaataaaaataattttccactatcacttagtttacaggtaatcactccttaaaagaaatcacttactggtccttgaagctctagaatttctccatgtgtatgtctgtatttcagatatatactaaagcctcagggaaagtagaggaaaaccaccaacagtgacacatcttcctaggaccagatatgctcctgagtacacacctaggttgttctcaggcaaatgactttgacagcaataattccttaataataataataataataataataataaaattaataatacagggaaattgcaatcattttccccataaagtaacagtttgg

SEQ ID NO: 128494 - DNA, 577 bp, Homo sapiens
cacatctggtccagaccaaacaaacagaagatttattctgtcagggagatcatttagcattccttttcatgcttcagaaggagcctgtacctgtcactcaccaaagcagtcggcttttggtggctaggctctgttgctctccctgactagccttgatctaatacttctaaggaggctcatgtgcaccgctccacctgggagcccagtacccatgccaagttcatttccatagtcttatagaaacctcctggaggatttcaaacatctgctcataagtaaagaaacattgtcttgagctctaacagtaatataaagggcaactgaaccttcttttgcaaataaagtagagctgataaatgatcttatttcataagactggatacaagtatttgtgtgtctttctgagttcaaatgtttaaaatatagtccattaatcatggggaaaatcagatgtatccaaaattttgccattaagtgatatatagtaaggattgtgaaataggyttaaaagtctgtcatttttctgaaactaaataaatatatttacaaaaactatgccattattcctaaaatgaat

SEQ ID NO: 128495 - DNA, 485 bp, Homo sapiens
atgtaaggtttctcaaaaaatgctttaggaaatcataagaacattatctgagattccttttgaagatagcaacaaactaattaataccttagacagtggtgaagaggtgctttttgtgttaatatagatattctttcttgaagaaatacaagatgtggtctcagttttagggacttacgtgctcataatttgatttctcttgtttattttaagtgaataaaccattaaactttacttctttcttttatcatctaggatcattttgctgtgaagtggcagtccttgggcttcaggtggatgyatgttaatggtggggttgatccatgtgtattgatatccataatgattttattttggtattcttccatctaagatttcaaaggacttcataagtgtctgaattaaaagttgcagcaattctcttaaaaaatctaagccgtcttaaatataagctcctcaagggcacaattttcactatgtgagca

SEQ ID NO: 128496 - DNA, 525 bp, Homo sapiens
gaaactttgtcatgcatttgaagttccttcctttctgcccttcctccctcctctcttcctttcttccctccttcccttccttctttccttctgccctcttactccttttcctccctccctccctccctcctccctcccttgcttcctcccttccttccttccttttcattctccctcctttcctctctctctttctctttctttcttgaatctggtaagggaagaagggaaaaatagattggtaatgagggtttgaggagttttccttggggaaaggttggagtaatacttacttttttttcctagkggtggggaattcatatagtttttcattaaatttcctgcggagatttttttcttattaataccttctgtgttctacatagtcataattcacatataaataggaggtgtataaaatattctttctacaagatgaaaattattcccattgctttagaagtgctcaaaaaaggattctgttcaaaaatgaagtttatacatgacttaaatatacttaatctc

SEQ ID NO: 128497 - DNA, 603 bp, Homo sapiens
tcaaaatagctaaaaaagattctgcagttctaacaacctctcaagtaatgccaatgctagtggtccatggatcacattggaatagcaagattttaagggaaataacacaaggcaatggtgatacagagtggtggggacagggggtggcctcttyagataaggttctcttggaaagcttctctaagcaggtgacatttgttttgagacctgaaagataagaaaaagtcatttaaaaatctacaggaaagatattcctggtagaggggaaagcaagtggaaaggtcctgaggtgagaataagttctggtattttttagaaacagaagaccactgtggccttcttaaattgctcaagtgtttcttccacatttcaggtgttattaagtgaaaagagcactatgtttggagtcataaaacctaggtttggtctccatcccattagctctgtggcctctgacctagtcacaacttttcttagcctcagtttcctcataaatatgggcatattaataaataatacctatcttccatggtcgatgtgaggactaaatgaaataaggtatgacaaagcggattgtaagttacaaaatactatacacattta

SEQ ID NO: 128498 - DNA, 542 bp, Homo sapiens
tagctatgataagacggatttggaactactaacaggaataagtagtgtagaggctaagcatgcaaatcatagatacaactagatttaacagatgtatgttaatagggcaaattacwcaacctcattgagtttcaatttccttgttgataagtagtggataaacatttatctaatagtacttataatactatatttgtctcataaacttaaatggtagactctgtatacaaagtattggggacaaactaagtgctagagtaagtttaggttttattagtgttagagtagtatttagcttgatagggcttctaagagtaaaatcatatcttctaagctatttcttgatattgctctttattcaggccaaaactattagaggttctgcttcagtctttcattcatgtggaccctcaaatttagatatagtacttctttggtctttgatttttttcttttcgaataattggaggaaggtgataactatttcataggattattctgaagaataaatgaattcatagcttaggttagactgtgataca

SEQ ID NO: 128499 - DNA, 542 bp, Homo sapiens
tagctatgataagacggatttggaactactaacaggaataagtagtgtagaggctaagcatgcaaatcatagatacaactagatttaacagatgtatgttaatagggcaaattacacaacctcattgagtttcaatttccttgttgataagtagtggataaacatttatctaatagtacttataatactatatttgtctcataaacttaaatggtagactctgtatacaaagtattggggacaaactaagtgctagagtaagtttagsttttattagtgttagagtagtatttagcttgatagggcttctaagagtaaaatcatatcttctaagctatttcttgatattgctctttattcaggccaaaactattagaggttctgcttcagtctttcattcatgtggaccctcaaatttagatatagtacttctttggtctttgatttttttcttttcgaataattggaggaaggtgataactatttcataggattattctgaagaataaatgaattcatagcttaggttagactgtgataca

SEQ ID NO: 128500 - DNA, 542 bp, Homo sapiens
tagctatgataagacggatttggaactactaacaggaataagtagtgtagaggctaagcatgcaaatcatagatacaactagatttaacagatgtatgttaatagggcaaattacacaacctcattgagtttcaatttccttgttgataagtagtggataaacatttatctaatagtacttataatactatatttgtctcataaacttaaatggtagactctgtatacaaagtattggggacaaactaagtgctagagtaagtttaggttttattagtgttagagtrgtatttagcttgatagggcttctaagagtaaaatcatatcttctaagctatttcttgatattgctctttattcaggccaaaactattagaggttctgcttcagtctttcattcatgtggaccctcaaatttagatatagtacttctttggtctttgatttttttcttttcgaataattggaggaaggtgataactatttcataggattattctgaagaataaatgaattcatagcttaggttagactgtgataca

SEQ ID NO: 128501 - DNA, 542 bp, Homo sapiens
tagctatgataagacggatttggaactactaacaggaataagtagtgtagaggctaagcatgcaaatcatagatacaactagatttaacagatgtatgttaatagggcaaattacacaacctcattgagtttcaatttccttgttgataagtagtggataaacatttatctaatagtacttataatactatatttgtctcataaacttaaatggtagactctgtatacaaagtattggggacaaactaagtgctagagtaagtttaggttttattagtgttagagtagtatttagcttgatagggcttctaagagtaaaatcatatcttctaagctatttcttgatattgctctttattcaggccaaaactattagaggttctgcttcagtctttcattcatgtggaccctcraatttagatatagtacttctttggtctttgatttttttcttttcgaataattggaggaaggtgataactatttcataggattattctgaagaataaatgaattcatagcttaggttagactgtgataca

SEQ ID NO: 128502 - DNA, 640 bp, Homo sapiens
aaagagtaaaagaacaaatgctaaagagtgaagatttcatattaagacaatgatcatactatattttaggtcttaaattggtactatacaattaacttctacctctccatcctttgttaacaaacaatgttggttttccctgacactttcattctctatatcaccacccttgcctttagtattaactagatgcttgtaaattcatttggtttgttacatatagggaagcattttaccattgtgacttttcctccatttaaatgttgaatgtctttctgattttatgattcagggatattaactgttatctctagggtgccactatgatcgcaaatacactgagtaccttggatgcttgcaatgcaaaacacttacagtaacctttatataacccacttggcatagctgagtatgtatctctcaaattccctcttcagtacacaagattattaagacttggttataccacaataacttcatgccaaagcacatgctgacagcatgtttagtacagggaatagaattttccacattcttctcttgcgacgtatcrctgctgtttcagcttctagaattaactgaattctctatagtgtgttcccacccccagtttataatatttctttcctgatcctattca

SEQ ID NO: 128503 - DNA, 593 bp, Homo sapiens
gtgctcttttagttataagccaatttggtaggcacaacgtataacaataagtgtacatgcaaataaacacatmtagtcatatatacacacacaaacaaagatccaatagcctttaccttggaactctagccatgagatagcaagacaaactcactggttttacatggttacaatttgcttgtcccagtgggtaacccaatgaaggctgtgaaccaaaattttgggtaaagcagtttccatgacagtttgatttttaaactccaaagaacattcaggccaaacagcaccaaaggagagtgtcacatgctaaccaggccagaccctgattagaaaagcagtacaaaagcctgtatacatgcaactccttcccactttcccattcaacagcaaactccagattccaaacaatattggggccaaacaatatttcaaaagaatatcaagtgtttcctccttaggttatcagggtcaaattgattccagtggttgaggatgcagccaagtggggagtgaggtggaatagatgcaatgtttctcatagtaatctgcaagaaagagaaaattctaaggaaggcttagtactagacctcaga

SEQ ID NO: 128504 - DNA, 593 bp, Homo sapiens
gtgctcttttagttataagccaatttggtaggcacaacgtataacaataagtgtacatgcaaataaacacatctagtcatatatacacacacaaacaaagatccaatagcctttaccttggaactctagccatgagatagcaagacaaactcactggttttacatggttacaatttgcttgtcccagtgggtaacccaatgaaggctgtgaaccaaaattttgggtaaagcagtttccatgacagtttgatttttaaactccaaagaacattmaggccaaacagcaccaaaggagagtgtcacatgctaaccaggccagaccctgattagaaaagcagtacaaaagcctgtatacatgcaactccttcccactttcccattcaacagcaaactccagattccaaacaatattggggccaaacaatatttcaaaagaatatcaagtgtttcctccttaggttatcagggtcaaattgattccagtggttgaggatgcagccaagtggggagtgaggtggaatagatgcaatgtttctcatagtaatctgcaagaaagagaaaattctaaggaaggcttagtactagacctcaga

SEQ ID NO: 128505 - DNA, 593 bp, Homo sapiens
gtgctcttttagttataagccaatttggtaggcacaacgtataacaataagtgtacatgcaaataaacacatctagtcatatatacacacacaaacaaagatccaatagcctttaccttggaactctagccatgagatagcaagacaaactcactggttttacatggttacaatttgcttgtcccagtgggtaacccaatgaaggctgtgaaccaaaattttgggtaaagcagtttccatgacagtttgatttttaaactccaaagaacattcaggccaaacagcaccaaaggagagtgtcacatgctaaccaggccagaccctgattagaaaagcagtacaaaagcctgtatacatgcaactccttcccactttcccattcaacagcaaactccagattccaaacaatattggggccaaacaatatttcaaaagaatatcaagtgtttcctccttaggttatcagggtcaaattgattccartggttgaggatgcagccaagtggggagtgaggtggaatagatgcaatgtttctcatagtaatctgcaagaaagagaaaattctaaggaaggcttagtactagacctcaga

SEQ ID NO: 128506 - DNA, 591 bp, Homo sapiens
taagccctacataaatcatgaaaacatgaagattctgagaatatagaaatacctgcaacagaaatagcacataagatactacttgaactcatttatgtggtatttaagatcaatgtatttgcatgtacatatttttaaatgaaggaaatattttataaatatttctgtattgagattaatttcataagtaccccaaaaagcttacttagcatcataaggttacatttattatttttgtgtgtcacacactgctatacaggctttatttataatatgccacatgaaccctattgtagtgatggggaaactcagatckaggaaggctaagtgacattttcagggtcacacatctggttagtggcagagccataatttaaatcaggggatctgacacttaaccacattgttctggctactcaattatatatttttttctgattattttcttttgaaactattttccccctaagtatttattagcaacataattggggttgattgattgatagattgaaagagcctaagggcatgggatgagaaggggagggattattttcaaaagaggtaaagtagttccaaaaataatggtgt

SEQ ID NO: 128507 - DNA, 660 bp, Homo sapiens
ttattcaaatattaatcagagaaccacctgaaagtgattatctactttctcaacataactttttcccactataaacattcattgttatgcagaatatataaagaacttctgaaatccaacraaaaacaaatgatctgattgaaaagtgtgtaaagaacttgaatcaatagtttttcaaagaagatatacaaataatcaataaacacacagaaagatggtgaacatcactaatcattggggaaataaaaatgaaagctacaataataaaccacctcacattcattaggatggctactagacaaaaaacctaaaaaatagcaagtgttggcgaggatgtggagaaattgaaacactacaatgttggttggaaagtaaggtggtgcagcccaaaatttcagttacacaaaagaaacaagttcaagagattaattttacatcccagtaactatagttaataacaatatattgtacacttgaaaattgctaagagagtagattttaagtgttgtctgtacaagaagtgaggtaatacatatgttagttggcttgatttaaccattctacaatgcatacacatatcaaatatcatgttttacaaaagaaatatatacaatttttattaataaattgaaagtttaaaataaaatcatatggaaattg

SEQ ID NO: 128508 - DNA, 660 bp, Homo sapiens
ttattcaaatattaatcagagaaccacctgaaagtgattatctactttctcaacataactttttcccactataaacattcattgttatgcagaatatataaagaacttctgaaatccaacgaaaaacaaatgatctgattgaaaagtgtgtaaagaacttgaatcaatagtttttcaaagaagatatacaaataatcaataaacacacagaaagatggtgaacatcactaatcattggggaaataaaaatgaaagctacaataataaaccacctcacattcattaggatggctactagacaaaaaacctaaaaaatagcaagtgttggcgaggatgtggagaaattgaaacactacaatgttggttggaaagtaaggtggtgcagcccaaaatttcagttacacaaaagaaacaagttcaagagattaattttacatcccagtaactatagttaataacaatatattgtacacttgaaaattgctaagagwgtagattttaagtgttgtctgtacaagaagtgaggtaatacatatgttagttggcttgatttaaccattctacaatgcatacacatatcaaatatcatgttttacaaaagaaatatatacaatttttattaataaattgaaagtttaaaataaaatcatatggaaattg

SEQ ID NO: 128509 - DNA, 660 bp, Homo sapiens
ttattcaaatattaatcagagaaccacctgaaagtgattatctactttctcaacataactttttcccactataaacattcattgttatgcagaatatataaagaacttctgaaatccaacgaaaaacaaatgatctgattgaaaagtgtgtaaagaacttgaatcaatagtttttcaaagaagatatacaaataatcaataaacacacagaaagatggtgaacatcactaatcattggggaaataaaaatgaaagctacaataataaaccacctcacattcattaggatggctactagacaaaaaacctaaaaaatagcaagtgttggcgaggatgtggagaaattgaaacactacaatgttggttggaaagtaaggtggtgcagcccaaaatttcagttacacaaaagaaacaagttcaagagattaattttacatcccagtaactatagttaataacaatatattgtacacttgaaaattgctaagagagtagattttaagtrttgtctgtacaagaagtgaggtaatacatatgttagttggcttgatttaaccattctacaatgcatacacatatcaaatatcatgttttacaaaagaaatatatacaatttttattaataaattgaaagtttaaaataaaatcatatggaaattg

SEQ ID NO: 128510 - DNA, 588 bp, Homo sapiens
cagtgtgcaaacctttacattagtaatcaaatctctattgctagaacatgcctaaaccattgaaaagcattcaataagcgctcaaggagcaaagagaagaagaaatatagccaaccacagtaatttacactttcctcaattatatttcaaaaaataatatttcaacaatcactaataaaaatggtgggtaaaagttcaatgagaaacaggatagttacagtcttaacctagttccccacaatatagctttaatacttattaagtattaagtacaaaattactggtaaatacagargggaaagctggaagacactgttttgtcaaagtgataaaagccatcactaccaataatgaaacagatacattgtgtgtcttttgtgttacatgctatgataaaaacagtatcatttttgaaacattcatgcacaaagtctacgaatcatgagaaaatatcaggtgaattaaaatttagagacattttatacactcctctggtcctgaaaaatattaaggtcatgaaagtcaaggaagtattgtggaaatgctaaaattgagactaaaaaaattgaaaactaaacttggttttag

SEQ ID NO: 128511 - DNA, 565 bp, Homo sapiens
aacttgtgttgatttgaattgacaaatttatcatagggaaagtgcccatctgtgaatagaatgaagtttaaaagtatgtttattagtcttgctgttatatgggatttagtattcttcattttgtttggttataccactatgttaaccatttatttttcttatttcaaaaatataactagaaatataattagaattgacatgacatacagttattccataaaagaaggtggtaaaaacaaaaatacagttgtcccttagcataggcagattattagttctaggattcatgtatataccaaaatctgcacatactcaggtccttaattgaccctgtaaaacccacacaggtttcacatccatgaatattgtatttccatctatgcttagttgaaaaactgcatgtacaagtggaccctsacagttaaaattcgtgttgtccaagggtcaactgtaaagtttaataaaatatttcctcaaaaagaaatgcttcatggtgaaaataggtgtattttacttttagaataatattttaggaatcatgattggatgaaagcagaaactgctg

SEQ ID NO: 128512 - DNA, 650 bp, Homo sapiens
tggggttattagcactatttcttctcagctgatagatttggtcattcatcatttttaggaaagagggaaagactccagcctttcacacctatgttgtaagcattgtttgtaatattctcttttcagctgtgatgactagaaattcagttcaaaagaagataatttctaaggaacacacacacacacacacacacacacgtgtatatatattttctggtgacctaaagacagagacttagtacaaaagtgcctcaatgggcctgtaattgagaagtggcggaaatgtagataattacgattttctctttatctctgtaaattctcttgttctttkacacttttttttgaagtatcttcccttatctttgtgtctttttctgtagctctctcttctctctttgggtttcccccatttgttcacattgaatataactgtgagtctgtgttttagttccaataagcagcatcaactttgcccttatcaatctttagacagccttaagcttgtctctgattaagctcaggctactgtgccatcagctgctgaaaattctatgttattgtcattgtttgtgtgtctcctctaatctaatttcctaaagtaaaaagtggaggactaagtaaggctatgcaatttttgtccacccaag

SEQ ID NO: 128513 - DNA, 601 bp, Homo sapiens
tggcccaacacaaacatgtaaatgtccttaaaacattataagatttatttgtgattttttattatcagctcatcagctgtcattcacgttagtgtaatttgtgtgtggcccaagacaattctttttcttccagtgtggctcagggaagccaaaagattagacagacacctctgaattagttcagtgcattatgaacactcttactttgtattaccatgaaggcattaaacaaacaaaaaaaatcagcagtattttacaataactgtgatgagtacactagaaattgcatagaaattaaatgcccctmattaaaggcctgacaacatatattgtccagtacatatttttacatattgtctactaccaagttccaacagataattcaagtggtacttaataaacaaaaggtgaccaaatgagaaaatgaacttatacaaaagaaagaagaatgcttcttcttctgaacaatagtgcagactgacaaagattctttgcctggccaaacttgatcaggcttctgaatcttctcctaggctcatctgtatacttcctcataaaatcactttttaacaaagaaccatactatatcactttaccaaga

SEQ ID NO: 128514 - DNA, 643 bp, Homo sapiens
tatccaacctttttagactatactgaaatatttttcaaagtaggatcctgcaaattaacagcagcasaatcaccttgggtgtgtattaaatatacatatttctggaccctacctcagatgttctgaataaaaatctcagatgatggaagtggaatatctgcatttttaattagctcttcagggaattctaaggtacactaaaggcaaagaatcattgcctaattggtcgtgttcttcctcatggctatcatttattgagtaattgttcactagatatcagctaatattcccataactgaagtttatgctaatgtatgtagataacaataacaggacatccaaacatatgcttgtaaaacacagacatggtttatatacttataaaacatagatatccttacatgcttatataacatagacatgcttatatgcttataaaacatagacatttattatagttattattagtggaagtttaataaaatttctggaattatgcagctcaatgtttggtttgacagttcaattatatcaccagggacttaggttccttccatccttatacttccctcttctctggaatgtggttattttcccaatgccttatcagctgggaggtatttgtgtaccatggccataagca

SEQ ID NO: 128515 - DNA, 585 bp, Homo sapiens
tataattaattatttgctatatcktccacaataggtcaattgtgttccattaattcttgacagaaaagttaaaaattaaattatttaagacaaaacgtttatccaaatattaaaagtgtcaatcactaaaacaatttgacttagatttaatatagcaaaagtatcaaggcaacacagtctggaattaaacacaaaagctacacaagaattggaggtttgcctgtaagaagtattataagatttgattttatgaccatatctaaatatgtcaaagagattacctgactgtattattatagcgctttctttccttttctcctgtattttttggtatcttcttgaacacaagaatgctctgacacaagcttgaatcaaaataagcttgtcaatagcttcctttcgcattagatttaactgctccacgtgataatacttaaggaacacctgaaaaattaaaatataatacaaagaaccatggcacacagatgtgaagcagttatgtgctgtgctttgaagaacagaacacattctaaattgcttgagattttggaaatcactgtcttttgcttctttgccctagatgtc

SEQ ID NO: 128516 - DNA, 495 bp, Homo sapiens
gtcgcccaggctggagtgcaatggcatgatcttggctcactgcaacctccacctcccaggttcaagcgattctcgtgcctcagcctcccgagtagctgggattacaggcaccctgccactgcccccagctaatttttgtattttaagtagagacggggtttcaccatgttgcccaggctggtctcgaactcctgacctcaggtgatctgccccacttggcctcccaaagtgctgggattacaggcatgagccaccgctccgggcccttattattgtttactagataattttaatggcacataggagtccattctagggatgtcagaacttatataaccaatgccctactgttgggcagagagaatgggatatatataaacctagcagatgacgtgaatgagctaaaggagaaaagtgaaacaacaactaaacaaaatraacaaaacccaacacatgtagaaaatagtccaaatcaacacattttctaggagagac

SEQ ID NO: 128517 - DNA, 602 bp, Homo sapiens
gtttttcctcctctttttcataatatgtagccacctgaccaagagtagtgttgggagagagactgtccctaccacccaggagacarcaggagggagaggtcatctagtgatcacactcctgcttctcctctccaagggcaaagggctgcctcagcagctgtcacatcctgctgccctttgaaacagaaaaccagtctagagtttcacacttatctcctgctttgcattaccaaattggcagtcttgctagaccctagtaattgcctttcatagatgaaggaagtgaacgctctagggaatggtgaatggggagggcatttgtgtttgggaaggggcagtacctggttcagctgtctgccatccatcagatggttctgcagatgaaacaagcacagaggaggaagagaacacacaaggtcacttggtctatctcaggcaggcaggcagaatcatatctttgtgcacagtgaaccatagagtcttgtgaggagattgctagtcatacaaaggcacatcatgaaggacttcaaagattcccattgtggactcacaaatcacagttactcaactcaccttctagtcagactagcccctgttttccc

SEQ ID NO: 128518 - DNA, 602 bp, Homo sapiens
gtttttcctcctctttttcataatatgtagccacctgaccaagagtagtgttgggagagagactgtccctaccacccaggagacagcaggagggagaggtcatctagtgatcacactcctgcttctcctctccaagggcaaagggctgcctcagcagctgtcacatcctgctgccctttgaaacagaaaaccagtctagagtttcacacttatctcctgctttgcattaccaaattggcagtcttgctagaccctagtaattgcctttcatagatgaaggaagtgaacgctctagggaatggtgaatggggagggcatttgygtttgggaaggggcagtacctggttcagctgtctgccatccatcagatggttctgcagatgaaacaagcacagaggaggaagagaacacacaaggtcacttggtctatctcaggcaggcaggcagaatcatatctttgtgcacagtgaaccatagagtcttgtgaggagattgctagtcatacaaaggcacatcatgaaggacttcaaagattcccattgtggactcacaaatcacagttactcaactcaccttctagtcagactagcccctgttttccc

SEQ ID NO: 128519 - DNA, 609 bp, Homo sapiens
cacttccatttgtggtagtaatggagcttccacctctatttctctgctttcctttatactttacagcaaaactcctccagagatgtctctactcatcgccatcactgcctttcctctgaagtattcttccatccaattcaatcacattttcattcctaccattkcactcaaattgcttttgttgaggttaccaatgacctccatgtttctaattccagtaggcaacacaaggatggaagttagcccacatggcgtctttatgtgaaataggctctccttcttctgccaaggctcaaccccatgccagggtgtcagagagattctagataccactcactccattatgcaattaacaacctgcacaactagaaatactagtcctggtctattttcaggtctcatcttacttggtccatcaacagtatttgatgcagttgatcattccctcatcctgaatagactttctgtgctgggattctcgcacatcaccctctgttctttctctacctcaatggcgttccttctcaatctcctttgctgaatttcccctatgtccctcatctctaaatactacaggggccaagaaccaattccatgttcctcttctat

SEQ ID NO: 128520 - DNA, 606 bp, Homo sapiens
ggtaaaatagagcaagtctatattgtataaggcatgatcctttttttttttagaagaaaaggaataagtttgtatatgtatttttgggtgtatataaaatggatctaagatagcacccagttactattccccaaactggagaaggaaacaggattgaggaagagagactgggataggaaagggaagatcttgactttgggctctgtatacttgtatatatatttttttataacaaatgaatgtattcatttttaatcatgtagctaaattcttttaaaggatgaaaaaagttaaaagataagtacaccaaactgttaacagcaattctctctggggagtaggaggtgggaacttttatgttacattctttacatctctacattacaggaatccttawccaagaggatgcattaaattattaatgatgattagtgttaatttgttctagtttttaagaattccctcctttggagaatcacagcctgttaagaaaataatgtgtaaagggggcatccatagacccccaaatcccttgttctcattgtatttttccctcgagaccctactcccactcctcacctcacctccagtaaggacagatgccca

SEQ ID NO: 128521 - DNA, 618 bp, Homo sapiens
tcaataaaaacaactgaagcattaaaaaaaaaacactgaaataattaactcatyggaggtggggggaggggggagggaaagcattaggagatatacctaacgctaaatgacgagttaatgggtgcagcacaccaacatggcacatgtatacatatgtaacaaatctgcacattgtgcacatgtaccctaaaacttaaagtataaaaaaaaagtggaaaaaaaaaagtaactcatcagatacattctgagtcttccatatgaaaggaggactttgctaagtgatgcaacaactttgtaaatagtcattcttcccaaggcagaaaacaattatttctgagtggtaaacaattctgatttcacgaattgtaggtggctgcactgcacagtgaaacagataactctaaagactgataaacctaaaataggtccttgaaatttatgaagggataagtgcccaaacatgacaaaataccgtaatctaaattctaaaacaacaccataggatatatttctctcatacagtgaagttaggtacaacagaaagttttaatttgcgtcttcagatccttggacttactgcctattaaagaagagaagagtcttgaaagtctactcact

SEQ ID NO: 128522 - DNA, 513 bp, Homo sapiens
tttattgaaaagccttgcctttgaaaatgtgacttggtccagttggaacagcttcaggcatctcagcctcacatgcctccctctctcattgctcctttccctagtcttgcctgaccactggggcaagatcttgtaccttcttacttaaataaagaggataaagaatggcagctcctctctcaggagtggatttctgcatgccctttttccattttccattctaacccatggtttgcttggatcttcatatcacccagttaataaactcacattggatcttcttgactgccgattaattaaacacattactatactatctggctactcctttggtcacaagtccattcttcccaattgtatgttgactgcctctcatccaaggctttaagtatcaagaatgtctactggcacgctaacatcttyccaaggtatggctcaatcagggcacaattattgttcataaaggaaatggagaaactgcccttgaaaaagcaaacaaggaagagacagtta

SEQ ID NO: 128523 - DNA, 619 bp, Homo sapiens
tttatttattttccagtttcctggttggtcgatagcagctggccacaatatccagtgggtagtcatcaaaactaaagaaagtgaatttgtatggaaagtattttggtagaaagtttccacgatgaaatttagcccagccctgcccattcatattcaccatttcctgtggtatttcagtgttccttgtggtgggaaattgtcactgaaataatataagtgtcccagagcatgtgactttgcttctactaaaaggttttgttttttttttttttttcttggagacagggccttgctctgtcgcccaggctggagtgcagtggcgcaatctcagctcactgcaacctccgcctcccaggttcaagcgattctcctgcctcagcctccacagtagctgggattacaggtgtgtgccaccatgcccggctaatttttgtatttttagtaragacagggtttcaccatgttgtccaggctggtctcaaactcatgacctcaagtgatctgcctgcctcggcctcccaaagtgctgggattacaggctactaaaagttttaaaagcagcatggtggtaaggaggaaacgtgtaacgtttctccatcagagcagaaggctgtggtgt

SEQ ID NO: 128524 - DNA, 582 bp, Homo sapiens
cctgcagacaagtcctcactacacagaggtagtgagagagtgtatgcaggaggccttgtctttatgcataacctgctagcaatgtagcaagacagtgctgggggcacagcaataaaattacacttcgtgcccagattatagatccaggtgaggtgacttgctagagaaagggcttccccattccccccagctatataaggtaatgaattatgctagggtytcaggatttcctgattggcagggtaggaggcttggttttccccctctgctcccactcagggcttcctgtgatatggcaggcggaaaaccaccaccatgaccactcatgaaaatgggagacgggccgggcacagtggctcacacccgtaatcccagcactttgggatgctgaggcaggtggatcacatgaggccaggagttccagaccagcttagccaacatggtgaaaccctgtctctactaaaaaaaaaaaaatacaaaaattactcaggcatggtggtacacatctgtaatcccagatactcgggaggctgaggcacaagaatcgcttgaatccgggaggtagaggttgcagtgggccaa

SEQ ID NO: 128525 - DNA, 647 bp, Homo sapiens
tgtacagtactagttttgtggcactcaataatgttgtattgatttagatctgcatctcaccacaaagcagctagaagagatgtttttccrtggaacttttcgaggcctgagacacagtttccacacagcatctttttagaatcctgaagtgtgctagcctacaacccaaaagtacagatggccttccaggctggagcgccacctgactggctacctggctgccccagatcgaattcccacattcccactgacatgactcagaccgaatgtgggtgatttctattcccatggttagcgtgttcactggaaaagaaaaaggccctgaaccaagagtctgatcatagttaaaacattaaagaataagagaaaaaacaggaagagggtattctaaaccaaaatggctcaaaggagtttcacacctaagtaaccagacaaggagaggtaaagaaaattttaaaaaggcaagaaggggccaggcgtggtggctcacacctgtaatcctagcacttgggaggccaaggtgggcagattgcttgagcccacaagttcgagatgagcctgggcaacatggtggaaccccatctcaaaagtttaaaaaaaaaaagtcaaggacagacgtaaaagaaaagggccttaaatttaatact

SEQ ID NO: 128526 - DNA, 563 bp, Homo sapiens
tggccaagggagttctaatataatcacttactggctggcaatcacttacctcctctgaaccctgttgtcccatccataaaatggggttaataatagtacctgtctcataaggttgttttgatagcttaatraggttatgtacaatagggtccaaaatctcttctcataactgatagtcataactcatatgaacaacatactttatatggctacaaagaagattatttgctttttttttttaagagataggatctcgctttgtcattcaagctggagtgcagtggcgtgattgtggctcactgcagctttgaactcctgggctcaagcaatcttcccaagtagctaagacttacatatattttgatagatactgatagtaggaataggtgcatcttgaggtgtgtggtgtaccttaaatattcagaaagtaaaagatgaaagaaaaggaagaatgctttctagaatagtaagattatatagtgagactatgataaaactcaaggcatatggggaaggggaaacaaccagttctgcagaaagagtacataaattgtggagaagaa

SEQ ID NO: 128527 - DNA, 396 bp, Homo sapiens
gttggccaagggagttctaatataatcacttactggctggcaatcacttacctcctctgaaccctgttgtcccatccataaaatggggttaataatagtacctgtctcataaggttgttttgatagcttaataagrttatgtacaatagggtccaaaatctcttctcataactgatagtcataactcatatgaacaacatactttatatggctacaaagaagattatttgctttttttttttaagagataggatctcgctttgtcattcaagctggagtgcagtggcgtgattgtggctcactgcagctttgaactcctgggctcaagcaatcttcccaagtagctaagacttacatatattttgatagatactgatagtaggaataggtgcatct

SEQ ID NO: 128528 - DNA, 527 bp, Homo sapiens
caaaaattagctaggcatcgtgggaggtgcctgtagtcccagctacttaagaggctgaggcaggagaattgcttgaacctgggaggcggaggttgcaatgagccaagatcgcgccactgcaccctagcctgggtgacacagtgagactctgtctcaaaaaacaaaccaaaaagagagctgcattcattgctgaagggtgagggcaggtgagggaagggagctggtgttggaggagctactccatgcagggcgcacttggctgagtgctccactagttttctctcattcatactgtacgagagaggcactttatmcctattttacacgtgacgaaatgggagctctgaggggacgtggggaatctctcagctggtgaggagcaacgacaggctgtcactgtaccccaccaatgcttttgacatgtgctcatctcaggatatgtgtgcaagggtgaggatcttggcctaggacggggctgactgctgttagactagggtgtactcagattccagtctgcaactgtgggg

SEQ ID NO: 128529 - DNA, 575 bp, Homo sapiens
gttaaaaaagacaaagagggcattatataatgataaaaggcctagtccaacaggaaaacatcacaatcctaaacgtatatgcactgaacactggaactatcaaatttataaaacatttactaacagaccttagaaatgagacaggtggcaacataataatagtgggagacttcaatactccactgacagcactggacagataatcaagactgaaggtcaacaatgaaacaatggatttaaactataccttggaacaaatagacttaacagatatatacagaacattccatccaacaaccatagaatatacattctattcagtgcatggaactttctccaaggtagaccataygacaggccacaaaatgagcctcaataaatttaagaaaattgaaattatatcaagcactctctcagaccacagtggaataaaactgaaaatcaactccaaaatgaactttcaaagccaggcaaatatatggaaattaaataacctgctcttgaatgatcattgggccaaaaatgaaatcaagatggaaattaaaaaattctttgaattgaatggcaacaatgac

SEQ ID NO: 128530 - DNA, 618 bp, Homo sapiens
gaattccttcttgggtactttaccccatcaggaagcccccaccccttccctcttcagtctcacccctctctacaaacatgcagaagtacatcctggaaagcctcccytcaagtcagagattcctgggagttcttgccctctacatctcacttcagttgttgccaatgttcttcaaagtattattcatttatttactaaatatttagtgagtttctctcactttgtggcaagcattatgctagatgttggggaaataaagagcaagctgaggttccactttctagttaaggaaataagaatccctacccaaagaaaaatacaacagactatcactcacgttaatgttattacgaaacaaggagctgtaatatagagtaatcagagtctctactgaagataggtaggaaaggcctctccaatgagggagtattttggataagacctgaaggatgaaaaggagccctgggaagagtgaggaaaatggcaattccagctgagggaacagcttgtgcaaaggccctgaggcagaaagatcctggcttgtttgaagagccaaaaggccactgtcattaaagtgcagtgagcaagggtaaaatcaaaatgatcttaggtaggtgg

SEQ ID NO: 128531 - DNA, 583 bp, Homo sapiens
cgcaattggaataccaaaaggaaactaaagaatagagcagaagaaatttaaattaataatggctaagaactatccaaaatgaatgtcagacaccaaaccacagatctaagaagctcagagaataccacataagataaatttaaatacacacatacacacatgcacacacacacacacacacgtamatataggtgctcctcaacttacaatgaagctttctcccaataaactcgttataagttgaatatattgtaagtcaaaaatgcatctaatacacctaacccaccgaacatcatagcttaacctagcctaccttaaatgtgcccggaacacttaaattagcctaaagttgggcaaaatcatctaacaaaaagcctattttataataaaatgttgaatatctaatgtaattgattgaatactgaaagtgagaaacaaagtggtctccaggctattctacaaaagcctcttcagtggcagatccactttactggaagttgagcctgaagcattatcttttaccaacacgtaacttccattttagacatcatttctatagtaaaatccatcccatattttcagt

SEQ ID NO: 128532 - DNA, 626 bp, Homo sapiens
  misc_feature (1)...(626): n = A,T,C or G
aattgctgtgttcactgtgtcagaaaagagaaaacaggccagaaacttgttcttatgagactaggtgactatttatngtttgctggttgtttcaatagtgtctatattttccaggacagggtatatacatcatagcacgtgggcaatattctgcgaaatatttcttatattggataaatcaaacaggccaatggaggctcatarccttaggaacttctagccatcataagggtaagacctaagcaaataatttcccagcaagaatacaattctcaagaagaaacgaattatttactatggattcattgcagcctcccactcaagacagcacagggtcataatttgtgattaaccaataactctaatactatttaataagtatattatttttatgtaatgccttaatgtgaattttaaacaatatacatttgcacattgtgtagttaacttgcataatttataataaatttgaatactatatttcctattttaaaatatatttttttatttcaatagctttaggggtacaaatggtttctgcttacatcagtaaattgtgtagtggtgaagtttgggccttttgtgtctccactgctggaccggtatgcagtgtacccaacaggtga

SEQ ID NO: 128533 - DNA, 554 bp, Homo sapiens
tacagatttggggtatatgctaaagtaaccaaagttgtagaaaataacgccgggcattgtggctcacatctgtaattccagcactttgggagggccgaggtgggcggatcatttgaggtcaggagttcgagaccagtctggccaacatggtgaaactccgtctgtactaatagtacaaaaattagccaggcgtgatggtgtgcayctgtagtccttgctactcagaaagctgaggcaggagaatcgcttgtacccaggaggcagaggttgcagtgagcagagattgtgccactgcactccagcctgggtgacagagtgctatgagtcaccacacctggtatgagccaccgtgcctggcccacaatgacttttacacatgttgttaaatcatcttacagattttataatttgggggaagaaaagttttactaaatggtcttttaatggaaactctacaagaaccagaatctttgctttgttcacttatgtatccattcctaggcctagaaaaatgtctgacacatagcggcaattattcattgaataaatggacc

SEQ ID NO: 128534 - DNA, 564 bp, Homo sapiens
ttttttgtagtgacacattttgtttctagtctcatttccttttgtttatattctatgtatatttcatttttggttactatgagaattacatawaacatcctagagttataacattttaattcgaatttatttcaacttaagttcaatcacataccaaaattctactgctatatatatagctctactcttctttatgttattgatgtaacaaattatgtctttattcattgtataccagctaacagatttacaattacatttttatgccatttgccttttaaattatgtagaaaataaaaagcagagttacaaaccaaaattacaataggactgtttttatgtttgtttatgtatttacctttaccagagagctttgtatattcatacagcttgcttatttacttatatagttattgcctagagttcatttatttcaacctgaaggacttaacacttcttgaatggcaaattcagggataaatggatttttttcagttttaaaaaaaaatccggaaatgtcttaatttctccctcatttttgaaggataagttttccagctatag

SEQ ID NO: 128535 - DNA, 564 bp, Homo sapiens
ttttttgtagtgacacattttgtttctagtctcatttccttttgtttatattctatgtatatttcatttttggttactatgagaattacataaaacatcctagagttataacattttaattcgaatttatttcaacttaagttcaatcacataccaaaattctactgctatatatatagctctactcttctttatgttattgatgtaacaaattatgtctttattcattgtataccagctaacagatttacaattacatttttatgccatttgccttttaaattatgtagaaaataaaaagcagagttacaaaccaaaattayaataggactgtttttatgtttgtttatgtatttacctttaccagagagctttgtatattcatacagcttgcttatttacttatatagttattgcctagagttcatttatttcaacctgaaggacttaacacttcttgaatggcaaattcagggataaatggatttttttcagttttaaaaaaaaatccggaaatgtcttaatttctccctcatttttgaaggataagttttccagctatag

SEQ ID NO: 128536 - DNA, 564 bp, Homo sapiens
ttttttgtagtgacacattttgtttctagtctcatttccttttgtttatattctatgtatatttcatttttggttactatgagaattacataaaacatcctagagttataacattttaattcgaatttatttcaacttaagttcaatcacataccaaaattctactgctatatatatagctctactcttctttatgttattgatgtaacaaattatgtctttattcattgtataccagctaacagatttacaattacatttttatgccatttgccttttaaattatgtagaaaataaaaagcagagttacaaaccaaaattacaataggactgtttttatrtttgtttatgtatttacctttaccagagagctttgtatattcatacagcttgcttatttacttatatagttattgcctagagttcatttatttcaacctgaaggacttaacacttcttgaatggcaaattcagggataaatggatttttttcagttttaaaaaaaaatccggaaatgtcttaatttctccctcatttttgaaggataagttttccagctatag

SEQ ID NO: 128537 - DNA, 564 bp, Homo sapiens
ttttttgtagtgacacattttgtttctagtctcatttccttttgtttatattctatgtatatttcatttttggttactatgagaattacataaaacatcctagagttataacattttaattcgaatttatttcaacttaagttcaatcacataccaaaattctactgctatatatatagctctactcttctttatgttattgatgtaacaaattatgtctttattcattgtataccagctaacagatttacaattacatttttatgccatttgccttttaaattatgtagaaaataaaaagcagagttacaaaccaaaattacaataggactgtttttatgtttgtttatgtatttacctttaccagagagctttgtatattcatacagcttgcttatttacttatatagttattgcctagagttcatttatttcaacctgaaggacttaacacttcttgaatggcaaattcagggataaatggatttttttcagttttaaaaaaaaatccggaaatgtcttaatttctycctcatttttgaaggataagttttccagctatag

SEQ ID NO: 128538 - DNA, 601 bp, Homo sapiens
ttgacatcagttccatatttgtgatgtcttaccaaacattttaatcccatcactttaaatctaygaagttaaaattactctctattgaaaagtagtagtctatcctaccattcaatcatatggcagcgccaatattttccacatcatataggtttcaaatcacctagtcattgctgatttgtctttatcatcattcttatttactttaaattcatccacagaaccttgcatatgtccttacaaaaggcaaacatttaataaatgcatactgaatcatcaagtctatacggttttctttttaacccatttcatccatcttttctttcttcatcattgtgacttccaccatctacatgagatcctcatcagatgtgtctagcactcatcattctcatccctacagtattttgctgatgttgtttttctgattgcagccactattgactattatgtatctctggcagactaaaattgttttcatcctgttatctcttgttcaaagttttagtattcatcattgccaattcagctggacgcgaaaatcatctacaatctagctccaaccaatctctacaacaataccacccacaacttctcaatg

SEQ ID NO: 128539 - DNA, 601 bp, Homo sapiens
ttgacatcagttccatatttgtgatgtcttaccaaacattttaatcccatcactttaaatctacgaagttaaaattactctctattgaaaagtagtagtctatcctaccattcaatcatatggcagcgccaatattttccacatcatataggtttcaaatcacctagtcattgctgatttgtctttatcatcattcttatttactttaaattcatccacagaaccttgcatatgtccttacaaaaggyaaacatttaataaatgcatactgaatcatcaagtctatacggttttctttttaacccatttcatccatcttttctttcttcatcattgtgacttccaccatctacatgagatcctcatcagatgtgtctagcactcatcattctcatccctacagtattttgctgatgttgtttttctgattgcagccactattgactattatgtatctctggcagactaaaattgttttcatcctgttatctcttgttcaaagttttagtattcatcattgccaattcagctggacgcgaaaatcatctacaatctagctccaaccaatctctacaacaataccacccacaacttctcaatg

SEQ ID NO: 128540 - DNA, 630 bp, Homo sapiens
aaatattaaagtatctgaagggaaaggtatatttcaatacaatgtaagtagaggatttaataatcactttcaatattggatagacataaaatcaataagaaaacagtggacttgagcaacatttcagactaactggacctggcagacatgtacaaaacataccaaaccaacaacaaccaaatacacattcttgtcaagagcacacagaacattttccagaataaaccatatattaggtcacaaggcaagtctaagcaaatttaagaagattgaaatcatatctrgtatttttttctgatcacaatgggttaagactaaaaatctgtaacagtaagactttcagaaaactcaatgaaattaaacatgctcctgaatagccagttgatcagtgaataaaagggaaattaaaaaatgtcttgagacaaatgaaaatggaaacacaacataccaaaatttaggaatgcagcaagagaagttctgaggggtgagtctgtagcaataagtgcctatatcaaaaagaaaaaatatttcaaataaataatgtcacaccttaagaaaacataaaaagaacaaactaagcccaatgttagcaaaagaaaataaataagaattatcacagaaataaatgaa

SEQ ID NO: 128541 - DNA, 556 bp, Homo sapiens
agaattctgtgtataaatgttttattgagggagtgaataaagcaggataggacaagggaagaagataggcaaagaaatgggttcagaggaagtctagtctgtctgatcccgtggggagctctgaagtatgaattaccacctaaaatgtatgccacttacacaaaaggataccagcctcttatatcccactatcagtcaggggtacaacagtcacacttaggggcacttgtaagtgacatgagtctgagtaggagggcatctttgaggcaggctatcccagtctaccctctagccttccaaaatkcacttccctcccacatgcaaaatacacttccccctttccaagtttcccaaaagtctcataccattatggcttcagatcaaagttcagaatcccttcatctaaatgaggtctaggtgctcatggggttcctttgagggtagttccttaagcaagctccttgaatacgctacttttgattttaaaaccttcaaactagacagacaagttatcccttcctcccccaacacttgatgttggaacatggataggata

SEQ ID NO: 128542 - DNA, 542 bp, Homo sapiens
gaattctgtgtataaatgttttattgagggagtgaataaagcaggataggacaagggaagaagataggcaaagaaatgggttcagaggaagtctagtctgtctgatcccgtggggagctctgaagtatgaattaccacctaaaatgtatgccacttacacaaaaggataccagcctcttatatcccactatcagtcaggggtacaacagtcacacttaggggcacttgtaagtgacatgagtctgagtaggagggcatctttgaggcaggctatcccagtctaccctctagccttccaaaattcacttycctcccacatgcaaaatacacttccccctttccaagtttcccaaaagtctcataccattatggcttcagatcaaagttcagaatcccttcatctaaatgaggtctaggtgctcatggggttcctttgagggtagttccttaagcaagctccttgaatacgctacttttgattttaaaaccttcaaactagacagacaagttatcccttcctcccccaacacttgatgttggaa

SEQ ID NO: 128543 - DNA, 541 bp, Homo sapiens
aataccccatgcattaccactaatgctgcctaagcccccatcctgagtggtaggcgatagttagccgatgacttgtcttcccctaaaacatcaggccagtgagacttacatccccatttaccttggtcaccatgagaaaasgaagctggtctgttaacaaagggccttattccccacagacctctatagtatcgccaattgaatcccatttctcacccttccctgaccaccctaaccctcagtctgcaaaattcctcatgtcctcaagctcttctatgaacttgccctctacctttttgctctaactcgaactcatctctctcctgaagaaatggctcttcttgtgctctcccaagcatggctttcttcttccactctcctctattcctgggtcaggaagtggagtaaagtgttttcttagctcatcactgctgctttcaaattattttttcttcctcaataagaccaactcctgcaaagggcatatcaaactaaacctactgcttcccattgatgtcttccacaatattcctgatcactc

SEQ ID NO: 128544 - DNA, 541 bp, Homo sapiens
aataccccatgcattaccactaatgctgcctaagcccccatcctgagtggtaggcgatagttagccgatgacttgtcttcccctaaaacatcaggccagtgagacttacatccccatttaccttggtcaccatgagaaaacgaagctggtctgttaacaaagggccttattccccacagacctctatagtatcgccaattgaatcccatttctcacccttccctgaccaccctaaccctcagtctgcaaaattcctcatgtcctcaagctcttctatgaacttgccctctacctttttgctctaactcgaactcatctctctcctgaagaaatggctcttcttgygctctcccaagcatggctttcttcttccactctcctctattcctgggtcaggaagtggagtaaagtgttttcttagctcatcactgctgctttcaaattattttttcttcctcaataagaccaactcctgcaaagggcatatcaaactaaacctactgcttcccattgatgtcttccacaatattcctgatcactc

SEQ ID NO: 128545 - DNA, 624 bp, Homo sapiens
ctggaatacatcttaattcttgcctatctcccactccacagttacttgggtatgtgtaaaaggcatgaaatgtgcctagaactctaaccttggttaaacattcttcctactctttatttgtaccagaggcagaattaaacccagggtagctcctatctactttgcagtttttaggggctggaattgtctattagagtgggagcatgcagaaacttggagtccaagtgaaggagttaggattttattccataggcaatggggagcctctaaaagttgcragcaggagaacacagtgggcaactcctactcattcaagtctcatgtaaggcactgctttcccaatcctcctggcttcttccccatctggaacaagtacctctctctgcttacttctgttttggtgcttatcatattctatcttatcataactacttactggtctgcctctcccactaaacctcatctttttcaatacaaggactatgcctttccatcattgtatcttcggctgatagctgggctggagcaattcgaaacacttcatccccatttagtgaaggtagttatgcaggcaattacctaaccataaatacagtgcatggtgtaaatgaaaattagtgaaga

SEQ ID NO: 128546 - DNA, 624 bp, Homo sapiens
ctggaatacatcttaattcttgcctatctcccactccacagttacttgggtatgtgtaaaaggcatgaaatgtgcctagaactctaaccttggttaaacattcttcctactctttatttgtaccagaggcagaattaaacccagggtagctcctatctactttgcagtttttaggggctggaattgtctattagagtgggagcatgcagaaacttggagtccaagtgaaggagttaggattttattccataggcaatggggagcctctaaaagttgcaagcaggagaacacagtgggcaactcctactcattcaagtctcatgtaaggcactgctttcccaatcctcctggcttcttccccatctggaacaagtacctctctctgcttacttctgttttggtgcttatcatattctatcttatcataactacttactggtctgcctctcccactaaacctcatctttttcaatayaaggactatgcctttccatcattgtatcttcggctgatagctgggctggagcaattcgaaacacttcatccccatttagtgaaggtagttatgcaggcaattacctaaccataaatacagtgcatggtgtaaatgaaaattagtgaaga

SEQ ID NO: 128547 - DNA, 580 bp, Homo sapiens
taatatattacaaattctgtatacgtaaatcctagtgtggtctgagacagcatgctgtgatcaaacatgttaccatttctatagtaaaacatattaatgttcatataatgcaagataaataaagaccataaattgtctcatgttggttcaggcaggcttttgaaaccaaaaawgttatgaaaaattagtgggtttcagagcttattggattttggaattgtgggtaacgagatcatgaacttttccctaaccacttcctcacattttcttaagaaggaagaagaaaaagcaaaacaattattcagctccaggcataatcaatggtagctggactgatagttattccctggttcagcatgttgtcttctgctacttagatttttgcaatcattttctaactggtaacccagcctcacacaaaaatgttgcagggatctgatggctctaaaatacaattccagtctaaaatgtcactccatttaaaaaaataatatagtgtttcacaagtatctatcagttaaagtgctaattccttcacctccttgatctggtcccaaaccgccaccacacagctttatgt

SEQ ID NO: 128548 - DNA, 580 bp, Homo sapiens
taatatattacaaattctgtatacgtaaatcctagtgtggtctgagacagcatgctgtgatcaaacatgttaccatttctatagtaaaacatattaatgttcatataatgcaagataaataaagaccataaattgtctcatgttggttcaggcaggcttttgaaaccaaaaatgttatgaaaaattagtgggtttcagagcttattggattttggaattgtgggtaacgagatcatgaacttttccctaaccacttcctcacattttcttaagaaggaagaagaaaaagcaaaacaattattcagctccaggcataatcaatggtarctggactgatagttattccctggttcagcatgttgtcttctgctacttagatttttgcaatcattttctaactggtaacccagcctcacacaaaaatgttgcagggatctgatggctctaaaatacaattccagtctaaaatgtcactccatttaaaaaaataatatagtgtttcacaagtatctatcagttaaagtgctaattccttcacctccttgatctggtcccaaaccgccaccacacagctttatgt

SEQ ID NO: 128549 - DNA, 618 bp, Homo sapiens
agtgcaaatgtgaccacctgccacccaacagctgaaaactgtttggtggttaaccatcactttcagaatgaagtcaaaactgcttaggamgacataaaatttattcataatccagcccctggcaacctcttagcctcgcctgttcttcctgcttacccactattcctgtgttccatccatactgtactacttggagttccttagaccggatatgctgtccagcatttccaaaccttcacatttgttccaacttcatcaattcattcaacaaatatttattgaacatgtcctttgtgcaaggcactgtgctaggtgttgggtatagagcagtgaacaaaagagatataattcctactcctgtgggcttagagtgactaaatcaataaacaaatgaaaaaataagtctataattacacattggaatttggttgctttgaaacaggattttttgaaagagagtggatatagggtttgtgatggtaggggttttaaagtatggatagcagtggaaagcctcttcaagaaggtgataatttaagaagaaaagaatagttctacctgtaacacactttgccatgttttttgcctggctattttatccctcgttatttaaaattg

SEQ ID NO: 128550 - DNA, 606 bp, Homo sapiens
tacaaacatgaattacatataaatagaaaccttatttgaaagaattttcttttgttaacagcttattagacatttgtttcatgttgtaactttagataaattaaatttgaatatttcataattgtaatcaattctcttcagcttcaattttaattcctaattgattcaagcctattagcaagatccctggtggtagtctgttacataatgttagtaaaaggcctgaggtttttctcctaacaaacttggtgccagctcgttagactgaaaataagatactctctggtagatccagcggattggatgcctgggtcctaagtttcccaagccagggattatcaccttttaggagctgcaaggaagttagaaggatraaggagaataacttaggaaaccaaataacttcttatgtgtcgcggtgatacttttcttttttttttaatttatttatttatttacttttcatgcgcgtctgtgtgaagagaccaccaaacaggctttgtgtgagcaataaagctcttaatcacctgggtgcaggcgggctgagtcggaaaagagagtcagtgaagggagataagggtggggccgttttataggatttgggta

SEQ ID NO: 128551 - DNA, 623 bp, Homo sapiens
cattttccagatttgggaacctgatcacagaggggtaaagtctcactgctagtcgtgttgggggcccagagaactggatgcttttgaagggatctgtggctagcagtggaaactcttaagtggggcttttccaagagttttttctctgggaatggcttcctgtagccagaatagatttgtaattttcttattgtagttcagtgggcccagccttraggcgctttgggagcctagggtgctgagagttcatgaacacttaccgagttttgctgggtgctgatctcagcactttgtgtaggctgactctagacatcctgtgtcccagctgtctgaggtgggtactgttatcattcccattcacagaggttggggaatggaagctcagagagattcaggatcttcccagggtcacctgcatcatcagctgctctggagtctgcctttcaagacaggagcagcccccatcttgctctcaagaaggtttaattttcagaccaggtgtggtggctcacacctataatactagcactttgggaggccgaggtgggcagacagctgaggtcaggagttcaagaccaccctggccaaaatgctgaaatgccatctctactaaaaataaaaaa

SEQ ID NO: 128552 - DNA, 539 bp, Homo sapiens
atttcttctcagtctccccatgacccatacctgacctacctccctttgcaagaatctgatggattagggtttgtggttttagcataaaggttaccccaacctgcattttttgtgggaggacagggtcttgctctgttgcccagcctggaatgcagcagcacaatcacagctcactgcagcctcaatctcctgggcttaagcaatcctcctgcctcagcctcccaattagctgggactacaggtgtgtgccaccatgcccagctaattttttgttttgttttgttttgtttgttttgttttkttttttgagacagagtctcattctgtcacccaggctggagtgcagtggcatgatctcggctcacggcaagctccgcctcccgggttcacgccattctcttgtctcagcctcccgagtagctgggagtacaggtgcccaccaccacgccccagtaattttttttgtatttttttagtagagttggtgtttcaccgtgttagccagaatggtctccatctcctgacctcgtgatccacct

SEQ ID NO: 128553 - DNA, 539 bp, Homo sapiens
atttcttctcagtctccccatgacccatacctgacctacctccctttgcaagaatctgatggattagggtttgtggttttagcataaaggttaccccaacctgcattttttgtgggaggacagggtcttgctctgttgcccagcctggaatgcagcagcacaatcacagctcactgcagcctcaatctcctgggcttaagcaatcctcctgcctcagcctcccaattagctgggactacaggtgtgtgccaccatgcccagctaattttttgttttgttttgttttgtttgttttgtttttttttttgagacagagtctcattctgtcacccaggctggagtgcagtggcrtgatctcggctcacggcaagctccgcctcccgggttcacgccattctcttgtctcagcctcccgagtagctgggagtacaggtgcccaccaccacgccccagtaattttttttgtatttttttagtagagttggtgtttcaccgtgttagccagaatggtctccatctcctgacctcgtgatccacct

SEQ ID NO: 128554 - DNA, 622 bp, Homo sapiens
tttattttattttattttattttattttatttagacagagtttcgctcttgttgctcaggctagagcgcaatggcatgatcttggctcactgcaacctctgcctcctgggttcaagcgattctcctgcctcatcctcctgagtaactgggattacaggcatgcaccaccacgcccagctaattatatatttttagtagagacagggtttctccatgttggtcaggctggtctcgaactcctgacctcaggtgatccacccgcctcggcctcccaaagtgctgggattacaggcgtgagccaccacacccagccagaagttagggatttaatagttggtaggtatagtggacatttgttgtttgtcctgcccagaataatatcgcgctgcttaaagccttactaacgtgtgcttcatgaactcagggcattatctgtcttgctcatcaccctgtattcttaacgttyagcacagtgcctagcacaatagtagcactaaacaagtatttattgaataaatgaatgaaatactcctactgtcatgattcaaatggaagatatcatcttttggtagaccgcctgcacagccttaataataactttgttgcatgcttactgtgtgct

SEQ ID NO: 128555 - DNA, 583 bp, Homo sapiens
tctcacttacaactctgttattaactcctacttggtcttccagcttctctcaygtcctatatatctcttctaattctgagatatcatacatcctagggccaaaataattttcttaagatgcactctcttcacgtcacttctagaaaacctgtggttttttattgtctaccaaaatatatagtgacttcttatcacagctttcaaggttctgaaatgtggcgtttttctggtctcatctccaccacttcttcatataaaacctatgccccacttacatctaccatacttggaatgttctccccttttctttgcctatcaaaattgcccattctgcaaagctgataaaagtcttctcctctataaagcctttctagatttttttctaagcagtttttgtgtctccctcttctgaactccctttcaaatactgtttttcttaacagattcacctttacttgtagcaaagccagtcatgtacttgtttaagtcatcttgctaaattatcagtgctttatggaaaggaaatatattttaattaccctcgtatcccctgcagcacttagcacatgtctgttaccaaaag

SEQ ID NO: 128556 - DNA, 622 bp, Homo sapiens
ataaacaaattggtacacctgtaaaataaaatataactcagtgataagaagaaatgagctatcaagtcatgaaaagatatggaggaaccttaaatgtatatttctaagtgaaagaaaccaatatctaaagkcttcacactgcatgaatccaacaatatgacaacgtggaaaaagaaaagctacagagacaataaaaagatcactgattgtcaggagtttgtggggagagaggaagggaggaatgcatgaataggcagagcacagggaatttttagggcagggaagttcttctctatattacataatacaatatattaatagagtaatatataatactatatattatataatacaatgatggatacctgtcaatatacatttactaaaacccataaaaggcacacaaaaaagtgaaacttaaactatggagtttagttaataataatttatcaatactagttcatccattgtaacaaaagtaccacactggtgcaagatgttaataatgggaaactgggttgtgggtaaagggagtataagaaaacaatctgcactttcctctcaatttttttgggtaaacctaaaactgttcaaaaaaattgctactatatataatataaaa

SEQ ID NO: 128557 - DNA, 561 bp, Homo sapiens
gatttcacctgaaagagaaacaagctctccagtataaatgtgaataggcaggggcagaaagataaagtagtattaggagtaatccccaaggccttctttgttcatgtaaaacaagctcaaataatagattattaactatatagttcaagccacctgagttcccttcctcttctcaattccttctttccaccagatgtagtcatctttttgaattcagattatcattcacatgcatttcttttcattttactctatatgtgttaattaagaatatatatrcaaatgctttggaaatttttggaatttatatcagtggtattatattctgtatatttttaagctaccagcttttccagggaattataattgttgattctgtaacagtaatttgttcattttcactggtatacggtatcccattatgtaaacatggcacattttatccattattttgttaataggcacttaagttgtttcaattttattgctattataaatctgctctgagcattctttatatgtgttttcttttctatgttcaagaatttctttgggatatat

SEQ ID NO: 128558 - DNA, 561 bp, Homo sapiens
gatttcacctgaaagagaaacaagctctccagtataaatgtgaataggcaggggcagaaagataaagtagtattaggagtaatccccaaggccttctttgttcatgtaaaacaagctcaaataatagattattaactatatagttcaagccacctgagttcccttcctcttctcaattccttctttccaccagatgtagtcatctttttgaattcagattatcattcacatgcatttcttttcattttactctatatgtgttaattaagaatatatatacaaatgctttgsaaatttttggaatttatatcagtggtattatattctgtatatttttaagctaccagcttttccagggaattataattgttgattctgtaacagtaatttgttcattttcactggtatacggtatcccattatgtaaacatggcacattttatccattattttgttaataggcacttaagttgtttcaattttattgctattataaatctgctctgagcattctttatatgtgttttcttttctatgttcaagaatttctttgggatatat

SEQ ID NO: 128559 - DNA, 561 bp, Homo sapiens
gatttcacctgaaagagaaacaagctctccagtataaatgtgaataggcaggggcagaaagataaagtagtattaggagtaatccccaaggccttctttgttcatgtaaaacaagctcaaataatagattattaactatatagttcaagccacctgagttcccttcctcttctcaattccttctttccaccagatgtagtcatctttttgaattcagattatcattcacatgcatttcttttcattttactctatatgtgttaattaagaatatatatacaaatgctttggaaatttttggaatttatatcagtggtattatattctgtatatttttaagctaccagcttttccagggaattataattgttgattctgtaacagtaatttgttcattttcactggtatacggtatcccattatgtaaacatggcacattttatccattattttgttaataggcacttaagttgtttcaatyttattgctattataaatctgctctgagcattctttatatgtgttttcttttctatgttcaagaatttctttgggatatat

SEQ ID NO: 128560 - DNA, 561 bp, Homo sapiens
gatttcacctgaaagagaaacaagctctccagtataaatgtgaataggcaggggcagaaagataaagtagtattaggagtaatccccaaggccttctttgttcatgtaaaacaagctcaaataatagattattaactatatagttcaagccacctgagttcccttcctcttctcaattccttctttccaccagatgtagtcatctttttgaattcagattatcattcacatgcatttcttttcattttactctatatgtgttaattaagaatatatatacaaatgctttggaaatttttggaatttatatcagtggtattatattctgtatatttttaagctaccagcttttccagggaattataattgttgattctgtaacagtaatttgttcattttcactggtatacggtatcccattatgtaaacatggcacattttatccattattttgttaataggcacttaagttgtttcaattttattgctattataaatctgctctgagcattctttrtatgtgttttcttttctatgttcaagaatttctttgggatatat

SEQ ID NO: 128561 - DNA, 617 bp, Homo sapiens
accatgtaagacgtgactttgctcctcatttgcctttagctgtgattgtgaggcctccccagccatgtggaactgtgagtcaattaaacctctttcatttctaaattacccagtctcagttctgtctttattagcagtgtgagaacagactaatacaacctcaataaagttgatatcaaaaattaaataaatgtaaacagactatatactccaataaaacatcaaagattttcaggttaaaaattaaaaattcattatattgtttcgggatctttggggtgtcacatttctggctggaaacctgtggccagtggcaccattgcccaagttttgtttgggcctgctgggcttgttacacccacttgatctggcaggctaccctcagctcacactgccagcctggatcacatacstccaagaaagactggagtcagatgtggaggagcatggggtgtgtgagggagtgtggtgaccacccaccgcacagtggggcatgctgactgctgccacggggtgggcagctcccatatgctggcaggggtgccagctctctgcagggctgcagctggaccaggccaaacaacatccctggctggaacctggggatgcagtgatgc

SEQ ID NO: 128562 - DNA, 604 bp, Homo sapiens
gaggcattaaatataattatatataatctatatgtacctacatatttaattgcatatgaaatactaatgtgttaattcttttgttaatattaattcaaagtgtagacaggactgaattcctttctggaggttctgtgggaggattcctctccttgttcatgcaggtggttagcagaattcagtattttttttttyctaatagaactgggatcctgttttctttctggctgtcagagggcttttactggcttctaaaggccacctgcaatccttggctcatggtccagttccttcagtggagccagcaggtaagtacctctcatatgtccaattgctctttcttttctcccatctctctgatccactcttctgctttcctgtttcacttttaaggtccgatgtgattatgttggacctgactggataatccagaataatcttcctattttaagatcaactcattatcaaccttaattctatctctaaaataaattcttcatgcatatatgtatgtatatatgtaagggttcgtgtacgtatgaccacttggtaaggattaaatgagatgctatgagcaaaaatattgagtgtataaaatgaggat

SEQ ID NO: 128563 - DNA, 580 bp, Homo sapiens
caatgtgcaaccaaggttgagaaccactgatctgggagtatcatgggcaatggaatagggtacaaattgagttaggaagccacttcataggaagcaaaacagaaagccttctaatttgcgtcctgaaggatgtgtgggagaaggaatgagtgttctaggtgggaggaggagcacatgtcagaccctgagatggcctcttctttcataaccccctgtgcttctctcctccattgattgtgtctctgggtctgtgtttccataaaacagccagcttatgacaataggaacaggaatgtgccttacctatctctgtagcccttgctcttggtagctgatgcaaggtaggaactcccatgtctgcccactgaagggtcacagaactcctgatgccaaaacatagggaatgggtctgtgagaaggtgttttcggggtcagccatgacatctcagcctccatcaatggtgccttcagaatttctctttgggaaaggcctaggggtctagttgcagtgawctagttggaaggaccagtatactaatcttgaactagatattactgaaaaaccatcacttgttcatat

SEQ ID NO: 128564 - DNA, 482 bp, Homo sapiens
cctgctgccctgtgtcagagtcctcctcgcacactacaataattatctgtttccttgtccatttccccacacttgactctcagctcatagaggtcaagcactctcctgagtcatctttatttctcaactagctctaacacagtaaaacgtcattaggtacttatcaaagttgtctcaaatgttcttaaagtattcygctgtgttcttaaagtctcaggatcatggcattagaggtcaccttaaaagatcgctggtcttttctacccttcaaaccctcctgtaccctcacaggcaaacagccagcctcagcttggtctcctgcaatggtgagagctcactgcctgctgaaacacctcatctctgcttgacttctgactgtgataatgatcgaccttatgctaagcctaaacttgccttcctgtagcttttggcctttgggtcctagttcttgcccttgcaaccacacaaataaaccttattct

SEQ ID NO: 128565 - DNA, 621 bp, Homo sapiens
ggtcagtgaatcagttaggcataaatcttcataggtggtttagagtatgtggaaaaggtctctgctttcctactagactgtaaatcgcttggaggcaggaaccatatcatattaacatcctttctgtacacatagcacagtgcctgaaacatagtaggtgagctggataggtctcctgaacatgtaggactgagagaaagacactgggctgaaggagaggtcatggagttaactaccaactctacttctgctaaggtgggtagcagggtagcaccaggtaagttaactttacctctctgagcctcaatttctgaacaaatgaagaggctggawgatacatgtaatgccctttacaatgttgtaaaatattctgagtctaggaataataaatgaatcagtgaataaatgaataaaagctatgttgacagggatattaacattcccatcagcaagctaatatcataatagcaaggcacatccctacaagtgctagagatcatcaacaatgaatgagaacatggtcctctccttgaaggaatgcacaggtggagggagacaggaaggaccagatggccaaggaattacaacacagtgtcacaaataccagcaaatactatccta

SEQ ID NO: 128566 - DNA, 621 bp, Homo sapiens
ggtcagtgaatcagttaggcataaatcttcataggtggtttagagtatgtggaaaaggtctctgctttcctactagactgtaaatcgcttggaggcaggaaccatatcatattaacatcctttctgtacacatagcacagtgcctgaaacatagtaggtgagctggataggtctcctgaacatgtaggactgagagaaagacactgggctgaaggagaggtcatggagttaactaccaactctacttctgctaaggtgggtagcagggtagcaccaggtaagttaactttacctctctgagcctcaatttctgaacaaatgaagaggctggaagatacatgtaatgccctttacaatgttgtaaaatattctgagtctaggaataataaatgaatcagtgaataaatgaataaaagctatgttgacagggwtattaacattcccatcagcaagctaatatcataatagcaaggcacatccctacaagtgctagagatcatcaacaatgaatgagaacatggtcctctccttgaaggaatgcacaggtggagggagacaggaaggaccagatggccaaggaattacaacacagtgtcacaaataccagcaaatactatccta

SEQ ID NO: 128567 - DNA, 573 bp, Homo sapiens
agttaatcattgtttgatgtactaagtcttttatgtacacataattccgataaacttgggtatctcttcctaaattcatatcaaattagaagcatcaagtgcttttagggaaggaactgttctaaacagaagaaaagaaggaagaaatgatggctaataatttggaagaaagaaaaaaagcctctttggcaccatttaatctgtgtaaaaagagccttaccaatgtagtctgatgacaccactggaaatttggtattggtcctgatgataacagtcttgaatcaccaagaaacatttacattgctaaagatgatagttcatgactattaaagttcatagatttccttggaacttatggtctctgatggccaaaattttgtctgtcttgaacctcattgtcaacycaggaatcttactatgcctgatttaaagtagacaaccagatgggtgtttgtaaaaaattaaaagaaatcactttccacattcattatgaacgtagctacctgtatggtccaaaaacactgtctttgggcttttgcaatagactgtaatttaggtctcacagcagttagt

SEQ ID NO: 128568 - DNA, 556 bp, Homo sapiens
ccagccttccatctagactgcaccctaggtccctcttgggaactctggactgctccccactgaatgtgccaacgcccccactcaccactgcctggctttcactcccagtgycatggacttggttccaaagggctttgagaacctcacataaaaacccactccaaatctttgagggtctaaagggaagattctggccccttcccagagacccatctactgtagggacaggaaaagaagacctggggggtagggaggggtagatggtaaatttccttaccaagaaaaatgccagccaggtgcggtgtctcatgcctataatcccagcattggaaggccaaggtgggcggatcacctgaagtcgggagttcaagaccagcctagtgaacatagcgaaaccccatctctactaaaaaaatacaaaaattagccggtgtggtggtggacacctgtaatcccagctacttgggaggctgaggcagggaggattgcttgaacctgggaagtggaggttgcagtgagctgagatcgtgccactgcattatatcctgggtgatag

SEQ ID NO: 128569 - DNA, 556 bp, Homo sapiens
ccagccttccatctagactgcaccctaggtccctcttgggaactctggactgctccccactgaatgtgccaacgcccccactcaccactgcctggctttcactcccagtgccatggacttggttccaaagggctttgagaacctcacawaaaaacccactccaaatctttgagggtctaaagggaagattctggccccttcccagagacccatctactgtagggacaggaaaagaagacctggggggtagggaggggtagatggtaaatttccttaccaagaaaaatgccagccaggtgcggtgtctcatgcctataatcccagcattggaaggccaaggtgggcggatcacctgaagtcgggagttcaagaccagcctagtgaacatagcgaaaccccatctctactaaaaaaatacaaaaattagccggtgtggtggtggacacctgtaatcccagctacttgggaggctgaggcagggaggattgcttgaacctgggaagtggaggttgcagtgagctgagatcgtgccactgcattatatcctgggtgatag

SEQ ID NO: 128570 - DNA, 556 bp, Homo sapiens
ccagccttccatctagactgcaccctaggtccctcttgggaactctggactgctccccactgaatgtgccaacgcccccactcaccactgcctggctttcactcccagtgccatggacttggttccaaagggctttgagaacctcacataaaaacccactccaaatctttgagggtctaaagggaagattctggccccttcccagagacccatctactgtagggacaggaaaagaagacctggggggtagggaggggtagatggtaaatttccttaccaagaaaaatgccagccaggtgcggtgtctcatgcctataatccyagcattggaaggccaaggtgggcggatcacctgaagtcgggagttcaagaccagcctagtgaacatagcgaaaccccatctctactaaaaaaatacaaaaattagccggtgtggtggtggacacctgtaatcccagctacttgggaggctgaggcagggaggattgcttgaacctgggaagtggaggttgcagtgagctgagatcgtgccactgcattatatcctgggtgatag

SEQ ID NO: 128571 - DNA, 680 bp, Homo sapiens
ttttctcatctataaaatgaggcaatatttacattttatgttgttttggtggttggatgtgtgatgatcagaaataatgaatgcaaaatataacagcatacttataaaagtagtagatataaaatatattctggtgtcttgtaggtattcaagaattaatctacatctttcccctccttactgatctatacttactatggaaacatatgataggcaatatagtagatactcaagaaatatatgtatatgtgtgtatgtatataatgtgtgtgtatatatataagataatctaatatttcttagatataatyacttagcctagagtctagtacggcatagaatgattaagatatgaaatgattaaagcttgaactaagaaattggcaggaattcaattcatgcctgaaacctagtatgcacatgctatcctctttttccaaaggcatcttctctcttcctgttttgatggtttatctcctccccattgtccagctcttagcctagaagcgatttcccctagtatcccttcgctgatctctaactctgggctaggcatccctctctgcttctcccaactaaacacccatgattttgtgctgtgatttgttttcttgtctgtatctaccaatagactgtaattttaatgagagaaggcgatgtttttatttggctaggtgagg

SEQ ID NO: 128572 - DNA, 680 bp, Homo sapiens
ttttctcatctataaaatgaggcaatatttacattttatgttgttttggtggttggatgtgtgatgatcagaaataatgaatgcaaaatataacagcatacttataaaagtagtagatataaaatatattctggtgtcttgtaggtattcaagaattaatctacatctttcccctccttactgatctatacttactatggaaacatatgataggcaatatagtagatactcaagaaatatatgtatatgtgtgtatgtatataatgtgtgtgtatatatataagataatctaatatttcttagatataatcacttagcctagagtctagtacgkcatagaatgattaagatatgaaatgattaaagcttgaactaagaaattggcaggaattcaattcatgcctgaaacctagtatgcacatgctatcctctttttccaaaggcatcttctctcttcctgttttgatggtttatctcctccccattgtccagctcttagcctagaagcgatttcccctagtatcccttcgctgatctctaactctgggctaggcatccctctctgcttctcccaactaaacacccatgattttgtgctgtgatttgttttcttgtctgtatctaccaatagactgtaattttaatgagagaaggcgatgtttttatttggctaggtgagg

SEQ ID NO: 128573 - DNA, 631 bp, Homo sapiens
tgcaaatgcaaatcttaatgcaaatgcaaatgtctaagtttcaaaagccatgatctcgaacaagaatgttagatataggccaatgtagataaagaacaaaattacattcacaattagccaacaataaaatccttcccatttcactcagaccctgaaataaagcaacatatgggcgagaaagataaaatgccacctaccttgcctcaagttcccagaaagtggtgtcatcggacagccatgggttagaagggtcaggtggcaaaagaaacgggtcgtattctaaatactgttccgtgtaacttagtagactaaggagaaaaaacatttccagtttctttagttttctgactggggttgcagccagtccaaagcagggaaaacaatataaaaatgtgggaccaaggaatccttgttcacttaaagcatgaaatccaatggcaatcttcacgcttcagtaactttcatgcaacaacttattgtgcttcttggcagacaactgtggctaaagattccatctctacccatgcctaarccatgtaaatcagtatcccttggttaacatgaagcactatggaagaggtcagtgtgtgaagggcaccgctaagagtcagttccaatctttggttaatca

SEQ ID NO: 128574 - DNA, 520 bp, Homo sapiens
acactgcatcaaaaataattttctgagtagctcatttgtttcccaagcaaggaaagctatttactgaggatgaataaattaaattgtgtttgattatagcagttgaataaattatccagatagaacaaacctgtttaagactattagctttttggtgagaacagttgcttgaatagttgagaatactggaagcaatggcaattgttgattaaaagacaaggcaartaattttgagtggttttccttgcatcttgatgagttgacagatatagctgataccactcagttattatttatttgaggagtcaattctgagtctacagtgattaaagaattagcctaatgaatagcctgcattgtaaaactataggtgacaacatttccaaaaaaactgagagaacacaaattctgcacaacctgaaggggaatcttctaagatgtgttccaatagacggtggtaaaatatttattttaaagcagaaaaagggtttaattgtacaaattcatatagcttttcaaa

SEQ ID NO: 128575 - DNA, 520 bp, Homo sapiens
acactgcatcaaaaataattttctgagtagctcatttgtttcccaagcaaggaaagctatttactgaggatgaataaattaaattgtgtttgattatagcagttgaataaattatccagatagaacaaacctgtttaagactattagctttttggtgagaacagttgcttgaatagttgagaatactggaagcaatggcaattgttgattaaaagacaaggcaagtaattttgagtggttttccttgcatcttgatgrgttgacagatatagctgataccactcagttattatttatttgaggagtcaattctgagtctacagtgattaaagaattagcctaatgaatagcctgcattgtaaaactataggtgacaacatttccaaaaaaactgagagaacacaaattctgcacaacctgaaggggaatcttctaagatgtgttccaatagacggtggtaaaatatttattttaaagcagaaaaagggtttaattgtacaaattcatatagcttttcaaa

SEQ ID NO: 128576 - DNA, 402 bp, Homo sapiens
gaataaaacatgggaaggtgtaaaagtgtaagtgatcccacttatcatcactcctaagtgacccacagctgttcctacaactctgggctctgcgacttagaaatcctggtttctaaaggggaaatgcttcatctagataacacaataagaagcccattaaatctcaagctatggctaccaccccgtcaygtcatgttgcttgagacaagacccaggaagtgagaagggtcaacatcctggcaaatataaccaacatggatcatcaggcacaggttcggctgctgctacagaatgagggcaggaaatatgttcaccagtcaagtaattcggtgtctcttggtactctcttgctcaattttgatgataaaaatacaagttcagtgttatggtctgaaaagaatg

SEQ ID NO: 128577 - DNA, 591 bp, Homo sapiens
atggctctgaacacaaagaaatgcaaggtgctcacaagccaaggacatgaatactttaataagcatgatattacttctgtcttacaactgaccctgttaatacacacacacacacacacacatataaggaatagggtccaatttaactgtgcccacccaccagccttccaccctagcatcacagctcacagctctgctcacccgccttcccccactgcatcttctattacacccaagtgggggcttagcagctgaacacacgccccgtacctctaactcttgaagctagctttttccctaaggatcagctgaacttggccttatttgcctgttattccaccaaaggttcattggttactggtattactgcttctcatcacaactttactggtttgccctttatccactcaccaatcagtagaacacaacagctacaacactgctggcaaccacagataggaaatgctcrcaagtgccccaaggacctcccaggctggaagcaggggggcattcccaaattcccaagaaaacacaccaggtagtaactagttcatgggtactcaactggaagagaactaccagctaagtgaa

SEQ ID NO: 128578 - DNA, 515 bp, Homo sapiens
gattacagtgtgtttctctgtgtgcttactattaccagtgagttttgtaactttagataatttcttattgctcattaacatttttttctttctgattggagtgattgttttagcatttcttgaggacaggtatgttgttaatgaaatctctcagcttttgtttgtctgggaaagtctttattttttcaagtttgaaggatattttcactggatatactagtctagggtaaaagttttttccttcaacactaattatgtcatgccactctctcctggcctgtaaggtttccattgaaaagtctgcgctgctagacgtgttggaactctattgtatatttgtttcttttttcttgctgcttttagaatcctttgtttatctttgacctatgggagtttgactactaaatgccttgaggtagtctcctttgggttaaatctggttggtattctatcaacttcttgtacttggatattgatatygttctctaggtttgggaagttctctgttattatcc

SEQ ID NO: 128579 - DNA, 588 bp, Homo sapiens
ctgacaatgtataatgctaagattatttgtgaatttatcttagctgctgaaatagatacagacaggtagattatatgtttgagcatttatacaatggaggtattcaaactcaactaagaatttgtaattacagactctcactctttagtttgaatataggaatggaattatgcctagaatttttttatggttgggataaatcatatcagaatggaattgccaatatcctttataaggatraggctttttagaacatatatatctaaaaattaaatgttatataataagataaatggtaacttcatttattcagtaagaattgtgtggattactctgtgcagcccatgttgagtgctggaccatcaacaatggagagacatgatccttgctctcatggaacttatgctgtagtggaagacaacatgtaaacagctgcaatacagttaaatatttgctgtaatgaagttatatatgtagtgtaaaaagggacaggaaaaatctttaattcaaggaaatctttatgaggacgtagaacttgaacagaaatgtgaagccatctttttctcaggacatttgggaaagggaatt

SEQ ID NO: 128580 - DNA, 623 bp, Homo sapiens
tgaattcaacagtacattaaagagatcattaaccatgatcaagtggtactcatcccagggatgcaaggatggttcaacatatgcaagtcaataagcatgatacatcacattaacataatcaaggacaaaaactatataatcacttcagtagacacagaaaaagcatttgataaaatttgacatcccttcatcatacaactctttaaaaatcagatatacaggaaatgtacctcaacacaataaaggtcatatatgacaaacacacagctaacatcatattgaactggaaaaaattaaatgctyttcttctaagatctggaataagacaatgatgccctcttttaccacttttattcaaaacagtactggaagttttagctagtgcaattaggcaagagaaagaaataaagggcatccaagttggaaaatacaaactcacattgttcctgtcttagtctatttgtattgctataaaggaatacctgaggctaggtaacttgtaaagaaaagagatttatttagctcatggctctacaggctgtacaaaaagcttagtgtcagcatctgcatctagtgagggcctcaagctttttccactcatggtggaagaggaaagagagcca

SEQ ID NO: 128581 - DNA, 560 bp, Homo sapiens
tttaatgtgcagcagttgaaatcactggcctaatatattatttcaccaaagaagtagttctttgtatttttatacatttgctgagcatttactgtacctgctccatgcctggtagagctacgcttgggagataaaaagattaataagacttactttttgccctagaggacctcataatctattagcagtaatttcaaaattccagtttttgttcctgttgttcagtcagaagcacgacctttgtgttatggaatctttggctgtttgagtttgcttttagttaatggcctgtgtgtgaaagttaagcatattcacctgttttattgaaagaccatgggaaagagtttatacttatgtttgtggtgaaaaaaagaaaaggcattcatcttagctttctgmttcctatgatgacccgaggctttcattttagtaaggaattcctctcttggcagagaaagaaaacagatggtgtatctttaagtacataatgtatgcttcctccacattatttttggagagcataaagtatgattaagggaagtgaactcatgctgtgaaaa

SEQ ID NO: 128582 - DNA, 526 bp, Homo sapiens
gcagcctctgggcagcctgaatccagccaccaggtgaggcacatgcrtggagaactgtaagaacattgagacttcgtgcctcactttacagggcagcaaatggaggccagagagggcaagatacatggccagggatgcacaggagcaggatgaggaaccgggccttgctcccaccctgcactcggaggcccaggtccacctactacagacaaggagtccgtgggccaggggtgggactcatctgtgcacggagggcccaggctgttttttctcaggagggacaaggctctagtcaacactgcatcagggagggacagatgtcatctattcagcagggggttttagcagcttccttagttcttgggcttcactgggtccttctgccaacaagcatggcccctggccccgtgtggacactctcccagggcagaggccatggctaaccagcctgagctgctccagatagcccagcagagatatccaagcagctggagccagccagccctcagcacatgtccatttattc

SEQ ID NO: 128583 - DNA, 526 bp, Homo sapiens
gcagcctctgggcagcctgaatccagccaccaggtgaggcacatgcatggagaactgtaagaacattgagacttcgtgcctcactttacagggcagcaaatggaggccagagagggcaagatacatggccagggatgcacaggagcaggatgaggaaccgggccttgctcccaccctgcactcggaggcccaggtccacctactacagacaaggagtccgtgggccaggggtgggactcatctgtgcacggagggcccaggctgtttyttctcaggagggacaaggctctagtcaacactgcatcagggagggacagatgtcatctattcagcagggggttttagcagcttccttagttcttgggcttcactgggtccttctgccaacaagcatggcccctggccccgtgtggacactctcccagggcagaggccatggctaaccagcctgagctgctccagatagcccagcagagatatccaagcagctggagccagccagccctcagcacatgtccatttattc

SEQ ID NO: 128584 - DNA, 420 bp, Homo sapiens
gaacatattccaaaatagactgtatgtaggccttaaaataaacctcaaaatttttaaaacaattgaaattttgtagagcatgttctctgactgtaatggaattcaactagaaaccaacagyggaaggataataagaaaatctctaaacaattgaaaacaaaacaacacatttctaaataatccatgactcataggaaatctcaagggatatataaacaacgttagactaaatgaaaagaaaaatgaaaatgcaatataccaaaattagtaggatacagctaaaatagtgctgagaagatggtggatagcactaaatgcctacatcacagaagagggaacatcttaagtcattaatctatttttacacctcaaaaatctagaaaagaagagcaaaataaacccaaagcaagcaggagggaa

SEQ ID NO: 128585 - DNA, 570 bp, Homo sapiens
  misc_feature (1)...(570): n = A,T,C or G
ttaccaattatttttaaaactgcctttatttcttaaagattatagtcatgtgaactcaaaaggtattacagcttttatttttcttcaaaaaatatttgatctawgtgcttattttcctagagcttttttatataaacatcacgcccataagaaatataaaattacacagatgaacaaaagcaaattcagtacttgtaagatttttcatttgccaatcttctgaatagattattggcctctgggtgaagcccttcaagagcagggcctaggacagcatacagtttctagggcctaataaacaggcatagctggaagacagagatagattttgagaaggatctatccacttttaattcctggggtttcatgaggaaaacagagggtgttgttttccccaaaatggggtctgcagcaccttctttgttttttcccaggagccccgggctatcagaagttatcttagagcctctcatgtatgcactgaatgacaagacaaaatggggaaaaaaaaatcattcaacagagaaagaacctttttccagaaaaacaagatccatgcagagaaaaatn

SEQ ID NO: 128586 - DNA, 511 bp, Homo sapiens
aagtctattcagtgtaaactgcctccaccttttttgatgtttatcaagagaaacccaaaatacaagattggagaattaaatattgaaatagtcaactatgggaatgttctcaaaaaacaaggaagcaagcaaacaaacaaacaaaaacacattgtgctggccaacactgtgaaagctaaagtaactctggaaatgtatttggatcagttactgyaaatttataattttcctttaggaagtagacagtaggataaaccattgaaatgtttctttcttgttttgatgtagttccaatacttactaaatatgtggcttggacatgttagcttctttatttttaaaacagaacaaaaaatagacgtcatattgatttgaatactaaataggatagaagtaataaaccatatatggcaatgcttagtacattagtaaacacttgataaataagtggtagctattattattgcttgccaaataactttacagaggtgtcaaaaaattcaaaatccca

SEQ ID NO: 128587 - DNA, 456 bp, Homo sapiens
tccctcatatattatacatttcccatgaagtttttatttacattggatgaatttgtagttctttaaccatgtgaaacatttcattatgaaatatttcaataaaaatatgatgtataagttttatcaatatgtttttgttcattcttgcatatattagtttttttggctattaaattttctaagtggaaactttttggtaagatttttctttctggtttaactggctatctgatcgaaaaacaaccaaaatatctccagatggattaaagaattacacacaaaaatacaactttagtgaagtatatccatatgttatcaaatagcttaaaactaacttttgaaaaaaaatcaatgtgactacttaaaaattttgttcagataattrcagggataccagtttgaaataatctaacttaaaatcatacatttatgtacataaaaataaatttggtatca

SEQ ID NO: 128588 - DNA, 600 bp, Homo sapiens
cattatttgtaggtgtagacaatgctttcaaactagacacatttaattagcacataatatgaactacatgagtggcaagttaagcagcactggcccctttgccaggcattttgaaagaattacaggatttggtcatgtgatattaaatctaattgaagtagtgttctaggaggcccatcattaagataaaaatgacttgctacttcaaatagggacactagaggaagctgtttttagaggactcagttgcagtaggaaatcagtttggtttaagacaatgcttgaaccgaagacactgaataaataatgacttccatgcttattaacaacactaggattaactttgtacstttagtcaggaaggactattggatatattaatcactatgggatattatgtctttaatgttgagttgcaggaattcgtaaagaaacaagctcaacgtcgggctcagtggctcacacttgtaaaatcccagcacttagggaggctgaggagtgtggatcacctgaggtcaggagttcaagacaagcctggtcaacatggcgaaaccccgtctctactaaaaatacaaaaattagccaggcatggtggcaggt

SEQ ID NO: 128589 - DNA, 600 bp, Homo sapiens
cattatttgtaggtgtagacaatgctttcaaactagacacatttaattagcacataatatgaactacatgagtggcaagttaagcagcactggcccctttgccaggcattttgaaagaattacaggatttggtcatgtgatattaaatctaattgaagtagtgttctaggaggcccatcattaagataaaaatgacttgctacttcaaatagggacactagaggaagctgtttttagaggactcagttgcagtaggaaatcagtttggtttaagacaatgcttgaaccgaagacactgaataaataatgacttccatgcttattaacaacactaggattaactttgtacgtttagtcaggaaggactattggatatattaatcactatgggatattatgtctttaatgttgagttgcaggaattcrtaaagaaacaagctcaacgtcgggctcagtggctcacacttgtaaaatcccagcacttagggaggctgaggagtgtggatcacctgaggtcaggagttcaagacaagcctggtcaacatggcgaaaccccgtctctactaaaaatacaaaaattagccaggcatggtggcaggt

SEQ ID NO: 128590 - DNA, 607 bp, Homo sapiens
ggctcacacttgtaaaatcccagcacttagggaggctgaggagtgtggatcacctgaggtcaggagttcaagacaagcctggtcaacatggcgaaaccccgtctctactaaaaatacaaaaattagccaggcatggtggcaggtgcttttaatcccagctactcaggaagctaaggcaggagaattgcttgaacctgggaggtgaaggttgcagtgagccaagattgtgccactgcactccaggcaggtgacaagagtgaaaccctgtcaaaaaaaaaaaaaagaaagaaaaagaaagaaagaaagagaaagagagagagagaaagaaaaggagaaagaaagaaagagaaagaaagaaagaaagaaagaaagaaagaaagaaagaaggaasgaaggaaggaaggaaggaaagaaagaaagaaagaaagaaagaaagaaagaaagaaaggaaagaaagaaagaaagagaaagaaagaatttgaagaagtaaaattatgggagaaacgtgtttagtctaagttatggcaaggtttcaccgaacactgtgacctttaatgttgctccctgacaaccctggtaatatggatgaaaaagaagtttatctccc

SEQ ID NO: 128591 - DNA, 555 bp, Homo sapiens
aaaacattgtaggaaaataagtagcatttttaygaaccaaaatcattgcagctaataaccaaatcaagaacacaatccaatttacaatagccacaaagaaaatgaaatacctaggaattcatccaaccaagggggtcaaagaccactacaaggagaagtacaagacactgttgaaagaaatcagagatgacacataaatggaaaaatatccatgcgcatggattggaagaatcaatattgttaaaatggatatactgcctaaagcaatttacagattcaatgctattcctatcaaaataccaatgtcattttttaaataattagaatgaaacctattataaaattcatctggaaccacaaaagagcttgaatagccaaagcaatcctaagcaaaaagaaaagccagaggtatcgcattgccagacttcaaactgtactataaggctacagtgatcaaaacagcgtggtactgatacaaaaacagacacacaggccagtggaagagaatacagcacccagaactaaatttgcccacctacaactatgtgacctttg

SEQ ID NO: 128592 - DNA, 555 bp, Homo sapiens
aaaacattgtaggaaaataagtagcatttttacgaaccaaaatcattgcagctaataaccaaatcaagaacacaatccaatttacaatagccacaaagaaaatgaaatacctaggaattcatccaaccaagggggtcaaagaccactacaaggagaagtacaagacactgttgaaagaaatcagagatgacacataaatggaaaaatatccatgckcatggattggaagaatcaatattgttaaaatggatatactgcctaaagcaatttacagattcaatgctattcctatcaaaataccaatgtcattttttaaataattagaatgaaacctattataaaattcatctggaaccacaaaagagcttgaatagccaaagcaatcctaagcaaaaagaaaagccagaggtatcgcattgccagacttcaaactgtactataaggctacagtgatcaaaacagcgtggtactgatacaaaaacagacacacaggccagtggaagagaatacagcacccagaactaaatttgcccacctacaactatgtgacctttg

SEQ ID NO: 128593 - DNA, 555 bp, Homo sapiens
aaaacattgtaggaaaataagtagcatttttacgaaccaaaatcattgcagctaataaccaaatcaagaacacaatccaatttacaatagccacaaagaaaatgaaatacctaggaattcatccaaccaagggggtcaaagaccactacaaggagaagtacaagacactgttgaaagaaatcagagatgacacataaatggaaaaatatccatgcgcatggattggaagaatcaatattgttaaaatggatatactgcctaaagcaatttacagattcaatgctattcctatcaaaataccaatgtcattttttaartaattagaatgaaacctattataaaattcatctggaaccacaaaagagcttgaatagccaaagcaatcctaagcaaaaagaaaagccagaggtatcgcattgccagacttcaaactgtactataaggctacagtgatcaaaacagcgtggtactgatacaaaaacagacacacaggccagtggaagagaatacagcacccagaactaaatttgcccacctacaactatgtgacctttg

SEQ ID NO: 128594 - DNA, 538 bp, Homo sapiens
gaattatcaactttttatgcatcaccatttcagagtgggctataaaaatatcagtatctgtcctacatatataccaatgtttttcaatttttagtcaattaagtatgtttcattgattttctgctgtgtgcgtaaaactgtgcatgatgatattatagaaggtactgtgaaaaggcttaaagcagtatatttaaccactgcctaccagaatagtacatagagaagcaaacctaatctataagcaacaatgagagcgtgctacagataacttttaatattgtaaatatatatgatacagattataaaatctttatgaaataatctatagaagaggtgaaatgggtctctgccaggagaatgcaaaggcagtaaaaaattaaaaaccaaaatattgagaattattttgaggaaagtgttagtagaatttaataatacatttaatagaaacataagattaaaaatgcaaagatgaattcaaagttgcttacattmaaaaataactcattaaatgtacagtattttaagcacacttttgatc

SEQ ID NO: 128595 - DNA, 399 bp, Homo sapiens
caagtgttcaaagcctaaagaacctggagtctgatgtccaagggcaggaagcatccagcacagtgcaatgatgaaagccagaagactcgttaagtcagcttatcccaccttcttccaccagctttgttctagccaagctgacagtcaattggatggtgtccacccacattgaggatgggtcttcytctaccagtccgactcaaatgttaatctcctccagcaacaccctcactgacacacccagaaactattctttaccaattatctaggcatccttcaatccaattaagttgacacctattattaaccattacaatcctgaaaccatcgtctgctcccctgtccgtggaaatattgtcttccacaaaaccagtccctggtgccacaaaggttgaggac

SEQ ID NO: 128596 - DNA, 399 bp, Homo sapiens
caagtgttcaaagcctaaagaacctggagtctgatgtccaagggcaggaagcatccagcacagtgcaatgatgaaagccagaagactcgttaagtcagcttatcccaccttcttccaccagctttgttctagccaagctgacagtcaattggatggtgtccacccacattgaggatgggtcttcctctmccagtccgactcaaatgttaatctcctccagcaacaccctcactgacacacccagaaactattctttaccaattatctaggcatccttcaatccaattaagttgacacctattattaaccattacaatcctgaaaccatcgtctgctcccctgtccgtggaaatattgtcttccacaaaaccagtccctggtgccacaaaggttgaggac

SEQ ID NO: 128597 - DNA, 399 bp, Homo sapiens
caagtgttcaaagcctaaagaacctggagtctgatgtccaagggcaggaagcatccagcacagtgcaatgatgaaagccagaagactcgttaagtcagcttatcccaccttcttccaccagctttgttctagccaagctgacagtcaattggatggtgtccacccacattgaggatgggtcttcctctaccagtccgactcaaatgttaatctcctccagcaacaccytcactgacacacccagaaactattctttaccaattatctaggcatccttcaatccaattaagttgacacctattattaaccattacaatcctgaaaccatcgtctgctcccctgtccgtggaaatattgtcttccacaaaaccagtccctggtgccacaaaggttgaggac

SEQ ID NO: 128598 - DNA, 613 bp, Homo sapiens
tttttatttaacacttcaccatcttcagtcacttatataatattgatcaatgagtcaacattatttaaaaatatgagaattatagtgagactctaagtcctaacccctctgggccttgatgtccacaaatgaacaggtaactgccaactgaagttccttaatcatttctaaaattggtctactgtataacctatcgtaaaggacgtatgtggtttaagaaagrtgtctaatctaaattcctctagcatgttatttttgtagcattaaaactacaattaaaaaaaaaaaaataaaaaaacctaagggccaggttcaggggctcacgcctgtaatcccagcactttgggagctcggtgagagaggacagcttgagcccaggagtttgaggccagcctgggcagcatagtgaaatcctgtctctacaaaaaataaaaaaattagccgggcacggtggcaggcgcctgtagtcccagctactcaagaggctgaggtggaaaagtaacttaagcctcggaggttgaggctgcagtgagctgtgatggctcttctgcactccagcctgggcaacagagaccctgtctcaaaacaaaacgaaataacctagtaattctac

SEQ ID NO: 128599 - DNA, 613 bp, Homo sapiens
tttttatttaacacttcaccatcttcagtcacttatataatattgatcaatgagtcaacattatttaaaaatatgagaattatagtgagactctaagtcctaacccctctgggccttgatgtccacaaatgaacaggtaactgccaactgaagttccttaatcatttctaaaattggtctactgtataacctatcgtaaaggacgtatgtggtttaagaaaggtgtctaatctaaattcctctagcatgttatttttgtagcattaaaactacaattaaaaaaamaaaaataaaaaaacctaagggccaggttcaggggctcacgcctgtaatcccagcactttgggagctcggtgagagaggacagcttgagcccaggagtttgaggccagcctgggcagcatagtgaaatcctgtctctacaaaaaataaaaaaattagccgggcacggtggcaggcgcctgtagtcccagctactcaagaggctgaggtggaaaagtaacttaagcctcggaggttgaggctgcagtgagctgtgatggctcttctgcactccagcctgggcaacagagaccctgtctcaaaacaaaacgaaataacctagtaattctac

SEQ ID NO: 128600 - DNA, 613 bp, Homo sapiens
tttttatttaacacttcaccatcttcagtcacttatataatattgatcaatgagtcaacattatttaaaaatatgagaattatagtgagactctaagtcctaacccctctgggccttgatgtccacaaatgaacaggtaactgccaactgaagttccttaatcatttctaaaattggtctactgtataacctatcgtaaaggacgtatgtggtttaagaaaggtgtctaatctaaattcctctagcatgttatttttgtagcattaaaactacaattaaaaaaaaaaaaawaaaaaaacctaagggccaggttcaggggctcacgcctgtaatcccagcactttgggagctcggtgagagaggacagcttgagcccaggagtttgaggccagcctgggcagcatagtgaaatcctgtctctacaaaaaataaaaaaattagccgggcacggtggcaggcgcctgtagtcccagctactcaagaggctgaggtggaaaagtaacttaagcctcggaggttgaggctgcagtgagctgtgatggctcttctgcactccagcctgggcaacagagaccctgtctcaaaacaaaacgaaataacctagtaattctac

SEQ ID NO: 128601 - DNA, 613 bp, Homo sapiens
tttttatttaacacttcaccatcttcagtcacttatataatattgatcaatgagtcaacattatttaaaaatatgagaattatagtgagactctaagtcctaacccctctgggccttgatgtccacaaatgaacaggtaactgccaactgaagttccttaatcatttctaaaattggtctactgtataacctatcgtaaaggacgtatgtggtttaagaaaggtgtctaatctaaattcctctagcatgttatttttgtagcattaaaactacaattaaaaaaaaaaaaatmaaaaaacctaagggccaggttcaggggctcacgcctgtaatcccagcactttgggagctcggtgagagaggacagcttgagcccaggagtttgaggccagcctgggcagcatagtgaaatcctgtctctacaaaaaataaaaaaattagccgggcacggtggcaggcgcctgtagtcccagctactcaagaggctgaggtggaaaagtaacttaagcctcggaggttgaggctgcagtgagctgtgatggctcttctgcactccagcctgggcaacagagaccctgtctcaaaacaaaacgaaataacctagtaattctac

SEQ ID NO: 128602 - DNA, 553 bp, Homo sapiens
gtttgtgtattttgttgcaggtgtgtggcaacataaactcattttttattagtgtcaatataaattggcacaactattttgtaaaaggattacataagaatacttttctgggatttactgacattaaaatacatgtggaaaagaaaaaaagtgataatagacaagggtcacaagacaaaaataaaagtcatatttttggactatttcttttagtgtagaagtatgatttctgacaaaagttccaagataaatcaaagataaaagaagaataagaagagtatgtataaaatgagattaatgtaacagaacatagatcccagaaacaagccactcaaataagaagttatgacataaggaakaaataggactgcatagaagtagggaaaaagagatcttcaataaatggtaatgaagcatcaatgtaaccacatgaaaaaatgttttacttcatttcaaaaaaattaaattacagattgattaaagatgtaaatatgaaataacaaatgtaaatatttggtaagacaatattggaaatttttttcattatgtcagg

SEQ ID NO: 128603 - DNA, 547 bp, Homo sapiens
ctgtccctgactccgtagtagctgttttggattgctgggcctctggcttaaacctgcttttctcaaaatctggtcccacctcctcagcaaattcctataacttcaaaattcctccaagttccctagaaaatattttaaatgtctaactgcctactttaacttcccttccccttcgaaatttacagaaggcacaatgaccggatctctaggatcaagccatgcaggtcacttgtgtaaatgttaacagctaagaaataaatctggcacaggctccaggtacatgaagccagctttacaataccttacaactcctcctgcttcctggggctctgcaaagaaactttgtctccttcagaccttatgcaatacccactccaaatgagtcttggacccctgccacaaagaattgatatcccctggacagcagcaygtcttttaaattacaatcaccttttgccccactttcagaagatttcacctaatttagagaagaataaggaaggtcagtggctattcacaatcgtatttacagtgatcttggtcggct

SEQ ID NO: 128604 - DNA, 654 bp, Homo sapiens
tgtagtgacccagtagtcaattttccagccaggccatccccttgccacttcgttggtttgattgctcatgtaaatttgttccaattcaagatctgattcatgactgtaagacaagtctcccaaaacatttaacctaaatctatcatgctgtaggttgctttccaggaagacccagctcttacatcacctatagccagtcagctgaaattgaagtcccagtgcttaaaaaaaataagtcctgtctgtaaaccctgaggctctgccttgctggaaagaaatcaggatatttaagcccatattgtacatgtatagaaatcaataagaaatcgaaccccctttgtttctaccctggaggtcctagaactcacgaagaacaytgtggctgataacagagtccagttccatgtgttgagtgcctttgaccccctccccgtcagcccttctgatgacaaggccttgggctaccagctgctccgccagaccgtacagtccgtcttcccggaagtcaatattactgccccaggtaatgacttcatcagctgtggctggagggaggagggggctggaactgtttcctatccaatgtctacttccccacccccaccctagatgttcagcctgtaaacagctggctgcttcccctcctgatgagac

SEQ ID NO: 128605 - DNA, 613 bp, Homo sapiens
acccactcaaatttatcatcagtaaaataataactcaaaccacaggacctagaagaggatgacttaaataaggacaggcatttgcttcaaagaaagaacaaagtagttagggcattcaatgaatagcgcaatgcaagtggcagataccttaattacctaatcttrgctgagttaaattgtgtgcctgcccttgccagtaaaaaatagcaatctaacaacatggccagttgttaataaagtattatttagaaaaagaaaacaattccagatttaatatcatataaaggtaatggcctcattagatgtgcatcaaaatgatgcctaatcagtaccattattattatttattaataatggcggtatggaacccgatttcacagtggctgaggtcagcctcacatggatgactcacacacatggctgatctacataaatagcatgtgctaagattaccatctggtataacaatctacatcacaagactccacatttcctgttacccagggtaagtaaatttcaagcatgagggaaaattttagcaagtttctccaagtacctttgctgagagactaatgtggcttacacagagaggaggggaaaggaaattatgagg

SEQ ID NO: 128606 - DNA, 561 bp, Homo sapiens
tgcacacctccacattattgacctcaggtcagctggtgtttctctcagtgataatccctagaccagttgcttccaagtcacctggggttggggttcttgtttaaaatgatgccttctcatccccctctcagaactactgaatccgaacccctgggcttgatgcctacacatctgtgacagtctttccacataacatttaagctcactaagtctgggagtcactgggctgtatacctccatgcctccatcccacaaaatttagcgttacatggttagtgaagctgcagcttgccagcaagtatatacaatttctcagtttaaattcaccccctccaccaaaaaagagtcctttaaaagaaaagcaatcagtcagtatggaaatgtccaaacaaaaccaaaatgcataatttaatttgtgattctgatttcaaagggccagtttatttaattccatttggaactttaccaacrctactaggtatccccctgtgtgtgtttctccctctcaccctagagaagatttgagccaacttttactgtggtctagcaagattttcactt

SEQ ID NO: 128607 - DNA, 417 bp, Homo sapiens
tgaaaaaaattccttcttctaaggccattgaagttattaccaatattcaacactgtgcattatatagaatttctggtagctataaataatgcaaccttactacagatgacgtgrtcactcatgaacagtttaaaggtattcacaaaagatcaaatcaacaagaatcttttcaatagatattttggtgaatttccaaaatgcctgtatcattatttatgttttattagataactctcagaatatatttttaaaaatcaatgaaactaaatatttgacataaacaaaaaatgatagactatactgtaaccattaccttgtctatagtttctttggattttagtgttgtacggcagatatattttttttaattaacttgaaaagattggtaaagtttcagtaacttacttctttctggct

SEQ ID NO: 128608 - DNA, 417 bp, Homo sapiens
tgaaaaaaattccttcttctaaggccattgaagttattaccaatattcaacactgtgcattatatagaatttctggtagctataaataatgcaaccttactacagatgacgtggtcactcatgaacagtttaaaggtattcacaaaagatcaaatcarcaagaatcttttcaatagatattttggtgaatttccaaaatgcctgtatcattatttatgttttattagataactctcagaatatatttttaaaaatcaatgaaactaaatatttgacataaacaaaaaatgatagactatactgtaaccattaccttgtctatagtttctttggattttagtgttgtacggcagatatattttttttaattaacttgaaaagattggtaaagtttcagtaacttacttctttctggct

SEQ ID NO: 128609 - DNA, 608 bp, Homo sapiens
cttccatctgtattgaaggggcctcctttccaagtttgacagctctaggtaaaggaatctctgatatcccgtagtaccaagtatcctagttggttgtggttgtggtctccatcttgtgcctattatcaaaagagattctggagaacgcttttttctaaaacagctgtcaaatttttgaaatggtttcctgcatggtaaatggagtaatacataaacattttttttaactacaaaaaagccaaaaaaaaaaaagtaaaaagaccacaaaaatgctacagttttgcttgttttatgttttcctcactttctaattcagttgacttaacttcagtgcacagaactaccctcccaccttgggcagtcaatcatgccacatggagcagcagccctcaagctggggatattggatagagtgacgaaaatactataaactgtaaatcaaagatgatgtctagtttatgagaattttgcctgaagamacatttttattcccaaaagcctctttgctaaagcgtttattacagatcctaattcctcttgcaaacttagttaatactcatggatgtcttttgcatacagagcagggcacctgctgtcaaaactgacgt

SEQ ID NO: 128610 - DNA, 608 bp, Homo sapiens
cttccatctgtattgaaggggcctcctttccaagtttgacagctctaggtaaaggaatctctgatatcccgtagtaccaagtatcctagttggttgtggttgtggtctccatcttgtgcctattatcaaaagagattctggagaacgcttttttctaaaacagctgtcaaatttttgaaatggtttcctgcatggtaaatggagtaatacataaacattttttttaactacaaaaaagccaaaaaaaaaaaagtaaaaagaccacaaaaatgctacagttttgcttgttttatgttttcctcactttctaattcagttgacttaacttcagtgcacagaactaccctcccaccttgggcagtcaatcatgccacatggagcagcagccctcaagctggggatattggatagagtgacgaaaatactataaactgtaaatcaaagatgatgtctagtttatgagaattttgcctgaagaaacatttttattcccaaaagcctctttgctaaagcgtttattacagatcctaattcctcttgcaaacttagttaatactcatggatrtcttttgcatacagagcagggcacctgctgtcaaaactgacgt

SEQ ID NO: 128611 - DNA, 549 bp, Homo sapiens
tgcctccagcaaataaatgttccatcatcctagggagacttgccagtccaggtgactttggagggaatggggagcagcaatgtgagtgggttgagttgcttccagcatatgagattaggagagggctgccacacattcctaggaggtccaggagcagaaagcttcagcagagggttaactaccaatttgttctctgattgtccataaagatagaggttgtattgtctttcccaatgttctgatttttcactgtttgatttgacttctcgaggcatatataccataatgagacaaagacaaattacaattaagggcattaacaatctgatagaagacttatctgattgtctggaatggcagcccctccattgaaacacaaacaatggaaatgtcaatcgagaaattttatttaaaaaattgaactcttaagtgagtaaattggaatatacacacacaaaatgcttctgtttagaatttaggaaacatagtccatggctttcaaaatccaaaaggtgatttwaaaaagaagacagaacttgttgaaaacgg

SEQ ID NO: 128612 - DNA, 520 bp, Homo sapiens
aaggcaaaggtgtcagtctgtctgctagagctgggatacmctcttcctctcctgtgcttggacatcagaattcctggttctccggcctttggactctaagatctacagccgcagccccccagattctcaggccaaatgcacagaagcaaacaagtaggactgccaatcaggggtgatgccagtaatgtggctcagtcagatttggacggagccacactactggcatcccagggtctcaagcttgaagacagcctgtcgtggggcttctcagcctccataatcacacaagccaattcccctaattaatctcctctcatacctgtatctatatcctactagatctgtctctctggagaatgttaatataacactatttttatcactatccaaagattcaaagctactagaagagaccaacccatatacacagtaataattggtgagagggtgacagctgttatatggtcacatattgtaacaaaagttaattccaaccctttgctgcttgccaataccctcc

SEQ ID NO: 128613 - DNA, 520 bp, Homo sapiens
aaggcaaaggtgtcagtctgtctgctagagctgggatacactcttcctctcctgtgcttggacatcagaattcctggttctccggcctttggactctaagatctacagccgcagccccccagattctcaggccaaatgcacagaagcaaacaagtaggactgccaatcaggggtgatgccagtaatgtggctcagtcagatttggacggagccacactactggcatcccagggtctcaagcttgaagacagcctgtcgtggggcttctcagcctccataatcayacaagccaattcccctaattaatctcctctcatacctgtatctatatcctactagatctgtctctctggagaatgttaatataacactatttttatcactatccaaagattcaaagctactagaagagaccaacccatatacacagtaataattggtgagagggtgacagctgttatatggtcacatattgtaacaaaagttaattccaaccctttgctgcttgccaataccctcc

SEQ ID NO: 128614 - DNA, 520 bp, Homo sapiens
aaggcaaaggtgtcagtctgtctgctagagctgggatacactcttcctctcctgtgcttggacatcagaattcctggttctccggcctttggactctaagatctacagccgcagccccccagattctcaggccaaatgcacagaagcaaacaagtaggactgccaatcaggggtgatgccagtaatgtggctcagtcagatttggacggagccacactactggcatcccagggtctcaagcttgaagacagcctgtcgtggggcttctcagcctccataatcacacaagccaattcccctaattaatctcctctcatacctgtatctatatcctactagatctgtctctctggagaatgttaatataacactatttttatcactatccaaagattcaaagctactagaagagaccaacccatatacacagkaataattggtgagagggtgacagctgttatatggtcacatattgtaacaaaagttaattccaaccctttgctgcttgccaataccctcc

SEQ ID NO: 128615 - DNA, 572 bp, Homo sapiens
agattttctttgcatgttggaaagtcatagatttgttttttgtttttttaatgtaatgagattccttagttacttagaaacgtttttcatatctatatcatgataaaatagtgtacaagctggaagatatatttataataagtatagatattactattaaaacatatagctggacatgatggctcacatctgcactcctagcactttggaggccaaggcaggtggatcacttgaggccaggagttcragaccaacctagacaacatggtgagaccctgtctcttccaaaaagacaaaaaaaaatttggctggacatggtggtgcatgcctataatcccaactccttgggaggctgaggcacaagaatcacttgaacctgggaggcagatgttgcagtgagccaagatcttgccaccgtacttcagcctggatgaaagagcaagactctgtctcaaacaacaacaacaacaacaaaaacagaccaaggggacataatgtgtgagagctatccatttagccaattaaacagaatgagttgttggtggttcagatgttataacatgtctaacata

SEQ ID NO: 128616 - DNA, 572 bp, Homo sapiens
agattttctttgcatgttggaaagtcatagatttgttttttgtttttttaatgtaatgagattccttagttacttagaaacgtttttcatatctatatcatgataaaatagtgtacaagctggaagatatatttataataagtatagatattactattaaaacatatagctggacatgatggctcacatctgcactcctagcactttggaggccaaggcaggtggatcacttgaggccaggagttcgagaccaacctagacaacatggtgagaccctgtctcttccaaaaagacaaaaaaaaatttggctggacatggtggtgcatgcctataatcccaactccttgggaggctgaggcacaagaatcacttgaacctgggaggcagatgttgcagtgagccaagatcttgccacygtacttcagcctggatgaaagagcaagactctgtctcaaacaacaacaacaacaacaaaaacagaccaaggggacataatgtgtgagagctatccatttagccaattaaacagaatgagttgttggtggttcagatgttataacatgtctaacata

SEQ ID NO: 128617 - DNA, 596 bp, Homo sapiens
tgagtacagtttaacatagctaggctatcccagatttagaggatttctcttatgtttcattaatgaagaagaaggcaacttccacttccagccatgacagagtaacagggactgatatattgtccaactctaaactggtaaaatatatgagataattttcagacattggactacagtyaacatagagttgtgatactcagaggattttggattcataatccttcatttaaggagttaggaaagagtaacaatagttacaagaaagatgaaataactatttaaaatatgtttccctaaaattttctgtgttactatgctgggtgtaatgtcagtgtttgatatttgtgctatatgttccctgttaattaaaaaccaatgaaaacttatggtaaatgtacaactctaaaacttcagacattcttaggatagtgggaaagatggtgtgtattataagaaaatctgttgatgaactgagaactttcctcagaagattcacattttaataatgaaaactagttataagcgtccaaatacctttagtgtaataagcactataataaaacgatgtacaaagttttatgaaagccaagaacagg

SEQ ID NO: 128618 - DNA, 556 bp, Homo sapiens
tccaaactttaccaagtatcccctgggggcaaaacttctcattgttgaaaatcactgcattagacataytgagacaatcttaatctggtcaattgtgttgacacaaactgttagaggaagaataattattaacatttgtgtctagtcaactgatctggtcacataaattctgtatgtgaattcattttgtttaccaccaaagcacaaagacttttcagataactttaaataatattgtacaagtataggggttcagaggagcaagtgaataattaaatttacctagaatgtggagaaattgggtttggaatattcatgacactagttctatttctaatgtttagtgactaccattgaataatttatgtcttattattagaacaccaggagttatgacacatattttttgtgaagtttgccaactttggacttttcaagcatcaaaattcaactctgtatatttatagctaaactaggaaccaggaaatttagatgatttggccatgtccataaagtcacttcactgcaaaacaggaattgtggtctgatattctgg

SEQ ID NO: 128619 - DNA, 396 bp, Homo sapiens
aaatattcatattcgtcaatggcaattttgtaaaagaatttgcaatgcccctactttctgtaaatgagtgggtacccccatcctagggatatcctcatcctaatacctctctttaggacagcctgtctctccctctaagccattcttggtggagatgataccatcttccagaagacaaaaattgttcttgggaaacaaaaatatcttactatgttaatgtgtaaggcacagatacacacagagtacacacgcagataagcagtatgtttgtggtattgaattttgtggggaggatatcagaaaaaaaatctaaaaagkttctttagagaggtgacaaaaaaagtcaggaaactctagtctataccctaatcacctttggagcagggattctgaatt

SEQ ID NO: 128620 - DNA, 657 bp, Homo sapiens
cctttccccagttcactggtattttggtcacttctgtggtccccaactctcatcaggtagacaaatacatttccagtggacctactcttcatgggacttatgttctaacccagaatggccagacaacagcagagttttcaaaatamcagatgtccactagtaaaacaaaagcagaactgagatactcaggtacttcaagcccccagatgctccccaccttccatgtgcaagccttcttttcttcagagatgacaggcaaagattcccaaggaaatggggttcttcctttctctttctgtgcctcttcacagcacatttttgaaatattgaggtgacattcatataacataaaattaaccattttaaagtatagaattcagtggcatttagcacattcataatgtacaaccaactcctctaccaagatccaaacttacagcacattttgcctcccatttgatagatgtttgtttgtctatcacactggacagttcatttcttgaagccaacatctatgtcaatttcatctacatatttgtaaacattctaatgcccaggaaattctagttgaatggaattccagtttccctattccctatttcttcttctgagcagcacttgaatggctggatttgggatcagaatcaatgccttctt

SEQ ID NO: 128621 - DNA, 532 bp, Homo sapiens
cataaaaaaagactttaacctatcttgtgtgttccacaaattgtgaaatggaaagtgaatcttccagttattatttcggaatgttttagtccctagaaatagctacaaattagactcattcaccactggaaagctctgagttttctgcactgcaattctatataatttatatgctatgcaaatcatgctccactgaataccatctaatgcatttattcttcttcaaaattagctaaacactgccttctcttctgctaaatcaatccgcctgcaaaggcagttgtaaggatacttctctgacaagtgctgttgcttcttagcttcyctttgccaaaaggcatatgactggacaatggtaaaaaatctgtggggcctcatttcacaaaacctaatttaaaatctgtatgatgctaaaggtgtgtagaaggaaacatgaaagaatggaggccaagtttcctggaggtagaggtagggacttgggaatagaccacaaaagtacagagcctaaatttacttatgattttatgaaaat

SEQ ID NO: 128622 - DNA, 630 bp, Homo sapiens
ggtaacttcacagtttctcccactcctctagttcctgaaaaatacaaatatttgtggaaagctgttttaccaacacagggatggggtggattttgatcctcattgtctccattccctgctgactactgagaataagcaagaggtggcctaaggttcaggaaagtgtcattgcaaagccgatgccaagtttttaggcattgtagtgtggaaattcccttttgtaatggtactcttcaagtacactaccaggtaagctatttcaaaggtcacagaagggaaagactcataggtcaaattaagatgcttcaataacagggtttattaaatccatttaaaacttacagcaagaagcaagaggaaagaaatgagatgttaacactcagggtagggtgcacgtgggtagaaggagcacactatctcattcctgggttatgcgatgcttctgccttctgtctcttttgcagtgacaacagccttgccttatgatgaggaggttagagaactacagttgagggaggctagtgatagttaatcacatgtgccaacttggttaggccacagtacccagatagctacttaaatatcatccaatatatttctgtgaargtatttttggatgggattaagatt

SEQ ID NO: 128623 - DNA, 539 bp, Homo sapiens
gtcatggctacctttgtcacagcaccaccagaatggattttggtcagttgctgcttcttaacctcactggttcttgccacgaaatttaggactagagtatctgattggtgaaggctagatcatgtgacagcastcttactgtaagggtggttaggaaagtgaatatatggaaatttcagattctttgctgaatagaggtctttgtctcataaggtggggaggagattcctcaaacccaaggggaagttcagtcactgagcagctaaaaggaatgacaaatgtctacacactggtgtttgattccctttcacaagtgcctgggcaaaccttagggagtagaggtcccaaaagtcaaactagatctggtaaagtaggtacccagagtgaccaggggcagatgtaacctgatgagcaaatgtaggtagaagcctaaggtcaaaacttaaggatcatgaccagttattgggcctaagggagtaatgcaaatattacaggagtggaagctacatatccctggatactaggaaatttaggaagaa

SEQ ID NO: 128624 - DNA, 453 bp, Homo sapiens
aagccttttaagagtgtgtgtmccatttgtattcctatcagcaacataagaatgttccttccagtttctctccatcctcatgatattgtttgtctttttacttaactcattttggtgggtctgtagtgaatattttgtgctgatgattttcattttgctgatgactaatgattgtaagtagttatcatgtaattataagacatacatataaatttgtattcaggaattatccatttatatctagtatacattttaatagatgtttatctaatctagttgtaaaatttattttataccttcttgctgtggatgaaatgtttgtatcaaccccaaaatgtcataatgagggttcaaaatttcaatgagggttatgatgtttagatgaggtcatgagggctgagtttacatattgagagtagtgtgcgatatattttggctgtacccccacccaag

SEQ ID NO: 128625 - DNA, 453 bp, Homo sapiens
aagccttttaagagtgtgtgtaccatttgtattcctatcagcaacataagaatgttccttccagtttctctccatcctcatgatattgtttgtctttttacttaactcattttggtgggtctgtagtgaatattttgtgctgatgattttcattttgctgatgactaatgattgtaagtagttatcatgtmattataagacatacatataaatttgtattcaggaattatccatttatatctagtatacattttaatagatgtttatctaatctagttgtaaaatttattttataccttcttgctgtggatgaaatgtttgtatcaaccccaaaatgtcataatgagggttcaaaatttcaatgagggttatgatgtttagatgaggtcatgagggctgagtttacatattgagagtagtgtgcgatatattttggctgtacccccacccaag

SEQ ID NO: 128626 - DNA, 546 bp, Homo sapiens
agtgctagaattgaactgaattgcagtacacccagttgggaatggaaacaggaaaaccagagtatttataaatatgtgtattggatgcactgaagtattaggtgtgttgcattttaagatagatatcaaatgatgaggataatgcttaataatttgtagtaaaaactgacctgattgcctcttaaaatatgttcataaaaagggctacctaatacaacttactattggctctttggtggttgctttaaagagagaatggaacatgagtgagaactcaagggactggtgatatttggatagacagagaayggaatgtaaagaataggcaacgttgtctgaaccccttggtctctacctgataccaaagcttccctttaaaattcagggccattattgttttatttgtcttctttgtgtgatggttaatttcaggtgttaacttgactggattatgggatactcagtggctggtaaagcattactcctgtgtatgtctttgagggtgtttttagaagagattggcatttgaaagagtaaaatgaccaa

SEQ ID NO: 128627 - DNA, 573 bp, Homo sapiens
acaactggcatcacatatatgccttaattacccctttttattgttgaaccaactgagggttatggagctgaatttccttgcctgatgccacgctgctagtattaaagcacaggcattctgactgccaaccccaaactcttaaccatcatactatattggtttaaggggctcattatttcagacatgctrccactttaacaatttttgtattccatgagaattgctgtggctactatcctagttaggcagacaaaagaaaaaaaagttcctgataaaacaattcagcaagcccctctaggctcatattaatgagccacatcaggtgagacttttacactaggtagcataggtggctgcaactgagatttgatcctctctctggcaaaatattacataatttaaatatgtcttgaagaggccttttaaaggtgagctgttcaccaagagaacatacttttttttcctcttactattccttttttagcaaactgtcacactcaacttcaccattcctccaaaacatgaaactaagccccttttgagcaatttcaaacatttccacaaatgaatagg

SEQ ID NO: 128628 - DNA, 618 bp, Homo sapiens
ctccagatctgactgtagattttgcaaagtcactctccagaggtcttatatcatctctgtataaagttgaaaccatggaaatagggagagttaataggaattatgaggtttataggyaggcattatacatgggttacctcaatgaatcttcacaatttgcaatatttctatttgacaagggcggacaatgaaactcacagaagctgagtaacttgcttaagtttatccagctagtaaatggtaggatcaggatttgatcccagggctgtatgtctccaaagcccatggtcattttttttaagccacaatatttcatggagcttattgtatattgtaggcttaagagaaaagagaagcagcaggttttctctatagtccccagtaattatcttaatgctaattctggtataactctgaaggctaaaatggcttgatttacttctctcgaaattgttattttttaagatgggtgatatctgtgagtgcaatagcttttatggaatgactattctgaagaagaggctcttctctaggagtggtaccctgcatcttaagagtatataacacagtttccctttgaattagtttattccagaaaagcattatttattgtaacaa

SEQ ID NO: 128629 - DNA, 632 bp, Homo sapiens
atttgtgaatttttagaatatatgtagtacttaaaagtcatgattccagctgaggatgtatggaatcaatgtaacctgagtagtcctgggactccccaacatggataaaactaatatatatatagatactcatatagtgagatatatatacatatataaacatgaatatatatgtacacatatatatactcatagtgagatatatatacatatataaacatgaataaatatatatacatatatactcatatagagagatatatatataaacatgaatatatattcacatgtactcatatagtgagagttaaattaaattatattaattatgtataatatataatacatgaagaaaatgtataatataaaaatgaaaaatcatatgcttgtatatacagtgggtatgtagtaaaaatataaaaattatgaacaggaaataattcacaaaatatcaggataatggwtgcctctgagaatggtggagaaagaatgaaattgggaaaagtatacaaatggctttcaatttgggctttaaagttttatttctaagaaaaacaatttgaaacattggaaagttgattacatggcaggtaagaaattagacaaaatgacatagtgcatttaaagaattc

SEQ ID NO: 128630 - DNA, 553 bp, Homo sapiens
tgagtgacctgggacaagtgactaaacttctctgaacttgttttattacatgcaaaacaaggataactgtgcctgcctgcaaggttgctgtcacggccagaaaacactcatcctggggcccgacacacagtcaacacgcaagaaaaggtggctaccttcatgaaggtgtcccatcactgtgcccacgtggaaggcgcccctctgcagcgatcacccacaccacctctgtgggtgttccggggtcacacccgactttgacatctgaatcccagtcctgattcccacggacatttccccagctcctagagccagcctccttgcatgaacctgatgcctgagtccttttctctggagaccrttggggaaactgagtctttgagtccttttctctggagaccattggggaaactgagtcttacacctgtaaggaactttctgactctgaagtcgttccggcttttatggctctttgtgactggcagctccttcctccagctctggttcctcagtggcccagcccatcaggtggagcccctggggttatcctggctgg

SEQ ID NO: 128631 - DNA, 639 bp, Homo sapiens
cctgggttgattctttgtctttgctattgtgaatagtgctgcgagaagcatacaggtacatatgtccttttgatagaacaatttattgtcctttgggtatgtattagtctgttttcacactgctataaggaactacctgagactgggtaatttataaagaaaagagttgtaattgactcacagttctgcatagctagggaagcctcaggaaacttacaatcatggtggaaggtaaaggagaagcaagcaccttcttcacaagatggcagaatagagatagtgtgcaggggaagctgccacttataaaccatcagatctcatgagaactccctcactatcataagaacacatggagactgcctccatgatccaatcacctcccactaagtcccttccttgacatgtggggatttcaattcgagatragatttggatggggtcacaggaccaaaccttatcaaggtatatacccagtaccattactgggtactcgtgctgggattgcttggtcaaatgatagttcaccacttagttctttgataaatgatatttcaccacttagttctttgataaatcaccaaactgctgtccatagtggctgaactaatttatattcccactaacagtgtataagtgtcc

SEQ ID NO: 128632 - DNA, 520 bp, Homo sapiens
atcaacacgtatggtggaaaaatggtaaaatgaaaccaggatttggcagttacagatacatttgacccttagtcaacagatctttccattataaaaactgcttctttttaattgatttgagtttacaaggttttctttaaaattaaaatgttcccttaaaaaatacataataaaaaataaaaataaaaataaatgtttccctgaaggctatcagttgttcacacctcactgttaattaatcagatacayactttaagtaacaccggtgtacttaaaaggaattgttagttgaaaagtggtgagaagaggggtaatcttagtggagcaggcctatataatgctcattgtgagaatttttaccagtcaccaggcagcatgatgataatggcacctacaaggtgacagcagaggggatccaggaattgtaaaaggcatcaaagcaattccctccatactccatgggattatactaagtgctctttaaggaaactcaagttctgttattctactcttctcttat

SEQ ID NO: 128633 - DNA, 384 bp, Homo sapiens
acatcagagtctgatgggcaatattttcctgagtgacatgtgcctagagaggtattggaggatgtagagagamatctgttttgatttgtgacttataatatgcaaagaactgcagagagaaaagagaaagagagagagagagagaaggagaggagaaaaagaaaagagagatccagtagagggaaaacataagtccttgttttctccttctctgtgccaagtaggtatatgctgctgctaggaccatttggccagactggcagtcaacaatgacagcagtctagctgtggcttggggccagtgggaggcaggctgcgtggcagactgagcatgggtgaggggcaggtggaagtgggaagtactagaaggaaattgttgcagcca

SEQ ID NO: 128634 - DNA, 384 bp, Homo sapiens
acatcagagtctgatgggcaatattttcctgagtgacatgtgcctagagaggtattggaggatgtagagagacatctgttttgatttgtgacttataatatgcaaagaactgcagagagaaaagagaaagagagagagagagagaaggagaggagaaaaagaaaagagagatccagtagagggaaaacataagtccttgttttctccttctctgtgccaagtaggtatatgctgctgctaggaccatttggccagactggcagtcaacaatgacagcagtctagctgtggcttggggccagtrggaggcaggctgcgtggcagactgagcatgggtgaggggcaggtggaagtgggaagtactagaaggaaattgttgcagcca

SEQ ID NO: 128635 - DNA, 584 bp, Homo sapiens
gttacagtattagcgtttgcagatgacattggagaggaaaccatgaaggatccagttaatgggcccttgaaggtgagtatgggaagcttggacgtcactgaccctgtctaggtttagatgccccaaacattccacctaggctttcgctcagccttattcctggcacccaccttccaccacccaatatgagtccatcctccacrctgatgctgtcatgatcttcctgaaacacaacttggcctatcccagcactccctccttcagctccttcaatgtatccttatggagtaaagtccaaactcctaagcctgcctttcaaagtcctccacaacctccttttgagcatgatccttcatgcacctgtccttctacaggccccacctctctggctgactcgtgttgggccctctacccattctccttcctctctgcaacctcccttgccttctcccagggtcttctgttgaagatctgttattctttaaggcctggttctaatctcatgtccttcaaaactccttttaagatcttctagtttgaaatagtctctcaagccactgtatttgtatatcatgtatctacac

SEQ ID NO: 128636 - DNA, 501 bp, Homo sapiens
tactgatatgatgacactggcttagcaagattaattaggtgattttgaaacatacaatgcattattatttattgtagtcaccatcctgtacaatagatcactaaagcttattcttcctgtgtaactgaaattttgtacccattgataaaaatctctctttccccatttactgcacccccccagcctctgataaccatcactctactctctaattctgtgactttgacttctttagattctacacagacaagcataccttgaagatattgcagattcagrtctagaccaccacaataaagcaaatatcgcaataaagtgagacccacagttgttttttgtttcccagtgcatataaaagttgtgtttacactcttctgtatcctatcatgcaatagcatgtctaaaaatgtacataccttaatttaaaaatgttttattcctaaaaagtgctagtgattacctgagccttcagtgagtcatgatctttttgccagtggaggg

SEQ ID NO: 128637 - DNA, 529 bp, Homo sapiens
cctccaccacctccctgaggggcccctgcttgtgtctcaccaccctggttgccaggaagtaccgcatcaagtctaactattgtccttcttgctgcaactgcagcccagttcctttcacttaggaaagacaggaagcccagggagctgcagatgtctcccagaggctggtgagagcgcccagctattgggctcttcctggcccaygggagaggcataggatagagatggaaggctggcagactgccagcccctgcctggtggtgttctgggggagcccttccctgcccctggaggcaggctggctctcaccagtatttcctcaagtcacctaacaggagtgaaagacaaaaaccacccctgtgttggcacctcctatggtgaccttgggagcctttatgcgcactcaaaaagaagtcaaggtcagacatggcccctggcagtcaggcctgagtggggagagaacagcccctgctgagccctaatgggggagacacagcccttctccagtgtgaggggggaaacatcagac

SEQ ID NO: 128638 - DNA, 529 bp, Homo sapiens
cctccaccacctccctgaggggcccctgcttgtgtctcaccaccctggttgccaggaagtaccgcatcaagtctaactattgtccttcttgctgcaactgcagcccagttcctttcacttaggaaagacaggaagcccagggagctgcagatgtctcccagaggctggtgagagcgcccagctattgggctcttcctggcccacgggagaggcataggatagagatggaaggctggcagactgccagcccctgcctggtggtgttctgggggagcccttccctgcccctggaggcaggctggctctcaccagtatttcctcaagtcacctaacaggagtgaaagacaaaaaccacccctgtgttggcacctcctatggtgaccttgggagcctttatgcgcactcaaaaagaagtcaaggtcagacatggcccctggcagtcaggcctgagtggggagagaacagcccctgctgasccctaatgggggagacacagcccttctccagtgtgaggggggaaacatcagac

SEQ ID NO: 128639 - DNA, 404 bp, Homo sapiens
aattgagaattcttggagtcctyggtgttctgcatcaggatgtggtagtgggtggtgggaggagctcttcccagttcacagctgtggtccccctacctaccctgtcattctggctttcagctgtagcaccgcgtgatgtggcttgctcaggcagggaaggggcccacgtaggccctggaagtgggctgtgcctattttggtaggtcattctggggtcacagtatcctggcattgttcagaaggggcacggcttctgggtgggcctgtcactcagcttgatggggacggaggcatgtgctgggggcgcccagagcagtggcctctaaatcaagggcccagggcaggggcttatcttgcccaggtctaaaggtgatgttgctttagcctacatctatttgaggaca

SEQ ID NO: 128640 - DNA, 626 bp, Homo sapiens
ctttgaaatgaatgataatactgacacaactgatcaaaacctctgggatacagcaaaagcagtgttaagaggaaactacatagcattaaatgcctacatcaaaaaatctgaaaaagcacaaatagacaacctaatttcacacctcaagaaagtagagaaacaagaacaaaccaaacccaaaccagcagaagaaaataaataacaaagatcagaactaaataaaattgaaacacacaagaaaaccaatacaaaagataaatgaaacaaaatctgattctttgaaaagaaaaaccaaaatgatagacccttagtgagatttaaccaagaaaacaagagagaagattcaaataagctcaatgagaaatgaaactggagatattacagccagtaccacagaaatataaaagatcatttgaggctaytatgaacaactttacgcacacaaaactagaaaatttagaggaaattcccagaaatatacaaccatcctagattaataaattcccagaaatatacaaccatcctagattaaatcagaaagaaacagaaactctgaacagaccaataacaaacagtgagattgaatcaataattttaaaaaagtgccaaccaaaaaaatgtccaca

SEQ ID NO: 128641 - DNA, 599 bp, Homo sapiens
tcgtgcactaggctataataattcatttcatcacagcttccctaggacctcctgtgatgtttatgagcttgctgctatggtgatttgattttcatttataaaagaatgtgttactacctagtcatccccattttctaagaaatcttttytctgaaattagaaaccaggtatgaattttaaccttttgggtctgtgataagtgttttaatggcttcatttaacaaactatactattatttaattgctttgattcatctaattttgtgaaaaacccagggaaatagggttgatgtgaaaactaaattaatactcactgccatgtatgaacttctttcatactcagatggctcctcaatggcacttcagcttcatgagacacaattcccatgctaatccaaaggtctggaatgacaaactattagaagaggaagggatcttagagcttatcaagtataacttcttactggtttggaaatctacctatctatcaatctatctatctatatctatcttgaaatgtgagtagtcagcttctgcatgaattcctgggacaggagaaagctgcaccagagttggaaactcctaagaattacttggaa

SEQ ID NO: 128642 - DNA, 425 bp, Homo sapiens
cttgttccactaggctgaaactcaagaagcaatactggataacagaaagaaaaggctttagaagctgagagagctgcaatcaaatccaaactctgcagctagctgtgtgaccttgggtatgctacttaacctctctgagtttccatttcctcattaataaatttaggtaataatactccacagattggttattgaggtgaaataagatggcatgtgtaaagtgcccataatatgttttatgtggaagttgtcagcttataaattgaaattggaacatataaatgatgctttctcagtttgatttagctgtgaacayacagatttccttttaggtgaaataagaagcataacaaagcatttgaaaaacaatttctgaaatatgattacaggttagcaagaaaccagaaataaaagctaaatattaa

SEQ ID NO: 128643 - DNA, 619 bp, Homo sapiens
gagcgatgctcccactagatgaggaagctctttctttttttagccaaaaaaaaaaaaaaaaaaggagatggataccatgtcagcaatgccctacttatagtattcttaacttgattaagaaagygatgacttcaaagaagcaaaagggtggggctgaaaaagacaaaagccaagaggaaaagccaagtttgtgcaggcataagcaaactagcatcgtgatctgtgaacacattgcacaacctgaaaacatgtcagttaattaaagtccttttatattaattggatgaagcatagattatgtaaaggtagaacagcagtgttcctgcggctgtcctatttcatagtactgtgcttttggggctatttaatataacagatggaatatcagtaactccatagttatcagaaatgactccaatatacttagttaatacacgtattaaacaaaattactccagaaatccacactaagatcaaataacataactaataacataactttctacaacacagaaaatgtttttgtgacctaggatcaagatggtcagattgatgtataagagtttttaaaaataattctgaccttgccttacagtgctcataaactagacccttcaac

SEQ ID NO: 128644 - DNA, 562 bp, Homo sapiens
caaacttttccgtgagaatagattctgtgctttcatgtgttgctcattaaactgcctgtgaaagaagatgagtaacagcgttgcaccacgcgtaaggttattcaggtcctacacaaaaacctctctgtgaattagctaaygcttttctgaaaatcaatatgaaagcattcagatattaggaagaaagaggaagcaaatcaggatttcatgtatcactctagcatgaaactccaatggggaaattagtctaaaatcatccaagagaagctccagtctgtatataatgataataactaggaaaatgggaatttttcactgaagtttttccttattgctatactcagttgatataatgtaaccatttgcatctattaaacattattaggttttcctcatgtgaaaatcctcaaggcatatccacatgtcttagcctatgaatattttatggtgataattatttacgatgagtggcagtatttttttagtcaatctttggaagaaaataataaagctacaaattcctccagtttactgtaagaagaataaaaagttcccagccact

SEQ ID NO: 128645 - DNA, 562 bp, Homo sapiens
caaacttttccgtgagaatagattctgtgctttcatgtgttgctcattaaactgcctgtgaaagaagatgagtaacagcgttgcaccacgcgtaaggttattcaggtcctacacaaaaacctctctgtgaattagctaacgcttttctgaaaatcaatatgaaagcattcagatattaggaagaaagaggaagcaaatcaggatttcatgtatcactctagcatgaaactccaatggggaaattagtctaaaatcatccaagagaagctccagtctgtatataatgataataactaggaaaatgggaatttttcactgaagtttttccttattgctatactcagttgatataatgtaaccatttgcatctattaaacattattaggttttcctcatgtgaaaatcctcaaggcatatccacatgtcttagcctatgaatattttatggtgataattatttacgatgagtggcagtatttttttagtcaatctttggaagaaaataataaagctacaaattcctccagtttactgtaagawgaataaaaagttcccagccact

SEQ ID NO: 128646 - DNA, 628 bp, Homo sapiens
ctgttccaatgctggaaggtggagtctctggccacaagctctggactttgctctgacaagagatccttgtactgaatcttatccacagtgatgatctaggcagccaccagtgggagaggaacactacaaggcaactaaggaacaatcacagataccacctagatgctactgtaatggaggctatggtattccacttagattctccatttaggaccagggcactcattgccccagctgccaggaatgtttgccaaccacgcttcatagctcaatcccactacaggaattggcctcaaccaaagaaacttccttcacccacacttataccctccacagggacaacctatattcaaagactgctcaatgtaagggtacaaagactcaacactcttgyttccatttatgacaactttgaaagtccatcccagccccagaaatccccatggggtcaactaaatattccaacagcatcacagttcagcttttccactgcccaatctggcagccctctctccctcacaggtgttccccaaagcactcccaatacatcacctacatgcaaatctctgtcccagatctgtttcccagagaaactgacataagacaggaactgtggcctcctgcccat

SEQ ID NO: 128647 - DNA, 618 bp, Homo sapiens
agtaagaaaaatatatggtaggggcacatttaacccattaaaaatataatttgaaaagtctttgatttattatttacatgcaaatagaaatagctataataaactacttcttaatccagtttacagaagcaatgttttatgaaatgttgaaaagagcggactaggtttaaattccagattggccacttaatagctgcaatataagcaaattacttatcttctctgagcctcagtgttctgatttgcgagctaaaaagagtaacgtttaggatgatccacatgaaattgctgatattcaacagttttttacctacagagaaggcaagttcatgtggtttaatcaaataattaactcttatatgtatggcgagggaattacagagataatctgtgaagagcctccagcatgcttctgggaatatagtcaacacacaataatgttcccttatatttctctcaattctccacggatgatgctgaccattaggataatctggattcaattttctgtgttagtgaakatacccacaggatgggaaaccaaatgctgcaagtgatagtcatatattgtcacagctgaatataggtaataattatttcagcctcctatattttttc

SEQ ID NO: 128648 - DNA, 539 bp, Homo sapiens
gactaagaggtaacgggagatagctgctttaggactaaggtaactggagatatcagatatcagaggtcatatgtgggtagatggagtagttccaactcaataaaagtagagagttcttgctgagcccctctggcattcagttaaataagattccagaaaagcaacatcttaaaaataagaactacasccttgaaaaggagccctgccctaaaattacaaataaagctagaagaggatacctactcctaacaaagtactgaaacaagcctaacaggttcaagatcctttagtaatttaattgcctgccagaacaaagctcataacttttaaagaaaggtaacataattcataaccctacaaaatgtatcacacacaagtacagcacataatcaaaactctctagacatgtgaaacaggaaaatgtgacccaaaataaaaacatggtaaccagatattgatattagcagacaaatactttaacaaattaaacagctgaacataatgaacaaaaagacaagaaatcttagcagaagaaacaa

SEQ ID NO: 128649 - DNA, 539 bp, Homo sapiens
gactaagaggtaacgggagatagctgctttaggactaaggtaactggagatatcagatatcagaggtcatatgtgggtagatggagtagttccaactcaataaaagtagagagttcttgctgagcccctctggcattcagttaaataagattccagaaaagcaacatcttaaaaataagaactacagccttgaaaaggagccctgccctaaaattacaaataaagctagaagaggatacctactcctaacaaagtactgaaacaagcctaacaggttcaagatcctttagtaatttaattgcctgccagaacaaagctcataacttttaaagaaaggyaacataattcataaccctacaaaatgtatcacacacaagtacagcacataatcaaaactctctagacatgtgaaacaggaaaatgtgacccaaaataaaaacatggtaaccagatattgatattagcagacaaatactttaacaaattaaacagctgaacataatgaacaaaaagacaagaaatcttagcagaagaaacaa

SEQ ID NO: 128650 - DNA, 583 bp, Homo sapiens
aggtttaagctgcttctccaatataaaaaaacacaaatagataaaatcctttttttttttttcttaaagaccaagtcttgctctgttgccaaggttggagtgcagtgacrtgatcacagctcactgcagccttgacttccaggactcaagcaatcctcctgcctcagtcttctgagtagctgggactacaggcgcatgtcaccatacctggctatttaaaaaaaaaatttttgtagagataggtgtcttgatatgttgcccaggctggtcgtgaactcttagcctcaagcaatcctcccccattggcttcccaaagcgctgggattacaagtgtgagccagtgtgcctggccacaggaagaaaatcttaaatcagttcactttgttcttccaagcataagaaaaaaaaaattctggcaaaagctaagcttcatgactcaaaagggaattggttataaattacaaagctcacctagctgttctctggctttctggccacatcaaccaaaaaactgcaacatttagcaaaattggcttctggatgtagtgcaaaggagattacaaaatcagacagcacacattaa

SEQ ID NO: 128651 - DNA, 579 bp, Homo sapiens
  misc_feature (1)...(579): n = A,T,C or G
attttggccaatggcaataagcacaagtgttttatctaatttctgacatcttagcataaagagcagcttggggctgcttgaggtaatgataacacctcaaaagagcttctcctgtggcctaaaggatagaaaaaggaatcaccaggtgatagccttaaatactagtggttgggatattattctgcaggaatgtgacaccaatctcaagtaaaatttatggaaatgacttgggtatcaatataaggctcgattggagacagggcgatgagttagcaggctgcaataatagctcacatgagaaccagccatgtgtctgaaccaggacagtgtcaccaaataattcagtgtaacttaatagtaaattatacatcacctactccatgcagaacactgatctnggctaagagggaataaatataaagacccatgagacacattccctatcctccaagaagtaccaattaagtagctgatgaaataaatayaccaaattaaaacagagtgtgagctatgattgctgattaattatgaaaataaaagtgcagatacctttagctggaataaatcaagaaacacagt

SEQ ID NO: 128652 - DNA, 561 bp, Homo sapiens
ggtatctaattattccttatttaaactaggagggttgtatttttccatgaacttatccatctcttcctaggttttctagtttatgtgtgtgaaggtgttcatagtagccttgaatgatcttttgtatttcagtggtgtcagttgtaatgtctcctgtatcatttcttaatgaggttatttggattttctctcttttcktggttaatcttgctaatgatctatcaattatatttatcttttcaaagaactggctttttgtttcatttatctttcatatttgtttgtttgtttgtttcatttagttctgctctgatcttggttatttcctttcttctgctgggtttgggtttggtttgttcttgtttctctagttccttgaggtgtgaccttagaatgccactttgtactctttcagtctttttgatgtaggtgtttaggggtatgaactttcctcttagcactgcctttgctgtatcacagaggttttgataggttgtgccattactgtcattcagttcgaagaattttttaatttccatcttgattttgtttttgacctga

SEQ ID NO: 128653 - DNA, 609 bp, Homo sapiens
tttttatcgtattttacaaaagaatcagtctgccacagattggaaattcttttaaaaaacaatcctgtaccacaaataatttgagaaacactgatctacaaatggcaaatataggccaagtctggcccaccacttaattttgcaaataaaatgttattaaaacacagtcacagccacttatttacatatggtgtatgattgcttccatgctataatggcagcattgagtagttgtgacagagaccacatagcccacaaagtctaaaatatttgttttctggacctttaaggaaaaggtttrctgacatctgatctagaccacttgttctcaatcatgattacacttcaggaattcctgggagacattttaaaaataccgatggctgggttctgttcccggggattctgatttcattggtttatggtgcagccagtgcaggtcattttaatgttcagcaaagttttaaaccactgatttagatcagtaactttcaactttggcctggaatcagaatcactgaggatgccagggattcactctcaacctactgtatcagaattctgggaagtggggcccaggcatgcttgaatgtgtttttgttaagtaaa

SEQ ID NO: 128654 - DNA, 609 bp, Homo sapiens
tttttatcgtattttacaaaagaatcagtctgccacagattggaaattcttttaaaaaacaatcctgtaccacaaataatttgagaaacactgatctacaaatggcaaatataggccaagtctggcccaccacttaattttgcaaataaaatgttattaaaacacagtcacagccacttatttacatatggtgtatgattgcttccatgctataatggcagcattgagtagttgtgacagagaccacatagcccacaaagtctaaaatatttgttttctggacctttaaggaaaaggtttactgacatctgatctagaccacttgttctcaatcatgatyacacttcaggaattcctgggagacattttaaaaataccgatggctgggttctgttcccggggattctgatttcattggtttatggtgcagccagtgcaggtcattttaatgttcagcaaagttttaaaccactgatttagatcagtaactttcaactttggcctggaatcagaatcactgaggatgccagggattcactctcaacctactgtatcagaattctgggaagtggggcccaggcatgcttgaatgtgtttttgttaagtaaa

SEQ ID NO: 128655 - DNA, 609 bp, Homo sapiens
tttttatcgtattttacaaaagaatcagtctgccacagattggaaattcttttaaaaaacaatcctgtaccacaaataatttgagaaacactgatctacaaatggcaaatataggccaagtctggcccaccacttaattttgcaaataaaatgttattaaaacacagtcacagccacttatttacatatggtgtatgattgcttccatgctataatggcagcattgagtagttgtgacagagaccacatagcccacaaagtctaaaatatttgttttctggacctttaaggaaaaggtttactgacatctgatctagaccacttgttctcaatcatgattacacttcaggaattcctgggagacattttaaaaataccgatggctgggttctgttcccggggattctgatttcattggtttatrgtgcagccagtgcaggtcattttaatgttcagcaaagttttaaaccactgatttagatcagtaactttcaactttggcctggaatcagaatcactgaggatgccagggattcactctcaacctactgtatcagaattctgggaagtggggcccaggcatgcttgaatgtgtttttgttaagtaaa

SEQ ID NO: 128656 - DNA, 609 bp, Homo sapiens
tttttatcgtattttacaaaagaatcagtctgccacagattggaaattcttttaaaaaacaatcctgtaccacaaataatttgagaaacactgatctacaaatggcaaatataggccaagtctggcccaccacttaattttgcaaataaaatgttattaaaacacagtcacagccacttatttacatatggtgtatgattgcttccatgctataatggcagcattgagtagttgtgacagagaccacatagcccacaaagtctaaaatatttgttttctggacctttaaggaaaaggtttactgacatctgatctagaccacttgttctcaatcatgattacacttcaggaattcctgggagacattttaaaaataccgatggctgggttctgttcccggggattctgatttcattggtttatggtgcagccagtgcaggtcattttaatgttcagcaaagttttaaaccactgatttagatcagtaactttcaactttggcctggaatcagaatcactgaggatgccagggattcactctcaacctactgtatcagaattctgggaagtgggrcccaggcatgcttgaatgtgtttttgttaagtaaa

SEQ ID NO: 128657 - DNA, 551 bp, Homo sapiens
atacaatgacatcagtggtttccaggaggctggggtaccttctccttgggggtctacaatgatagcaatggagcaatgtttttaaaagctcaaaagaaagtgcatgtgttgccagttaaggctatrttgcctaatatgaacactgtctcttgctctggttgaatgatgtcaactctgcaggtatcatagataaaatcatgttgcttagcatgtgtatccatcaagattcttggctgcatgcaatagaaaccaagtctagttgacttaagcagaaaataattgctttgggaaaatgtctgccagctccagagcaaatgaaaagacaggaagaccagactctggatatgggcagtagccaggaaaagctgagcaatgaagagctcagccaaggtcacaccacagaagcggcatggttgggataccactggacaccagacaccgacccactggaaccaccaggacatgggatgtcactgcccagtggactgcattccaaaccatggttgctgctttgtgttacttgctccagatgcaaagtcccaggtgagacc

SEQ ID NO: 128658 - DNA, 569 bp, Homo sapiens
gaatgatgttgcaccttacaatgttagaaaacctgggagcctgggatgttaggctggggagtgggtaagtggaagtagttgtttgccatattaagatgagctacttagtagttgaaaatacgagtaataatcttaggaaaagaaatctaggctacaaatattgacttggaaattctccaattacatgtgactaagagaatatatagaataaaaagaaaatagaacccagaataaaaccttggcaagaaccaacattttagtgggtggaatggatcactgcagttagctgaacagattaagaaggaaataattgaagaaaggaaatgtattagatwtagttcatggaaataaaaagctgaaccaatgaattcatggggaacatggagagaaatatctgagataaggaggataaggctgcagagtgtttacattcttgtaactgcaagagtgagatgagccaaaaacacagctggaatgaaacactgaggagcagaaggcccagccgaaattgaactgtgcaggcagaattatagcactccacccccacattaataatattttaattaaaa

SEQ ID NO: 128659 - DNA, 634 bp, Homo sapiens
tttagctactgagttgaatttaggtgggggaagtatttttgacttgaactttctacaaatttactgtatgtatgtgaacattaataggatagcagtatactaaatatgaatattgggattgaagactgcagaatgcaagacactgtggcatcttacaatagttacaaaggcattagcacaaggcagatttatttgtttatttatgtcccctataaaccacagctaractgttttttattgattttttttttaaatttgccttgacctcttttttctaaattccaaaatattaagattcttattcagcagatttgagaagtttttaaatgtaataaagtggttttgaatgtagtgaggaaaaccagcccaagagcatatagctgctgtgaggatttactacctgggaaggtaaaagaaaacaaaagggcccggattcctgggggtcctttattttacatatgcatatctgtgttcatggaccagaatttgtattctccacttgtattttagaaagactgcctagtgttatgagagacagattgaaggttattgatattataactgaggggcagtttaaaagttgagttagaattgatagttgttgcatttctgaagtttgtcacttctaagccag

SEQ ID NO: 128660 - DNA, 591 bp, Homo sapiens
ggtttggctgtgttcctacccaaaatctcgtcttgaattgtaatctgaattgtaatctgaatagtgctggggtgacatctggtgggaggtaatttaatcatgggagtggttaccctcatgctgttctcgtgatagtgagtgagttgtcaagagatctgatggttttrtaaggggtttttcccctacttcactctgcacttcttgctgccatcatgtgaagaaggatgtgtttgcttccccttctgccatgattgtaagcttcttgaggcctccccagccatgctgaactgtgagtcaattaagcctctttcctttataaattacttcatctcaggtatgtccttatagcagcatgagagtggaccaatactgtcatttattgagaatttactgcccggaggtaccttgaggggtcacagaaaaattgacaatctggttttcattctgagtaacaattatagtaaacaatccttgagagtctgctatatgatgaatgaagaaggtataaaaaagctaagccacttttctaagtgtctctctcaccctagggccttggcttacaaccagctgggaagactaatgatttctttc

SEQ ID NO: 128661 - DNA, 590 bp, Homo sapiens
aaacacaaaaaaaggcaaaggagtaatwtagattaaaagaataaagagaaatgacaattcaatatttgaatcttcattagatcttgattagaaaaaaagctagattctatggagtagacaattgggagaaaattgaatgtgtattgtgtatcagacattactgaatcaatgtggaatttcttggatgtgatcatggtattatgattatgatacagaattctgtgctcccagaaggcatatatatgatcaagtatttagaagtcttgatgtttgttatttactttcaagaataatttcaaaaaacaatttaagtaaaaaagaaaatgtgtgtttatgcagaaaagagaaaaaaagagatgcagagggagacaaacagaaaaagcagtgtggaaaatattaattggtaaactagataaagactgttcaccttaacactgtttagagttttctgtggatttgaaagaaaataaaaaaggtggagggcaaaggtgtttgctaagccaatgaatgaataaaatggtactaaaagaaaaccaacttttccgccttcctcctaccccaatacctaaatctcaaaacaagtattaatg

SEQ ID NO: 128662 - DNA, 439 bp, Homo sapiens
gaatctgactactcttatttcctttgtcacatgatccacacactaaggaaattcaatcaaaagcaataaatattcacagcacccatgaagaagcttgataattgaggtcaagtgtatttttgcctagttttaacttaatctactttgtcattgttagttttattagactttctcatctctaytctctctcaaaggaataccgagtaaagagcatattaagtcaagccagatccagttccaactgatcttttggtccccagaatttccactttcctaacttgaccattacccatgggacactaccaatttcatgtattttcactgaatttgttgtgttgtcatgtacaacaccctccacttcccaacccacccccgcgaacgccgtctgactccagaaacccaaacttgtgctcatttttcattattccaccttctcctg

SEQ ID NO: 128663 - DNA, 564 bp, Homo sapiens
ttaacaaagggcaagtggctggggtggcaatgggagatcaggaagcattttcagagggcgtggggaatgtatgggcatgtgttccagggtactttgacaagcaaggtgttattggtgcgggggrctgcagaactgttagcacttaaagtaggaagtagctgggtactatctccaggagaaggagctgaagtctcttgaaaacatcctggaggacttcttgagggctaagcagacattgctgctgatgatggtgatgataatgatgataacaaaatcttccttccaggggcctaccgtatgtatacctactgtgtactttaaaacagctcttcattggaccattagcaacttgaaatcaggatgtggtctccatctctgtgtcctcagtgcctaatcctaaaaaggtggtcagtaaatcccatttctacactcaccaagcttctgctctgagactgacagtgctgggtgccgggagttcaggcataaatggagccccattctctgccctcaagatgcccagagtaccagggggacacaaacatgagaacaaaaacaaacagtgca

SEQ ID NO: 128664 - DNA, 571 bp, Homo sapiens
ctaccttcctgggtcttaaagtagggatgaactttaactgtgaatagtgaattcagccttccttaatatatataacttatattttgattgtatgtaaataatttagccttacaaccaaggtattgccaaagcaaatactgagggtaataagagaaagactcgttgaccttaagtgtgagactccagtataataacaacccataaaagctgctgaattggaattacccaggagatagggctgtcagccaatttactcagcttaaagtgttccctaaaaacaattctccagggaaggaggggtcaacctgggacaccgaggtggaagggactgataaaaaagacatactttatgtgtgtgtgtgttttttttttttttttttggttcaaagactctcaaatactttcaaagagcaatctatacgtgaacagcttcytgcataaaacccatataacagctgagcctatttgaagagggtccaagttttcttttgtatttattggagattggaggaatgaagtttgcaaacccaacctttgctccttaggatcactcatttcaggcacatgttca

SEQ ID NO: 128665 - DNA, 628 bp, Homo sapiens
ttgcacaaatatggaaccagcctaaatccccatcaaccaatgagtagataaagaaaatgtgatatatatatatatatatatatatatatatatatatatatatatatatatacacatatatagtatacatatacacaccatggaaaactactcagtcataaaaagaaatgacataatggcatttgcagcaacctggatgcagtcagagacttattctaagtaaagcaacccaggaatgtaaaaccaaacatcgtatgttctcacttgtaagtgggagctaagctataaggacacaaaagaataagaatgatataatggactttggggactcgggggaagggtgaagggtggatgagggataaaagactacacatttggtacagtatacactgcttgggtgatggggagcgccaaaatctcagatatcaccgctaaaaaacttacccatgtaaccaaaaaccacctgtttccaaaacactattaaaataaaaactcatactcagaccttggatcaactttatatttttgttttttatttagaggcaaggcatattttttctctatgctttcagaagcagaccaaaaacattcataatgrtaagtaatgcatgggtttctttgtttgttt

SEQ ID NO: 128666 - DNA, 592 bp, Homo sapiens
tcctgcatctcctgactcccaagccccagccccattctccctgccaggaagccctttgtcagagtcaacgcggaacatgggtggtgcagtaagaaatcacccaaatcttactttaaatcctggtgccaccacttactggcctttggagcacttgtatgacttcttggttttctcattggaatattgggaaggtaattttttaagtgcccttgtttagatgataaattataaggtctctttrccattatatgacccttggggtatagcagatcgccaaaaaggagcagagggcactaaaaggagaggtggagaaccacaaacgacatgctttactccttcagtactgcacccagcctggactctgagccctgtgttgcagttacaagcagccacagctacttgtcaacctgtccaattacacttctggaatcccaataagaagtgcttataaatacagggctccaattaccacaggtatcatgttggctgcccaggaagtgcttgctttagaacacctttgggaatccctctccccaagacttcaggtagccaatactttcacagtaggatccagactttatgtgcttaaatg

SEQ ID NO: 128667 - DNA, 592 bp, Homo sapiens
tcctgcatctcctgactcccaagccccagccccattctccctgccaggaagccctttgtcagagtcaacgcggaacatgggtggtgcagtaagaaatcacccaaatcttactttaaatcctggtgccaccacttactggcctttggagcacttgtatgacttcttggttttctcattggaatattgggaaggtaattttttaagtgcccttgtttagatgataaattataaggtctctttaccattatatgacccttggggtatagsagatcgccaaaaaggagcagagggcactaaaaggagaggtggagaaccacaaacgacatgctttactccttcagtactgcacccagcctggactctgagccctgtgttgcagttacaagcagccacagctacttgtcaacctgtccaattacacttctggaatcccaataagaagtgcttataaatacagggctccaattaccacaggtatcatgttggctgcccaggaagtgcttgctttagaacacctttgggaatccctctccccaagacttcaggtagccaatactttcacagtaggatccagactttatgtgcttaaatg

SEQ ID NO: 128668 - DNA, 592 bp, Homo sapiens
tcctgcatctcctgactcccaagccccagccccattctccctgccaggaagccctttgtcagagtcaacgcggaacatgggtggtgcagtaagaaatcacccaaatcttactttaaatcctggtgccaccacttactggcctttggagcacttgtatgacttcttggttttctcattggaatattgggaaggtaattttttaagtgcccttgtttagatgataaattataaggtctctttaccattatatgacccttggggtatagcagatcrccaaaaaggagcagagggcactaaaaggagaggtggagaaccacaaacgacatgctttactccttcagtactgcacccagcctggactctgagccctgtgttgcagttacaagcagccacagctacttgtcaacctgtccaattacacttctggaatcccaataagaagtgcttataaatacagggctccaattaccacaggtatcatgttggctgcccaggaagtgcttgctttagaacacctttgggaatccctctccccaagacttcaggtagccaatactttcacagtaggatccagactttatgtgcttaaatg

SEQ ID NO: 128669 - DNA, 592 bp, Homo sapiens
tcctgcatctcctgactcccaagccccagccccattctccctgccaggaagccctttgtcagagtcaacgcggaacatgggtggtgcagtaagaaatcacccaaatcttactttaaatcctggtgccaccacttactggcctttggagcacttgtatgacttcttggttttctcattggaatattgggaaggtaattttttaagtgcccttgtttagatgataaattataaggtctctttaccattatatgacccttggggtatagcagatcgccaaaaaggagcagagggcactaaaaggagaggtggagaaccacaaacgacatgctttactccttcagtactgcacccagcctggactctgagccctgtgttgcagttacaagsagccacagctacttgtcaacctgtccaattacacttctggaatcccaataagaagtgcttataaatacagggctccaattaccacaggtatcatgttggctgcccaggaagtgcttgctttagaacacctttgggaatccctctccccaagacttcaggtagccaatactttcacagtaggatccagactttatgtgcttaaatg

SEQ ID NO: 128670 - DNA, 596 bp, Homo sapiens
attacatgtgactactttagacttttcctttaatatggttttatttaaaaataaaagcaattgtggttagaagtcaggagagctgacatgactacttgggagctaaatcaatctttaccgaaaacaattttttaccctttatttttaaatacagggtcttgttatgtcatccagcctgggatgcaatggtatggtcacagctcactgcagcctcgaactcttgagctcaagtaatcctcctgcctcagcctcgcaagtagttgaggctacaggcatgcaccaccacacccggctatttatttatttatttttggtaaagatgggctctccctatgttgcccaggttggtcttggactcctggtctctagggaacctcccatcctggcctcccaaagtgctgggattacaggtgtgagccactgtgtccagccaaataaacaacttttatatatcttgatttcttaaamttttgtaaattctgggattagcatagaagcttttctagcgtgtataaatggcagatgctaatgacaaggatgctctttgttttggaatatctgcccttaatttttaggatattgacttcatcagtgaa

SEQ ID NO: 128671 - DNA, 534 bp, Homo sapiens
tggcatttggcatcattgaagacccaagcctaggaatgctacgggagttaaagctgttttttcactcatgcacaatttaacaaatatttaatgcacgcccctgctgtttctttaaacaatttgctgttttcttttatttttcttttttgagacagagtttcattcttgttgcccaggctggagtgcaatggtgcgatctcagctcaccacaacctccgcctcccaggttcgagcaattctcctgcctcagcctcctgggtagctaggattacaggcatgcaccaccacgcccggctaattttgtatttttagtagagacaggatttctgcatgttggccaggctggtctggaactcccaacctcgggtgatcygcccacctcggcctcccaaagcgctgggattacaggcgtgagccaccactcctagccgcgatttgctgttttcttctgcttcttcagtattgtatgtattccttaagatactgtctcccatcattgtctttctctttgtatttctgtttatcctctgttct

SEQ ID NO: 128672 - DNA, 534 bp, Homo sapiens
tggcatttggcatcattgaagacccaagcctaggaatgctacgggagttaaagctgttttttcactcatgcacaatttaacaaatatttaatgcacgcccctgctgtttctttaaacaatttgctgttttcttttatttttcttttttgagacagagtttcattcttgttgcccaggctggagtgcaatggtgcgatctcagctcaccacaacctccgcctcccaggttcgagcaattctcctgcctcagcctcctgggtagctaggattacaggcatgcaccaccacgcccggctaattttgtatttttagtagagacaggatttctgcatgttggccaggctggtctggaactcccaacctcgggtgatctgcccacctcggcctcccaaagcgctgggattacaggcgtgagccaccrctcctagccgcgatttgctgttttcttctgcttcttcagtattgtatgtattccttaagatactgtctcccatcattgtctttctctttgtatttctgtttatcctctgttct

SEQ ID NO: 128673 - DNA, 633 bp, Homo sapiens
tttctcttctttcaaaagcaaatgggagaaatatcactgaattctttttctcagcaaggaacatccctgggaaagagaatatgcgcctgggggtgggtctatagatggcccccctgggtgtggtcgtcctctatggtcgagactgtaggggtgaaatagaccccagtctcccatagtgctcccaggattattaggaagaggaaattgcygtctaatcaattttggtcagacaggttgctctcaaaaccctgtctcctgataagatattatcaatgacagtggtgcccgaaacttcattagcaattttaatttcagcccagtcctgtggccctgtgatctcgccctgcctccatttgccttgtgatattctattaccttgtgaagtacatgatctctgtgacccacaccctattcgtacactccctccccttttgaaaatccctaataaaaccttgctggttttgcagcttgtggggcatcacaaaacctaccaacatgtgatgtctcccctggatgcccagctttaaaatttctctcttttgtactctgtccctttatttctcaaacctgctgacgcttagggaaaatagaaaagaacctacgtgactatcagggcaggtttcccaatattgc

SEQ ID NO: 128674 - DNA, 633 bp, Homo sapiens
tttctcttctttcaaaagcaaatgggagaaatatcactgaattctttttctcagcaaggaacatccctgggaaagagaatatgcgcctgggggtgggtctatagatggcccccctgggtgtggtcgtcctctatggtcgagactgtaggggtgaaatagaccccagtctcccatagtgctcccaggattattaggaagaggaaattgccgtctaatcaattttggtcagacaggttgctctcaaaaccctgtctcctgataagatattatcaatgacagtggtgcccgaaacttcattagcaattttaatttcagcccagtcctgtggccctgtgatctcgccctgcctccatttgccttgtgatattctattaccttgtgaagtacatgatctctgtgacccacaccctattcgtacactccctccccttttgaaaatccctaataaaaccttgctggttttgcagcttgtggggcatcacaaaacctaccaacatgtgatgtctcccctggatgcccagctttaaaatttctctcttttgtactctgtccctttatttctcaaacckgctgacgcttagggaaaatagaaaagaacctacgtgactatcagggcaggtttcccaatattgc

SEQ ID NO: 128675 - DNA, 494 bp, Homo sapiens
ctttcttgctgaacttaattatttgtagcttttgatttaaagtgagagacgtgcaacttttctttcactttaagacatagggggcactgaagtgttattaattggcctaatttcaacattattatgtcttagggaatagtgaggcctgaagagaggaaacaagataggggaatggctagtcaatgaagcagtcagaacacacacatcatctattgaataactttgccatgttatgtgggcatggctcatggcactccaaaacaattacaatagtagcatgaaaggtcaccratcacatattagcataacaaatataataataatgaaaaagtgtgaaatattgtgaattaccaaaacatgacacgtacacactaagtaagcccatgctgctaaaaaaatgtctctgatatgcttgctctacacaaggttgccaccaactttctatttttttaaaaaaatggactatctgcaaaacgaaaaaaactgaagcacaa

SEQ ID NO: 128676 - DNA, 576 bp, Homo sapiens
ctgtatggctctggtttccacctctttacttaaccataccttctctcagggcataaatattccactaataagggcccatcctttaatgccagtgattcactggcctgtcatccaccatccagcatatttacatcagcataaccactctccaatcacactttagggtcaattccaaatcttgttaggtccattgcaaaaagcccctcctggctggccttgtctttcccaactatttcacacattgagtgctcaagcctgctcagttcagccctatcaaagaagtggaggagactgaagaactcaaaaacctagacacctaaacggatttatatttgcaaatagaacttcagttatatagaaggactggataaaggcaccatgaagctgaaattaaattttaggccagtggattgctgaagaccctttgggacaagaccctgccagtcctgccaagaacactgtttctttccaaagggaaaatgggaaaaaaaaatatatatatatatrtgtgtgtgtgtgtgtatatatatatgtgtatgtgtatatgtatatatacacatatatatatgtatatat

SEQ ID NO: 128677 - DNA, 494 bp, Homo sapiens
gggtcagaataatatggtttgaatttttgcccccctcaaaaacccatgttaaaacttaattgctattctaatagtatttaagaggcagaacttttaagaggtaataaggctatgagggcttcactcttagaggtgagattggtgctgttatraaagggtgtacttagccctatgctgttctctttcttgcctttctctttgcctttctgcacttccaccatgtaatcatgcagcaagaaggccctggacagaagttgttcccttaatattgaattttccagcttccagaagtgtttaagtcaataaatttctttttattataaattacccagtttcaggtgttctgttacagcagcagaaaatagacttagccctgaattcataaccttttaactactactgaattctcatctgtatatgccactttattcaagtccatttcacatctgaaagttaataaaagtgtgtattttcctacattttcatatatttta

SEQ ID NO: 128678 - DNA, 494 bp, Homo sapiens
gggtcagaataatatggtttgaatttttgcccccctcaaaaacccatgttaaaacttaattgctattctaatagtatttaagaggcagaacttttaagaggtaataaggctatgagggcttcactcttagaggtgagattggtgctgttatgaaagggtgtacttagccctatsctgttctctttcttgcctttctctttgcctttctgcacttccaccatgtaatcatgcagcaagaaggccctggacagaagttgttcccttaatattgaattttccagcttccagaagtgtttaagtcaataaatttctttttattataaattacccagtttcaggtgttctgttacagcagcagaaaatagacttagccctgaattcataaccttttaactactactgaattctcatctgtatatgccactttattcaagtccatttcacatctgaaagttaataaaagtgtgtattttcctacattttcatatatttta

SEQ ID NO: 128679 - DNA, 607 bp, Homo sapiens
ctcatatttcactactatgagacaagggaaagatcaagcaaatgtgtttctaatatttcattgctatttcaacttgagaactataattttatttttaagataatatggtttgaatttcatttgaaatattttctgtagaagaattgaaaagatactaaatagtaagcttcatagtctctcatacagaaaaccttaaatgaaatagaatgaaatataaacatcttcacactaatactctgccatcttcctcatcagtctaccttcctaggacctcatgtacaattccttcaactcagctacattttcatcacctctcaatttaagtcaaccaaatcccatttcagctacaattgtatttttccttctttgatttttattacttttattatcatcaatggctttatctgacatcagtctcctacttaggcttctttaggaacttcaaaacactcaaagctggtaaaacaattagaacacayacagtcagttgtttcttggcctacatttttcattccaataagagattaatccatgtaagagcttttagataattataacttaattgatgtggaaaatattgtgtgtgcataaaccacaatagaagggt

SEQ ID NO: 128680 - DNA, 560 bp, Homo sapiens
aactcctctttattcttctgcaaagtaatcagaaaagactttttccttcctctgtwtaaatagccacatgaatagggaagaatgtagaaccaggatttactggaaatcatattccaactatgaggggaaatatgtctctttcttgagacttagaaataacattaaataaatagagccaagatatagagagaaaggaaataagtcctagttttaagctgtacctgaagctttacctcaatacatgttacttacataagctaatgagtttgccttattgtttaaataagtctgagttgagttgtctgtttcttacaacataaggaatccttgtgaatacaggctataagagctgcacaggaaagagatcaaatttttggtgacatcagatttttaaaagatagggggagaggacacatagacaaggacaaagacaaaagtagatctttttagtaaaaaggtattaaaatgtttaatgcttaaatagagagaagcctgaaaatgataatgttaacaaaatactcttaaaattatgtttagaacaaaaagagaaaataggctgc

SEQ ID NO: 128681 - DNA, 567 bp, Homo sapiens
ctacaaaatcacaaataaatgagtctatattcaaactaaaaagcttcacagcaaagaaaacaatcaacaaaatgaaatagcttacagattgggaaaaatatatttgaaaaccatatgtctgataaggggttgatatccaaaattcataagaaactcacaataaagagtagaaaagcaaatggactttaaattggacaaaagacatacaaagaagagctggtagcattcttatagaaactattccaaaaaaattgaggaggagggacttctgcacaagtcattctatgaggccaaaatctggcaaagaaacaacaacaacaacaataatttyaggccaatatccttgatgaacatctgtgcaaaaattattgacaaaatacttgcaaaccaaatacagcagcctaacaaaaagctaatccaccatgatcaagtaggcttcatcctcaggatgcaaattttgttcaacatatgcaaatcaataaatgtgattcatcacataaacagaactaaagacaaaaactacatgattatctcaatatatgcagaaaaagctttgataaaattcaa

SEQ ID NO: 128682 - DNA, 578 bp, Homo sapiens
atttacagttgtaaatttcattatatgataccaattcttctaaaaattaagctattaaaacatttgggcatatagatatttcagattttgtattgatttcaaataaaaggcaaagtaatgatgaccaatttttcttgaataagagctggttaaattttgccttgatgaaagagaccttatcaagacttacccactccagaaaaactttgtaaaataaataagacctgagctgattttcatctttctgtagatagttggttatacctggagtgtctgtaaactttaagaagtaactttaagaggaaaccttaagaagaaaatggaacatagagttgakagaaaaacgcagaaatattaaattataaaatggaaagaaaggattaataataaaaaatatttattttggtagaaataagactatagaaataaattgactcattcaaatatattaaaaactagatggaaaaactaggattcattatgtgtagcttcagaggttaaagccgacatgagtggatggaaacctaggagatatatattggtagcaattaagaaaaaaaaagtaatactacctaaaa

SEQ ID NO: 128683 - DNA, 578 bp, Homo sapiens
atttacagttgtaaatttcattatatgataccaattcttctaaaaattaagctattaaaacatttgggcatatagatatttcagattttgtattgatttcaaataaaaggcaaagtaatgatgaccaatttttcttgaataagagctggttaaattttgccttgatgaaagagaccttatcaagacttacccactccagaaaaactttgtaaaataaataagacctgagctgattttcatctttctgtagatagttggttatacctggagtgtctgtaaactttaagaagtaactttaagaggaaaccttaagaagaaaatggaacatagagttgatagaaaaacgcagaaatattaaattataaaatggaaagaaaggattaataataaaaaatatttattttggtagaaataagactatagaaataaattgactcattcaaatatattaaaarctagatggaaaaactaggattcattatgtgtagcttcagaggttaaagccgacatgagtggatggaaacctaggagatatatattggtagcaattaagaaaaaaaaagtaatactacctaaaa

SEQ ID NO: 128684 - DNA, 557 bp, Homo sapiens
ttaccctctgtttccaaacccgtaacaaagataaaccccataatagaggtaccatgggcctctattatgagtcacacatgctttaagaacaaataagacaggaatgttatgagagtttatttttttttcccaaaggaaaactttatgttatgacaaattacaattagataatcacctcgtgcagaacaagagactggggaatgttaccaggcttaaaaaagaaatcctactatattgctgcttaggtgkaaatcttacctatggtctagagccaaactatccattgtttaaaagacacttgccagtacaccgttgccaaattaaggttaacttggggttcactgctttactacatgacttaaatgtaacaacacagacttcatggcatattagtttaggtatatgaaggaagaggaagagaggtgaatataaattgttaaaataaacatggaactcttgagattccaaggaaatgcttgagtagtttatgacaggtttctatttgtcctattctgctaaataaataaataaataaataaatgtcaatgagcagtaag

SEQ ID NO: 128685 - DNA, 595 bp, Homo sapiens
tagctttgatttaatcctgggttctttcctggggaatgtaatgtttcagtacaattctcaccaaaacaactttaggcattgatatatgtgtcaattttcttccaatttagaggactagggaaatgctgagcttcagatcatttactggagtgatttatgtgggagtaaactaaaatgaggaataaaatattccttacaagaatccaaatacagttaagaagacactaaagggagacttttgattctttagaaaaggaaaaagtacacattagattaaaaattcagtatgtacttattaattttcaaattgtttttcataatccaakactgtaaatgtatttttctaagcttttcagtgcaaaaacaaaatagcattgtgaaagatagaggctatactacttgcctcctgtggtgccatggtcaaggaattcataatatactaatgcatagaaatattcagtgatttcagtctcatttcagttaatattttattattatttgacattagaatatatcctcataaatcaagcaaatagcatatactctcaacattaatttgacattgttgcaggaacactgtgatatggattgctga

SEQ ID NO: 128686 - DNA, 632 bp, Homo sapiens
ccatgtttgaattctggctttatgtctacagccataccaccctgaatgtgcctgatctcatctgaattctgtctttatcatttactagctgtgtgatccgaagtaagttacttaacctttctaagcctcagtgttctcttttgtaacatggggataataggacttacctgatagggtttttgtgagaattaaatgaatgtatacacatgtatagttgtgcttataatggtatctggcacatatatgtactgtaagtttttggtattattatacatatatgtacattattggtacatatactaagaccagtatttcatatcataaaactgagaataatatctgaaataactattatttgaatttttccctcccctctaaaaaaatgttaacttgcttacaaataattacctgtgtggaaatgtctgcaaatagtcattactctaattagttcatggaggatatgttgggccaaatagatacagcaatacttaattttcctttacagagttaatggtttttaaccctaacaatttatcattcaaaacatctgagtgcctactatgtgcaaagktacatattggccatcttttagctcaaaaagattgttccctactaattctgagactagtaaa

SEQ ID NO: 128687 - DNA, 566 bp, Homo sapiens
cattccctttgcccaattttaatggggttgattgtttttcttttgtaaatttctttacattcgaaatgtttttattattaagttgagctgcctcattcttagtatggtttttcactttaaaaagcataaaggtggrcatggtggcgtatgctagtaatcccaactactggggagactaatacaggagggttgcttgagcccaggagttcaaggctataatgtgctatgatcatgactgtgaacaaccactgtactgcagcctgggcagagtgacatagtgaaaccatatctctaaaaaaagagaaaatgtaatttaaatctttaaatacatatgtatatgtgtgtatatatgtatatatattgcatatatcaaaaatggtttgtagtttccattcacagcacatagtaaaatgtcttaacctcctccctcctccctatgtgtgtttttctaagagagagttttttttaccttaatttttctcttagtgtctcatagtcttcttagatctccctctttcttctgtctttcacacacacacacacacatgcacgcatacacacatgta

SEQ ID NO: 128688 - DNA, 566 bp, Homo sapiens
cattccctttgcccaattttaatggggttgattgtttttcttttgtaaatttctttacattcgaaatgtttttattattaagttgagctgcctcattcttagtatggtttttcactttaaaaagcataaaggtggacatggtggcrtatgctagtaatcccaactactggggagactaatacaggagggttgcttgagcccaggagttcaaggctataatgtgctatgatcatgactgtgaacaaccactgtactgcagcctgggcagagtgacatagtgaaaccatatctctaaaaaaagagaaaatgtaatttaaatctttaaatacatatgtatatgtgtgtatatatgtatatatattgcatatatcaaaaatggtttgtagtttccattcacagcacatagtaaaatgtcttaacctcctccctcctccctatgtgtgtttttctaagagagagttttttttaccttaatttttctcttagtgtctcatagtcttcttagatctccctctttcttctgtctttcacacacacacacacacatgcacgcatacacacatgta

SEQ ID NO: 128689 - DNA, 610 bp, Homo sapiens
tgcccctctccatttcatctgctatggagtccaactgagcctcatctgccycttgaacgcacactctttctcctctgggagtctctgaagtgggtaatatcctctgcttataatatgcttccccttaaacctctactcccttcctagctagctttgactcctctgtcacttgtccgctttggcatcacctcctcatagaagacttctctgactcccgagattctcaggagcatggcaggtgaagtgctcctcccatgaatggatggagattagggagtgtgtgttattcatgcttaattcaccagtgcttagctgagtacctggcataaaatagttactgtggtggccaaagtaataacccccaccgccaccaattgctcatgtcctatgttacacagcacaattacataggaagggggaattaatagtgcagataaaattaatgttgctcatcagctgaccttaaaacaagattatcctggagtatctaggagagcccatgtaattacaagcattctttaaaactggaagagggaggcagaaggttaagaaccagagacggtgggcacaatggctcatgcctgtaataccaatactttgggaggccagg

SEQ ID NO: 128690 - DNA, 610 bp, Homo sapiens
tgcccctctccatttcatctgctatggagtccaactgagcctcatctgcctcttgaacgcacactctttctcctctgggagtctctgaagtgggtaatatcctctgcttataatatgcttccccttaaacctctactcycttcctagctagctttgactcctctgtcacttgtccgctttggcatcacctcctcatagaagacttctctgactcccgagattctcaggagcatggcaggtgaagtgctcctcccatgaatggatggagattagggagtgtgtgttattcatgcttaattcaccagtgcttagctgagtacctggcataaaatagttactgtggtggccaaagtaataacccccaccgccaccaattgctcatgtcctatgttacacagcacaattacataggaagggggaattaatagtgcagataaaattaatgttgctcatcagctgaccttaaaacaagattatcctggagtatctaggagagcccatgtaattacaagcattctttaaaactggaagagggaggcagaaggttaagaaccagagacggtgggcacaatggctcatgcctgtaataccaatactttgggaggccagg

SEQ ID NO: 128691 - DNA, 610 bp, Homo sapiens
tgcccctctccatttcatctgctatggagtccaactgagcctcatctgcctcttgaacgcacactctttctcctctgggagtctctgaagtgggtaatatcctctgcttataatatgcttccccttaaacctctactcccttcctagctagctttgactcctctgtcacttgtccgctttggcatcacctcctcatagaagacttctmtgactcccgagattctcaggagcatggcaggtgaagtgctcctcccatgaatggatggagattagggagtgtgtgttattcatgcttaattcaccagtgcttagctgagtacctggcataaaatagttactgtggtggccaaagtaataacccccaccgccaccaattgctcatgtcctatgttacacagcacaattacataggaagggggaattaatagtgcagataaaattaatgttgctcatcagctgaccttaaaacaagattatcctggagtatctaggagagcccatgtaattacaagcattctttaaaactggaagagggaggcagaaggttaagaaccagagacggtgggcacaatggctcatgcctgtaataccaatactttgggaggccagg

SEQ ID NO: 128692 - DNA, 610 bp, Homo sapiens
tgcccctctccatttcatctgctatggagtccaactgagcctcatctgcctcttgaacgcacactctttctcctctgggagtctctgaagtgggtaatatcctctgcttataatatgcttccccttaaacctctactcccttcctagctagctttgactcctctgtcacttgtccgctttggcatcacctcctcatagaagacttctctgactcccgagattctcaggagcatggcaggtgaagtgctcctcccatgaatggatggagattagggagtgtgtgttattcatgcttaattcaccagtgcttagctgagtacctggcataaaatagttactgtggtggccaaagtaataacccccaccgccaccaattgctcatgtcctatgttacacagcacaattacataggaagggggaattaakagtgcagataaaattaatgttgctcatcagctgaccttaaaacaagattatcctggagtatctaggagagcccatgtaattacaagcattctttaaaactggaagagggaggcagaaggttaagaaccagagacggtgggcacaatggctcatgcctgtaataccaatactttgggaggccagg

SEQ ID NO: 128693 - DNA, 539 bp, Homo sapiens
  misc_feature (1)...(539): n = A,T,C or G
ttctggtagcagccacaatatcttatccagaatatttcttattcaggccttcaaatgtgctgtcttttctggtctaatggaaatgaascttccttccatacaatttcttctcctaaattgtactctggctctcttatcacatacaaacgtctatgttaggtatttgtgtctgtcttgattcttggtaggcttttaaactctgtgaatgttggactgtgatgtagacatcatttcaccgcacactctgtaaccaccaaaccttagcagcttattcagtaagcacatacttggctcttaatgagtattgcttaaattgatgaattgaattagtattttaccttctctgttccttagctaagcagaagaatttgtcatttttttaatttagtgactggttctattaaaagttacctttgtctatatcattttgttatactaaagcacaaatgtataaggtcaaaaaacattctcaagattttgtttaaaccacagccctcagntgtgtatatttatctcttgttttcatatgcaagatttct

SEQ ID NO: 128694 - DNA, 624 bp, Homo sapiens
  misc_feature (1)...(624): n = A,T,C or G
tgcttaaattgatgaattgaattagtaytttaccttctctgttccttagctaagcagaagaatttgtcatttttttaatttagtgactggttctattaaaagttacctttgtctatatcattttgttatactaaagcacaaatgtataaggtcaaaaaacattctcaagattttgtttaaaccacagccctcagntgtgtatatttatctcttgttttcatatgcaagatttctcctgaaatgggcaacaattacaagagtttttttcctcttctgaactaagaaaataaatatttaattcacaagtttagaaaagtgaacctgaaaaatcacagggctaggtgggttatgaggcccactggtacatgatagtgttgaatgtggattagaatgaactccgtggattagaatctcagaccataggcaaacatttacttgttttagaataagcacatttgagtctgcaataagtattactatttttaagttgaaaatgtaattggtttctaataataaccatattggctagcattatttcaatcgtgtttaatgttttccagtgtcatttcatgtcagatatctctcttgattcttagtaacaatttggacaagacagcaaatgct

SEQ ID NO: 128695 - DNA, 539 bp, Homo sapiens
  misc_feature (1)...(539): n = A,T,C or G
ttctggtagcagccacaatatcttatccagaatatttcttattcaggccttcaaatgtgctgtcttttctggtctaatggaaatgaaccttccttccatacaatttcttctcctaaattgtactctggctctcttatcacatacaaacgtctatgttaggtatttgtgtctgtcttgattcttggtaggcttttaaactctgtgaatgttggactgtgatgtagacatcatttcaccgcacactctgtaaccaccaaaccttagcagcttattcagtaagcacatacttggctcttaatgagtattgcttaaattgatgaattgaattagtattttaccttctctgttscttagctaagcagaagaatttgtcatttttttaatttagtgactggttctattaaaagttacctttgtctatatcattttgttatactaaagcacaaatgtataaggtcaaaaaacattctcaagattttgtttaaaccacagccctcagntgtgtatatttatctcttgttttcatatgcaagatttct

SEQ ID NO: 128696 - DNA, 539 bp, Homo sapiens
  misc_feature (1)...(539): n = A,T,C or G
ttctggtagcagccacaatatcttatccagaatatttcttattcaggccttcaaatgtgctgtcttttctggtctaatggaaatgaaccttccttccatacaatttcttctcctaaattgtactctggctctcttatcacatacaaacgtctatgttaggtatttgtgtctgtcttgattcttggtaggcttttaaactctgtgaatgttggactgtgatgtagacatcatttcaccgcacactctgtaaccaccaaaccttagcagcttattcagtaagcacatacttggctcttaatgagtattgcttaaattgatgaattgaattagtattttaccttctctgttccttagctaagcagaagaatttgtcatttttttaatttagtgactggttctattaaaagttacctttgtytatatcattttgttatactaaagcacaaatgtataaggtcaaaaaacattctcaagattttgtttaaaccacagccctcagntgtgtatatttatctcttgttttcatatgcaagatttct

SEQ ID NO: 128697 - DNA, 538 bp, Homo sapiens
  misc_feature (1)...(538): n = A,T,C or G
gagtattgcttaaattgatgaattgaattagtattttaccttctctgttccttagctaagcagaagaatttgtcatttttttaatttagtgactggttctattaaaagttacctttgtctatatcattttgttatactaaagcacaaatgtataaggtcaaaaaacattctcaagattttgtttaaaccacagccctcagntgtgtatatttatctcttgttttcatatgcaagatttctcctgaaatgggcaacaattacaagagtttttttcctcttctgaactaagaaaataaatatttaattcacaagtttagaaaagtgaacctgaaaaatcacagggctaggtgggttatgaggcccactggtacatgatagtgttgaatgtggattagaatgaactccgtggattagaatctcagaccataggcaaacatttacttgttttagaataagcacatttgagtctgcaataagtattactrtttttaagttgaaaatgtaattggtttctaataataaccatattggctagcat

SEQ ID NO: 128698 - DNA, 624 bp, Homo sapiens
  misc_feature (1)...(624): n = A,T,C or G
tgcttaaattgatgaattgaattagtattttaccttctctgttccttagctaagcagaagaatttgtcatttttttaatttagtgactggttctattaaaagttacctttgtctatatcattttgttatactaaagcacaaatgtataaggtcaaaaaacattctcaagattttgtttaaaccacagccctcagntgtgtatatttatctcttgttttcatatgcaagatttctcctgaaatgggcaacaattacaagagtttttttcctcttctgaactaagaaaataaatatttaattcacaagtttagaaaagtgaacctgaaaaatcacagggctaggtgggttatgaggcccactggtacatgatagtgttgaatgtggattagaatgaactccgtggattagaatctcagaccataggcaaacatttacttgttttagaataagcacatttgagtctgcaataagtattactatttttaagttgaaaatgtaattggtttctaataataaccatattggctagcattatttcaatcrtgtttaatgttttccagtgtcatttcatgtcagatatctctcttgattcttagtaacaatttggacaagacagcaaatgct

SEQ ID NO: 128699 - DNA, 511 bp, Homo sapiens
ttaattcacaagtttagaaaagtgaacctgaaaaatcacagggctaggtgggttatgaggcccactggtacatgatagtgttgaatgtggattagaatgaactccgtggattagaatctcagaccataggcaaacatttacttgttttagaataagcacatttgagtctgcaataagtattactatttttaagttgaaaatgtaattggtttctaataataaccatattggctagcattatttcaatcgtgtttaatgttttccagtgtcatttcatgtcagatatctctcttgattcttagtaacaatttggacaagacagcaaatgctattgtccaagttttctaaagaagaatctgaagtgaaatgacatccagagacctatcaagacctgtatccaggaaaaggtaaatctgagctgaaattgtagcccttgtaarttacctacgtgacataccagatagtgttcatgatccatttagtattctgttctaaaaatgagacaatatcc

SEQ ID NO: 128700 - DNA, 517 bp, Homo sapiens
acagctggaattccagcacctgatcccagtgggtggatcacctgaggtcaggagttcgagaccagcctggccaacatgttgaaaccctgtccctactaaaaatacaaaaatcagctgggcatggtggcccacgcctgtaatcccagctacttgggaggctgaggcaggagaatcacttgaacctgggaagcagaggttgcagtgagccgagatggcgccactgcactccagcctgggcgacagaaggagactccgtgtcaaaaaaaaaaaaaaaaaaagagtggccaagtgtctgatggccactctgacgggagragcagcatcaggcagtttgttgctatgagtggtagattcttaaagagctggtttctgtttgacccttaaggaagaaaggctaatggtggttagcaagggagggggtatagtgaagcatgtggacccctccgcccaacatctcgttctccttgagaactcagttttcaaggataactgggggttcctcttgaccaacaggggg

SEQ ID NO: 128701 - DNA, 609 bp, Homo sapiens
aataagcattttaagcacatagatttagagattttaaatcattccctattaaatagaayactatttattggagaaattgtggattctagatttaaaggaggaaatatataagataaacatagaatatttcatcatactaaaaggtaagaacactgaaaccaccttggaaagatccaactatccaaggctgaggcaactggaacattaataaagataactgtaacacactgaacatatttcatatgtttatattcatgagttccttatgatacaaaagaaaagagagaaaaaagataaataattctactagcaagtcagaaccacaaagttattatttttaatgtgaaatcaactatgattcaaagttaatcaagggaaaagtcaaaaataattatagatttattgtatcttttctttatcatctatttctcagagtaaccaagtagttgatgaagggatattcctatttcatagacatttgtgagttactcagtagaaaataaaaaataaattataaaattagaatatcaccattttgcaaaccttaacaaattgacaaaatgggcaatgatcaatgatggctcctaatattacagacagacagaagac

SEQ ID NO: 128702 - DNA, 515 bp, Homo sapiens
aaaccgggtctatcttgataatccaaaattatctccttaccttaaggtgaactgattatcaacctaaatctcacatgtaactttatttttccttttccatgtaaactaatatattcccaggttcyaagaattcacacttggatatctttgggagagccattaattattagcctactacagagcctaagagcagagctcgataagatcttaggtctgaagtctcttgtattaggtcaactggggagagtggtcccagaattcatcctcctttacatattatgagtaaaaatcctgaagaagggttaatccacttcaacataattatacctattacaatgaaggaaaacttgggcttcactaactcaaggaggatgtcttcactgcagagagaaacaatgagctacaatattcacatgctcacattcattgacctctctctgacacttatctcgacatcacccctagccagtggagggagcagttagatcataccaacacattttatcccagtttat

SEQ ID NO: 128703 - DNA, 515 bp, Homo sapiens
aaaccgggtctatcttgataatccaaaattatctccttaccttaaggtgaactgattatcaacctaaatctcacatgtaactttatttttccttttccatgtaaactaatatattcccaggttccaagaattcacacttggatatctttgggagagccattaattattagcctactacagagcctaagagcagagctygataagatcttaggtctgaagtctcttgtattaggtcaactggggagagtggtcccagaattcatcctcctttacatattatgagtaaaaatcctgaagaagggttaatccacttcaacataattatacctattacaatgaaggaaaacttgggcttcactaactcaaggaggatgtcttcactgcagagagaaacaatgagctacaatattcacatgctcacattcattgacctctctctgacacttatctcgacatcacccctagccagtggagggagcagttagatcataccaacacattttatcccagtttat

SEQ ID NO: 128704 - DNA, 478 bp, Homo sapiens
tttaacatctcttgcaagacaggtccactggcaacaaattatctcatctttgtttcgtctgagaaataatttctttttcttagacttttaaasgttaacgtcatagagtacagaattctagattagtgttttttttctctaacactttaaatatttcacttcatttgcatggtttctgagaagccagatatgatttttatttttgttcctctatacatgttttattctcacttaacttttcaaaaaatattcatctttgaattactgtagtttaaaagttatatgcctaggtataattttttggcatttattctgcttgatgttctctgagcttcctggatctgtggtttggtgtatgacgataatttggggaaattctcagtcattattgtttcaaacatttctctgctcctttttctttttttcatatttttgtattcccattacacgtttcaacttttgtagtcaatccacagtc

SEQ ID NO: 128705 - DNA, 478 bp, Homo sapiens
tttaacatctcttgcaagacaggtccactggcaacaaattatctcatctttgtttcgtctgagaaataatttctttttcttagacttttaaacgttaacgtcatagagtacagaattctagattagtgttttttttctctaacactttaaatatttcacttcayttgcatggtttctgagaagccagatatgatttttatttttgttcctctatacatgttttattctcacttaacttttcaaaaaatattcatctttgaattactgtagtttaaaagttatatgcctaggtataattttttggcatttattctgcttgatgttctctgagcttcctggatctgtggtttggtgtatgacgataatttggggaaattctcagtcattattgtttcaaacatttctctgctcctttttctttttttcatatttttgtattcccattacacgtttcaacttttgtagtcaatccacagtc

SEQ ID NO: 128706 - DNA, 478 bp, Homo sapiens
tttaacatctcttgcaagacaggtccactggcaacaaattatctcatctttgtttcgtctgagaaataatttctttttcttagacttttaaacgttaacgtcatagagtacagaattctagattagtgttttttttctctaacactttaaatatttcacttcatttgcatggtttctgagaagccagatatgatttttatttttgttcctctatacatgttttattctcacttaacttttcaaaaaatattcatctttgaattactgtagtttaaaagttatatgcctaggtrtaattttttggcatttattctgcttgatgttctctgagcttcctggatctgtggtttggtgtatgacgataatttggggaaattctcagtcattattgtttcaaacatttctctgctcctttttctttttttcatatttttgtattcccattacacgtttcaacttttgtagtcaatccacagtc

SEQ ID NO: 128707 - DNA, 592 bp, Homo sapiens
ttttagaagacacaggtaaggaaagtaaagggaaatggggaggagaatatcaactcgagtcgcttagtggttgtgctaacctggagcattgtgttaagaaggattctttggttttgacagaatagaatgtggtggtgatcaacagatgtctaccaagggtgacagagaaagagggaggcaggagcactgttgctccagagctgtgtatcttccatccctggcatggcttctaaggatctagcttatcatccctcaccttccttagaagctggttctgtcaacatctttagcctctctttcaaagctcgactagatggattttgggggccttatggtggtaagaacccaaggctcacaktgaactctatttgtggaaatatcttctgtcaattgaagagacctctgaaagaaaatgttacggatcacagagaccagaaagttggttcccagatgaagggacagaaaagatgtacccaggaggagttgatctttgaacatgtacagtccttaggtggctctgtgggtgatttctgataggaagagccggagttatggtgtcagagaaggaggatttgaaaaatgagccttgctg

SEQ ID NO: 128708 - DNA, 518 bp, Homo sapiens
gtgggagtcatgtttggtcctgccttgggagatctgaaaagatttgtgtgcattaaacatggaattcaaagacagccacatccactcacctaatccagtgtagcaaaaattccatagtgcacatggcaacaccggaaacactgttgttttctctttctctggctttgtggccagtgatkccttagttagaggcacatggcttccaaatacttattccacccagatgattatgcaaagggcatgagaaatactcatttcgctcagaaatagtgaaatctaactttattttcactcactgataataaacttgcagaggggagcaaactttacttttgtcacagtgggtgagatttcagggccttattgtctatgagggtggtgggtcagaaaaacccccacataaagagactttgactactgccatcttcctggaactcagattgccttcagtacttgcatgttacattaaaaaatggggagagttgaataggttggtggtgatgagttgttcacttcca

SEQ ID NO: 128709 - DNA, 526 bp, Homo sapiens
tttcaaaacatagagattggataagtgccgcagtgccctctgccaggagagaaccraagtaggggcatggggaaactaaattgtcaggcaggcctggcggtcaaacagaagtgactcagggtcgtggaggaactgtggctgtcaagggtgagcagggaatatcatttcgttcaaacctcacatatgcaaaatgtctcaaattagaattctagacattacttccaaatgaggctgaatacagttatagagattctatgatgaaattcacaaaggtatttatgacataatttaaaatccccaaataggcttccaacaagtgtggccttcttatttgttttttaataacgccagataccagataaaatgaaagtggtccagatctcttgagcatactccagtggttctgaaagcaaggactccgaagctagaaagtgctgagatcaaatccgggacttactatgtgcagactggccttggccaagtagcagcatggcttttcagcggtgaggcacagacaatttagtat

SEQ ID NO: 128710 - DNA, 409 bp, Homo sapiens
gaattcaatgtaaatgacagtttccctgttttgtgcaggagccttggacacttccaatctctcagaatgttgtgaccattaggtgagcacagccatgctagcctgctggaggtaacagaccatatagaagagaatccagacatcccagctgagaccatctcagaccagcatgcagccaacctacccaaatgtaaaagagagcccagccaagatcagcagaactgcctactcaaccacagttaacaataagcgcagaagtgaatctcgctgagaccagaaacatcacccatatatatgtgagcaataatgaatgtttactgttttaaaatcattaagttttgggggagatggttacatagcattaactagctgatacacagagtcagayccaactcctagcttcagcaat

SEQ ID NO: 128711 - DNA, 608 bp, Homo sapiens
tgggaacccaccagtcagcaggtgggaggatgcaaaatatgtgaagtgttttactatttttaagagcctttgcctccattatgatcagaatgctaatcaktaataagtaatgagatgtgactgccaagtgatcaaaatgttcatattggcacatcaatgaattctctctctactaatcaacagaaagcattgacattgatttggaatgtataattggaaatatatgatgaggggaaaaagagtaagatggttttcaaggttgttttcaccaggattatgggagcccagtgaattatagttttccaatgtatggaaaaacttttaaagcattggcatatgttctttatgagctagatatagaaacttcttcccaagtcatgtttttggaaggactaacaacatctccatccaacttgactctttctaggttccagaagtgtttctcctttttgtttgtaatgacttgcaacatcatctatcatttcaacagactttcatgttatgttataaatttattttacattgattatctctttagttggcataaaggaacttcttaacttcaccaaagcaagtcatattatgtgatggttactgttgggaaggtt

SEQ ID NO: 128712 - DNA, 541 bp, Homo sapiens
ggtggtgctactctctgctatcctacctggtatctgtgattgcttctgatttataatcttcacagaggaaaaaggactgtttcaaaagtttggctattcctatcataatgaatcttactacacagatcaggtatctattgggagagttgctacatgtatccactccgatatactcagggactagaaaaatggtaacaaaatagatccttgggtttattaggcctactgtgatgtggacctgagctaggactccatttatactctgcctctatttgctaattttttaacagatggggcatagtgatattttagcttggttgatgtcaataaccactcagctcctgtatccagcagtcttcaaaaaaaaaaaaaaaaaaggtttttctttcccctgtttggttcatctagttatcaactatataataaactgagagaaactctctaaaagaaaaaggtacktatctgggaataggatattgcaataggaatacatgtgccatagtaaattatgtgtgtgctcagggaagtaaaggatgacaaa

SEQ ID NO: 128713 - DNA, 549 bp, Homo sapiens
aactttaaaaagaaacagcattgaggagtctagagcagattcctaaaagcaagggcaggcatctccaaggaaggttcttctaattggcatcttcacctgctgccttagttcatccagttcagtcagagcttggatccagaccatcctggaaacaaacacagcctgtgaattattctggagatgaaatgtagatggcctctgcctccaagagcatcagtttaacccacttggtctcccaagtattaaacttgcttctaattgaaagaaaatctgttgagaaactttgcttcggtgacaaagtcagtctaargatttggggattttctttccttcttcaggaaaggatctttcaactaaattgacactctgccacctacactgtttctatagtaatctcttattaaccagggtctcttaaacccccaaaataaaaagcctagcccatcagccacaggaaacattaagaattctcattttatatgtgaaaccatatttttttcttgtccccttgccctaaccatttaaaattattgcttggtgactcagtgc

SEQ ID NO: 128714 - DNA, 549 bp, Homo sapiens
aactttaaaaagaaacagcattgaggagtctagagcagattcctaaaagcaagggcaggcatctccaaggaaggttcttctaattggcatcttcacctgctgccttagttcatccagttcagtcagagcttggatccagaccatcctggaaacaaacacagcctgtgaattattctggagatgaaatgtagatggcctctgcctccaagagcatcagtttaacccacttggtctcccaagtattaaacttgcttctaattgaaagaaaatctgttgagaaactttgcttcggtgacaaagtcagtctaaagatttggggattttctttccktcttcaggaaaggatctttcaactaaattgacactctgccacctacactgtttctatagtaatctcttattaaccagggtctcttaaacccccaaaataaaaagcctagcccatcagccacaggaaacattaagaattctcattttatatgtgaaaccatatttttttcttgtccccttgccctaaccatttaaaattattgcttggtgactcagtgc

SEQ ID NO: 128715 - DNA, 628 bp, Homo sapiens
tgagaacacctaaaaatattttgacttgaaatatactagtaacagacaaaaatgggaggtcatgggctaaattaatttttttcatttaaatcttacatttataaatattaacttctgtgtatttaagctgaatcaggactttaaaatctccttctacattgtactgagtggtctctagatagctttggccaacccagtttctcctctttcttcatcttgcctctagttctcagaacaactgtagaaggtgctggaaatgaaatatcctgagatacagaggagctgcctgcaacagcccaagccttgttcctgtgcctcctggagaatgtaacatcttgagttarggaggaacaaacagccagaaacagcccaagctttgttcctttcttccttgggaatggtgtgtcctgcagagtttatccattgagtcctgttgcccctgaggcatgtaacctggggcgggctgtcttttggaggccctcaggtgtcctacagatggggcacataaaggcaagatgccatccacctctggcagctttcgtgaagcttgaaagactggcttataatggaccctaggtttcttttgtcccttgctgcctctctgtaagtaataaatctgcttcatgta

SEQ ID NO: 128716 - DNA, 683 bp, Homo sapiens
tctgttactctcactgcaccgttgctggtggagaggcctgaggggagaccactggaataggagatgtccacctagaaccttatgcagacttgcctaagtttcctcttgtgttcttgtcctggacatcttgccgtgtgagaaagcacggttcctcccaaatgtaattgtaatgtgtgatatgaaatgtataactcgcagttttagaatgacaacattttataatctatgaaccacctccccctttctatgatcagatatttcatgaaacaaaccacaagacgtcttgcttctctcaaggaaaatgaaatcaaaagacataggtcttttttttttkcctttttgttgagatggagtctcactctttcgccaggctagagtgcagtggcacaatctcggctcactgaaacctccacctcctgggttcaagcaattctcctgcctcagcctcctgagtagctgggactacagacgcgcgccaccacgcccagctaatttttgtattttttgtagaggcagggtttcaccatgttggccaggatggtctcagtctcttgacctcgtgatctgccagcctcagcctcctaaagtgctgggattacaggtgcgagccaccacgcctggctagatctcttttttaaaacttttctttgctatctggaaataagactttctgtttttgcaca

SEQ ID NO: 128717 - DNA, 444 bp, Homo sapiens
caggttcgccctggctgctctcccaggcagtacacagggaggggcccatcattgcagagacatctatggagatgtcaagacagtgcctgcgatgaaagggagcgctcattagtgcctttaatgaggcttccccagtttcatttgtggctgaatcagaaactttctgaatcatttaccctgtggcagagcagttttcagacatgagaaaggatagggtccctccatcacaaagaaacctccatgaaaacttgacaccattaagggcctggaacagggcgyggtgtcttcagaaaaccacaccttcccacaccaaggagggtagctggagtgaccgctctggaagaccctgtggcttttctgctgtggtccaccatgtgcttccctcatatgggcacctcccagactcagggcagttccagaccagggtaaaatgtaaaacagatc

SEQ ID NO: 128718 - DNA, 483 bp, Homo sapiens
tgaattctaattaatgaaaattaaattatttacacaagtatttggattggcatttatatcctggcaaatgatctacatgcacattttttaaagccgtgggattaaaaagataaagacccttactagaagactagcagttggttttttaacttagctgctctgtttcatttctttttacagtcagtgataaatggagatcatatattctccttaatggcctgttcgtgatttggcattgtgctaaggctggctggcagtggctctgaggatatgtgggggtgtccctgggcaggagaggagatactgctgaaagycatgccccatcccttttccctctgccccagtgctaggggctggctgggccactcagccagcacagacggcccagtgggcacaagttacaggggacttcttccagcttcctttttcctctcccttcctgcctgttcagagacgtgcaacagagtaatgagaaggaggagg

SEQ ID NO: 128719 - DNA, 595 bp, Homo sapiens
tatatacagctgtgaacatgcttagttgaatctctggatggaatatttttatagggaacaaaaattcgccataagcttactacctattttcatttttcttccccataataaaacagtgggaagaaaggagattataaaacattaatggtcctttttaaaaagttgagtaaacagcatctgtaattattttgcagagaaatgctcctaattgaaagaaaatcattctattagcacacatacctgcggctgcacaaatggtctattacttgctgaagaatttaatgctgatacaaggctgamtctccagtttatctccttaaagaatgaccacttgaaaattctgccttagttttgcctctgttgcttactgagttatctcagagtgatcatggcagggtaccaaaggggaagtatagttttactacaatatttgtctctgcagactttatagtcctgggttattttctggatcaaagagaaataaaaatcactctcttctcaaaataatcagaatccagttaccccagtatcagatcacaaaattttctttaagatcttaaagcacagccatactagtcatcacaggaggagaaca

SEQ ID NO: 128720 - DNA, 506 bp, Homo sapiens
tgcaagccagtatagacttggcttacatgtgttgtactagtgcaattgttaatagtaactactttcattctcaaaaaaggaagcagaaactttctctggaaatcaaaaatcttggctggatgtggtggctcatgcattttggtaggtcaaggarggagaattgtttgaacccaagaatttgagattagcttaggcaatatagcaagaacctgtctctacaagaaaaaaaaaaagttagcaaggcatggtggtacatgcctatagtcttagctacttgggagggtgaggcaggaggatcactggaaacgaggattgtgaggttacagtgagctatgctcatgccactgcactcagtctggatgacaaaaggagattctttctcaaaaaaaaaaaaaaaaaagaaagaaagtcttcacaagaaggctgatgcctaaaggaccacagaaagtggtcaaagagacaagcctgtgcatacaatgggaaaagaggagagaccaagagaattc

SEQ ID NO: 128721 - DNA, 433 bp, Homo sapiens
tgaatcttaaatttggatataaaaggaatcttgctagggaactctgttttcctgacctgaattagaatttagtatgggctgagatctcctccctggtagacactcccaacttgtatttctcactggtatatatccaagtgtctattacacagattcactcccaggtgtgggaatgtatgcaaataccatctccaatcttacaaatggtctggccaaactctccaaagggcccrtggcttcaaatggggcattaagtaaatggttcattttattttttattcaagctcaggagacttaggctttttctctagccatttaaaccacctatgaattaagacaatgaaaggaatcgagtatttctctttaaacaagatacactgttgtcagctgcagaataaagtcaggagttagattttgcctggatgctgaattc

SEQ ID NO: 128722 - DNA, 521 bp, Homo sapiens
taaaagcgttcctatttctccacagcctcatcggcatctgttgtttcttgactttttcataatcgccattctgactggcgtgagatggtatctcattgtggttttgatttgcatttctctcatgatcagtgattcaacatatctttgttgagtgcctaataactatcaagcactgttctaggtgcaaggatatatcattgggcaagacagcaaaactccatgccctcatggagttcatattctagttggtggggagaaaatttaatcatcaagtgatgttatgttacatcatgattgaaggtggtaggtgccatggaaaaagcagagcaagggagggaacatgagttttcaaagagggagtccagtttgagtaargtcaggagctgcagtgtaaaacgtcttttccatgtgtttgtctttaatagcgtgactttaatattagaactaaagagtttcacaaagccatgagagatatgcagagcccaatggagtgtcatattactatctctaagaattggggg

SEQ ID NO: 128723 - DNA, 548 bp, Homo sapiens
tttttgtcatgatcagaacatgcttctgtttggaacaagagcccagacaggctctagggttacagttattctctgaggaacaggggacagccagaatgcaacaggctgtgactcagaataggactctagacccggtgaattaaccaatgtccaycagaaaatagattcaatatcacagttaaagaatgtggatatatgggtcccggcactgcagctaatgcctataatcccagtgctttgggaggccaaggtgggaggattacctgaggccgggagtttgagaccagactgggcaacataacaagatcttgtgactacaagaaattaagaaatcagtcaggtatggtgctgtgccctgtagacccagctacttgggagtctgaggcaggaggattcttgagcccagcctttaatgagactgcggtgagctgtgattgtgccactgcactctatactaggcaacggtgtgaggctctatctcttaaaaaaaaaaaaaaaaaggatgtagacatgcagaacagagggcatcacctaatgctataagcata

SEQ ID NO: 128724 - DNA, 548 bp, Homo sapiens
tttttgtcatgatcagaacatgcttctgtttggaacaagagcccagacaggctctagggttacagttattctctgaggaacaggggacagccagaatgcaacaggctgtgactcagaataggactctagacccggtgaattaaccaatgtccaccagaaaatagattcaatatcacagttaaagaatgtggatatatgggtcccggcactgcagctaatgcctataatcccagtgctttgggaggccaaggtgggaggattacctgaggccgggagtttgagaccagactgggcaacataacaagatcttgtgactacaagaaattaagaaatcagtcaggtatggtgctgtgccctgtagacccagctacttgggagtctgaggcaggaggattcttgagcccagcctttaatgagactgcrgtgagctgtgattgtgccactgcactctatactaggcaacggtgtgaggctctatctcttaaaaaaaaaaaaaaaaaggatgtagacatgcagaacagagggcatcacctaatgctataagcata

SEQ ID NO: 128725 - DNA, 437 bp, Homo sapiens
atgatttgtgctgacagagccacatcatattttagggagatgacattgctattgatggttccttctaatctattcccagtaacatgctcatctgtatgttttccccaggcaccagaagaacaatctcagatccttaaaacagtatgtcattcctttccacacatctcatatgcacatatattattattatttaacgtttattaagtaccaacagtatgctaggcacaatagacatagggggccataaaaacatatttaacgcatcaaaaaccacamtaaaaggatgctgtgtatgtgacagaagacgataaaaatctctgcaattcatagttcaagatgaaatgcaccccaagtcccagagaagccttggaacagtgtggcacatcaaaaaaggtattggaatttttattcagccagcgtaaggaaggttatgcata

SEQ ID NO: 128726 - DNA, 622 bp, Homo sapiens
tgtcatttttgaagtgtcaaatactcattaagtactggttaattatgattatagatcagattcaaaaagttctcttttatttcactaatatatctgtagaaaaagaggtagctcaggactatcacattctcacaaattatcttaaaataacattttcttatttaaatggaatgtacatgtgtacttataaaataggtgacrtttccactaataacacaataaaaatattgttccatcagtattccacattgtctacaactctcaccaagattccttttaataaggaaggcaaaggcaattcatattttagtatctactatgcccacagcccttactgttttataatctcatttaataagtttattttgaaaatgccagtggaatctgggaagatcatctgaaacttttatcagccatctgtgcctcactggaaattaagcgtcagtaccatagcacagaatattagaaccaatagttagacaagatgatcccaataagtcatgtaggtcagtaactcttgttttacaccggaagaaactgaggcctacaaacattcaggtgctaagatgaaaaggttagttcacagtagcaagactagaatacacatttattgacattttgt

SEQ ID NO: 128727 - DNA, 581 bp, Homo sapiens
ggtttttctacaatgtcctgtagttttcagtggataagtcttgcatcttttttgataaatttactcctaattattttattgcttggatgatattataagtggaacttttagaaattttatttccagatggttcattgctaatgtatggaaaaaattattaatttttgtgtattgatcttgtatccacccattggctttcattgacagaaattacaaataacattcattcattyaaaaatacattatgagcacctactatgtctcaggcactgtgctgggctctgatatatgatgaagaacacacccctcaaggagcttgaggtaaagtagaggggaatgtagtcacatgaggtgcactcccaccactgagaagatgctgtaagcgctgtccctgtgattgcacagggcccctccctggggaccaaagcacaagcttctctccagtcccgggagcaggaaaagctgagtatccccctagcaaccattctattttcatctcgtgcccactgtgaattgtagagctggataggttttctttgcttcagttgctaggaagcttaggattatgtggtggccaaact

SEQ ID NO: 128728 - DNA, 588 bp, Homo sapiens
tgcccctcccattgcaggctcagaggctaaggaggaaagaatggtttcagaggccagaccctggacastcctgccatgtttagcctcaggacacggctgccccagttccagctgtggctcaaaagattccatgtacagctcaggctgcctcttctgagagtacaaactgccatatgccctggtggcttccatgcggtgttaagtgtgcaggtgcacaggatgcaagtgtgacacaggatggcagcttccccctagatttcagaggatgtatcagaaagcctgggtgcccaggcagaagcctgccatggagggagagcccccacataaagagactctactaggacagtgccaaaggaaaatgtggggtgggagcccccacagtgttttgtacctagtggagctacctagtggagccatggaaaggtggctgccaccctccagaccccagaatggtagagccaccagcaacttgcactcttcaagcctggaaaagatacagatagcagactccaacctgcgagagcagccatgggtactgcaccttgcaaagccataaagcaccagtgtgctctgaatgtgggacatgga

SEQ ID NO: 128729 - DNA, 615 bp, Homo sapiens
tttttgacaccatctcattcataccttacaacaatcccttgtaggaggtattgttaccccaaattttagagactttgaaactgaggctgagaatggctaggtaaacatgtgaaaaagtctcacagttattaaatggtagacttgtcatttgaacttgtctgttgattccatagctcacggtttttccaccacacagtagaaacctttcatggatccttaccttctaaaaggtaaagcacatgtctcttaatctgcactgaacgtctttcacattctagctccaaacttatcttcgtaataayagatgatattacatgtcaaacacagtaataagctttacatgctctatttcatttaatcctcatcacaaccccatgaagtaagtgctatgactatgtccattttacagattcagaagctgaggcatagagagattaaaaatagcttaatctgtaaatcagaaattatctaaaaataatttcttaagaatagcttcatcaaggcccacccagttagaaaacagcaaagctggatcaaacccgggtatgcctgattacagagatatttagaaggcagaatgggcaggaattcccatttgtacaacctatcaacatg

SEQ ID NO: 128730 - DNA, 593 bp, Homo sapiens
tgaactctcctgtgttctggttaacacagcctcttacaggacagtccccagagagggagcaaccagtcgtgcttgataccaagcaaaggtcggcttggtgaggcctcctggtatgggctctgctgccttccctgacctgcttcattccgctttttcctygctctggctgccctgggattgtactccttaatgaagaagcagtatctaggcctttgccttggggtctgctttaaagattccggctgggatggcttctaaccattgtcattcttctcccccaggatgctttccaatttctacacatctgaaatggatgctacagtctcaaaaggcagcactaatcatggccatgggggtagttagcagtaataccaagccaggggagttcttgaagaggagatttgaaagatcataacttgggcagtggaatttcagacgcaactgggctgaactgagaaagtaatcatagctaacatttcctgagagcttacaatgcattttatttgcacgtattatctcttctactctttgcaacaagcctattagagacacattattatttttgccatgaaagtaacttgtctaacatcaaa

SEQ ID NO: 128731 - DNA, 617 bp, Homo sapiens
ggcctgcttcactaagcttaatcgtttctagcttttgatttaaagtgagagatgtgcaactgtttctttcacttgaacacttagaggccattgtagggttattaattggcctaatttcagtattggtttgtctcggggataaggaggtctgtggagacgaagatgagggaagggccagttggtggagcaattagaacacacaaatttattgagtaaattctccatcttatatgggcacagtttgtgatgccctaaaacaattacaatagtaccatcaaagatcactgatcacagatcaccataacagatataataatgatgaaaaattttgaaatattgtaggaattactaaaatgtgacatagagacatgaaaatagccatgccattgaaacaatggtgccaatagacttgctcaatacagggttgtcacaaacctccaatttataaaaaaaaaaaacatggtatctgcaaagcataacaaagtgaagcacaataaaacaaggtatccctggatctgctttagactgtatttkcagacttctgggatcacctccacatggacttctcttatggaagaaggacttcacaattttcagggatgaggttaaggttgaaa

SEQ ID NO: 128732 - DNA, 407 bp, Homo sapiens
tggagtgcagtggcacaatcatggctcactgcagccttgacctccaggcccaggcaattttcccaactcagcctacagactagctgggaccacaggtgtgcatctctagtccaggctaatatttwatttatttatttatttatttatttattcattcattcattcatttttgtagagactgggtttcccaggctggtataaaactcctgggtttatgcagtctcctatctcagcctcctaaagggctgggattacaggtgtgagccaccgtgtccagcatttcactgatttcttggtctccagtctcaacaccttcaaattatgtcactcctgtactcaaaaatcttaaaaaaaaggagatcattaactactgaataaagttcagatttagcaagcaatgttctcca

SEQ ID NO: 128733 - DNA, 637 bp, Homo sapiens
tagacactaaataataacatacttaagatagtaggttttaaattcaacagcaacaactttttaaaaataagggactactcttcaagcacatttagacagaggtgtgtgaagtccagataagagataggaactctagcgccatctagcaaacatgctggggaacatcaccaactttctctactaagacctaacagtgaggttaagtgtccttcagttctatgttgatagttggccttggaaatcmcatgtaagcattccttagcctttccagaattctgaacttgctatatagttctttaaaaggcaaaggagaaaacagtttacaactgcatcaggcctggttggtaaagaaatgtgtcttagcaaataaacgccagctaactataaatctgataatacataaatgtcttcgccttcgtaaaagtggtggtatcattccttcttgataaagacataattatgctaaatttgctaatttgtaatctaagctatttttagtaattaaagtaacgaagaaaagaaatattttcctttgccagcttcccatacagcacacacacacacacacacatacatacacacacacactttaatatttttaatacatactcatatatattgtttgtcaagctagcca

SEQ ID NO: 128734 - DNA, 620 bp, Homo sapiens
agttgaaccatctgaacccaagaaaaagaaagtgtccttaaagctatcagtctggaatcctcacttccccctaaaaagaagcaaatcttgaatgacatctgtatcagttacctgttactgaaataatgctgttaataaactaccccccaaatcagcttttatttagttcacaagtatgtgcacgagcaattaggctaggtgggcctcccaagctcatttaggctcttaaacatccgaggtcagctgtctgtcagtgagaacacctgactgctccacgtgtctctcatgttcctccatcaggcaagccctgacatgtttctatgggaaaggctgaggttcaagagcagaagcagcattgtacaagcactttttcaagcctctgcataaatcrcacctgcaaattgtatggccaaactcagaatatggggaaagggaaagcgattctgcttctttggtgagaactgcgaagtcacaaggcaaaagtccctgataaaagaaggggtgagtaattgggacccttaatgcaatttatctactacacaagtgcatccacttctctaactctttttcaacaagctgcctacatcattgctgcagcagctcacaattaccccaaggtc

SEQ ID NO: 128735 - DNA, 594 bp, Homo sapiens
  misc_feature (1)...(594): n = A,T,C or G
nnnnnnnnnnnnnnnnnnnnnnnnnnnnnnnctaagtactatattggcaggaccttgggtggcaagtgacagaaactcaaacaaaaaaaaaaaaatggtggtgactgagtcactgtgtgagtgggaagaattgtttatggattttccaagtggaarattcagaaacgggattcctttcagaaatgccttgatagagaagcttggaaaatgcataataattctgtcattttctctccttgtcacagtactgctttcctagatgtcagcttcttttccgcatgaagtggcaaagatgaccattggcagttctaggttttgtttatctctgcaagtaatgattccaggcaaaagagtgcctctttcacatgatgcttagaaaatatcccagaaatgatgatagcctggccccctgtagcagacacatggagtattctggttggtcagccccgggcacaggtccactccaggaagtgggtgctaagataaactccaagtgaactctaagatggaaaatgaaggagagatgacttctctaattgatgacacatggaaaaatagaattccatcacaaatacccaaataatattgtataaa

SEQ ID NO: 128736 - DNA, 597 bp, Homo sapiens
tattgatgtatagaagtgctactgagttttgtacatcgatttttttatcctgaaactttactaaattgtttatcagttccaggagacttttggtggagtctttaggattttctacatacagaatcatattgtcagtgaagagagatagtttgacttcttcttttcctatttggatgcttttactttctcttgtctgattgcttaagtgggccgcttctacattgagattaycagcagtagtttttctttgttccctgcacttctaggtttcttaaaagccagtagcagcaatacttacattcactccacatctcatccaacgtttctgtaatcccattaagctcctttctacttaaaatatctaaagtagctttcactccttggaattgtgatgcagagttatcagataaacagagttgtttacagcttatgttagttatgtttccataactaagtgcttggtgcatttaggttatctccacaactgaacttcctaaagaaaggactgtgttttatagttctttatgtgcagtacagaatcttctcttgcaagcagtttttcaataaataattaatgattttatatgattaaatata

SEQ ID NO: 128737 - DNA, 597 bp, Homo sapiens
tattgatgtatagaagtgctactgagttttgtacatcgatttttttatcctgaaactttactaaattgtttatcagttccaggagacttttggtggagtctttaggattttctacatacagaatcatattgtcagtgaagagagatagtttgacttcttcttttcctatttggatgcttttactttctcttgtctgattgcttaagtgggccgcttctacattgagattaccagcagtagtttttctttgttccctgcacttctaggtttcttaaaagccagtagcagcaatacttacattcactccacatctcatccaacgtttctgtaatcccattaagctcctttctacttaaaatatctaaagtagctttcactccttggaattgtgatgcagagttatcagataaacagagttgtttacagcttatgttagttatgtttccataactaagtgcttggtgcatttaggttatctccacaactgaacttcytaaagaaaggactgtgttttatagttctttatgtgcagtacagaatcttctcttgcaagcagtttttcaataaataattaatgattttatatgattaaatata

SEQ ID NO: 128738 - DNA, 490 bp, Homo sapiens
accatgcttcttgggggtatgctgactggaggagtcagtgcctagaagtgaacacaactggtgggaagcgttccccttcctgtttatttctgtaccascttgtcacctctgttattgtgcccctcttctccttctcatccactccacagttttgatgccattttgtgccctaaccctcaccacccccggctgtgttccagcctctaggagacaatcaatggttctttcctctagaaaataataatgcaaccatggtggtgtgtctgaattatatggtatgtgcaggaggtgcttttaaaatatgttgatacttagaacccttccctagcgattcttatttaattgtgctggtgttaactggtatagacttttaaaaaaatcaacccgattgattctattttatagcttgggtcaagaaatactatcccagagcaaaatagacacaataagcagcttgtataccacctccctcttgcaagacagacatctc

SEQ ID NO: 128739 - DNA, 490 bp, Homo sapiens
accatgcttcttgggggtatgctgactggaggagtcagtgcctagaagtgaacacaactggtgggaagcgttccccttcctgtttatttctgtaccagcttgtcacctctgttattgtgcccctcttctccttctcatccactccacagttttgatgccattttgtgccctaaccctcaccacccccggctgtgttccagcctctaggagacaatcaatggttctttcctctagaaaataataatgcaaccatggtggtgtgtctgaattatatggtatgtgcasgaggtgcttttaaaatatgttgatacttagaacccttccctagcgattcttatttaattgtgctggtgttaactggtatagacttttaaaaaaatcaacccgattgattctattttatagcttgggtcaagaaatactatcccagagcaaaatagacacaataagcagcttgtataccacctccctcttgcaagacagacatctc

SEQ ID NO: 128740 - DNA, 605 bp, Homo sapiens
gttgagagtcctggacaggccattttaattgaccagaaccaaatccagttgttcggtcatggaaaatgaatgccattagattggttttcctttacacactttgcagagttaatggttaaacatacaagcactctgttaataaaatgtaatcaaccaaataatttcaaaggctttcttaatcttaaaaattagatggaatttcagacattatgatgaaaataatctttgtagtaatagaaggttctatggctcttttatttttccattacataactgacattgagwtagtgtgggcaggtggtttagggaactgtttaaccagatttgctaatttggacaaacttttgagctacacagaaaactcagtcctcttatttgtaaaatggggataataatatcacttatcttccacagatatcatgaagatttagtaaaaaagtaagtgctagccaacaaaagtctccttagtacaaagtatgcagaaatttcacagttggctaaatgaatttgattaaaataagtatatgaaattaaggctttaaaaattacagagggaaaaattatagtgttgtctacatttggtgcattatgtcactatgctagat

SEQ ID NO: 128741 - DNA, 605 bp, Homo sapiens
gttgagagtcctggacaggccattttaattgaccagaaccaaatccagttgttcggtcatggaaaatgaatgccattagattggttttcctttacacactttgcagagttaatggttaaacatacaagcactctgttaataaaatgtaatcaaccaaataatttcaaaggctttcttaatcttaaaaattagatggaatttcagacattatgatgaaaataatctttgtagtaatagaaggttctatggctcttttatttttccattacataactgacattgagatagtgtgggcaggtggtttagggaactgtttaaccagatttgctaatttggacaaacttttgagctacacagaaaactcagtcctcttatttgtaaaatggggatawtaatatcacttatcttccacagatatcatgaagatttagtaaaaaagtaagtgctagccaacaaaagtctccttagtacaaagtatgcagaaatttcacagttggctaaatgaatttgattaaaataagtatatgaaattaaggctttaaaaattacagagggaaaaattatagtgttgtctacatttggtgcattatgtcactatgctagat

SEQ ID NO: 128742 - DNA, 605 bp, Homo sapiens
gttgagagtcctggacaggccattttaattgaccagaaccaaatccagttgttcggtcatggaaaatgaatgccattagattggttttcctttacacactttgcagagttaatggttaaacatacaagcactctgttaataaaatgtaatcaaccaaataatttcaaaggctttcttaatcttaaaaattagatggaatttcagacattatgatgaaaataatctttgtagtaatagaaggttctatggctcttttatttttccattacataactgacattgagatagtgtgggcaggtggtttagggaactgtttaaccagatttgctaatttggacaaacttttgagctacacagaaaactcagtcctcttatttgtaaaatggggataataatatcacttatcttccacagatatcatgaagatttagtaaaaaagtaartgctagccaacaaaagtctccttagtacaaagtatgcagaaatttcacagttggctaaatgaatttgattaaaataagtatatgaaattaaggctttaaaaattacagagggaaaaattatagtgttgtctacatttggtgcattatgtcactatgctagat

SEQ ID NO: 128743 - DNA, 607 bp, Homo sapiens
atagaattgggcaaaattctttatatgcagtatttcctttaaacttccctgaaagtctgtgaggtggtactatatatattttctttttayggattagaaaattgaggatcagagagaagttaaataatttgtcaaaggtccctgtcttagtttgggttcccagaagcagaccttgaataaggacttaagtgcaaggggttaaagaagagatctcaggaaaaactagtagtgaaatagaaacatgagacaagggagggacggcagccaatgaaatgttcattatcaagcaagttaccatcatcgatgaccaaaacttaatcctcgtgggactctggaagccagtgtagaactcatatcttagaattatcttgcatgagggatgagggagctgaatatttttcaccaactccagtcagtcttggttgaggttgcttctaaggggtgctaatttcctgtcacttctgcctgctatggaaaaggggcaggtaggaggtgagtgggcaaagcaggctctggcagacagataaatgaaggtgatggcagtcagaagttggcaggacttcctacagtgttgagggtaaggggggcactgagaggagcactgcag

SEQ ID NO: 128744 - DNA, 607 bp, Homo sapiens
atagaattgggcaaaattctttatatgcagtatttcctttaaacttccctgaaagtctgtgaggtggtactatatatattttctttttatggattagaaaaytgaggatcagagagaagttaaataatttgtcaaaggtccctgtcttagtttgggttcccagaagcagaccttgaataaggacttaagtgcaaggggttaaagaagagatctcaggaaaaactagtagtgaaatagaaacatgagacaagggagggacggcagccaatgaaatgttcattatcaagcaagttaccatcatcgatgaccaaaacttaatcctcgtgggactctggaagccagtgtagaactcatatcttagaattatcttgcatgagggatgagggagctgaatatttttcaccaactccagtcagtcttggttgaggttgcttctaaggggtgctaatttcctgtcacttctgcctgctatggaaaaggggcaggtaggaggtgagtgggcaaagcaggctctggcagacagataaatgaaggtgatggcagtcagaagttggcaggacttcctacagtgttgagggtaaggggggcactgagaggagcactgcag

SEQ ID NO: 128745 - DNA, 574 bp, Homo sapiens
aatacctgtctttttctttttttactgttggttgtttgaagtctgttttatctgatataagaatagcaactactgctcttttttgttttccatttgcatgatatatattttccacccatttactttgaacttakggcttctacatgttatatgagtctcttgtagacagcagatatttgttttttttttaatctaatttgtgaatctatatcttttaagtggagtatttatgctatttgtgtttaagggtaatattgatagtgaagtttggttcctctcatagtttcattatctggttactttttagtctcaactatgtaattgctttacaggaactgtgaaatttttacttatgtatgtttttatggtagcaagtatcatccttttgcttccatgtttagaactcctttgaacatttcttgcagggctgatctagaggtgatgaattcccttagtgtttgcttgtctgtgaaagactttatttcttctttatttatgaagcttaggtgggcaggatataaaattcttgactgacttttttttttttttttttttattctgtaaggaggctaaa

SEQ ID NO: 128746 - DNA, 566 bp, Homo sapiens
cccattacaattgaacagtatccataacaaccaatggttactgagctaggttcttctagtaagttaccttctaggaatagatccatgtactctgagaattctcattaattcttttagaccatgagggtctcmttagatgaatttccaactcaatatattaaacagtacccaggtggctttacaaaatactcaaccactcatacaaggcagcgtattgtcctaggagaatctgtcttgttgatcattcaccttgtgtcatacattatatcaaaactggcattgcataattttaggtgcttgtattatgttaaagtctcataaccaaactaaaatacaaaatattcacacctactcacacatacacatacaacatactaggcacatattgaaaacagctttttcatattccttcaaatgtcatctccagatgtaaacaaagcaggaaactgcatcattctaaacaaaataaaaatctaaaaaattctcattttcttatcctcacattctcccattcgggcacatattcaaaccaaagcacttaagctttgtacgtcaatagactgtat

SEQ ID NO: 128747 - DNA, 598 bp, Homo sapiens
acgtttcttcttcctgaggccaatccctgctcctgggctttagattccatccycttacctcccatcagcttaggacatgcctttatcaaccatttcttcccttcagcaaccattttctctctatatctcctttcagtattgccttttcttcttcatacataacttgtttcaatcttacacatctgaggaaacaaataaaaacctcaaatttgaattgccattttcttaatttctctctcctcctgtcccagcagatctgttgtctacattcattgtccttattttctcatgtataattcttgcttaaatccactacagtatactttcaacctcaccactccactaaaattgcttttaccaaggtgaccaatgaactcctgactgccagacttaatacatttgtttcttttaaatttttctcttggaagattcctctgtgaattttacatttggctatttctgatttcctgagcttctctacttccatgacttctgtaataaacattgccttccaatttccctactctttctggccagtcctattcagggtcgtgtgtgagctcatctttctctgcctgtccattaaacatcagcagtc

SEQ ID NO: 128748 - DNA, 598 bp, Homo sapiens
acgtttcttcttcctgaggccaatccctgctcctgggctttagattccatcctcttmcctcccatcagcttaggacatgcctttatcaaccatttcttcccttcagcaaccattttctctctatatctcctttcagtattgccttttcttcttcatacataacttgtttcaatcttacacatctgaggaaacaaataaaaacctcaaatttgaattgccattttcttaatttctctctcctcctgtcccagcagatctgttgtctacattcattgtccttattttctcatgtataattcttgcttaaatccactacagtatactttcaacctcaccactccactaaaattgcttttaccaaggtgaccaatgaactcctgactgccagacttaatacatttgtttcttttaaatttttctcttggaagattcctctgtgaattttacatttggctatttctgatttcctgagcttctctacttccatgacttctgtaataaacattgccttccaatttccctactctttctggccagtcctattcagggtcgtgtgtgagctcatctttctctgcctgtccattaaacatcagcagtc

SEQ ID NO: 128749 - DNA, 594 bp, Homo sapiens
aggagaagctgggtgataaagtatgttagtaaatacccttatcagattacaacaaatcatcttttctatcctaagttaattcttctcaaacattccagttccatcacatacgtatgaaaaaaaaaaaataccagaaaggcaagaaaagcacatttgaagaaaagacaattgatggctgtaggctgaatttctcttcttatttttaattctttcttcctttcaaaccagccaacataacaaaagcactgctttcatttttttggatggcactaataattagttcatttctcccattcacacttacctgaatctgattcagtagcagatctggacaacaagtcaggaatccaggaatgtcgtctctttgctgactcttagtgtgcccttcctagaatctctctgaaggtgactgaggtttgaaatgacctagtttggtcttctgtggaaggaaaggaatccartgacaacatactagatgctctgaagtttccattgtgtggctataacagctacagatcattaccttacttttgagagctttgcaaatgtaacccttttttggagtttatttagaattaatcagttaacaaatat

SEQ ID NO: 128750 - DNA, 624 bp, Homo sapiens
tgtcagcaatggtggtgagaagtgggttaatttactgtgtgtcttttgataattgaacatgtttcccttatcacagggcctgctagagagaccggggccttacctgtggcctctgtttcacaactccgtctcacaacagcatgtcttcatacatattcagggtatcctcttcaccatactgcatttcacttttctgtccttagttccaatttaactcatcttctttacttatttttcatctattttatcttactatgttatttgtatcattgtaagttgatccagatcctttcagaacaaggagagctaaacatttgaaaacatgtatataaaacaatccaaggcactgwtcatcaaactagattggtgtagctcctttacttacatttagctctcttcccgggtgctctatgagaatgtcccttttgcggtgatttcaagaaaacctaatattattcatgaacagtaaagtttataaacctttcttaagtagttactaaaatctaccattgcagagctgtaaaggacagagctgagttaattatttagaaatgatatgaaaacatgcacatcaagatgactgaattgatgtcatttaagttttatggtgaaggcagccgacaa

SEQ ID NO: 128751 - DNA, 624 bp, Homo sapiens
tgtcagcaatggtggtgagaagtgggttaatttactgtgtgtcttttgataattgaacatgtttcccttatcacagggcctgctagagagaccggggccttacctgtggcctctgtttcacaactccgtctcacaacagcatgtcttcatacatattcagggtatcctcttcaccatactgcatttcacttttctgtccttagttccaatttaactcatcttctttacttatttttcatctattttatcttactatgttatttgtatcattgtaagttgatccagatcctttcagaacaaggagagctaaacatttgaaaacatgtatataaaacaatccaaggcactgttcatcaaactagattggtgtagctcctttacttacatttagctctcttcccgggtgctctatgagaatgtcccttttgcggtgatttcaagaaaaccyaatattattcatgaacagtaaagtttataaacctttcttaagtagttactaaaatctaccattgcagagctgtaaaggacagagctgagttaattatttagaaatgatatgaaaacatgcacatcaagatgactgaattgatgtcatttaagttttatggtgaaggcagccgacaa

SEQ ID NO: 128752 - DNA, 608 bp, Homo sapiens
ccctgctctctcttggttactattaatatttgcatggaatatctttgtctgttcctcactttcaacctatgcatatccttagagctaaagtgaatctctgcacacagcatatacttggattctgagtagttttgttttttttttaatccattctgccagtctctgttttattattgtagggtttaatacatgtacatttaaagtaattactggtatgaaaagacttacttttgctagtttattatttcttttctatatgcctgacagatttttttgtcctttgttacctccattggtgcctttgtttagttgatttttttgtgtgacatgtttagaatgccttttcattttcttctgtgtatattctatagatattttctttgtggttaccatggggattacatatatcataaaattataataatctgtcttaarttgatactaacttaatatcaattgcttatataaattcactttacagcttcaccttctgcatgacttatgatgtcacaaattacatctttatatactatgtacccattagcatagatttataattaattttatacatttttctttaactcctgtagaaaataaagtggatttgc

SEQ ID NO: 128753 - DNA, 486 bp, Homo sapiens
cactacatctgtgcaattaccaagaccaccaacagagagaggccacattaatccttcaactgtgttgtcccctgatcagatggctacagagttcttctgagaccttcttatccctgggggaacagtgggagggggcatctatttgtgatttaacaacacaggcatggagattgcactaaattttcatctgttccctttctccaccacccgcactcactctcatgtcctggaagaagtgagaacagcagcaattcttccttagttaggtacagctcttagrgattcatgactatttgaaaaacgtatcaatacggaggtgatgatatgctccatttgaagtcataatgcttaggaggccgagaaatactttctgtgaggggcagtgtgtgttggggatggggtggagagtcagataacatttatgagctatttaatggaccagaaactcatgtcttatcttaaatcctcttcaacagctatgtgagg

SEQ ID NO: 128754 - DNA, 524 bp, Homo sapiens
gagtctgaattccccaggacttaaccatggtgtgtccagctcttcttacagaaactctcaccatggccaatgtcagcacaaggctgaggcccttactagagtcaggtcattgttggtgatcctttaccccaaatctcagaatctcgagatttgctcagaccctgtgacatcatagctaccctttaccttgtcgttgattcttcatttagtatttcttttctatagttaagttcttgtctctcccttaaaaaaaaagatacacacacacacacacacacatacacatatatacatataaatatatttggttgtatatttttgttgttacaaaggggcttaaaacacccaactatattagygctttgatcttttcttctgtgcatatttgtgtctgtatatttcataaatagaaaattaggacactcctttgcaaatactgaatattctcctgtgttgttgaatatccgttacggcatcagtgttgatgatgaatcttgatactgcctaattcccctgttggattc

SEQ ID NO: 128755 - DNA, 540 bp, Homo sapiens
taatttcctatttacatatctatgrctgccataatttctgaataaaacattagatgatctcatgagtattgttgtaaaaattaggacaataggacaaagtatttgaaatcaggactatctggaaaatataacgtgtatagttgccacataaatattctaggacaaagatgacaaatacgttggcctatgaatatgttcaatattaatgattaggacagtagttgctaaattgggtcctgagctgttctagtcctgctaatagatgttccataaacaaaagaaattcatgttcacaaaagttttggaaatgtaagattgaaaaacaacacaacagatttctttacttcaggactccaagagacgttaatgttttaatatgcaacgtgactcttctggaagggaaatagtatgcagtgtttatacacttatttgaatgcttcacggaaccctcttgtacataacaacttgtgactgctggaccaggctgttcttttaaattaatcacattacaattatgtcttcctgaagctcaggtcaatg

SEQ ID NO: 128756 - DNA, 564 bp, Homo sapiens
gactttcaacaggtggaattcccattactccccatccagaaaatgatcgagtcaagttcataacttctgctctttagttaccttataaataatagtattttggcatcttacagaactatggatctattgtaccttggcatcaattcagaggcattaattctgggcacctacctaatcatttaattggtaaacaaatatttattatctccatrgaggatcctggtgctgcacactgaaggggcttcaaagatgtatacagtgagcttactatctaggaatttaaaattgatcatgtaagaaagacaggaaaagtttgttaacaaaataagtcagtataatgacattatttcaactgtaaacaatgagatcctgagcttgcatgttaatttgtaaactccctgagggcaagaccttgccttaaacatttattaattcccaacagtatctacatccaatggatgtttgagtgatgaagctttgcaaagtagattgagtggggagacaccagaagcagggagagaagaactttcacaatagattagatgtgagaaattgtgggccaaa

SEQ ID NO: 128757 - DNA, 488 bp, Homo sapiens
tgtgtgtacaggttttcatttctcttggctgtgtaacaaggaayggaattgctgggtcacattttgagaaattgccaaactgttttccaaaacagttgctccatttacaattccatcagcagttatgaaggttctcatttcttcacatcggtgtcagcacttgttattgtctgtatcttagccatcctaaatagccatccttaaccatgaggagtgaggtggtatctcattattgtttgatttacatttctctgttgactaatgatgttgaacatctttttatatgcttattagcttttgtatactttggagaaatgtctattcagatcttttaacaatttttaattgggtcagtcttctttttattgttcagttacaagaattatttatatattttgtatacaagtcctttatgagatcaatgattcacaaacattttctcctattctggagactgtctcttttcttgatgatgtaccttgaaacac

SEQ ID NO: 128758 - DNA, 488 bp, Homo sapiens
tgtgtgtacaggttttcatttctcttggctgtgtaacaaggaacggaattgctgggtcacattttgagaaattgccaaactgttttccaaaacagttgctccatttacaattccatcagcagttatgaaggttctcatttcttcacatcggtgtcagcacttgttattgtctgtatcttagccatcctaaatagccatccttaaccatgaggagtgaggtggtatctcattatwgtttgatttacatttctctgttgactaatgatgttgaacatctttttatatgcttattagcttttgtatactttggagaaatgtctattcagatcttttaacaatttttaattgggtcagtcttctttttattgttcagttacaagaattatttatatattttgtatacaagtcctttatgagatcaatgattcacaaacattttctcctattctggagactgtctcttttcttgatgatgtaccttgaaacac

SEQ ID NO: 128759 - DNA, 591 bp, Homo sapiens
gctttcttcctgataaaatatctatttcttccattggaatacactttaatttgggaacaagcatcaatcttagaataratccttcatgttctgctagttggcattactacctggccaaaggggaggaagattctggaaagcaaaggaaaaagggcctggaggggcagcccatccccagccagtctctcctgagcctgtaggctgccaaatccctcagtcccaagggccaaggctgccaaggacctctcctttcagtaacatcaaaaatgagatgacatcaggttaccctttactagtgcctagagagttgtcaattacctttcagtcacttaccctttgctaattgcaaaataaacagactccgcagcctgccttcaatgacagcctcgtctcctgtcctaatatttatatcttagcctcttattaattgcatttcattgatcatttcctgaatactcttcttcccttttgcattttcagtactccaattttttttttttgtttgtttgtttttcaaagagcaggcatcagagtcagattttctaaagggcctgccagtgccacacctgctattgttgatcctcataccct

SEQ ID NO: 128760 - DNA, 609 bp, Homo sapiens
gttagtgaaaattgtttctttttttccccttcacaatcctatattacaaattctccaaacctggcacttcacggcatattccttttgaatgtctttaattctgcaattttatacacccccttatcttacaaatttaattagtttccagaagttctgcagagaaaatgggccataataattcttgattattgccacttatcttcttataatttgatacaagaggattttattgcatttttaaagtagttttaatctgaaaaagatagtcctctccaagtttaacttcatgcagtagtaataatttaactactatttcctggttctagaagtatttttctatctaaaaagaaattgcttttctcaaattattgtactaccattgtattagtctgttttcacactgctgtaaagacatactcaaaattgggtaatttataaagaggtttagttgactcagagttctgcattgctggggaggcctcrggaaacttacaattgtggcagaagggaaagaggcatgtcttacatggctgcagattagagagaaatgtgtgagaatgcaggaaaaactaccatctataaaaccatcagatctcatgagaattcact

SEQ ID NO: 128761 - DNA, 631 bp, Homo sapiens
agtgctcaataaatggtagctattgatgactttgtcaaagttgttaatatggcttgcctttsttctttaaggatagaaacggggttttattcttttttgtatgtcacacagtggatgttcaaaaaatatttgccaaggggataagttaatgaataaacttagaatggtgttgtgagccaacagcaggaatatttcaaatctttctgggaaagctgcttgccccttcacctctgctggactccttgccccgaacccagtagttcagaaccttaaaggaaactactcagatagggtagatgtctttggttttgtctcatttcttcattcaccgttcattgaacaattactacagggctccgcctatgtgtccaggcaccactgactatctgaaagcaaggtgccaaagtgtaaaaaacactgctgaaaacaaatcgatttgtgtttgtgtgctgtcatgtggagagcagagcccatcttttggtatatttcagcgatgcctctttcttcctctgggataccaagggctttccatttatgcttgcagccaagaaaagttttccagaatcatccaaggctatttaccttatgctgaaatatacaagtgaacaggtaaagatccagaggtgtttaa

SEQ ID NO: 128762 - DNA, 536 bp, Homo sapiens
ctaacaaaaaagcagaactccagaggtgcccacagaggaaactgcagacaagtcagagaggagcgcattacaaacacagggccaaacaatcgagcactcyagagaggcttgtctctggtcctcaaatatccaggagaaaatgctattacaacatctatttcatacagctctgaatgggtgcctgcaactggccatcttatgattcgtccaagtggtcaaaggaaattgaaaatagttaaaaatcagcagtgttcctagtgttggtattacacataatgtgaacaaaatattacatagtctatccaaagacagagagcaagatgcttgaaaattattcattttgatcacatttacttgcaaaaatgacatttagctttcttaaagttctcattggagagtaagtcgagtaaatatcaaaaggttgccttaaaacttgccttttgcatggcaagaagaagttgggtggcctgggagttttagagtttggcagagcttgggtggtgggcatacacttaccataatctctctaagcctaa

SEQ ID NO: 128763 - DNA, 631 bp, Homo sapiens
ggtatcttaaattatcattcaagaagctaaggtacaaggaggaaaatgaccttgttttgtttccttctagtttactgtctatctttgccacctgcttcttagttctcatgctgcagagcaaatggagagctgaaaatctaaaagagttttcttgtttttcatcctcaccttttttaaagactcaaagggttcctctgatgagggaggtaagtcctgtacagactgtctcatgcgtggccttaaagtcacagctaaacaagccattttattttstgtgcaatgtaaaaattgttatatttaatcttgtttcctcaacaaacataggagagaaagaagagataaaagaagatgaggtgattaagcacccaagatggagatggaaaaactctatttaggcaagttgtaagattttaaaaatattcagcacacatgtacacacagtgcatggatgatgtggaaggtttttctgaaagtctaatattggaatcataagacgctttgcagaaattatagcatcctaaatttatgcaaagctgcccaaccaccaggatcagacagggccatttggacctggagtcatgacctggctttcccattaactgagataccccatctagggaagagtatgtta

SEQ ID NO: 128764 - DNA, 616 bp, Homo sapiens
ctgttgatgggctaattttcagtgttcatagcacagcacataatgccaaagtggaacacagtgagaaagagattcatgccaatcccttttgggaacaaatgtctgaaaaatcacaagggtcactggctctggtctcgcttggttctgtcactgtggggaatgggggatggaggagtgaggaaatacgccaggattgataatggtcagtgaaatgccttgcccatctaaagcactgctcccctcccccttcttttccttcttaacagctggcccgaagaacctaaacttagcaagggcgaggtgtaggaaactagatagtgcattctacagttggataggaaatactgggctcaatgtgtttaaggttaagattaattcctcacttcctccgaatctattttaaaaacagagcaaaggatggcatatgctttcttctarcaaaatgacagatgatcaaaggataaacatgatctgcatgtaaaaccctctgactactgccatggccctttgcctacagattaaaaaaaaaaaagcagtattttatcaatgtggttaaaatttggttgtctgtgtttattcagaaaactcagtagtggcaacagccagaaaaatagtg

SEQ ID NO: 128765 - DNA, 536 bp, Homo sapiens
aaattaagtttacatctttttgcatagcaacagggccagttttctccaagctgctcaatttacaagaaaagaaatcatacggctaagaattcaaacttcagcagacatgggtaaacaaggaactcttacaaatctattctagcaacctaacaagaaaccagaaatttagcaagttctttcccgctcaggacaattgtgttcactagatcagaggcactgagacatgaagaaaagacccgctaaaaagggaaagccttccttcctgccctaggacatccctgccaacttyagggaggtgggaacccagctgcgctctctacagtatgggttacttttgtgtctggaaggtgtctgacatcctgagacctggacccatttcaaggagctttgggaagagcccagatcactgatggaattggacagtgcgtggaaatggttcagcaggacgagggtaagtgcaggatcacggccaggtcattctgagagacaatgagtggcactgatggggtcagacaaagattaaaaacaaaagtttg

SEQ ID NO: 128766 - DNA, 545 bp, Homo sapiens
aatttaatctcataaacagaaatcagaaaaaatakcaagtccagggcatataaaccctaaaccagtgcttagattattcattttaaatagagctaagagtaaaatcttctccataaaatatatattgtatctatacataaaatatatgttgtatctgagttcagcgtgtgatgagtgtgaccatagactacccagcattcatgtggaagtgaaggaagaggactggatcaatcccagcggaaagcatgcctctcagcagcccacaccatcctccacctacactgtgtaatgacagtgctttgagatgtagcaaaggctgtaaatttatctattctctggtgtctcagagacctgacattctgtgtcagaaagaaaagttataaaaaggcaaaagtcttaatgagaatcattggtactcaatagaatagtgaattaaatacagccaggggaagacccaagtctcatatttctcttgtatattccaaagttccagtgaaattccaggtaatagaggttatttcccacactgttaaagcaaggttgca

SEQ ID NO: 128767 - DNA, 545 bp, Homo sapiens
aatttaatctcataaacagaaatcagaaaaaatatcaagtccagggcatataaaccctaaaccagtgcttagattattcattttaaatagagctaagagtaaaatcttctccataaaatatatattgtatctatacataaaatatatgttgtatctgagttcagcgtgtgatgagtgtgaccatrgactacccagcattcatgtggaagtgaaggaagaggactggatcaatcccagcggaaagcatgcctctcagcagcccacaccatcctccacctacactgtgtaatgacagtgctttgagatgtagcaaaggctgtaaatttatctattctctggtgtctcagagacctgacattctgtgtcagaaagaaaagttataaaaaggcaaaagtcttaatgagaatcattggtactcaatagaatagtgaattaaatacagccaggggaagacccaagtctcatatttctcttgtatattccaaagttccagtgaaattccaggtaatagaggttatttcccacactgttaaagcaaggttgca

SEQ ID NO: 128768 - DNA, 421 bp, Homo sapiens
tgcagtaaaaacctagctgtaggtaaattttaaggtgtacatccatgattactggacataaataaaattcttagaagttaaaatgctaaatcagtagtaatgtctgttttaaaagcttttggtatatatccttccaggtaggttgtactaatttatattttcaccagaaattcattggggggacccatttttctgcattctttccagtaccactcctgtaattactaccaccaccaccaccatgatcattytttgccaaaatttgcaagttaaaataatattttcctggtttaatttgcattcctctggttactaatgaggttgagtattttgaaaatgtttataaataatttgtgtgtcattttataagttgcctatttgtgtttttaactgttttactctcaggattttttttttatct

SEQ ID NO: 128769 - DNA, 470 bp, Homo sapiens
gcctctaaaaccctgtcgtgctatactgtcaactgagaagtgagattcaaatccaagtagtgtgccccgccccccaccattacctacaatcttttcttctttggcttcttgagatgtaagagggtttctctttaattaaaaaagtattgactaggtaatgtagtcatgggttcaaaattcaaagggcacaaaaagatacgtgaagaattttttctgcccttgtccctcagccatccagttcccctacctgggaggcattcactcatcatttgtctgtaagttctcccaaacatattttgtgcatatacaagcaaacacacatatatatgwttttaagtgactagagctcccctttttatgcaaatagaagcatagtatacatatcgttctgcaccttgctattgcactaactatattttggagattgtttagtagcagttcatagagaactttgtcatcttggtaactgc

SEQ ID NO: 128770 - DNA, 619 bp, Homo sapiens
tgccccacataatacgatgtattagttgaaaaaatacataataaaaaggctttttaaagcaagtactttaaaatgtgtagctgttttactaatcttgaaagctatacacttaaaaaaatttgtagtacwtatatatatgaaacaaaattggtttagtctacttgtctacttaggattccacaaactcctggccacaaatcatcccttccttatttcttacatccaggctcttagacccataagttgaatactcctggcatgtagtatatattctcacatttcaaccttcaatatgcctacaagtgttcttatacttatttatcccaataaggtggcccagaaccactctcccactgaaaaaaaagtggcaaagtgcccttgataacatgataacttcttttgtgttactcattttgaaaatgattgattctaataatacctataatctgttacctaagatagagacttgtgtataattactaatagcttagacttctttagcacgctgcctatgtctttgtttctctacttgtttctttgaattaggagacaccctcaaacaccgattttgagtttttattgttattatttttgccattaatttaattttgcttaataa

SEQ ID NO: 128771 - DNA, 613 bp, Homo sapiens
caatcttggctcactgcaagctctgcttcctgggttccagcgattctccagagccttagcctcccgagtagctggaatgacaggcatgcaccacgacgcccagctaatttttgtatttttagtagagacagggtttcgccatgttggccaggctgctctcaaactcctgacctcaagtgatccaccctcctcggcctcccaaagtgctgggattacagacgtgagccgccacgcccagtcccaaatttcattatgtattcttcaaaataactcctaaagttagtcattattattcttacttcacaaataaagaaaaagggtgatgaaaattgagtaagttgtgtaagatcacatattgataaagcgagggaaccacaattctaaagaaggttcttttaggctccagagttcatgatctttccctgatagcaatgctgcttttctataagctctgatggaaaggagggcttccttgaaagagttgcactgactttcacaggatgtttctcagagtaatttactcttaaagagccataactgtgtgcatggtaagayggatgcacatatatttgttagaaagaggttgttacttaaatttcacttaaaatgtact

SEQ ID NO: 128772 - DNA, 560 bp, Homo sapiens
tctttaatatgttaatgcactgcaaatctccaaggaagaaagagaacatcatttttggcagaatacttgcataatgtgagaaattctatataagaagaaaatacaaatttacggtaagttacagaacacaactaccaaaacattactttctattggataaatacatgaatatataaccataaggaatagaagtttcaaactgattagatgaaaatgttctgtctagaggggaattcaatgagtaaaacaaaaaacttacaggcaacayccaaataaaatgaggtgataacatatccacaagaaacccagaatatgggcaaatagagctaaatcaccagcagtaaatgtaaatgctacaaacattttggaaagcaaaatttgacaaattctaacaaagtagacataggtgtcctaggttcagtctcatttctaggtatatatttaggaacctagaaaaatattataaaatctctgtagaaacattgtttataacatcaaaaaactggcaacaacttaaatgaccctcaacaagagaatggataaatgaactcctgtataat

SEQ ID NO: 128773 - DNA, 560 bp, Homo sapiens
tctttaatatgttaatgcactgcaaatctccaaggaagaaagagaacatcatttttggcagaatacttgcataatgtgagaaattctatataagaagaaaatacaaatttacggtaagttacagaacacaactaccaaaacattactttctattggataaatacatgaatatataaccataaggaatagaagtttcaaactgattagatgaaaatgttctgtctagaggggaattcaatgagtaaaacaaaaaacttacaggcaacatccaaataaaatgaggtgataacatatccacaagaaacccagaatatgggcaaatagagctaaatcaccagcagtaaatgtaaatgctacaaacattttggaaagcaaaatttgacaaattctaacaaagtagacataggtgtcctaggttcagtctcatttctaggtatatatttargaacctagaaaaatattataaaatctctgtagaaacattgtttataacatcaaaaaactggcaacaacttaaatgaccctcaacaagagaatggataaatgaactcctgtataat

SEQ ID NO: 128774 - DNA, 632 bp, Homo sapiens
atttacttctttttaccatgttggaatcagaaggataaatgtaaatacagttaaagctaagaaacaggtttatgtaggaaaattttgcatcaagatgaattgtttcatatacatgaaaatcttaaaggagctttaaagcagagttcaggaaaagtccaaaccatgctactgtatsttaaaaaagcattacctgttatgtagatgatttgagaggtaaatttgcattcagtatttctcagaaaatattacttaagattatactaagatttattgctgggaaaatcctaaaattgatattttgaaaggctttatctacattctctgtagaaccaaaatatgtcttatatcatatatcttacgataaggaaaaggacatttattttctaacaaatcatgggcattagctgcagtttctaacagcaacatctcataccaaaggctttaaaaattattttaattagaaacatacctaaaaaggcaaaaaaaagtcatgaaagtctcatctactcctattactttaaaaattagataaataagtggaagttgtccatcactatgttctaaccctgtttaactcttctaaaggcatagatagtttaagaccctaaaggtaaaaagcaacagtcctttaa

SEQ ID NO: 128775 - DNA, 574 bp, Homo sapiens
tttaacttctaacaactccagatttgcctattaaggtagaaatgtcatgaggattattcgaaatgtaaatactgagctagcatgtcagtaaaatcaaacatacagatgacagataaataacaacaaacacaaaatacaactgtggcaatgtgcatctatgtaggaaacagagagggaagtttagtgtctcatgcatgccacgtgggattgaagagaatctgggaaagttaagtcagatcctgcaactacctacttaactatatctatgagtttgctttaatgttcctcctcttgcctagtgccacatgggtgcagaggcagcccatgaggacaacttctcccagccttccacatttatagcagactaaaagctccctccccctgtcaactccctcccccaacctgtgccctctttctcataacataggtaatgatcctcattcactctgwtctaaatctgaggggcaagtaagtaatccaataaataaagtctcattcctgactctttttaaaaaaattttccttctccccaaaccccctaagccagggaaatggaattgtcttttccttttcc

SEQ ID NO: 128776 - DNA, 616 bp, Homo sapiens
ttttaggattatggttgccaatgcgaaataggtcatatcaattgttgttgatacagatgatagctattgatatttgtatattataaccagataatttaccaaattatttcataagctctaaacattttaatgaggtttagtggacaatggtgaagttctagtgtatttatgtctatagttattgtattagtttgttcccacactgctataaagaacttcatggtggaaggtgaaggagaagctaacaccttcttcatgtggtggcaggagagagagagacagagagagagagagatcacgaagtgggaagtgctacacactcttaagccatcagatctcatgagaactcagtcaccatcatgagaacagaaagggggaaattacccgcatgatccaatcaccctccaccaggcccctcctcaaattygacatgagaattgggcagagacacagatccaaaccatatcactctgcccctggaccctctatcaaagctcatgtcatcatattgcaaaatacaaatatctcttctcaacagtcccccagtcttgactcatttcagcattaactcaaaaaattaactccatagtccaaagtcttatctgagacaaagtaa

SEQ ID NO: 128777 - DNA, 525 bp, Homo sapiens
tggtaccagcaccatgctgttttgtttactgtagccttgtagtatagtttgaagtcaggtagcatgattcctccagttttgttcttttggcttaggattgtcttggcaatgtgggctcttttttgttccatatgaactttaaagtagtttttcccaattctgtgaagaaaattrttggtagcttgatggggatgacattgaatctataaattaccttgggcagtatggccattttcatgatattgattcttcctatccatgagcatggaagcagaattaaggcagatataaacacatcagacttttaactctttccaagcgacaacccaattagggaatttggctaccatggacaaataaataaataaataaataaataaatagataaataaataataaattaaaaaagagacataaagcaaaggaaacatttaccatattttggcataatggtagaagttgttctttgataattaacaattgcacttttataatttgtctccagggcttctggtttggatagct

SEQ ID NO: 128778 - DNA, 586 bp, Homo sapiens
aaatatatttttttcttaccgtcacaaatrtaactggaagaacttgacatagagaatcccatttttttaataaaaacctttccactataactggggtgcagtttaatatgccactcttgcttattaatgtcctcatcaggatatgtgaccaacttatttgagttaaacaagtaatattctaccattccacagcaagaaattcagaaataccagtgcatactactatatattttatgaaaatcagatactgtacatctgtagtaatgcttgaactgatttttcataagacacaatagtgtatacttgagtgctgcagtacgtgggacagtcccaaatgccattttgacttatggggtttgcagctctgattgtatcatatgcatcatgtacagcttgggactttcctagcaaagctgctttactatcaagatgtcctttaaataatcatgacatggtgggaaaaaagtctcaggaacaaattgttgctgggttataaatgaagtttcaactataactagactttcattacctgtgcaagagtttgggtagtttaatatcatgaacctgactttctttctgacaacta

SEQ ID NO: 128779 - DNA, 535 bp, Homo sapiens
gaatttattggagaaaagtaaaggttctaagtataaagaatagttagtggagtaaattttaacttaaatgatacctcaaatgaattgaatacacctaacagtgaggtgcagtrcatctgatacagcagatataatgaaatctgggaaaggaaaggtgagctcagtattgttctttcttctttccatgcctgcaggatacagaaaaactgactagaacattttaaaggcagctgaaaataactgctttttgggaaaagtaagtctcaaaagaattggaaaggaagttaaattcacctacactatagagatttaaaatatagtctggacagagccgaggagattccaaagtgcgaacaagctgaaaaagtctggcatggaaattaagcctatgcataataccagaaaaaaaaataagtgagatactttcaataaaaaggacagagaaagaaactataatggaagaaaacataaccaaaggaacaaaaggaaaattgccagtgatgctttgtactccacaaggactcagattaaataa

SEQ ID NO: 128780 - DNA, 451 bp, Homo sapiens
tttatgtttgtaaatgggaaccatgtgtgatgtgtgtgtattctctccctacccttcaagatagagtaaaatggcacttcccacatccttcctttatcccaaagagtgtattctcttatatgtttctcaataatcaattttattaactagtatctttcttcaaaatgtactagcaaacaatccacagaataaagacacactacacctattgaatgggagaaaatatttgaaaaccattaatcccacaagggtctaatattcagaatatacaaggaactcaaacaactcaatagcaaaaaaaamcccaaaaaaccaaaaacctaataatcccattataaagtgggcaaaggacatgaatagacatgtctcaaaagaagacatacaaatggccaacgggtagataaaaaaggctccacatcactaattatcaggaaaatgcaaattaaatcca

SEQ ID NO: 128781 - DNA, 602 bp, Homo sapiens
tctttcctctgctctaacagaacttggtgttgggtgtattggcagtgggccagagggtctgggaatgacctgtgggatgaagagctgcttaaagtgtaaccaggaggtggtctgagaaccaaggagagctggatcaataagaaaaaggggaaggggccaggtggaatcacttgggaataataaagttaaggattgcctatactgcatcccacgttggctttagcrttaaaaaacaagctccctttagagtcctggccctcccttacactagctgtgtgacactgggctgttacgtaacttacctagatcttaatctcatctgtggtaatgggaaaatattttttagaagagctatcatgaggattaaaagagagaaggtatataaaatgttagtgcaacacacattagtagcttactactacttgtactgaatcttaatttcatttaaaaatatttagtaacattattttttgttcttagtttttaatcgtagagttacgtttcatttcaagtgataccttttatttcaaagataccacagaaacatgttaagtaaataaacatacagactgtgcacagataaagcaaaaaccctgagtgac

SEQ ID NO: 128782 - DNA, 524 bp, Homo sapiens
gggaggaaatacgtgcaaaacatatctgacaaaggacttgtatccagaccgaagaatgaaaacaaaacaacttgctaataaaagaaataacccaatttttaaaaaatgagtaaaagatttgaacaaatacttcataaaggaagatttacaatggccaataagtacaacgaaagtgctcagcatttgtcatcaaggaaatgcattttaatactacaatgagatactacttcatacattctagaatggctaaaattaacgactgacaacactaaatgtgaatcaaccagaatattcacatattgctggagagaatataaaacagtacaaagagagctctcttcrgaagcgcatatactaaaataataaaatggtacaagtggcccagcatggtggctcatgcctgtaatcccaacattttgggaggccgaggtgggaggatttcttgaggccaggagttcaagaccagcccagccaacaaagcaagaccctctctctacaaaaaataaaaacattagccaggcatg

SEQ ID NO: 128783 - DNA, 574 bp, Homo sapiens
atagtggtgcatggcacatagtaggtgatcaatagatgttggttattactaggaggatgaaggtgagaaaattcaccttaactgagctcttgccacatgactggcatgggacttaatgctttacacatagtatgtcatttaatctgagcacttggaatggtgcctggcccactgtaaatattccatagatatttgttgagtgaatgaatgaggtctcataaaaccccatgaaatgagcattttgacagatgaggaaactaagaaaggctaagtcccatgtgtgctctgcctgatgactgtgaatttgggtcccaggaatgtgtttacaactgtttcaggtatactgtgcaggtgcagaggggtcaagatgtgttagcattttccctgtttacgtagagatatggatatgggtagaggtggagatacacctgggtgtgaacatgagcatacctgcctgtgcacacacacattcacatgcgcatgcgtgygcgcacacacacacacacacacacacacacactcctaagaggtccaggctcccctagaagtaaagaaggcctaggaagggtgagaa

SEQ ID NO: 128784 - DNA, 574 bp, Homo sapiens
atagtggtgcatggcacatagtaggtgatcaatagatgttggttattactaggaggatgaaggtgagaaaattcaccttaactgagctcttgccacatgactggcatgggacttaatgctttacacatagtatgtcatttaatctgagcacttggaatggtgcctggcccactgtaaatattccatagatatttgttgagtgaatgaatgaggtctcataaaaccccatgaaatgagcattttgacagatgaggaaactaagaaaggctaagtcccatgtgtgctctgcctgatgactgtgaatttgggtcccaggaatgtgtttacaactgtttcaggtatactgtgcaggtgcagaggggtcaagatgtgttagcattttccctgtttacgtagagatatggatatgggtagaggtggagatacacctgggtgtgaacatgagcatacctgcctgtgcacacacacattcacatgcgcatgcgtgtrcgcacacacacacacacacacacacacacactcctaagaggtccaggctcccctagaagtaaagaaggcctaggaagggtgagaa

SEQ ID NO: 128785 - DNA, 645 bp, Homo sapiens
aacattgttctaaggactttatatatatttgctcatttaatcctcacaatagccccatgagttaggttctgttcttatccccattttacagagatgaggtagagagtagctaaataacttggcccaagtcatagggctaataagtgacacagtcgggattcaaacctaggcagtttagctccagagtcttcattcagttactacagcgtactgttccaggatattcctggtaccatacaacttcacctccagtcaccagctttaacttattagctgcttttaaaacmtaaataattaatgatttaaaacaattttgtaattttcttttacatttcatcaaattaaccctttgaaatttatttactgtcatgacttttgtagatactgatattctagtactagatctgggcctggaattactatctttaatgtagaagctggcactgttttcagttaagctttagatcaagagaaaaagactctgagacagagatttgcttgaggatttttattgaaaagcccttgggatcaacatctgtgggggagtgaagaagttagaactgggcagaaggaggattcagacctcagtgcagttgtgacaaaggcttcagtagatcccacagggtgcctggggctggggtaacc

SEQ ID NO: 128786 - DNA, 577 bp, Homo sapiens
tatacatattattaggaaagatttctggatctagtgttaaatcatgaataccagctctatatttttctgtcttccttggagaaatcattttccttttctttctatgtcatgacctgtttttcattgcagccaccatcttcagcccagctgatagaggaggaaggtgaagtgatgaaagtcaatatctacccagggaccttttgtggtttagtcaattaattgttggctatggggagaaggggagtggaagaagagtgaagaggaaaggaagaaatgaaaaaaaaagaaatcamctaatttcccatacctgtcagggttcttctcagcttttcctatgaagatgtcccctgtggcccatttagagccatttaccaaaacttttttgagatttctttgattttaacatctgctttcctctttcttccctgcatagtcctatgcttccgggaggcatggcagttagcctttgatcttggtgcctcttgttagctgcatgctgtaagttatccccctcctcaagctaattcttggcaatgatgaaatctacatccttccttcttcactctctttatcacag

SEQ ID NO: 128787 - DNA, 442 bp, Homo sapiens
gggagtcctacaggtctttgcagattatttatgactgaattttatgttaagtatactggaagccgttatagggttttaagcaggaaaataatatagcttggttttgatttttttttttttaatgatcctctggcttctgtgtggaggacaaatggaaaggagcaagggtggaaacctggagactaattagcaagatgtatccactgtgcaagtgggagatgagataggcctggaggttctccagggggaccctggagatggggagaagtggatgagtcaagttatattttggtgayagaaccaatcaattctatagattgagtatatgcctcaggtaagaagagggattcatgttttctagttcacagaagacaatcagctaatgggaatgatttcttccagtcatgcacaggaattgtgatcgttcaaagacagcacagaa

SEQ ID NO: 128788 - DNA, 612 bp, Homo sapiens
tgtctgtaattaacttagttcagtcacagttcctcccctggagctggggtagaaacccacattcccagagcatgttttgcctgcattatacctgagcaaacttgggattctattagcaaaaaggaggagagaatgacttttggaaaggcaactaacatctgtcacatgtgctatcctgaattattctttatttttatatacatttatattgtccctttatattattaccctgatagcaggagtcaagtcttagactttctttgcattctccacagagcttgctccagcggtgagcacaagaaatatttgtcgattggttggagaawaaaaagaaatcacagtctaatgtcaaagagttgaagaccctgtcattcacattgcctccatatttccatgccagccttagatgggtccctttggtgcacttgcagaggatgccaagttggaagatgggcaccaggaattgtgtgtggcaatattcagttcattggctgggcatgcacatgtgccaaattatacaacaggcaggcattgggacacctgctttgacaaagcatgtctattacgggatttgaatactactaatgccagtggcagagttctccacattca

SEQ ID NO: 128789 - DNA, 612 bp, Homo sapiens
tgtctgtaattaacttagttcagtcacagttcctcccctggagctggggtagaaacccacattcccagagcatgttttgcctgcattatacctgagcaaacttgggattctattagcaaaaaggaggagagaatgacttttggaaaggcaactaacatctgtcacatgtgctatcctgaattattctttatttttatatacatttatattgtccctttatattattaccctgatagcaggagtcaagtcttagactttctttgcattctccacagagcttgctccagcggtgagcacaagaaatatttgtcgattggttggagaataaaaagaaatcacagtctaatgtcaaagagttgaagaccctgtcattcacattgcctccatatttccatgccagccttagatgggtccctttggtgcacttgcagaggatgccaagttggaagatgggcaccaggaattgtgtgtggcaatattcagttcattggctgggcatgcacatgtgccaaattatacamcaggcaggcattgggacacctgctttgacaaagcatgtctattacgggatttgaatactactaatgccagtggcagagttctccacattca

SEQ ID NO: 128790 - DNA, 549 bp, Homo sapiens
aaatggatagtttaaaataactatatgttcaagccaaacactggcaggaatattcaggtttgttagacaatccaggtcatcatctcaagaacaattaggattctttaaataaatcacaaacttgatatttagaagtgagttaagcagagctgctcttaaacaaaacgacaagggcacgccatggaagtttgtcttcatacctgctgtgtaatcactttgaggcctcgttctctatcagtgccccttttttgacttctaamtaccgagatcctgagatctccctttagggagaaaggaggcgacatatctctcatgccttatacgccttacttgaatggcttcaatctctccctcttttccttcctctcttaacatttctcctttaaaatcttttcctcccttctctgtattccctttcctcttttttgttccttcaatttttctctcctcttttgccctttccacctcctcctacaccatgctactcctctatcccaaacctcccaccccttctctctgtattttcctgtcttttccccatctgcgctc

SEQ ID NO: 128791 - DNA, 446 bp, Homo sapiens
atatgacagtcagcatctaaaacgatcccaataatcctcctcccaatgctcacatctttgtttaatctcctccccttgtgtatgggccagacctagtgattcacttctaataaatagaacatggcaaaatgaatgagatgacatgtctgagactgggttatgaaagaccatgacttttgtctgattgcgctctccttctttccccatttctctaatttttctcagttttactcactcagatgaagcaagctgccatgttatgagctcccctaaggagaggcccatatggtaaggaattgagaatgaccttcagccaacaaccrtcaaagaaataaggccctcagaccagcagcccacaaggaactgagagctgccagaccacatgaatgtgcttggaagcggatccttccctcattgagccttgacaaggacagccaccacagcca

SEQ ID NO: 128792 - DNA, 604 bp, Homo sapiens
cgcaatgggataggttcaggagagagtatgtggttaggagtgaaggctaccagttcatattcttctccagagaaagctgagtgctaaatataaggagaaaactaggttgacgacttaaatgggcagcatttaaagaaaagattttggggttgaggtatatgacagtcagcatctaaaacgatcccaataatcctcctcccaatgctcacatctttgtttaatctcctccccttgtgtatgggccagacctagtgattcacttctaataaatagaacatggcaaaatgaatgagatgacatgtctgagactgggttatgaaagaccatgacttttgtctgattgcgctctccttctttccccatttctctaatttttctcagttttactcactcagatgaagcaagctgccatgttatgagctcccctaaggagaggcccatatggtaaggaattgagaatgaccttcagccaacaaccatcaaagaaataaggccctcagaccagcagcccacaaggaamtgagagctgccagaccacatgaatgtgcttggaagcggatccttccctcattgagccttgacaaggacagccaccacagccagc

SEQ ID NO: 128793 - DNA, 582 bp, Homo sapiens
caactatataaaaatttggtttaaaagttagtgtgatacttcagaatattaactgggtttcctagatagtagaactatagatggctttttcttcttttttacaaatttgtttccaaattttcagtaatgagatttcttacttttattattagagaaaaacttgtttgaaactgttaattgttgttgcggtagacagcctctaaggtggcatccagtgaatccattgatacacatgcccttgagcaatcactccaggagtgtaggctggacctagtgacttgcaaataataaatagaatatggaaaaaatgatggaatgttatcctgtgattagattacaaaaaayagtgtcttccatctagggtgccctatttctgctttcttgtgcacttactctgaaggaagtcagctgccatgttgaaagcttccttatgaagtggtccacatggcaagaagttgatgtctccagacaatagccatcaaggacctgacaccatggtgagcgagtttggaaatggggtctcccctgcttgaaccttgagatgtctacagccctgaccagcagccttgagagagatcctga

SEQ ID NO: 128794 - DNA, 640 bp, Homo sapiens
cttgcttctaagctccaataaaaatggaatgcttaacttctaggagagaatcatgaacctgaactacctttattaactgggtattatcttatcaagcctcacaactgtgatgtcctcagcagcatacaaagtgaatgtagtgtatatgagagtgagtataggtaggtgctaaatgcacaagggagtttcataagcaggtttctcctgtgaatgttgtgcctaaacttccactgccaacccagtcttgacccctactttgggtttgatggggttccctatgatcagataattgagaagaaaacattttarccagttattcaggtttcttggcaggacacagtggcacttgatagaagtagatttatgtggcggtcccgcttatgtgaccatgaagggcacactgatgtcagaaaatattaatggtaaccagaaattccaatagtcattgttgtgattcattgattcctgggaaatagtctggtagataaccaagaacttggaaggaataagactggatgattgaagacaaggtggtttgagaacaagatatgtagtagactgggtcttaaatgtaggaatatttttatactatgtgaatgttttctaaaaatgtttctactgcaaatgaggctttcgataa

SEQ ID NO: 128795 - DNA, 509 bp, Homo sapiens
gacatctgaaaaacttcgggatggaattcagagagctatgagtttgactcctactctacaaactccattttattaatctccctgtgcctcagtttcttcctttatatgtggaaaaataatatgaaatgttctctctctcttttttttttttgagagagctttccrttgttttagccctggactcacctcttcataatttaaaccttggaacctccatttgtcctggagttagttatcatattagaccaagtaacagattcttagcttttcagctcaacaggtaaggtctaaatacaagactgaaaaagataaaagtagaattagttggaggataagttgtttcctggttcttctctagtacttcccctcgtatcctgcccatttgataaagaccatatgatctgaggagtgaaaagagaattggggagtaaggagtccagcaaggaagttggcctgtctcttcattctgtcatcttgctattttagagatacttggaggacttcttctg

SEQ ID NO: 128796 - DNA, 509 bp, Homo sapiens
gacatctgaaaaacttcgggatggaattcagagagctatgagtttgactcctactctacaaactccattttattaatctccctgtgcctcagtttcttcctttatatgtggaaaaataatatgaaatgttctctctctcttttttttttttgagagagctttccattgttttagccctggactcacctcttcataatttaaaccttggaacctccatttgtcctggagttagttatcatattagaccaagtaacagattcytagcttttcagctcaacaggtaaggtctaaatacaagactgaaaaagataaaagtagaattagttggaggataagttgtttcctggttcttctctagtacttcccctcgtatcctgcccatttgataaagaccatatgatctgaggagtgaaaagagaattggggagtaaggagtccagcaaggaagttggcctgtctcttcattctgtcatcttgctattttagagatacttggaggacttcttctg

SEQ ID NO: 128797 - DNA, 509 bp, Homo sapiens
gacatctgaaaaacttcgggatggaattcagagagctatgagtttgactcctactctacaaactccattttattaatctccctgtgcctcagtttcttcctttatatgtggaaaaataatatgaaatgttctctctctcttttttttttttgagagagctttccattgttttagccctggactcacctcttcataatttaaaccttggaacctccatttgtcctggagttagttatcatattagaccaagtaacagattcttagcttttcagctcaacaggtaaggtctaaatacaagactgaaaaagataaaagtagaattagttggaggataagttgtttcctggttcttctctagtacttcccctcrtatcctgcccatttgataaagaccatatgatctgaggagtgaaaagagaattggggagtaaggagtccagcaaggaagttggcctgtctcttcattctgtcatcttgctattttagagatacttggaggacttcttctg

SEQ ID NO: 128798 - DNA, 605 bp, Homo sapiens
tcagtgccttcctgagaagctgcctcagttggggtacagagcaacatatcatccacgtattgaaaaccttcccctgaagatgggaaaacttggagagttcttttgacaatgcatgtccaaagaaatgagggttatctcaaaatccctgaggcagcaccatccatgtaaactgggtggtttggccagacagattgtcaaaggcaaacaggtattgagagtcargatataacagtatacagaagaaagtatcttttaaatctaggactgtaaaccatttagttccctcaggtatttcggtcagcaaggtatagggattaggtactaccagatagattgggtttatgaactcattaatgaggtggaggtcctgaaaagtctccattccccgttggttttgcactgttaatattggagtgttgcaggggctcttacagcgtttgaggaggccctgcatcttcaggttattaataatagcttctggccctttcctagcatcttgcttcaggggatattgtttctggttaggaaaaatggtgggatccttaagatggatctggactagcctagtggttacagctcgacctattcttccttgagctgcccac

SEQ ID NO: 128799 - DNA, 551 bp, Homo sapiens
acaaccatttcttggcatcctttgtaagtctgcagtgtgctgggcacatactgactggatgatcacttgctgattgactaactgaaatatgcatctgcccacagacaagacttttttgagcacagtattcttgcttagataatgaatcatatttgaactctgtcatttgcaaatccttttcactctgctatggaatttacctttttagattaatgtacccatgtaccagagtaatgttaggtcagctctccttggtagagactgtttttcactaagattcatataattttcaaattctacttatgcaagcactttataggatagaaatttattctggacttcagtacaaatgtattggttgagagtattctgataaggyatgaacagggagacccaggacctagcctcagtctcctgccagctaaccatgagaattcggcaggttctccaaccaccacctccctcattcctagccctggcctcagtttccttgaccctaagtaaggtctggactgaatgattgctaaggtctcttttagcactgctcttct

SEQ ID NO: 128800 - DNA, 644 bp, Homo sapiens
agatattctatgcaaatgagaaacaaaagacatgaggagtagctatacttagataaaatagatattaagtaaaaaaatggtgaagcaagagaaagaaggtcattatatataataataaaataaattcatcattaatttaaaacaattgtaaatatatatgcattcaacaatggaacacctaaatatataaagctaatattagcagacataaagagataactgcaatacaataataatagaaaacttcaatatcccactttcaataacaaatcatctwaacagaaaatcaataagaaaacaatggacttaaactacactttagaccaaatggaccaaacagacatatacagaatattccaaccaaaagcagcaaaatacacatcttcttaagtgcacaaggaacattctccaggatagataatatgttaggtcacaaaataagtgttcacaaatttaagcagattaaaatcatctcaaatatcttttatgattacaatagtgtgaaattaggaatcaatagtaggaggaaattaaggaaatctacaaacttgaaaattaagtattgcattcctaaacacctgatgggatacaaataaattaaaagagaaatttgtaaaaatcctgagccaaacaaaaatggaaac

SEQ ID NO: 128801 - DNA, 311 bp, Homo sapiens
gaattcctaaaggggttctaagggagcaaaaatagaaacaagtctcacataagaccagttagcatggacaacttttcagaactcagctgtagayattcctcctccttgagcagacagaaaattcaaaatgttggtgacatcaaaaagaaactaaatctctctcaaatggatttaatgggtatttttaatgcataattactcccaccagtctcatctcagccaggtggggttttctctttcatttgatttatcaatactatcatttgttagaagttctcaaaccagcatctattactcttcctagaagactc

SEQ ID NO: 128802 - DNA, 492 bp, Homo sapiens
ttgaattattaatcctattaattaaattctatttatcaattaaatctttagttttaaatatcagactctgtcagctgaaacataatgaaattataccaaatatcaagtcaactgcaagaacccaaaactctcctggatcattaaagcaacagttgtcmcagataattttgttttgtttgaattattcaatacttatgatgaaataaaggcagcccaaattctttgctccttttttaaggtatccccttcatttgataggtcaaagctggccctatgactgctttgaccaatagaatgcagcagaagtaatgctattaatatacaagtgcagaggctgagccttaagaaatcttcagcttctgccttcatgcttaaggcatttcctctgccatcatactgttagaagctccgtgaagcagccatatcgaaaagaatgaaggtactttgttggtgccagctgtactcctagtcaaagccagaacacattggtag

SEQ ID NO: 128803 - DNA, 492 bp, Homo sapiens
ttgaattattaatcctattaattaaattctatttatcaattaaatctttagttttaaatatcagactctgtcagctgaaacataatgaaattataccaaatatcaagtcaactgcaagaacccaaaactctcctggatcattaaagcaacagttgtcacagataattttgttttgtttgaattattcaatacttatgatgaaataaaggcagcccaaattctttgctccttttttaaggtatccccttcatttgataggtcaaagctggccctatgactgctttgaccaatagaatgcagcagaagtaatgctattaatatacaagtgcagaggctgagccttaagaaatcttcagcttctgccttcatgcttaaggcatttccyctgccatcatactgttagaagctccgtgaagcagccatatcgaaaagaatgaaggtactttgttggtgccagctgtactcctagtcaaagccagaacacattggtag

SEQ ID NO: 128804 - DNA, 597 bp, Homo sapiens
acctggaaaggtcttatggagcaggtagagtttgagcagagtttgaagcacaggaaaatcctgatggacaggaatgactagacgggaaggacttcccaggtagaggacagcaggtacagagggacagggtgagtactttaggcagtagtggaggtgctgcaagtctctccaatctctgctctgcgctggatggatgagggtgtttttctaacccaatgaagcatttttatgagtgctggcatagttgaaacaatgttcttgaagggcaaagaagctttgatagacagaccctttgaagcaccaaaggaraaaaggaatggcttagacattaacttctgcagcacagcttgcgtacctctacttttttgcagcatatagtttttagcacaatgctgggcactcagtggacactcaaatgcttaattatttatagcaacctagttctccctgccttcaagaactttaaatctactagaagttcaggtgctagtttgagaaccacctatatggggcagtctgtgctgggatctaatgaacaggagagacttgtttatgaaaacactttgaatgagatacagatttggtcaaggatcatgt

SEQ ID NO: 128805 - DNA, 597 bp, Homo sapiens
acctggaaaggtcttatggagcaggtagagtttgagcagagtttgaagcacaggaaaatcctgatggacaggaatgactagacgggaaggacttcccaggtagaggacagcaggtacagagggacagggtgagtactttaggcagtagtggaggtgctgcaagtctctccaatctctgctctgcgctggatggatgagggtgtttttctaacccaatgaagcatttttatgagtgctggcatagttgaaacaatgttcttgaagggcaaagaagctttgatagacagaccctttgaagcaccaaaggagaaaaggaatggcttagacattaacttctgcagcacagcttgcgtacctctacttttttgcagcatatagtttttagcacaatgctgggcactcagtggacactcaaatgcttaattatttrtagcaacctagttctccctgccttcaagaactttaaatctactagaagttcaggtgctagtttgagaaccacctatatggggcagtctgtgctgggatctaatgaacaggagagacttgtttatgaaaacactttgaatgagatacagatttggtcaaggatcatgt

SEQ ID NO: 128806 - DNA, 427 bp, Homo sapiens
  misc_feature (1)...(427): n = A,T,C or G
nnnnnnnnnnncacctaaagcctaacccagattacacctgagtaacctccttccgggacacactaacaacatccagcttgtgtcgttactgagagcaaagcacacttttatagctttagcacaattagtcctyttggcgcaattgaatcccaggcggaaagaattaagggattgttcaagatcttttgacagattttctgctagccgaaggctcatggaaaatgcaacccaaattccctgcatctgagtacgttgaatgatgaaatgtaccttgggagctgtcgctcctctcgctctcgaccccgctcgaagaaggaactgtccaaatagatgaaaacgtgaaaatcctgcctgacctttctccccacatgcaatggctcgggccacacataccatctagctcacctgacaccgaagctttatctgg

SEQ ID NO: 128807 - DNA, 628 bp, Homo sapiens
tgtaggtgctgtctccttgcacatatgtgagttggctaacattggtgatgaaatctgtatccagcatrttacagaggctaaacgcttttatatacagtgtctcagttaactgtcagactatctctaggaactccatcttgttattcttccttattttctcatagggaagtagaaactctgagtgattcagtctcttgtccaaggtcagctacataggggcagagccaggccgtggagccagctctacctctcatggtctttccacagcttcacgtgttctctgccattttgtattctgccccagtttccccattcataactttttttttttcctttccatcttgagttgctgacctaagaatatgaggttggatatgaactgtccttggcattatgctagggtgaggacagaatgaatggaagtggggataggaggtcagggaggggtggccagagcaatgaaagacaatggaaggacaaaggaggatgaggaagaggtggtgattctgcatctgattattcccagagtttcccagacctttaaacacagctcctccaaggactatagtcgaatctatggtctggaatgggtcttcccctccctctcccagggtgtgttttgggtttt

SEQ ID NO: 128808 - DNA, 536 bp, Homo sapiens
ccctgtggtcacagttgaactgaacacttccactcctgtgcactcatgatattgagaacatgctttgattgcatgctgttcacatgcccttctcactgttttgtgactgaaggatccttcatgcaaatagctttggtgagcttggtgggacagacagcagaattgactctgccatgtaggcgaactcatacacacgccaagaggcaacagatacttgcaatatgtatgagtcagagtagattcattgcaataacaaataactccaaaagtcaatgccttcacatgatgaaagactatttctcagtcatgtgatgtctcgtgttgatgtctctggccaggagttctcttatgtgggtcactcctgtgccatgacttaaggaccagtcttttgccatcattttccctcatcccatgcggcctgggagygctgcacagccacttgtaagagtggtggaaagacagagtgtgaaggggtggagaagacagagccagggctggaaatgacatagatcttccctctgccaatcacgtggtcc

SEQ ID NO: 128809 - DNA, 309 bp, Homo sapiens
aaaaatgactaaggggaatgaggagatgagtcatatggaatgcccaagacacagaaggcaggcagagaaaataacaaggataaagacactgaagtaaaatcatgctttctatrtttcaaaacagcagcaaggacactagtgtgacagagaaggaatgaccaatgggaggctgcagattttgtcagagatattttcaaggctcaggatcatacagggacttgtaagcctggaaagcactttgaattttattcagaatgagatgaaaagccattgaaaagtttttaagcagatgagtaaaataatccacct

SEQ ID NO: 128810 - DNA, 309 bp, Homo sapiens
aaaaatgactaaggggaatgaggagatgagtcatatggaatgcccaagacacagaaggcaggcagagaaaataacaaggataaagacactgaagtaaaatcatgctttctatatttcaaaacagcagcaaggacactagtgtgacagagaaggaatgaccaatgggaggctgcagattttgtcagagatattttcaaggctcaggatcatacagggacttgtaagcctggaaagcactttgaattttattcagaatgagatgaraagccattgaaaagtttttaagcagatgagtaaaataatccacct

SEQ ID NO: 128811 - DNA, 522 bp, Homo sapiens
tgaaaaacagttctgaatatccaaaaccacgcctccaccactgctcgcagcagctgtgagctgtggaaagcctctctaggcactggcgaagagagaacacagcaattgtgagacattaaactgtacagttctgttagagcagaaaggaacctggacccacctcagctggcacccacccacagagggagcacttaaaccagccctagccagagggaaatcactgcaactgctagaacttgggacccggaagccttcccagtgcaggctaaagtgttcgggatctctaggtaaatgtgaaaggcagtctaggccacaagaactgcagctcttatrcagatgctagcactgaaataggtacagagccagtggactaagacagcagcaatctactgagatgacagcagaggcagcaaagggagtggtgatatcacccctcccctaaacccaagctgcacagctcacagttccaaaagacacccctttcttccacctgaggagagtagagggaaaagtggtgagaat

SEQ ID NO: 128812 - DNA, 495 bp, Homo sapiens
gaattctatatcagttgcgtatattgttctgtaaatgtcaattaggctaatttggtctattgtgtagcttaactccaatgtttatttgttgattttctgttgggatgatctgtccattactgagactggggtattgaagtcccctactgttattgtattgccatctgtctctctcttcctttagatctattaatgtttacttatatrcttggtgctccagtgtcagataaagagatatttataactgttatacccttttactgaattgacccttttatcattatatatagtgaccttctttgtcttttttttacagtctttgatttgtagtctactgtatctcatataaatgtagctactcttgcttgttttttatttccagttgcatggattatcttttttaactccttcagctttagtctatgtgtatctttagagatgaagtgggtttcttgtaggaagaatatagttggggcttctttattcattcagcca

SEQ ID NO: 128813 - DNA, 602 bp, Homo sapiens
gcctgctgggctgatggcatcccataaagaagagagattcgttccacataaaatgcaaccactgtctactgccccaggaatggcccacgggtgtcgggggtgatgaccgacctcaggactaggtagctcccattactgcttggtggctgacracccatagtgggattacttgggggattgcgttgctggggaattacttgcttgggggattatgaggcgggaaggtgtgccctccattatatagaggaggcaggttgaaaattgtattaggctgttcttgcattgctataaagaaatacctgagactgggtaatttataaaagaaagaggtttaattggctcaaggttctgcagactttgcaggatgcctggtgccagcatctgcttagcttctagggtggcctcaggaagctgacaatggtgggggaaggtgagggggtggggacagacatgtcacataatgaaagcaggagtgagagagagagagaaagttgggggcggctgtctcacactttttaataaccagattccctgtgaactcagagcaagagcctaatcatcaccaagggggatggcccatgccattcatgacagatccagac

SEQ ID NO: 128814 - DNA, 609 bp, Homo sapiens
aaagcttaaaaatggcagagtattaaaayctcatcttgaggctctgctacatggtaattaaatttctctggagttagcctgtgactcaactaaaccaaggacacctacctaattctttcaggtgttccattcttacagagcatgatttcctgctgtaccttcaatatccactgaaagacgcagtcatttacttaaagcaaggtcggaaaattagaattgaatacttaaggggtaaagaataagtgtttaacagttatcaaatttatttccagagttctaatcctctttatattcacttttattttatttttgagaaagggtctcgctccgtcacccaggctggagtgcagtggcatgatctcagctcactgcaacctctgcctcctgggttcaggttttttttccacctcagcctccggagtagctggaactacaggcatgcaccaccaccacactcggctaattcttgtatttttagtagagacgggtttcaccattttgcccaggctggtcttgaactcctgggctcaactgatctgcctaccttggccgcccaaagtgctggggtttcaggcgtgagcaacggcaagcagctcctctttatattta

SEQ ID NO: 128815 - DNA, 426 bp, Homo sapiens
gaattcctccagcatctgctatatgccaagctttgtgtttctcattcaattcatttaccaaaaattgaaagagtgcttacactgttcctggcactggggacacamtaatgaacaggacagatatgatccctgccctcatagagcttccaggctagtgggaaggcacagggacaggcaataacaaggaatcaatcaaataagtccgtgtaaattcagatgcagacaaagaacggaatgtggcagtgatggggggtcatggaggaagaaatgaattagggttgtagcttcaagggcgacctctgaaagttactttggtattgtgagatttatttctattaatacttcctttcgctatgtactacagtattatctcctcaggaaagtgaggctcagagaggttaattaacttgcccaaaatcacacagc

SEQ ID NO: 128816 - DNA, 633 bp, Homo sapiens
acattttcccatcattcattgactattttcttattttctggcacaaggaaaagatgccccaggctcatcttgttctttctgtgactcagcccaggaatgagccatttcctcagggagacacttagaatccccaaactcccaccaaatagcatttataattgagaattacatgttaagaattcagttagctttctaaatttaagcatatgcatatcaacaaatgttaaaaactcaaaacacaatgtatacgttgaaggaatagataaaaatgggaagatagaccagtgaaaagtttttatggtcatggtctttgtttatttcttcttgagttataccatcagctgaaaaatgtacatacctcccaacattttatttgcagtctaagtctcttcagtgttaacttgcatctagttagtcggtttcctttctctgtggctggtttggtggcttagatggaccaaaasagttttggctgttgaccttgcaatatatccccatgaagatttactgaatgggacagggtgtagagttcaatccagtttgcagtttgagcataagaaagattctggaaaagacctgcttattgtatgtagtttgtacaaaccaaagatggtgtcctgggaaagaaatctg

SEQ ID NO: 128817 - DNA, 614 bp, Homo sapiens
ggctttttgatcactctgtattagtatctcatttgatcctctcaacaaccttgggaaatgggtcgtatcactcccattttacagaggagaaaactggctaaatactttgtctaggctcacacagtaagaagccaagccagaatccaaacccgactttggcagaagccacacttttttcataatattgcctttgaggtgctttccagacatgagagctctctttctcagtgatcattcacctcttaaagtatggtgcagagattaagagcataagctctgtggacagacagcccaaatcccagatcactacccatttgaccttgggaaagttttttttttttttagacaaagtttctctcttgttgctctggctggagtgcagtggcgcgatctcagctcactgtaacctctgcytcctgggttcaagcaattctcctgcctcggcctcccaaatagctggaactagagggccaccccaccatgcccggctaatttttgtatttttagtagagacagggtttcaccatgttgccaagctggtctcgaactcctaacctcaagtgatccgcctgcctcggcctcccaaagtgctgggactacaggcatgagccacc

SEQ ID NO: 128818 - DNA, 612 bp, Homo sapiens
ttagtacatatttgttgaatgaaagaaaggaatcagccactgctatagcatacaaagcacaaagccactccaacaaagtgggttttctccctcctgtcacgctaataccgaaccacaattgcataataagtgttaacaacttatgtatggcaagttattyttcctaatgaatggagggttctatctaactcctgatattgaaacttgagtggggaagaatcaatatgtaaatcaggcatgtggcctgggcctctcctggcaggacctgttctgaagttgatgtcacaagaactaggttccagccccagtctctaccacgtaactttgagaaagccagtttcctctctgagactctgtgttccccatctgaaaatgcggctcacttaccagagtgagaaggatttaaatggggtcacacgcatgaggcagaaaagctctttgcttatcctacatgttcatactctgagagggagtagttgggttttgaaaatttaaatggagacacagaccactagcagggggcccagtaaactacgagaaaggcagagaaatataaccaaattcttagtatgagacctttcagtaattccacattcatctccatgcttactg

SEQ ID NO: 128819 - DNA, 612 bp, Homo sapiens
ttagtacatatttgttgaatgaaagaaaggaatcagccactgctatagcatacaaagcacaaagccactccaacaaagtgggttttctccctcctgtcacgctaataccgaaccacaattgcataataagtgttaacaacttatgtatggcaagttatttttcctaatgaatggagggttctatctaactcctgatattgaaacttgagtggggaagaatcaatatgtaaatcaggcatgtggcctgggcctctcctggcaggacctgttctgaagttgatgtcacaagaactaggttccagccccagtctctaccacgtaactttgagaaagccagtttcctctctgagactctgtgttccccatctgaaaatgcggctcacttaccagagtgagaaggatttaaatggggtcrcacgcatgaggcagaaaagctctttgcttatcctacatgttcatactctgagagggagtagttgggttttgaaaatttaaatggagacacagaccactagcagggggcccagtaaactacgagaaaggcagagaaatataaccaaattcttagtatgagacctttcagtaattccacattcatctccatgcttactg

SEQ ID NO: 128820 - DNA, 612 bp, Homo sapiens
ttagtacatatttgttgaatgaaagaaaggaatcagccactgctatagcatacaaagcacaaagccactccaacaaagtgggttttctccctcctgtcacgctaataccgaaccacaattgcataataagtgttaacaacttatgtatggcaagttatttttcctaatgaatggagggttctatctaactcctgatattgaaacttgagtggggaagaatcaatatgtaaatcaggcatgtggcctgggcctctcctggcaggacctgttctgaagttgatgtcacaagaactaggttccagccccagtctctaccacgtaactttgagaaagccagtttcctctctgagactctgtgttccccatctgaaaatgcggctcacttaccagagtgagaaggatttaaatggggtcayacgcatgaggcagaaaagctctttgcttatcctacatgttcatactctgagagggagtagttgggttttgaaaatttaaatggagacacagaccactagcagggggcccagtaaactacgagaaaggcagagaaatataaccaaattcttagtatgagacctttcagtaattccacattcatctccatgcttactg

SEQ ID NO: 128821 - DNA, 697 bp, Homo sapiens
cttgggccttacctctcccagaaaaagcacaaggattgctcacccggccttcatgccggctatgcaggcccatttctaacacatccttctctagcctttagctcggaccaacaccaagtaccaccatttctataacttccattactcccctcctcctakgactacacatccctaaacctaattccactcttctctatttccttccaaaaaattccagcattttctggtgtgagatttgggagggataggaataagaaagaacactgatactacttctaagcatcccttctttataactacaaaagacaatctcacgtgcacagagtaatcaactcatgagtaaatatttaacatttcagtaaagacagtaagcacaaatgaaattttttaaatttttgtaaattttagggggtacaagtgcagttttgttacatggatattgagtagtggtgaagtctgagcttttagtgtagccatcacctgaatagcagacattgtacccaatgggtaatttttcattccttaccaccctcccgccttcccaccttttggactctccgatgttattatttcactctctgtgtccatgtgtacacactgtttagcccccacttacaagtgagaccatgtggtatctgattttccatttttgaattatttcacataggataatgatctccagttccatccatattgc

SEQ ID NO: 128822 - DNA, 697 bp, Homo sapiens
cttgggccttacctctcccagaaaaagcacaaggattgctcacccggccttcatgccggctatgcaggcccatttctaacacatccttctctagcctttagctcggaccaacaccaagtaccaccatttctataacttccattactcccctcctcctatgactacacatccctaaacctaattccactcttctctatttccttccaaaaaattccagcattttctggtgtgagatttgggagggataggaataagaaagaacactgatactacttctaagcatcccttctttataactacaaaagacaatctcacgtgcacagagtaatcaactcatgagtaaatatttaacatttcagtaaagacagtaagcacaaatgaaattttttaaatttttgtaaattttagggggtacaagtgcagttttgttacatggatattgagtagtggtgaagtctgagcttttagtgtagccatcacctgaatagcagacattgtacccaatggstaatttttcattccttaccaccctcccgccttcccaccttttggactctccgatgttattatttcactctctgtgtccatgtgtacacactgtttagcccccacttacaagtgagaccatgtggtatctgattttccatttttgaattatttcacataggataatgatctccagttccatccatattgc

SEQ ID NO: 128823 - DNA, 636 bp, Homo sapiens
tgagtctaagattctatgggcttatgagaggtaatgtgattaactctgggtgggctgatgacgattgcactgaataggcaatgactgtatctcaaaagagaaataggaattttacaggtggagagggatgtatacactggacrttttaggcagagaaaacagcaggagaaaaaggcactatattagcatgcctctcagctctatcttcttgcaacctctagaacacttgtctgtgccattcatttgtcaaataataatgttttgtctcatgacacctcttctattattgccttgaactatttatctcctgtgttacctaatttttcagatcttgtcactccaactagaatttaagtttgaaagaagaaaacccaatttaatagatcatcatgtctcccacagtgctttgcacaaggtcttaaatagagtggttgcttaatgaatacttgacttattgtaaagggaggaaagcagaataatcttgaacatatcctaaatttaccactcatcatcagagcctcctgtgaaataaagtttgttcactgtctcctcctgattatgtcaggatcatcaaaaagagtctttgagttccttctctgtgtccacaacaataaagactattgtggtatactaacg

SEQ ID NO: 128824 - DNA, 660 bp, Homo sapiens
tcatcatctactttaccaaaactttcaagaaaaataacacggtgataggacatattcctagctttaaaactttgaagctcacaaaactgatagattgacagccttggtatggatccaatcaaagctctcttgccataactgtaacaagaaaggggagaaaacgaatcacaaatatgggagacatatcttagcctaacagctcatcttcacgatgtggcattgttagttgtatttaccccaygttatgaaaaaaaaacagaattttaggcaacttaccaaaagccttataaaagccattttccataataggataaactaaataaacaagaaagttggagcaaagagacacaaaaaattagaaatgaagatgagggcagaagcaagaataagacatcaaaaacattgatatggctgtagaagataggctatatgtttggctatgagattcctagaagccaaagcaaagagagaaaagatcagttacaatttcacaaagtctatagaactttttttccctttggaccagaagtggaaaaagaaaactgcctatcagttttcatgaaattgacaccgtggtatcacaaatgtcaacataagcagtgtctctataaaattctgaaagagaatattccacatctcttactgtatgctgagatcata

SEQ ID NO: 128825 - DNA, 580 bp, Homo sapiens
agcacccctcacctggatgattgcactcacctcctcgctgctctctctgcttccactcctgcccccttctctcctcatggtatccagagggaccttctaaaagtgtgagttagattaagccgctcctctactcgatatctcctgccactgcctcatgctccctcatgcagagtcaatacccatgtccttatcatcacttaccagttctcggtctggtcccacacgttcccgccctcatcttctgccatctcccctttaccactgtgctccaggcaccctggtttgcttgcggatcagagctttgtaytttgcttttgctgtatccagaagaatctttgcccagatatcgacaagagtcccacacttccttctgtttaaacatcatgcattagagaagcctgtgattcacacacccttccctctctatcctggtatcctactttcctcttcttagcattttcatttattttcttttttttctgatttgtttattctctgtctaccctgctagattgcagggaggaatagggatcctctccgacgcaccactgtgtccccagcatccagctcctatgttagg

SEQ ID NO: 128826 - DNA, 582 bp, Homo sapiens
tccacctcccgggttcaagcaattctcctaccttagcctcccgagtagctgggactacaggcacatgccaccacgcccagctaatttttgtatttttttttagtagagatggagtttcaccatgttggccaggacagtcttaatctcttcaccttgtgatccgcccgccttgtcctcccaaagtgctgggattacaggcgtgagccaccgcaccrggccatcaacattttacagatgagaaagccaagttcatggaggttaagtaaagaacacacagaaagagagggagctggggattcaaatcataccatcagttcctttgaacggtttagtctgagaacagtcattctcttgcagcctacaccaggcttggcttcaccaaccagaaacttccagaagaggtcgtatatccactaatatgatgtatgaagacttccagcccaccaggccacggggaaacttggtcgccccgtaagtcccatgagttctatgtgttctcaagagcaggtccctcatgtccccctgcccggccccctggcccagtacctcgccactcctgctactgcaccctgggaatggctg

SEQ ID NO: 128827 - DNA, 582 bp, Homo sapiens
tccacctcccgggttcaagcaattctcctaccttagcctcccgagtagctgggactacaggcacatgccaccacgcccagctaatttttgtatttttttttagtagagatggagtttcaccatgttggccaggacagtcttaatctcttcaccttgtgatccgcccgccttgtcctcccaaagtgctgggattacaggcgtgagccaccgcaccaggccatcaacattttacagatgagaaagccaagttcatggaggttaagtaaagaacacacagaaagagarggagctggggattcaaatcataccatcagttcctttgaacggtttagtctgagaacagtcattctcttgcagcctacaccaggcttggcttcaccaaccagaaacttccagaagaggtcgtatatccactaatatgatgtatgaagacttccagcccaccaggccacggggaaacttggtcgccccgtaagtcccatgagttctatgtgttctcaagagcaggtccctcatgtccccctgcccggccccctggcccagtacctcgccactcctgctactgcaccctgggaatggctg

SEQ ID NO: 128828 - DNA, 513 bp, Homo sapiens
aaaagtgccaacatgtgttttttagtgactaaccatgattttaaaatatctgcactttataaagtgcttgcacgaaacatccaagacaattatcatgtaatgggctcaaaggaaaatcagatacagcaattcaccaagaatctgtgtccttatctaatcagattaatcgtctttcaatatgatgctgtaaaagacgcaaactgagcaagggcagagctggtcagcatttaaatgagatttttccaaaggcaaattcaaggacccaaaatactctgagaaggaacgccagtattttcrttactgaatcattttcctcttgagcataaggagacttccaagtgccctgaaagttattgtacttaaagatgcttttttaaaggtaaaatgtaaaaggaacaatgcagacatgttggtcattaaatttcatgtggtgttttttctgaagggtatgaagttaaaggctcattatcattaacataaatatagttcatcttaccctaagaccaagcaatt

SEQ ID NO: 128829 - DNA, 356 bp, Homo sapiens
ggatggcttagtgtgtcttgaagaatgcctgrggcatagtactgaacaaatacctgaacaagaaatgactgaaaataagcctttaatatatgtgtctttgaagttatattaactagtttctacatatttttcctgactaactggtaggcatccagttgtagctggaagttaagaaatcataaaaataaaacaaaaaaatctgaaaaagcaaaagagaattttatgtgtgtgtcatatcctacagtacattcaatctatgtaagccttgtctttggtatgtaaatctgcatctccaacctagattatgatgctgtaaatatatatcttgccatttcaggtactatgtcctattgtga

SEQ ID NO: 128830 - DNA, 356 bp, Homo sapiens
ggatggcttagtgtgtcttgaagaatgcctgaggcatagtactgaacaaatacctgaacaagaaatgactgaaaatargcctttaatatatgtgtctttgaagttatattaactagtttctacatatttttcctgactaactggtaggcatccagttgtagctggaagttaagaaatcataaaaataaaacaaaaaaatctgaaaaagcaaaagagaattttatgtgtgtgtcatatcctacagtacattcaatctatgtaagccttgtctttggtatgtaaatctgcatctccaacctagattatgatgctgtaaatatatatcttgccatttcaggtactatgtcctattgtga

SEQ ID NO: 128831 - DNA, 356 bp, Homo sapiens
ggatggcttagtgtgtcttgaagaatgcctgaggcatagtactgaacaaatacctgaacaagaaatgactgaaaataagcctttaatatatgtgtctttgaagttatattaactagtttctacatatttttcctgactaactggtaggcatccagttgtagctggaagttaagaaatcataaaaataaaacaaaaaaatctgaaaaagcaaaagagaattttatgtgtgtgtcatatcctacrgtacattcaatctatgtaagccttgtctttggtatgtaaatctgcatctccaacctagattatgatgctgtaaatatatatcttgccatttcaggtactatgtcctattgtga

SEQ ID NO: 128832 - DNA, 613 bp, Homo sapiens
tggcctcagggtagctgggcttcttactcagtggctcagggctccacgagcaaatgttctagtgaacaaagcagggctgcatgaacttagtgacagcatctctgtcattctctgttgggtgaagccttccagctgtctttgtgctgctataacaaaatgccatagactgggtcatttagaaagagcagaaatttatttctcacagttctggaggctgggaagtccaaaatcaaggtgccagtagattccttgtctggtgaggatcctatctctgctttcaagatgttgtctttttttaaacattttaattttttgtgggtgtatagtagctgtatatatttatggggtacatgaaatgttttgatacaggaatgtagcatgtaataatcacatcatggaaaattgggtaagcatcccctcaagcatttatcctttggtgttacaagcaatccaattatactattttcattactttaaacagtataattaatttattattgactataatccccckgttgtactatcgaatactaggtcttattcattctttttatttttatttttttaaacccattagccatcccatctgtcctctcactacccttcctagcct

SEQ ID NO: 128833 - DNA, 515 bp, Homo sapiens
tcagttagggtgttcctggcgaaaactatgattagtgggtgtttcctttggttacaagcccttgtgctttgatatttcatatgtgaatttaaagaaccttacacatgtgcccagcacccagagacaggctacattttatggtggtttcagtgggtcaatctgtctgcaaattccaatgtactccaggtcttctgggattgcaccccctaaccccacacttctcatcttggaggggtcctgtctctctcgtcacatgccatgtctgcctggcaggctcttgctctcttctgtctttggaaaacctacctattcgcccttcagggatcagtggcatctttttcaaagccttactagatctctcattcagaaatattttctccctcctatgtgccttcaaagattgcctacatctttgttagaatctttgtgaccaaaaaaaattgtgaaaggagaaagttatttaycgtttctctcatccagctatcttctaagatgggtggagtccatgcaggctt

SEQ ID NO: 128834 - DNA, 552 bp, Homo sapiens
tttctacttttcccaattagtatttgtgtttcaaccaccctgcatggaaacatgggttatgaaatgccttcacaagtatggtagaaaatatgctgctattgtgtgttgccttggacttctagaagtctaggtgttggtggttattatatggcgatagtaaagtaaaatcctccctactgttctagtacccacaatactacttttcatactttagctactttaccttcagtctctctgtcaacctctgatctaaagacttctttactaaataacattcttcttgcctaatactgtattatggacttcatcagggaagggactaatccatctttgcatgctaacrtttaagctgaaataaagtaatccctcaattaacattttgcagaaacctccttaggttcccctacaaacctgcccctattttagttaatagaatgcattcccactgacatgctggaaatttcagcattgtctttggtcctccctccagtctaatctgaatctcacaagtcatcaaggcctgtggcttctgtctctgaaatgtcttttgag

SEQ ID NO: 128835 - DNA, 644 bp, Homo sapiens
tggtgttggttctgtgcaacactggtctgtgaaggagctcaggcaacttgttggaaggacagtggggggcgattgattagtcatgctgccatggatgagatacagtaaaggggcactcctctactcccttactccctaaatgggcattccatttacaataccatcaaaaagaataaaatactcaggaataaatttaacaaaagaagtgcaagacttgtacactgaaaattacaaaattacaaaatactcttgggatttaacacacctcatctagttccagcttcttattttacaaatgaggaaacagatattcagagttgaggtaagtccagcaagatcatacaatcaagggagcagcagggttgaatccaaaatcyagccctctagctttccatttgagtattgttttcaacatcaactcttttttcactctctcataaggtctgtagagggctgatttttatgagacaaggagagattagggacctggctggtgtgtgtaatgcctgatacatggttcatgataaccagctgctccccgctcccagtgtggtttctgatctctctgccccctcccagcgggactgcaaaccacaagctgtttcagccccagcaggaagaatgagggggccttcccatacaga

SEQ ID NO: 128836 - DNA, 505 bp, Homo sapiens
gggcacaaaaactgcagagagtgacctggggaaggagaaattaattcaacctgtggtataatgcaacttagaaactgtcatgggagacataacatttgctataagtgctctgccctatagttcaaagtatttttcctcttttgtgcacatatataccagcaggagctctaatgcaaattctttttttaatctgtctccggttacatgctgattgtagggttattggtttatttgtattttggtttccttttaaattgcatcctttaatacaaaactgtgagcatagygactcgagaaacaatataaatgaatttttgaagcatggagtaaaagtcttcatcagaactatagaggtgttttagttatttatttgggatctcccagcatataaagatagtatttgctccacttcttgagaactgaaggattgaaaaagaggtgacttctgttgaaaatccttctctccaataatttctgtattaataaataggagaactatcatatt

SEQ ID NO: 128837 - DNA, 451 bp, Homo sapiens
tgtcctccttgttctgggaacatgccagcccaggcatgcctcaggggatttgccctttctgtggcctctttttggacaactcttctgtcatctatctgcctggttcactccctcatcccttcagacctttgcttgaatgtctctttcttagtgaggaatttcttgattataatatttaaaagtggaaataacagttgcactgcttagtattgaaatacrttttctagctttcattttctccattatatttctcattatctgatgactgaataggttacttatcactttccagtagaacataacctctatgaaggcagaaaaaaaaaaaagctttaatgttttgtttgctattgtctccccttggccttacttggtgtcttatgtaccataaacacccattaaataaataattgagttaggcattactaatagccgcattttagtagctgaa

SEQ ID NO: 128838 - DNA, 451 bp, Homo sapiens
tgtcctccttgttctgggaacatgccagcccaggcatgcctcaggggatttgccctttctgtggcctctttttggacaactcttctgtcatctatctgcctggttcactccctcatcccttcagacctttgcttgaatgtctctttcttagtgaggaatttcttgattataatatttaaaagtggaaataacagttgcactgcttagtattgaaatacgttttctagctttcattttctccattatatttcycattatctgatgactgaataggttacttatcactttccagtagaacataacctctatgaaggcagaaaaaaaaaaaagctttaatgttttgtttgctattgtctccccttggccttacttggtgtcttatgtaccataaacacccattaaataaataattgagttaggcattactaatagccgcattttagtagctgaa

SEQ ID NO: 128839 - DNA, 544 bp, Homo sapiens
atatttaaaaagatattgttaatataataaaatattcctgaaattgctaaaagaagtactgcaagtaaataatatatgggtatgtgtttartggggtattggaagcaaagaaaaatagaaaacaatattccagggctgaaataattctaaaatcttggattgaaagattccaaaagatgaataagataaatttaaaaggatatacataagcccaggcatggtggcttatgcctttaagcccagtactttgggaggcccaggctggcggatcactcgaggtcaagagttcaagaccagcctggccaatgtgacgaaaccctgtctctactaaaaatataaaacttagctgggtgtggtggtggacatctgtagtctctgctactcaagagactaaggtaggagaatcccttaaaacagagaggcagaggttgcagtgagccaagatcactgcaatccagcctgggtgacagagtaagactctgtcaaaaaaaaaaaaaagtgatctacataaatgcatcatggggtatgggacattcgagagctc

SEQ ID NO: 128840 - DNA, 544 bp, Homo sapiens
atatttaaaaagatattgttaatataataaaatattcctgaaattgctaaaagaagtactgcaagtaaataatatatgggtatgtgtttaatggggtattggaagcaaagaaaaatagaaaacaatattccagggctgaaataattctaaaatcttggattgaaagattccaaaagatgaataagataaatttaaaagkatatacataagcccaggcatggtggcttatgcctttaagcccagtactttgggaggcccaggctggcggatcactcgaggtcaagagttcaagaccagcctggccaatgtgacgaaaccctgtctctactaaaaatataaaacttagctgggtgtggtggtggacatctgtagtctctgctactcaagagactaaggtaggagaatcccttaaaacagagaggcagaggttgcagtgagccaagatcactgcaatccagcctgggtgacagagtaagactctgtcaaaaaaaaaaaaaagtgatctacataaatgcatcatggggtatgggacattcgagagctc

SEQ ID NO: 128841 - DNA, 544 bp, Homo sapiens
atatttaaaaagatattgttaatataataaaatattcctgaaattgctaaaagaagtactgcaagtaaataatatatgggtatgtgtttaatggggtattggaagcaaagaaaaatagaaaacaatattccagggctgaaataattctaaaatcttggattgaaagattccaaaagatgaataagataaatttaaaaggatatacataagcccaggcatggtggcttatgcctttaagcccagtactttgggaggcccaggctggcggatcactcgaggtcaagagttcaagaccagcctggccaatgtgacgaaaccctgtctctactaaaaatataaaacttagctgggtgtggtggtggacatctgtagtctctgctactcaagagrctaaggtaggagaatcccttaaaacagagaggcagaggttgcagtgagccaagatcactgcaatccagcctgggtgacagagtaagactctgtcaaaaaaaaaaaaaagtgatctacataaatgcatcatggggtatgggacattcgagagctc

SEQ ID NO: 128842 - DNA, 613 bp, Homo sapiens
tagttttttgtgctcattttaaaaaccgcaatgaaagacctaaattcactcttaaaatataagccattgccagaaattaaattatctcagatgactaaaataattacttttaccctggcctagaagctgggagaaatcaaaagcaaatatttacatagacagtagatgatggtagatataaatatttatatagatagtagttcactgatatggtttggatttgtgtccctgccccaatctcatgtcaaattgtaatccccaatgctggaggaggtccccartgttggaggagggacctggttggaggcgattggatcatgcaggcagattttccccttgctgttctcatgatagtgagttatcacaagatttggttgtttaaaactgtgtagcaccacccctctttgctctcttccttcttctccagccatgtaggatgtgcctgcttctccctcaccttccgccttgagtgaaagtttcctgaggcctccccagccatgctttctatacagcctgaagagccatgagccaattaaacctcttttctttataaattacccagtctcaggtagttctttatagcaatgctataaagaacagtccaatacatcca

SEQ ID NO: 128843 - DNA, 616 bp, Homo sapiens
gaatcctggctctgccaccttcgtgctatgtgatatcagccaagttacttgccctctctgattctcaaatgctcggaggccctttgacctctagagtctatgggacctgagtgaccacagggctctggtttgttggtggctgcctctttatttaactccttttctcaaatayggtctatgggctttgcttaaagtgaggtgtcctgtgcacactcttctccatgactttgaggccgtgagaaggcccgccctgcagaaggactgaggaaactagtgctggagtctcctttcttgtatcagtgaaggaaggggagagaggagataaagtgctcaggttacagaatgtgaggatcgtgccccttttttccaactgaagacattcctaggcattttatctcccctgttgcaacttctaaatcacaaaaaccttatgcatccagtttggctgacatccacctgcaatgggagtgagtgagattgagccactcctcaggtgaatggaaaattaaggccaaccaaggcccaccccatgccccactgtggggtctaaaaggagcaggcactggcctgctttctttttccctaaagaaagctctttggggacccagcagaaaca

SEQ ID NO: 128844 - DNA, 616 bp, Homo sapiens
gaatcctggctctgccaccttcgtgctatgtgatatcagccaagttacttgccctctctgattctcaaatgctcggaggccctttgacctctagagtctatgggacctgagtgaccacagggctctggtttgttggtggctgcctctttatttaactccttttctcaaatacggtctatgggctttgcttaaagtgaggtgtcctgtgcacactcttctccatgactttgaggccgtgagaaggcccgccctgcagaaggactgaggaaactagtgctggagtctcytttcttgtatcagtgaaggaaggggagagaggagataaagtgctcaggttacagaatgtgaggatcgtgccccttttttccaactgaagacattcctaggcattttatctcccctgttgcaacttctaaatcacaaaaaccttatgcatccagtttggctgacatccacctgcaatgggagtgagtgagattgagccactcctcaggtgaatggaaaattaaggccaaccaaggcccaccccatgccccactgtggggtctaaaaggagcaggcactggcctgctttctttttccctaaagaaagctctttggggacccagcagaaaca

SEQ ID NO: 128845 - DNA, 616 bp, Homo sapiens
gaatcctggctctgccaccttcgtgctatgtgatatcagccaagttacttgccctctctgattctcaaatgctcggaggccctttgacctctagagtctatgggacctgagtgaccacagggctctggtttgttggtggctgcctctttatttaactccttttctcaaatacggtctatgggctttgcttaaagtgaggtgtcctgtgcacactcttctccatgactttgaggccgtgagaaggcccgccctgcagaaggactgaggaaactagtgctggagtctcctttcttgtatcagtgaaggaaggggagagaggagataaagtgctcaggttacagaatgtgaggatcgtgccccttttttccaactgaagacattcctaggcrttttatctcccctgttgcaacttctaaatcacaaaaaccttatgcatccagtttggctgacatccacctgcaatgggagtgagtgagattgagccactcctcaggtgaatggaaaattaaggccaaccaaggcccaccccatgccccactgtggggtctaaaaggagcaggcactggcctgctttctttttccctaaagaaagctctttggggacccagcagaaaca

SEQ ID NO: 128846 - DNA, 616 bp, Homo sapiens
gaatcctggctctgccaccttcgtgctatgtgatatcagccaagttacttgccctctctgattctcaaatgctcggaggccctttgacctctagagtctatgggacctgagtgaccacagggctctggtttgttggtggctgcctctttatttaactccttttctcaaatacggtctatgggctttgcttaaagtgaggtgtcctgtgcacactcttctccatgactttgaggccgtgagaaggcccgccctgcagaaggactgaggaaactagtgctggagtctcctttcttgtatcagtgaaggaaggggagagaggagataaagtgctcaggttacagaatgtgaggatcgtgccccttttttccaactgaagacattcctaggcattttatctcccctgttgcaactyctaaatcacaaaaaccttatgcatccagtttggctgacatccacctgcaatgggagtgagtgagattgagccactcctcaggtgaatggaaaattaaggccaaccaaggcccaccccatgccccactgtggggtctaaaaggagcaggcactggcctgctttctttttccctaaagaaagctctttggggacccagcagaaaca

SEQ ID NO: 128847 - DNA, 596 bp, Homo sapiens
tttggttaatttccaggactctgaaaatgttaattttgacatttttgccagtgctctcattgttgttaaggaaggattttcagaagtcccttattctgacattctgcaagtgtttctcttggtttgagttttcatgtgattgtttggggtagttgtttttatttttgttgttgtcttgattggtttttggagagatggttttctactggatactcctaggattcttttctttgaaggcaaacattcattttgttaggrtctgtcatctcagcattgacttctctaaatcaatttacccttcggtcagaaaattcaagtcttcctttatttcaggaaagttgttctgaatattgagtctaagtttttttctattccatagttcaggtttcctaaccaggggacagaatgtcctcccctgcactgaatggcctctgcctttgtctactgaagactgcctgagtatcacttgcaatttaaaacagggcctgtctgtagagacttctctgtacccaggacagtttagaggcgtgtctgtgtttccacaccaacagtaattatagtaataatgattactacaaggtgagcatctaatgctt

SEQ ID NO: 128848 - DNA, 596 bp, Homo sapiens
tttggttaatttccaggactctgaaaatgttaattttgacatttttgccagtgctctcattgttgttaaggaaggattttcagaagtcccttattctgacattctgcaagtgtttctcttggtttgagttttcatgtgattgtttggggtagttgtttttatttttgttgttgtcttgattggtttttggagagatggttttctactggatactcctaggattcttttctttgaaggcaaacattcattttgttaggatctgtcatctcagcattgacttctctaaatcaatttacccttcrgtcagaaaattcaagtcttcctttatttcaggaaagttgttctgaatattgagtctaagtttttttctattccatagttcaggtttcctaaccaggggacagaatgtcctcccctgcactgaatggcctctgcctttgtctactgaagactgcctgagtatcacttgcaatttaaaacagggcctgtctgtagagacttctctgtacccaggacagtttagaggcgtgtctgtgtttccacaccaacagtaattatagtaataatgattactacaaggtgagcatctaatgctt

SEQ ID NO: 128849 - DNA, 633 bp, Homo sapiens
caaacattcattttgttaggatctgtcatctcagcattgacttctctaaatcaatttacccttcggtcagaaaattcaagtcttcctttatttcaggaaagttgttctgaatattgagtctaagtttttttctattccatagttcaggtttcctaaccaggggacagaatgtcctcccctgcactgaatggcctctgcctttgtctactgaagactgcctgagtatcacttgcaatttaaaacagggcctgtctgtagagmcttctctgtacccaggacagtttagaggcgtgtctgtgtttccacaccaacagtaattatagtaataatgattactacaaggtgagcatctaatgctttgaaatctgatatcatttaatgaccccagctaccctgtgaggtgggtattatcttcatttgcagatgaagatactgcagcttagtcagcagactaagtcacctaaatgctctgtcagaagcggaatttgtactcaggaatggccaactgcaaagtccatgtgcttgaacagtatggcatactgatacatgcacctgccatgaccagaacacaatacagtgatctggcagcacttcgtggctcaccatctctgctatactgataacaacttgagg

SEQ ID NO: 128850 - DNA, 633 bp, Homo sapiens
caaacattcattttgttaggatctgtcatctcagcattgacttctctaaatcaatttacccttcggtcagaaaattcaagtcttcctttatttcaggaaagttgttctgaatattgagtctaagtttttttctattccatagttcaggtttcctaaccaggggacagaatgtcctcccctgcactgaatggcctctgcctttgtctactgaagactgcctgagtatcacttgcaatttaaaacagggcctgtctgtagagacttctctgtacccaggacagtttagaggcgtgtctgtgtttccacaccaacagtaattatagtaataatgattactacaaggtgagcatctaatgctttgaaatctgatatcatttaatgaccccagctaccctgtgaggtgggtattatcttcatttgcagatgaagatactgcagcttagtcagcagactaagtcayctaaatgctctgtcagaagcggaatttgtactcaggaatggccaactgcaaagtccatgtgcttgaacagtatggcatactgatacatgcacctgccatgaccagaacacaatacagtgatctggcagcacttcgtggctcaccatctctgctatactgataacaacttgagg

SEQ ID NO: 128851 - DNA, 596 bp, Homo sapiens
  misc_feature (1)...(596): n = A,T,C or G
gttagggttgcccagtgcaaagatagcaagtcatgtgacacatgggccacctcacccctcctgcagccattgataactttcttctttgaacatggcattctttcgctctaagccctngtagatttcagaatccttctatgtccgggggttaaagcagcsaccaccaatctattggtgctgacatgaattcaaaagatactttctatcccttatctaaatagttcataagatgatgaggctgaactatggaacaaatgtagtccatcagagatttctagaaaaaaaaaacaactctcaatagtcctagaagtttggaaatgagtattaatcccaggataatccacacacatcttgtcttatggcctgatgccaagtgatgtggcccttatctaatagcacatttgcattttaaatgagtaaagctggttaaacctctttttctaatttcagctattattttatctacaggggcctcatagacattcactccacccaacaaccacagaatatacattcttcctatctgtacacagaacatattctcagatcaaccatatgctgagtcataaagcaagtctcaataaattttaaaaaat

SEQ ID NO: 128852 - DNA, 596 bp, Homo sapiens
  misc_feature (1)...(596): n = A,T,C or G
gttagggttgcccagtgcaaagatagcaagtcatgtgacacatgggccacctcacccctcctgcagccattgataactttcttctttgaacatggcattctttcgctctaagccctngtagatttcagaatccttctatgtccgggggttaaagcagcgaccaccaatctattggtgctgacatgaattcaaaagatactttctatcccttatctaaatagttcataagatgatgaggctgaactatggaacaaatgtagtccatcagagatttctagaaaaaaaaaacaactctcaatagtcctagaagtttggaaatgagtattaatcccaggataatccasacacatcttgtcttatggcctgatgccaagtgatgtggcccttatctaatagcacatttgcattttaaatgagtaaagctggttaaacctctttttctaatttcagctattattttatctacaggggcctcatagacattcactccacccaacaaccacagaatatacattcttcctatctgtacacagaacatattctcagatcaaccatatgctgagtcataaagcaagtctcaataaattttaaaaaat

SEQ ID NO: 128853 - DNA, 471 bp, Homo sapiens
tacacccacacttaacagctgtagccagacatgatgtgacagagaaagaaaatcagtgaaaatccagtccatatgcacacacttcctagacacacctgcacagatcactgaaracaggaaaccataatctcacaggcacacaaacatacacaccgccagtctcctttcagaccctctgggaagctggcttcaacccaagagcattctgcctcctaaagtcttcagggaatgggggtcagttgactcccttcccctcccttctccaagctgagtttagggcagcagggacacagtcctccagcagacatagggaggggaccctgggcagccgatcttaaggacaccttgtctagcatcatatttagcccaaactgaggccagctactgggacttaggggctgtccttccatccccccaatccatttcccccaccatcccagcctcatgccccagcattatttttcagaaaaa

SEQ ID NO: 128854 - DNA, 657 bp, Homo sapiens
caggatgtctcttctgtgattatagaagattccaagttctatcttgctagtaaactctttccattgacatcctcccttactgactttgatgtagacagccactatatggagaaacccatgttgtaaggaactcagggtaacctctggctggcagttagcaggagagtgaggccctctgtctgagagccttcaagaaactgggtcctgccaacacccatgtgtggttggaagtggatccttcccttgtaacagatgagatgccagccctagccaacatctcataaaaaaccttgaagcaaaagacccagctaagccatacccagactcttgacccacagatattgtggataataaatgtgtgtcttcttaagctgctaactttgtggtaatttgttaagcagcagcaaataactaatacaccactagtatacaaatgcaaagtttcctaactataagaactataattttttaaaaatgaggaaaaacaaaccacactttgaaaagcatatatatgtatatgcatayatacatacacacaatacatatctctgtgtgtgtgtatacatttatacttatgtttatgtatttgcatatgtatgacatgtaaacagaaagcagaaggaaattatattaagatcaaacatagctgtcatatca

SEQ ID NO: 128855 - DNA, 569 bp, Homo sapiens
gactggcgttgagtgtccatggcttttccaggtggatgatgcaggctgttggtgaatctaccattctggggtctggaggactgtggccctcttctcacaacccactaggtggtgccccagtagggactctgtgtggggacttcaaccccacatctcccttctgcactaccctagcagaggttctccatgagggcccygcccctgcagcaaactgcctgggtatccaggcatttccatacagcatttgaaatctagacagaggttcccaaacctcaattcttgacttctgcacacctgcaggctcaacaaaacatggaatctggcaaggtttgggcttctaccctctgaagccacagcccaagctgtatgttggctcctttcagccatggctggagcagctgggacatagggtaccaagtccataggctgcacacagcatggggaccctaggcccggaccatgaaaccactttttcctcctgggcctccaggcctgtgatgggagcacctgctgtgaagacctctgaaatgtcctggaggcattttccccattgttttggggattaatat

SEQ ID NO: 128856 - DNA, 569 bp, Homo sapiens
gactggcgttgagtgtccatggcttttccaggtggatgatgcaggctgttggtgaatctaccattctggggtctggaggactgtggccctcttctcacaacccactaggtggtgccccagtagggactctgtgtggggacttcaaccccacatctcccttctgcactaccctagcagaggttctccatgagggccccgcccctgcagcaaactgcctgggtatccaggcatttccatacagcwtttgaaatctagacagaggttcccaaacctcaattcttgacttctgcacacctgcaggctcaacaaaacatggaatctggcaaggtttgggcttctaccctctgaagccacagcccaagctgtatgttggctcctttcagccatggctggagcagctgggacatagggtaccaagtccataggctgcacacagcatggggaccctaggcccggaccatgaaaccactttttcctcctgggcctccaggcctgtgatgggagcacctgctgtgaagacctctgaaatgtcctggaggcattttccccattgttttggggattaatat

SEQ ID NO: 128857 - DNA, 538 bp, Homo sapiens
tgaattctaaaattcaactctataattgagggatttatattatctatagactatatattatgaaccaatatatgctgtcttgaaaaccttgaaatctttatgaaaatatattataaaaaaggagttaaagctcaaatacttataaggatgaaggaggttacctaagtaagtgaagtactcaggtgggcacagtagcaaactggagaatatgtgcctcctacccagggcaacctctgcgcagcagaccaagcagtgatgtggttctggggacaccagatttgtttcttaagcctgaggtccagacttctgcatgagtccactaaagtttacatgttgactcaattcaaagaggcaaagaacaaatctatacgccacatttagactatagctcttgtgtttttatatttgctgtgaatgygttgctaaatgattgtgtataaaccaagtatttgcatgtggaactttttctctgtctagtatcgtatgtttattatatttctcaagccctgatatatatataataaaaattgctgttaac

SEQ ID NO: 128858 - DNA, 588 bp, Homo sapiens
gctgctgggagaggaaataagttattcgcactctgatctggggcatcccttacttgctgtgggcatctacccaagcaggagcattgcttatgtggatgctatgctgcccacgtggctaatctgcatgtgtctcctgggacaaaataataagcgcttccatttgtatggcacttcaaagtctacagagctctgtcgtaatttttttttttttatacacaacaaccaacttgtaagacatgcaagtgtcattggcttcattttatagatgaaaaaatgaaggctcagcatcttgttaaggttatacatctagggaacttcaaagccaggtaatctcctcatcaaggaatatacttttagcataaaaaatctcaaggccttcttttgagccctaaagatacctcttaccttgtcactgaacataatgttgaaacatgccaaataaagggattcagggaaacagggtgtcaagttatgattcagttttmattcttgagggtacagttttattctagtgaaatcatattattaataggtttcatcctagtttgatttagagggagaaagaaaaagagagagtgaaagagatag

SEQ ID NO: 128859 - DNA, 607 bp, Homo sapiens
  misc_feature (1)...(607): n = A,T,C or G
agctggggagaaaatatttgtaaatggattgttagaactgggcttttaatgaaagtgtatacagaattccaaagaggcacagaggggaagggggttaggaataacatcatggtggaggtgatatttcacctgggcctggaaagatgagaatgccaggaatgcaaggtggagaaggacaatccaaaaagaggaaataattagagcatgagcaaaacacactgtttatggggaagacagccattatggctggaacactggaggcgtggggaagaggagttgagaaatgacaggcatgaggctatgaaattagggctgtcttgattgggaagggtgtcagatgcctccttaacagattggacttcacccactgggcatcagaaattattcaattcgacaaatctttattgagcatctgccagaagtaggcactgctatgagatgtgataaagacaaagacacagcttctatccttagaaaacttaaagcttagtaaggagataaggggggcccgaaantttactccttcattaattatagcwtatttatttaacaaaatatatagataacaatctattaagacaataaatataaacaaaatacagtcagt

SEQ ID NO: 128860 - DNA, 495 bp, Homo sapiens
tccttacacaatttttatttaacaactaaaagggtgattctaggttactgtaattaagctcctcaaagccttcatttataaagatccttccagagttaccattttattaaagccaaagaaaaattacattgatacttgaagcattttcatatgtaaatgtttctatatattaaccatgaaagttgcagcactccacttcctcttctacttttctctcattttgattgctttttatctgtaggaattatattctttaaaaaattagctatattttaatttatcagatgaygtattatgcccattaagttgtttcattttaacttgtccatggcctagaagcccaaagaaatggtattagtaggaatgacattgaatttcaggagcacattgactggtgcattaatatgggactatgttctaaattgttaattatgccaacatgataaaatatatttaatcaagtatattatttcattttttggtgagggcatttat

SEQ ID NO: 128861 - DNA, 517 bp, Homo sapiens
attttgctgctctttaaagcttccttaaggtttttcaagagcgtacaacataggctgcttctaagtgtatttttatttcctagctcttagcatttctcaccttatcattataactttaaatttaaacagaatacaaattgtgtacacagatgggtgtgtcactattgcactgtcacttatgtaagtgcagtttagcatttcttctttccttttaatcaaaatgaggaaatagaaaatgttttgttatggtagttttacacatacacccacaaggaaatgtgtatctagagtctgtgggaactgtgactgatacatttcagggaataaaatgtatgatggctaaaattttaactctgccaaatgttcacggggaaagaaaaattaacaaactcacattttacactttattttagcctagtctctgccttgtttacatctatatgataatgaagctrtacttgtctttccacaacagtgtattttataagttgtaccttttgtttaagggagccttctt

SEQ ID NO: 128862 - DNA, 633 bp, Homo sapiens
ttcttacattcactgcattaaaggaatatttatggctttggtaatattttaaatttcaaattaaaaaatttgaatatctgaattaagtatctctgatttaactctgtgtgtgtgtgygtgtgtgtgtgtgtgtgtgtgttgggaggaggaatagaccttggaattgttttttcaaaactttttttataatagtgcctaatctcagttggcaaggaatagctgtccagaatgctgcatagatctagtgaaaagatttagggaagttgtaactagtttaataaccatctgtggagtgacatagattgacacacccaattacacaagacctgagtctgagaactgttgatgtgcaatcatcccatcagcatctgctcatcattatcaacaacaataatggctcaactatttctttgaggccacatgaaaagacagtgtacccatagcaaaggataagtcagacctgaaaaaaacatagccctctgcatccccttgttcccaaacttctttttaaacataaccttttgtgaagttctgaaagaattcattttatgttttctttttattaatttttcttcttaaataccatgtctttctggctgaaatccttgccaaaaccaggaagggccagtgtac

SEQ ID NO: 128863 - DNA, 633 bp, Homo sapiens
ttcttacattcactgcattaaaggaatatttatggctttggtaatattttaaatttcaaattaaaaaatttgaatatctgaattaagtatctctgatttaactctgtgtgtgtgtgtgtgtgtgtgtgtgtgtgtgtgttgggaggaggaatagaccttggaattgttttttcaaaactttttttataatagtgcctaatctcagttggcaaggaatagctgtccagaatgctgcatagatctagtgaaaagatttagggaagttgtaactagtttaataaccatctgtggagtgacatagattgacacacccaattacacaagacctgagtctgagaactgttgatgtgcaatcatcccatcagcatctgctcrtcattatcaacaacaataatggctcaactatttctttgaggccacatgaaaagacagtgtacccatagcaaaggataagtcagacctgaaaaaaacatagccctctgcatccccttgttcccaaacttctttttaaacataaccttttgtgaagttctgaaagaattcattttatgttttctttttattaatttttcttcttaaataccatgtctttctggctgaaatccttgccaaaaccaggaagggccagtgtac

SEQ ID NO: 128864 - DNA, 633 bp, Homo sapiens
ttcttacattcactgcattaaaggaatatttatggctttggtaatattttaaatttcaaattaaaaaatttgaatatctgaattaagtatctctgatttaactctgtgtgtgtgtgtgtgtgtgtgtgtgtgtgtgtgttgggaggaggaatagaccttggaattgttttttcaaaactttttttataatagtgcctaatctcagttggcaaggaatagctgtccagaatgctgcatagatctagtgaaaagatttagggaagttgtaactagtttaataaccatctgtggagtgacatagattgacacacccaattacacaagacctgagtctgagaactgttgatgtgcaatcatcccatcagcatctgctcatcattatcaacaacaataatggctcaactatttctttgaggccacatgaaaagacagtgtacccatagcaaargataagtcagacctgaaaaaaacatagccctctgcatccccttgttcccaaacttctttttaaacataaccttttgtgaagttctgaaagaattcattttatgttttctttttattaatttttcttcttaaataccatgtctttctggctgaaatccttgccaaaaccaggaagggccagtgtac

SEQ ID NO: 128865 - DNA, 569 bp, Homo sapiens
gagccaactgcaatatactccagtgccttgtggatattagttgttaatgaaaactgaggattgtagggtgcattgccaggaccaaaagcaaaatgcaaaaggtaagtttcagaggtgggtggagagaccatacaccatccctgggrtaatgtgactgaatccaaagcaggttattttcatgtcttcttttgaaagagtgatacctatgtcttggctgatgcaggggaggtagaggaaaatttattagatatttggatatgtgatgacctcagaaggtaaagtgaggaaaaataactacttacttattaaggggtttctctgaaccttgatgatagcatcaagaaagtaatgttagtttccttattttctttaggatgaagacttagtgctggaccaaaaacaaaacaaaacaaagatcccgaaacttaaagaaattgttgtggatgcacgatgattttgtagctcactgtagctattggggacttagcgctccagaaaacagcctctcagagtgatggtcactgtcagtgaatagactttgagtgaagggtgtaattgcagcctatact

SEQ ID NO: 128866 - DNA, 286 bp, Homo sapiens
aaaggttggtggagatgccagtataaaaattagagaaatggacaggtgaaagaaatttcagaggcagaattgatagagctaagccattgactggatgtagaaccagtgaggctgaagaaacccaaagatgactgatcaccaattcatctcttcactcacatcctacccactgtcaycttgtcgtaaacttccagactaccttcacctctctcttcaataacgtgagttatttgttcaaagtctgccttttctgttagaacatgagctcactatagcagggacagtg

SEQ ID NO: 128867 - DNA, 495 bp, Homo sapiens
ggtgaattcagctttgggtctatttcatccattctggaaggttccttgggtcactgatctgaggcattcttgatgtggttaggacttcccagcattattttttttagatcctgtttatttaaaatgaaaaggattagcatgagggatggtaacattcctttttgatrtctgtagcagcaagttttcttatgattcattattcttcttcttacagctttaaatcatctaggaacttcatataaaatttaattccagtttcaactagttgtggagcatttgatccaaaataaaatgaaagtcctctctgaagctgtagaggaggctcaagaatcagaacaacctgaagttctttaagctgtcagttgaaggactaggtaaaaaacaaatatcatttagtgtgatcattaatgcacatgagtcattattccatgtggttgctgtcgactggtcaggggcacttcaagccctaatctgtactttgtcctgtctctctac

SEQ ID NO: 128868 - DNA, 533 bp, Homo sapiens
ggaattcatcgcatgagttcttgcacaaggaacattgaacaacataatgggcagtatctttaagcagtttttacagaagctacaaaartattcttcacttcactgtttctactattaatggactttttaaaaaaaagataaagtcaatactaaaacatgattcatgaaagagtttttactgggaaaggctaagctaatgagcactacatttagatgtttctggtgatctgaatacagcttagcacacatagatgagaaactgcacacctgtaaactgcatttttcaaatatcagttgtcttagccaggcttcgacaggagctaaatgacaagccaaaattggattctctgatgagagcctagaaaactcccactcattcaagggtagctatttatagcatgtaaactcttgccagactgaaaggagaatttggcccagtgaataaaaatatagaaaataaacgctcagaaattgaaggaggaggagaggttcgggattgattgtccaaccacaccatttggctttattgcact

SEQ ID NO: 128869 - DNA, 533 bp, Homo sapiens
ggaattcatcgcatgagttcttgcacaaggaacattgaacaacataatgggcagtatctttaagcagtttttacagaagctacaaaaatattcttcacttcactgtttctactattaatggactttttaaaaaaaagataaagtcaatactaaaacwtgattcatgaaagagtttttactgggaaaggctaagctaatgagcactacatttagatgtttctggtgatctgaatacagcttagcacacatagatgagaaactgcacacctgtaaactgcatttttcaaatatcagttgtcttagccaggcttcgacaggagctaaatgacaagccaaaattggattctctgatgagagcctagaaaactcccactcattcaagggtagctatttatagcatgtaaactcttgccagactgaaaggagaatttggcccagtgaataaaaatatagaaaataaacgctcagaaattgaaggaggaggagaggttcgggattgattgtccaaccacaccatttggctttattgcact

SEQ ID NO: 128870 - DNA, 617 bp, Homo sapiens
aatggggcagtttaatatttracatctttatttttatgcatgctttcccataacttatacagccatttcaagatttacaaaacaataggcacaattgttagctattttttagttcagaacatatataaaaatagcaaaacttttgatcagtaaagtggttccctgtagtagacatttggaaaaaacagggagggagaggctcctgtgaataagataaggcttttttatataattctttaagactcaggtcagttactcagtttctcccttgagcagatagctaaaacagggcagccacaatacagttgtcatggtcccaaacaatttattactactgcatccattaccagccagatatgttcaaggaattaagagaatcttatcccaataatacaaggaaaataatggcagtgtttaccactacattccttttggtcaaatccattgaattaaactggttcctgcctttcctatctggtttgttgaggctgtgtgggtgagctaagtaactcttagattagattattttgtatcattcaatctatctagctaacttagacaatttcaggatcactgtatagccatgtgatatggtttggctccatccccacccaaag

SEQ ID NO: 128871 - DNA, 558 bp, Homo sapiens
gtttgactaaactttattgtgttttcacaggtataattttttttttagttccattggctttcaaacttttggttatttgtaatatttcatcatatttttaagcacctctttcgatctgtaaagtaaatcttgctctgttaaattttgatagaagtgatggcatttgctctttttaactcctagcccacacccattaggtggaaagcagcataccaccaagcaccagggataggagaaatgtgaacagatcagattagttctgaaatccacgtggcataaaataaaggccagttgtgkagtctactctgtttgcatgggtagccagtgccctttattatatttctttatcatctttatcctaaaatttcactctaaaaaatcacattttccataaatctagattttatatttttagccagaaactactagttcctggacaagaggaatgagtccaattcatcactgtgttcctatattaatccgttttcatgctgcttgataatgacatacacaagactgggcaatttacaaagaaaagaggtttaatggagaacccac

SEQ ID NO: 128872 - DNA, 620 bp, Homo sapiens
tcaggtctacagacggcctgctggaggtgttccagtagaggtatcagcggtcagaggaggccttttctgtgttgaatgagaaattcttcatctctggggatattcagggacatccttagattatgtggatttcaataggcctgcaatctcacctcatctctagtagcagagagaataggttgtgatttccttgaaagacagagcctagagagttctgaaactagagtagctttagccttgagaagtgattcaccccaggatgtcacagcagtacttaattctattaaattttgatttttgtggtctggattctctcacactggtccacattgctgtttggtgttttcagaaagattcctctacttccccctttcacttcattatctcaatcagctttatgcagagaagaagcttactgagctcactgctggtgctggtgtaggcaagtgctgctttggcaatctgggctgacctggcttgtctcctcagaactccttctccaaycctggagcaggcttccatgctgctgtgggcgtccttgctggcctttggtaagtgatggggaggagacctttgcttgctgcaaagctgagcctcaccatgagcaaaagccctctttt

SEQ ID NO: 128873 - DNA, 620 bp, Homo sapiens
cctgttcagaggattttggcaacattgtcagtgggaaaagcatagctgagttctagtgatgagttctagtgattggtgctgctctattaacaacagggatgtgaacaatttcaggtaggagatcagtgctaatagaaaagcgatttctttttatttcttcaatgtttatagactctgagcaaaattgctaamggaggcatctccaatttgcaggaataacaccttggtaccatgttggaatagagactcttgatacataaatgtgattgggacacaaatgcacagcaagttatggcatctctttcagttttaacaataatcaagcagcaaaacaccactacttggggggctgaatgttgaaacagcatgcttccaattagaatgccttcctcttacaggatctcaattgtgcccaggtgtgtgaagtgatgttacaaaggctgcccagacaggggagaaatatctagggtgacttcagcctttggtttgggcctgaggattaattgtcttaatgattttccaaatggacagtaacacagttggagaattccactctccagagagcttctcaaaacaacctcttttctgttatcaaaatattaaatcacacctgctcagga

SEQ ID NO: 128874 - DNA, 591 bp, Homo sapiens
tctagattatctgctttacgaaaggtctagaagtaacaaagaaggaaaataccacaaataaaataagacaaatgcatttgcagctactttaactatcagtgtgtccactcacaactatatggcaaccattattcaaagtaataamtttgctttatgtcaagtgagctccctaaaacatgtggctcattccactggtatgactagaaaatcctaaggatcagttctttattctgttttaggctccaaataacaatagcagcagcaactaccatttattgagtgcctattatgtgtcaaattttccggtaaaaggtttttgtttttgtttttaaatttgttgatttaaaagtaaagaaatttactcaagcccaaagtaagatggaatttactgaaaaacatacagataatgctcacagaaaccttgtgaaaaacaggaagtcaccaagcagctgccctctccatctcgcttcccccagggctacgtaggctcccatctccactcctcttagccagctccattgccttacaagacctttgttttctgcctccccactgagtttgactcatattagctttggcttgtcatggcac

SEQ ID NO: 128875 - DNA, 586 bp, Homo sapiens
ttatagggtactcaagtttttaaatgcaggaacctcctaatatcaggtgagggttacacatgaaaatataacaaagtgagagaagagcaaaaagttgaggttctcatrgcaaccagaattcatagcagctgtgcattgttaaagggacttctcctgacagactgatgaataatcccaaagtctacctattgtgcaggaattgccagggactcttttggggagaaagtggggcacaaaggtaacactagccaaccattttatgagatttttaatcaatgcaaaaaaatttggcaacattttcaatgaaagtgtgcaaataaaaatgcatctatatttaatgaggcactctatttattcaataataaatgccagttggttattaataaaatattgctgtcattaatcctcaataaatacagttagagtaattagtattaaagtgacacagaatacttcataatgcaaaggtaattttctcaacgttaatggattattcaaacaaacctttactcacagctatcaagatcaagaccctctagggaaaaaggactagcgagttacagggtaaccttgaaaactttgaaag

SEQ ID NO: 128876 - DNA, 614 bp, Homo sapiens
aagccactgtcatactgaggtttatttgttacagtagctagcattagaatatctaattacagggacttctttggtattttaaagatatctttatatagcactttcacggtttacaaagcgttgtttcattacgaatgagcaaggaggggctgggtagagtggttcacacctgtaatcccagcattttgggaggctgaggcaggaggatcacttgagcrcaggagttcaataccagcctgggcaacagagttcgataccagcctgggcaacatagggagaccctgtgtctataatataaataaataaataaataaataaataaataaataaataaataaatttttttaaaaaataagaaattagatacagtacacataactgtgaggttaagtaacttacccccaatcatactgctggagtcttcacaaacccatgcaccctcacttgcccactggatgcgcataagctcaggatcaaaagtcaagcagttctgatagatttgagtctcttcctcagctaattatttgctgtgatttttcagcaacttatgtagtttgtctctatttccttagctataaaatgagaatgacactagctcttatcttatggagttg

SEQ ID NO: 128877 - DNA, 538 bp, Homo sapiens
tccttaacaattagattccagggcacagagcaaggtggagaagaatggaaaagcaatctggaagggcaaacggaggatgtccagcacaagggtgtatctgctccctttggcacaaaagataggcctagttggagtccactctgtaaaatgggacaccttaaaagaataatggaattttagggctagagaagtccttaagatcattcagaccagaatttataaacttgcctatatctagcattcaggtgtggcttacatggctaatgtagctttaataccaaaaagcaaacactagcaggcaataaacaaaactcaaaatttaacattaatgtccttaggtcaagtatgtagtttccagttcaccacgattatcatcattccctattgtccaacaccccgtatacattcttgcctcccagaagtatttgacaygaggacttgtaaatagaaaagtgaagcttcttcatttttcagataaagaagctgggatggcaaggaaacttgtttgcccatggctgcacagccttggtgggaattc

SEQ ID NO: 128878 - DNA, 608 bp, Homo sapiens
tatcatcattccctattgtccaacaccccgtatacattcttgcctcccagaagtatttgacatgaggacttgtaaatagaaaagtgaagcttcttcatttttcagataaagaagctgggatggcaaggaaacttgtttgcccatggctgcacagccttggtgggaattctgtctgcaaagacaaaaatagaaatgtataaatatgaggacttaatgaaagagttgtttgcctctataagatgagactccatgggagccaccatcacacatgggagtgactgtcatttgaagcaagagttatgcaaggattctacttgctctttgtggccttagaaggtggaaatagaacaatagggaaaagtgattatgatcggtgcaagtcagagcttgcaaagggctattcagaatggactgggatgcctcagttcatcctcacttcccatctgtgcagctggtcaattaacagaaacagaaccaycccttagtgaggatggtgttggaccttgttcttagagccctcctcctatgagttgagctgatgctgagttgaattggaatgagaggaatgtgtcttcttggcttttttccatggattatctttcatttta

SEQ ID NO: 128879 - DNA, 583 bp, Homo sapiens
ggtttttattcagtcagtccctttacttcttttctgtggaagccagcaaagtgaattcatctagaccagtggttttcaaccctgctgtgcatcataatcatctagaaagttttataatacatttcatcggatcccacccttagagattctggtgtcatgagtctgggcctttgttctcagctgtatttagcatagtacctgagacatgataagyagtcaaacttctgtttaataaacaagtaaattaaataatttgcatatccctatacaaaccatataccctagctgctatatcttgcacattcttttcccttgcatcaagtaccattccctttttattactcctcctagcctaaataacttctatccttcaggacacaagtcatgttttgcctgcttcaattggaatatgaatttgtcagtctaacagtcttttgctttcctatctgtatgcccacagggttcagtattgccctctttaaacactcaacaccttggattgcagtggtctgcttcagtgattgtcttagtgagttcaggctactgtaatatattatcacagatgggtgagttaaacaacaga

SEQ ID NO: 128880 - DNA, 583 bp, Homo sapiens
ggtttttattcagtcagtccctttacttcttttctgtggaagccagcaaagtgaattcatctagaccagtggttttcaaccctgctgtgcatcataatcatctagaaagttttataatacatttcatcggatcccacccttagagattctggtgtcatgagtctgggcctttgttctcagctgtatttagcatagtacctgagacatgataagtagtcaaacttctgtttaataaacaagtaaattaaataatttgcatatccctatacaaaccatataccctagctgctatatcttgcacattcttttcccttgcatcaagtaccattccctttttattactcctcctagcctaaataacttctatccttcaggacacaagtcatgttttgcctgcttcaattggaatatgamtttgtcagtctaacagtcttttgctttcctatctgtatgcccacagggttcagtattgccctctttaaacactcaacaccttggattgcagtggtctgcttcagtgattgtcttagtgagttcaggctactgtaatatattatcacagatgggtgagttaaacaacaga

SEQ ID NO: 128881 - DNA, 514 bp, Homo sapiens
tgcattgttaaacaatgcaagactgtagttctaaggttgatggaatttttttttaagtctctgctagctacagggaaatttttccaaagtaaaagaaagatcttgtgaaaaatcacataagaagcacattgggtctctggggtaaaattaaagggttcaaccagaagacatccttcttcctcttcaagaactcggatctaagacctctgcagagccatttttggtcttttaagaaaaggcaaaagtattataatatttagttattagcatgttcatttgccaaagttctaaaaattccttagtactatatatgtatattttatagaatcttgaggtctcttgaataagtaacagaatatatttaaagccgtcttgtggtacttgcaatctacttttactattaaagttrctataaagatttagagatattatatctttgcctgtgtgatccattgttgccatatcatggagccaactccttggtcagaaacataacctccaattataacattgc

SEQ ID NO: 128882 - DNA, 605 bp, Homo sapiens
ctagtattcacaaagaatagacagttgtattatttctactatgtgtgtatgtgtgtgtacctgtatttgtacctatgtatgaatgtatatttcatatacatatataatataggtatgtgtggtatgtattttatatatcgtatatatacttatatacgtacatatatcccttttgaggaaagacctaaattaggttttttgcattaacactgaacacactgagatttggtctacattggagagggacccacaggaagaaaattaaatgatgtttagagagcctgggctgtttataagtcttcataacacaagaataattatttttcccttgacaatagtacttctaaacatcttagtcacacacacaaatctttaatccattgaaatatgatgtaaatgcattttccaagtattcctaaaacacaacactatttaccaagayaataagtagcccatgaatcttgaaggatgagctttctccttgctactaacatggttacagattttcatgtgcactgagaaagtgactgtatacatacacagtttgaacgtagcaacttccctgtgactatttttggggatgcaattggcccttatgagtgatg

SEQ ID NO: 128883 - DNA, 557 bp, Homo sapiens
gatttagctacatacagcatcaactaggtggcaaaaccttgctgggctaggacaaggccctccagaaggcagtatatgctctgaatcagtatccagtatatgacactgtttcttccacagccaggwttcaacaggtaaaaacgggagtgttctcactcattattacctctagtgatccactagcaaaatgtttgcttcctattcccaagacttaatgttctgcatgcaggtctacaggtccagagggaggaatgttttcttcagaagacacaacagtgagtgattccttgacctggaagttaagacttctgcctggccactttgggttcctcatgtgtctgagtcaaaagaccaagaagggaactatgatgttgtctggagtgatttacattcactaccaagggaaaattggactactgctccacaatggaggtaaagaagagtatgtccataggcatgggcaaggacatcctgactaaaacaccaaaagcaatgtcaacaaaagccaaaattgacaaatcggatctaattaaactaaagagcttctgcacagcaaa

SEQ ID NO: 128884 - DNA, 557 bp, Homo sapiens
gatttagctacatacagcatcaactaggtggcaaaaccttgctgggctaggacaaggccctccagaaggcagtatatgctctgaatcagtatccagtatatgacactgtttcttccacagccaggattcaacaggtaaaaacgggagtgttctcactcattattacctctagtgatccactagcaaaatgtttgcttcctattcccaagacttaatgttctgcatgcaggtctacaggtccagagggaggaatgttttcttcagaagacacaacagtgagtgattccttgacctggaagttaagacttctgcctggccactttgggttcctcatgtgtctgagtcaaaagaccaagaagggaactatgatgttgtctggagtgatttacattcactaccaagggaaaattggactactgctccacaatggaggtaaagaagagtatgtccataggcatgggcaaggacatcctgactaaaacaccaaaagcaatgkcaacaaaagccaaaattgacaaatcggatctaattaaactaaagagcttctgcacagcaaa

SEQ ID NO: 128885 - DNA, 591 bp, Homo sapiens
attcagtctccatggtctttgtccagattctgagctgctctcacgccatgtccattgtgatatrggccctctagagatgtggtgccgccttacctaccctaatcctatagaggcagagagtaggggtgtctgtgtctgcatcattgcaaagctgagaaaccttgactcttggatgtataagtaacctgtccagactcatccagtttgtaaatggcagagcaggaatagaaaacacccatccatcttataacaggtaagtcacctgccaggttctgttgcaactgagttagaagcaaacaatcttaaaacagatctttccccaaagcactcccaccatttgctgcagcatgatttccttaagggttagcaactcagtaggaatgtaagtaaacaaatatcctgagtatttcacctacaggagtgaacatggcaggtgacaatttgtcttctgatataatattatttgttgaattagtcccggattagttctgaaagaaaaatgaaattgaccattaggaagtgcaacccagtgaaaagttgcatagtcaacttctgtgacatcttgtcagatttacatgtgtgaattctcac

SEQ ID NO: 128886 - DNA, 649 bp, Homo sapiens
agaaatattttaatgctggaaactactaattgcatctgttatttatagtattagttgatagatactttctacttacactttttaaaattttttcagttgttttttctgcttataaaaataataaatgaccactgtagaagttcaagttatacagaaaagtttaaagaaggcagactaattttgttttgtgaatttcacctcaattaaagaagacagggaaaatggcttcaagtcccacatcccagagttaatattttggtgagcactgttcaagccctttccctcttcatatataagcataaagatatatagatatatgattttatataattgggatcatattatacctgctattttgcaaccccgtagtattatcttagggatctttccctgccagtaggtatggagacatataatcttttccmaaagctgtattttcttctgttttgtgaatgtactgtaacctccagtttatgggcatttagaatctaaattttttgttattgtaaacagggctgtgttgaacattcttatacacataactctgtgacctgactgattttctctttaggataaattcctaagtgtaagaatgtgaagtcatggagcatgattgcctccagaaagactgtgggtctttttctaaatt

SEQ ID NO: 128887 - DNA, 612 bp, Homo sapiens
aattttctgacccttttgttcattgataaaacctaaagtgactgaagagtatgcaccaagcaacccatttttttctyctcttttatttataataaaacccccaacctcatgtgtaatgtgacttccctatttagagtgattaaatcttagtggcacattattatctgtgggcttttaacttttgattctgcagtgtttcattaaatatgccatttatttgtaggcctaagagggattctggaagagtagaaatgcaaaggacctaattccgagaaattttggtactgatcttggttttaccgctttctaatgtatgatcctaggggtgtcagggaagctgaaccactctaggtgataaagtacagaatctgctgcctcggtgtctagtcgtggcctgaagttgctatagatcaactgagaaggcagttgggaagaaatgccaaatgccctttcacatgaagggtagaatgggacaggaaaacaaggacaactggaacccatgaggacaatctggaatccacaagcacaaattggaacctggtctgtttctccctgaatctaaccctgtgacacaggtatcctgacaacctggtagccttctcctggagaatc

SEQ ID NO: 128888 - DNA, 612 bp, Homo sapiens
aattttctgacccttttgttcattgataaaacctaaagtgactgaagagtatgcaccaagcaacccatttttttctcctcttttatttataataaaacccccaacctcatgtgtaatgtgacttccctatttagagtgattaaatcttagtggcacattattatctgtgggcttttaacttttgattctgcagtgtttcattaaatatgccatttatttgtaggcctaagagggattctggaagagtagaaatgcaaaggacctaattccgagaaattttggtactgatcttggttttaccgctttctaatgtatgatcctaggggtgtcagggaagctgaaccactctaggtgataaagtacagaatctgctgcctcggtgtctagtcgtggcctgaagttgctatagatcaactgagaaggcagttgggaagaaatgccaaatgccctttcacatgaagggtagaatgggacargaaaacaaggacaactggaacccatgaggacaatctggaatccacaagcacaaattggaacctggtctgtttctccctgaatctaaccctgtgacacaggtatcctgacaacctggtagccttctcctggagaatc

SEQ ID NO: 128889 - DNA, 578 bp, Homo sapiens
agattatacctatgagtttcagaaatagcatttagagagaattggcgggggaagtggggactgtgaagtaatcaaagaaataaaaagaaaaattctcgtaattgaaaaaagattatattcatattaaagttgctcaccgaagactaagcagtttagaaagaaaaaacacacctagaacacaatggtcatatttcagatatttagatatagatacaaatatatgtatttatttacatatataaataaatataaattcctcaaaaaattccacarattttttcaaactcacccagagtggaatgaaaatcagactggcattagatttctcattggaagaattttataccaaaaacaaaatagtaataaacaggaataaacaggcaaatcttcaaaattctgaggaaagttattttgaacctaaaattctatatccagccaaactaatattgaagaaggaagtaaaacatagatatatctggacaggcaaggatccataaatgttatctcctcacagaatatctctgaaagaactgagtatatactagaaatatgaagacaaattttaaaaattatgtgaa

SEQ ID NO: 128890 - DNA, 532 bp, Homo sapiens
gtcacatccggtggtgagcccctgggccacggtgatgtcatgtagaatgtgagttcattgtcaccaggtgattcgaactcttttcaagtggatatccactgcagaagatatgggttttgtttttggcctatgtggactccaaatgagactaggccacttgtgtatatytgaaggcaagactggcctgagaatttggtaaataaatgtcatttaagtcaacaggcttctgggtgacagctagcaaaggcaatgttggcacccatgtgctgtagtaagggacaaaagcaccagaactctactggcacaattaaattccccattaaagatggcagaatctaaagtttctgatatttaaggttttgcccagattggtaatgaaagggattatgttgcaaataggttttaaatcatatggcctgatttggatatatgttgttaatagggtatcaggttgtttaaaacagcggtccccatcctttttggaagaaaatcttttccacggccggacaaggtggagcaggggatagttttg

SEQ ID NO: 128891 - DNA, 532 bp, Homo sapiens
gtcacatccggtggtgagcccctgggccacggtgatgtcatgtagaatgtgagttcattgtcaccaggtgattcgaactcttttcaagtggatatccactgcagaagatatgggttttgtttttggcctatgtggactccaaatgagactaggccacttgtgtatatctgaaggcaagactggcctgagaatttggtaaataaatgtcatttaagtcaacaggcttctgggtgacagctagcaaaggcaatgttggcacccatgtgctgtagtaagggacaaaagcaccagaactctactggcacaattaaattccccattaaagatggcagaatctaaagtttctgatatttaaggttttgcccagattggtaatgaaagggattatgttgcaaataggttttaaatcatatggcctgatttggatatatgttgttratagggtatcaggttgtttaaaacagcggtccccatcctttttggaagaaaatcttttccacggccggacaaggtggagcaggggatagttttg

SEQ ID NO: 128892 - DNA, 571 bp, Homo sapiens
agattgccctgtggattcagaagcttgtcagctttgtctgccaccctgccacastgtcccctgcccaccgtcttcctcactaagaaagaaggtggtgttcattaaggatttgccaaaccgaatctctttccccttttctgccttcaagttgttgcagcttgtttactaggagaggatatctgaagtcttatttaaccttcatccagaccaaagttacagtcctctctccccaccagggattggggtggggggtgctggcagacagcctggttaagaggtcccccttagctcaggagaccctgtcttgatcccaggctatttgcagatggctccatgctgggctgcccctgaggcccctctctaggggtgatgacatctggctggagtatctctatttgtgattctcagtttacccgcatcagaaacactttagacgcttgtttaaaaatagactttcctggatcccactccagggctattgagtcagaatagctggggctgggccaagtgtgtgcattttagcaagcaacccatataattccaatgaacactgaggttggcaagccttcat

SEQ ID NO: 128893 - DNA, 571 bp, Homo sapiens
agattgccctgtggattcagaagcttgtcagctttgtctgccaccctgccacagtgtcccctgcccaccgtcttcctcactaagaaagaaggtggtgttcattaaggatttgccaaaccgaatctctttccccttttctgccttcaagttgttgcagcttgtttactaggagaggatatctgaagtyttatttaaccttcatccagaccaaagttacagtcctctctccccaccagggattggggtggggggtgctggcagacagcctggttaagaggtcccccttagctcaggagaccctgtcttgatcccaggctatttgcagatggctccatgctgggctgcccctgaggcccctctctaggggtgatgacatctggctggagtatctctatttgtgattctcagtttacccgcatcagaaacactttagacgcttgtttaaaaatagactttcctggatcccactccagggctattgagtcagaatagctggggctgggccaagtgtgtgcattttagcaagcaacccatataattccaatgaacactgaggttggcaagccttcat

SEQ ID NO: 128894 - DNA, 571 bp, Homo sapiens
agattgccctgtggattcagaagcttgtcagctttgtctgccaccctgccacagtgtcccctgcccaccgtcttcctcactaagaaagaaggtggtgttcattaaggatttgccaaaccgaatctctttccccttttctgccttcaagttgttgcagcttgtttactaggagaggatatctgaagtcttatttaaccttcatccagaccaaagttacartcctctctccccaccagggattggggtggggggtgctggcagacagcctggttaagaggtcccccttagctcaggagaccctgtcttgatcccaggctatttgcagatggctccatgctgggctgcccctgaggcccctctctaggggtgatgacatctggctggagtatctctatttgtgattctcagtttacccgcatcagaaacactttagacgcttgtttaaaaatagactttcctggatcccactccagggctattgagtcagaatagctggggctgggccaagtgtgtgcattttagcaagcaacccatataattccaatgaacactgaggttggcaagccttcat

SEQ ID NO: 128895 - DNA, 571 bp, Homo sapiens
agattgccctgtggattcagaagcttgtcagctttgtctgccaccctgccacagtgtcccctgcccaccgtcttcctcactaagaaagaaggtggtgttcattaaggatttgccaaaccgaatctctttccccttttctgccttcaagttgttgcagcttgtttactaggagaggatatctgaagtcttatttaaccttcatccagaccaaagttacagtcctctctccccaccagggattggggtggggggtgctggcagacagcctggttaagaggtcccccttagctcaggagaccctgtcttgatcccaggctatttgcagatggctccatgctgggctgcccctgaggcccctctctaggggtgatgacatctggctgsagtatctctatttgtgattctcagtttacccgcatcagaaacactttagacgcttgtttaaaaatagactttcctggatcccactccagggctattgagtcagaatagctggggctgggccaagtgtgtgcattttagcaagcaacccatataattccaatgaacactgaggttggcaagccttcat

SEQ ID NO: 128896 - DNA, 391 bp, Homo sapiens
ttttgggtttttttgtgattgatctagagattataatatatatctttacatttttaatctgcttacaactgatattgtgcgactttaaataaaatgtaagaatttggagccacatacatctacttaccagccctcttcctttatgttggagctgtyatttgtgttatatttacatatattgtaaatgccacaataaaatgttatcatttttgccttaaaatgtcatatccatttgaaagaaattaacagaaaagtagcctttagtacttaccatttgcagtgcttctcatttcttcctaaagattcaaatttccatttggcattatttcctttcagtctgaaacacttccttcatcatttcttgttgtgcaggtctaatggtgatgaattc

SEQ ID NO: 128897 - DNA, 536 bp, Homo sapiens
gtgatgagaaacataaaacgaattttaaaaacagtacatcaagttgcttccaagatggccgaataaaaacagctctagtctacagctactagcgagattgacgcagaagatgggtgatttctgcatttccacctgaggtacctggttcatctcattgggactggttggacagtgggtgcagcccatggagggccagccaaagcagggyggggtgttgcctcacctgggaagcacaaggggttgggggatttccctttcctagccagaagaagccatgagtggctgtacctggagaagcagtacactcctgcccaaacactgcactttccccacagtcttcacaaccagcagaccaggagattccctcctgtgcctggcttggtgggtcccatgcccacggagccttcctcgctgctagtgtagcagtctgatatctacctgggatgctggagcatggagggaggggcgtcggcaattactgaggcttgaggaggcagttctatgctcacagtgtaaacaaagcagccgggaagctc

SEQ ID NO: 128898 - DNA, 585 bp, Homo sapiens
ccataaataagtctaataaaagtagaatagtcaaaatccaccatagcacacagcatgctggggcttaggatccaaaagactgagttcttgagctcatctctcctctttccaaccatctaaccttaagcaagtcacttaacttcttaagcctttgttttatcatttgtaaaatgaggatatcattggtatctactttgtgaaacttttatgaactattaacaaggtgcctgtgtatgtgtatttgcattaatacttcatcaacaaaaaagrtccagacatacgaatgctaattttcagatactattatctaagagaaatggcaacaaaatcctatgggagtttagaggtaagagaaatctctccaagtccagggattttttctgggcctaatgaagatatgtctgtgagatgcaaaggcagaaatggggaagaaagagaggggtttctaggaaaagggaattttctggcagaggcgtggcaataaaatctaccaaatgtatttagagggcagcaatctatgtcatcctgaccacatctgtgttattcctcttgtatcctcagcacctggaacagtgtctggcacct

SEQ ID NO: 128899 - DNA, 585 bp, Homo sapiens
ccataaataagtctaataaaagtagaatagtcaaaatccaccatagcacacagcatgctggggcttaggatccaaaagactgagttcttgagctcatctctcctctttccaaccatctaaccttaagcaagtcacttaacttcttaagcctttgttttatcatttgtaaaatgaggatatcattggtatctactttgtgaaacttttatgaactattaacaaggtgcctgtgtatgtgtatttgcattaatacttcatcaacaaaaaagatccagacatacgaatgctaattttcagataytattatctaagagaaatggcaacaaaatcctatgggagtttagaggtaagagaaatctctccaagtccagggattttttctgggcctaatgaagatatgtctgtgagatgcaaaggcagaaatggggaagaaagagaggggtttctaggaaaagggaattttctggcagaggcgtggcaataaaatctaccaaatgtatttagagggcagcaatctatgtcatcctgaccacatctgtgttattcctcttgtatcctcagcacctggaacagtgtctggcacct

SEQ ID NO: 128900 - DNA, 612 bp, Homo sapiens
agaactctagccttgactgtaggtgttaataacactaaatgagatgcccttcagaaatcagccttttcatcctaagtagcaacagcatgtgactgaatgtaatacagaaaggggaacatgtcttattaagtgagatgaggaaatgccatagcagagaacatcagaaggaggtgaaaaattaggacagtgggaaaggagaagagaaaactacaactaacatgtgaggaaactgcacttcacatgaacctgtctatgaacaattagatcaggaaagctgttgccacaattcttggtatgtgctctgttcttttatgggtgaatgagttattggtgttccttaagtggaattgctattctgaagattcctgcwtttaaaattagcagaatttgcagtggaataaaataagtttgtagtggctttgtaatgacatgtaaatcaggttttgacactactggaacccatttcaggcaattctttgtctcatctcaatttgaacacactgtcccaggatagagctgtgaggcagaaacttctagaatgagctatgagttgcttacaaaggcacccatgctagccaatgagcaccattaactctggatattatttgtacc

SEQ ID NO: 128901 - DNA, 612 bp, Homo sapiens
agaactctagccttgactgtaggtgttaataacactaaatgagatgcccttcagaaatcagccttttcatcctaagtagcaacagcatgtgactgaatgtaatacagaaaggggaacatgtcttattaagtgagatgaggaaatgccatagcagagaacatcagaaggaggtgaaaaattaggacagtgggaaaggagaagagaaaactacaactaacatgtgaggaaactgcacttcacatgaacctgtctatgaacaattagatcaggaaagctgttgccacaattcttggtatgtgctctgttcttttatgggtgaatgagttattggtgttccttaagtggaattgctattctgaagattcctgcttttaaaattagcagaatttgcagtggaataaaataagtttgtagtggctttgtaatgacatgtaaatcaggttttgacactactggaacccatttcaggcaattctttgtctcatctcaatttgaacacactgtcccaggatagagctgtgaggcagaarcttctagaatgagctatgagttgcttacaaaggcacccatgctagccaatgagcaccattaactctggatattatttgtacc

SEQ ID NO: 128902 - DNA, 627 bp, Homo sapiens
  misc_feature (1)...(627): n = A,T,C or G
attaactctggatattatttgtaccccaatatgattcagtctcatggccaatgatatggtttagatctgtgtccccatccaaatctcatgtcaaattgtaatccccagtgttgaaggaggggtctggtgggaggtgactgagtcatgggggtagagttctcatcaattatttagcaccattcccccttggtactgcatagtagttctcacaagatctggttgtttaaaagtatgtggcaaccccctccccttttcccctgctccagccatgtgacatgnctgctttctcttcnccttccacgatgattgtaagtttcctgaagtctccccagaatgagtagatgccaggaattgtgagccaattacaactcttttctttataaattgcccagtcttagatatttctttaaggcaatgtgagaacgacctaatacatcagcattaaagaccattayggaaatccagctgccttagcagatgtcacaatttaagtctctctaaaaccttgaatcttttttggtctaagttatttggagagaagcaagcaaaaaaaatgccagaacaaaaagttactgtggggaaacaaatcattcttcataggagtctgcagtttttatggtgaaagtg

SEQ ID NO: 128903 - DNA, 508 bp, Homo sapiens
attttcaaatgatttcactaattccatatccttcctttactctctttctttcttccccactcagtcttcccagtccactccctgggacttgccaagcctaacactgacagctttgtatcttcttgccgtacagaagaaatgatcaaaaatattaataaaaaagtaactgttttttatgatatgrctcttgtgttagatcagtcatggttgccaaatcatatattcttctcctcatccttaaatttttcttccccgttccttgaaaactcaatcatcctgagcttcccatcacccctcagttaagcttcatccaacccacatttctttttaccttctctgctttcacctcagatgaattaaaaatactaaattttaaaataccaaatatgcaataatgctggttttttttctttgcctttgctttatttatctcaccaaaaagcattttctctgggatatgaagaattgttttctgtcttgtaaagtcttttgagaaagttaattaaat

SEQ ID NO: 128904 - DNA, 484 bp, Homo sapiens
tgaaaggtaagtaagatatagtgtggaggctgagagctgaaaaaaaaatacatgatgtgttttaaaaactgaacaaaattcagggcaactggagtatatagaactggaggagagtggtgttaagtgaggctggaaaggtgggcaagactcagagcctgaagggraaggcataaagaagacattcttcttaatggtgtaaaatgcaagcacaacaattgttatgtattattttgggcaataataaactagatactgttttgagttttttttttttttcagctattagctgttttagttcttattcctactctatgagatagatgatatcattactcccattctataaataagaaaactagagcatgaagaggttaggtaacttgcccaagataatactgcagcagaactaggactcagtttcaaggtgtctggcttcagaatttgtgctctagagcaatccacaatactgccttatgccaatata

SEQ ID NO: 128905 - DNA, 490 bp, Homo sapiens
tccctggaggaagtcctattaggaagcccttggttagcctgtttcaccttattatgtatgaaaattttgaaaaaatacttattttattttcaaatagcttatcattaacatttyccaccaaatcaaactagtcttccctcattttatctttcttacagctcagcaatatttttccctggacaactaaacagcaatggaaagagatagctgctgtgttctaccaaggtctctctgaatcattaggagggcaggattgctgaattatcatgcatcctggccccccaatccctgacaatgtggagacatgtgagtagttggtaaaaagaaacactgcattatattttggcttgcatcttagagggcttttcaggcactcagaatacagatgtgccttattatgaaactatatgaatttctggggattttcttcagctacaggaagagtcaattgatgtgaaactacatttcctaaaagccacaaattagagac

SEQ ID NO: 128906 - DNA, 611 bp, Homo sapiens
ctggtacaaaagagggaagagtgatgctttcacaaaggagaatttatagaacataagtttatatatttacatatatgttcatagaatatatttgctttttaggcaaataagtgtttactgttttctcagttgtcttcagytcaatataatccttatgtcaaagcagcatattttgggggagcattttctgatcccctacaatagtcttcaagttttatctcatttaatttcctgagtccagtaggatattagtatccacctttggcggactaaatgacttgcccaaagccaacagctagttaggtgtaggaccaggatttgaacccaggctctctggctgcagaacatacaccatagagcatgggctcagtaggtgtgcattgaatggcatctaattctgctgctccacagtcatgcgctgggaacttggtgaggcccgtacagagcatttccctggcttggggaatacacatctttatatgtattgaaaaataccagaaatggccaatttttgtctctttttcaggttgtaccgaggagagagaatttcctgagtcttcaggtttcttgctgaaccctaaatctgcaggtagccagctgggtgacttaga

SEQ ID NO: 128907 - DNA, 600 bp, Homo sapiens
atatctagttgattgattcatatgtactaaatatttacctaaatatgtctagtgacatcataaaggtgtatggtgaagtttgctactataaaggaattaaactatagggttgaattgaatttcattttttctcactgttaagatatgttcaattaattttaataataaatgagaataagagttatgttttgaataactacttgtattttaacatattttaggtaaacttgtttgagtrgtaagtccctttatttttcctgtctgctttcaagtatttacatggtagagatatttaacatattccaaatagtttagtactatagtaaagacatgagaaaatgataagcattcctatagtcagcctgccagtagtgcttaatgctactgcataattatggacaaatatcaaagaggtgaacagcccaatccctgacataaagaagattgaaaatactcaaattatctcagaatgtcccaccagaagctctatgtcaacttgagtactacctatttacttagaattaggtcatattagcatttcaactcagcctatttctttcattcatcacaaaacaactcaagtgggaccttctacttctt

SEQ ID NO: 128908 - DNA, 600 bp, Homo sapiens
atatctagttgattgattcatatgtactaaatatttacctaaatatgtctagtgacatcataaaggtgtatggtgaagtttgctactataaaggaattaaactatagggttgaattgaatttcattttttctcactgttaagatatgttcaattaattttaataataaatgagaataagagttatgttttgaataactacttgtattttaacatattttaggtaaacttgtttgagtggtaagtccctttatttttcctgtctgctttcaagtatttacatggtagagatatttaacatattccaaatagtttagtactatagtaaakacatgagaaaatgataagcattcctatagtcagcctgccagtagtgcttaatgctactgcataattatggacaaatatcaaagaggtgaacagcccaatccctgacataaagaagattgaaaatactcaaattatctcagaatgtcccaccagaagctctatgtcaacttgagtactacctatttacttagaattaggtcatattagcatttcaactcagcctatttctttcattcatcacaaaacaactcaagtgggaccttctacttctt

SEQ ID NO: 128909 - DNA, 586 bp, Homo sapiens
cagggcttcctgaggctgtatcacaggtgtatttttgaccttggcaaaataaactttctaaattgactgagacctgtgtcagatatttygcattcacaatcagtaaccacagagggattctgaggggaggtgcccctgactttgacgaatctcctataggtgcttggtaccagcttgagcttttttatggctcaaaccaatagggcaatttgctgaggcctgtaagctccccctccagaaaatccctgatctccccaaatttggttaagatctaaagcttattttgctgtacaactcctccttttggagtttcacttgcttcttacagggaaggcaagttttcctgcttccatgatgttggaaggaaggtaagtcctttctggagtttgagcaaacttccaaaagggaaggcaagtctgagttttttcctgcttctaggatggtagatagcagtcttcagcctaagacccattcctaggtaagtagctgaattgttttttttttatttttattttttgtttgtttttttgtgggctaaagttaagattaaaaatcagctggtgttaatttatctttaccattagag

SEQ ID NO: 128910 - DNA, 571 bp, Homo sapiens
gcaagggatggagaacagtcctcccaaaacctagacccatgacctatcactatgtgacccttgtcaagtgattcctcagggatgagaacctctcccatacagagtggttgtgagaattgagctcatccatacaaagtgctctgttcaacagagctcataacaacgtctcaggagaggggctatgaaatgacctgggcaccttttgtcttctaaaccatgatagggaaatyaagtcagggttcctattttcttggcagtggttgaaacaggaagacaaagggagagtacttcttctaaaatggtcaaaatcactatttaactccagctagctacctctaccctttttactttgatcctgctgattttgcctaacagttttcatctctgagaataactccttggccatgctgccctcccgcccaccgtggttcatcttcccattcccctctgaaacctatagggttaccctggtatgttgataaaatccagattgggagtaatggtttttattctaatttcaagacagccacatttcatttcaacagacagtttttttgagcttccattttgt

SEQ ID NO: 128911 - DNA, 481 bp, Homo sapiens
ttaaaaaaatcccagcctggacgacatggcaaaaccctgtctctacaaaaaactacaaaaaaattagctgggtgtggtggtgcatgcctgctgtctcagctgctcaggaggttgaggtgggaggatcacttgagcccaggagaaggaggttgcagtgagccgatatcgggccactgcactccagcctgggagacagagccaggccctgtctcaaatatatatatatataaacatcttttttagaaacccttagagcagatgacacagatgacaatctgtgttgtactctgaaaarccaacagaacatttaacaaacattaatccatatcaggccccaattcaacaagtgctgtgtgctgctcccttgttctttgggactacacacggtatgtcgagtggggaatctctcctcttaatctctcacaattcacccactgttcaggaccagccctgactcagatccctcaggccacagaggctg

SEQ ID NO: 128912 - DNA, 635 bp, Homo sapiens
cttctgcaccaggggagggacaaggattgttttggggccccagattttgcactaaagcagaaatgtgcacctatggtcaagagtgggaaaaccaaaggtgcattgatcctatgcaagaagaaacaaaatattgtgtccctgttgtggtgtaagagacatgcaataatataaagcaaaggttttctaccactgaggtgggaggagggcaaggtagtatttcttctcaaaaaaaactaatacagataagtgacagtttgactcctactagagtgagagttaggargtgctgagaataacctatctctgagtgtctgattttcaggctggctcaaaaataacctgaatcatccctctgctcacaatataaattttgtacctagtcaaaagaaatattgttctatagttaaagaggaacaagaaagtggagggagaccatttctattacacaggtgtgtagggattgctaaaactaatagtggaacaggagcattggcatatgcccttcagagcctcaggccccagactggatacaggatagtagcagccccactgatggaggaatttgaattatatggttcactgaatgttctgacaacagtgacaaaacccaacccaggtcaactttgaaaatattg

SEQ ID NO: 128913 - DNA, 635 bp, Homo sapiens
cttctgcaccaggggagggacaaggattgttttggggccccagattttgcactaaagcagaaatgtgcacctatggtcaagagtgggaaaaccaaaggtgcattgatcctatgcaagaagaaacaaaatattgtgtccctgttgtggtgtaagagacatgcaataatataaagcaaaggttttctaccactgaggtgggaggagggcaaggtagtatttcttctcaaaaaaaactaatacagataagtgacagtttgactcctactagagtgagagttaggaagtgctgagaataacctatctctgagtgtctgattttcakgctggctcaaaaataacctgaatcatccctctgctcacaatataaattttgtacctagtcaaaagaaatattgttctatagttaaagaggaacaagaaagtggagggagaccatttctattacacaggtgtgtagggattgctaaaactaatagtggaacaggagcattggcatatgcccttcagagcctcaggccccagactggatacaggatagtagcagccccactgatggaggaatttgaattatatggttcactgaatgttctgacaacagtgacaaaacccaacccaggtcaactttgaaaatattg

SEQ ID NO: 128914 - DNA, 635 bp, Homo sapiens
cttctgcaccaggggagggacaaggattgttttggggccccagattttgcactaaagcagaaatgtgcacctatggtcaagagtgggaaaaccaaaggtgcattgatcctatgcaagaagaaacaaaatattgtgtccctgttgtggtgtaagagacatgcaataatataaagcaaaggttttctaccactgaggtgggaggagggcaaggtagtatttcttctcaaaaaaaactaatacagataagtgacagtttgactcctactagagtgagagttaggaagtgctgagaataacctatctctgagtgtctgattttcaggctggctcaaaaataaccwgaatcatccctctgctcacaatataaattttgtacctagtcaaaagaaatattgttctatagttaaagaggaacaagaaagtggagggagaccatttctattacacaggtgtgtagggattgctaaaactaatagtggaacaggagcattggcatatgcccttcagagcctcaggccccagactggatacaggatagtagcagccccactgatggaggaatttgaattatatggttcactgaatgttctgacaacagtgacaaaacccaacccaggtcaactttgaaaatattg

SEQ ID NO: 128915 - DNA, 635 bp, Homo sapiens
cttctgcaccaggggagggacaaggattgttttggggccccagattttgcactaaagcagaaatgtgcacctatggtcaagagtgggaaaaccaaaggtgcattgatcctatgcaagaagaaacaaaatattgtgtccctgttgtggtgtaagagacatgcaataatataaagcaaaggttttctaccactgaggtgggaggagggcaaggtagtatttcttctcaaaaaaaactaatacagataagtgacagtttgactcctactagagtgagagttaggaagtgctgagaataacctatctctgagtgtctgattttcaggctggctcaaaaataacctgaatcatccctctgctcacaatataaattttgtacctagtcaaaagaaatattgttctatagttaaagaggaacaagaaagtggagggagaccatttctattacacaggtgtgtagggattgctaaaactaatrgtggaacaggagcattggcatatgcccttcagagcctcaggccccagactggatacaggatagtagcagccccactgatggaggaatttgaattatatggttcactgaatgttctgacaacagtgacaaaacccaacccaggtcaactttgaaaatattg

SEQ ID NO: 128916 - DNA, 593 bp, Homo sapiens
tgttctgttttgttttatggggtaggttcttttttttttttgtcctgagatggtgtctcgctctgttgcccaggctgatgtgcagtggcacaatcttggctcactgcaacctccgcctcctggtttcaagcgattctcctacctcagcatcccgagtagctgggactacaggcacatgccaccaagcccggctaattttttgtatttttagtagagacagggtttcaccatgttagccaggatagtcttgatctcctgacctcgtgatccgcccacctcagcctcccaaagtgctaagattacaggtrtgagccactgcgcctggcattagtttaagacaaactgtatagcagacattctttcctttccggcactccctctaccatgccgtcacgaagaaacatcttcttccatggacagtgggaaggggtgctcactctctgcagagaggacatatgggaacccaggtgcatgatccagggcagcatcttcttagctcagaggaggggttgagctgtcttggagggctgggtagagtcaggacccagtcagcaaaaacctgcatcatctgggtgccacccatgccaggaaca

SEQ ID NO: 128917 - DNA, 453 bp, Homo sapiens
tttacaaataattacttagtgtttttacaaataataacttagtgttttttttttatcagctgggtgttaggacattgcagatgaaaaacacatgatcctcctccttcaagagctcaaacttggagaaggcatattcaagaacrtataacaatagaactgccatgcgatgtttttatagagatgagatgttaagtgttgtggtaaaagaaatagagcatttaggcagacagggaagtaagcagtaattgtaataagagagaaaataattattttgagaaatatttaaaagttagagctatgaagtatttatctttaatttgattcaagaatgataaccttggtttctagtttggccaaatggtggatgtttctattactgaaataaggaaggaagaaaagaagcagagggaagtattagataccttagcaataaatagtaaaataatttacttt

SEQ ID NO: 128918 - DNA, 338 bp, Homo sapiens
aaacctttattgcctactgacccatcaaagccaacaaagtgaggaagcccgtcaggactttacaatatgatccttgtaaaatcccttaacccaggartcttaggtcttggggcttaccaagggctctgttaaccttgctctatgggcttcctgctagggaagagcatttccagtcattacttatctcaggctgaggcaggttctgtgagtgtttgcttatgtcctgcaggttgtcttcacctggctcattgttttctcaggcttgactgagcattccttcgtaatacaggtgaaaacactgtcatgaccaaaggcttaaggttttagatgctgtcaag

SEQ ID NO: 128919 - DNA, 542 bp, Homo sapiens
tgtggcttccatataaattttagaatcagtttgttgatattgacaaaataaatgactgagattttgttcaggatcaccttgaatcaatagatcatatagggaataattaatattttaatmgtattgagtcttttcatccatgaacataaaaatctctccatgcatttaaatcttctttgatttcttttaacagaatttgtagttttccttagaaattttggatatattttgttagatttattcctaagtacttcaattttggatgctaatgtaaatggtaatgtgtttttaatgtgaaattccaattgttcattgctagtatataagaaagcaattgacttaatttatatattagccatgtatcctgaaactttactataatcctttattaattctgtgcattttaaaatagcttctttgggattttctacacagacaagccatctgtgaaccaacagttttatttcttccttctcactctgtatatcttccatttacttttctcatcttattacattagctaggacttccaaaacaatgtt

SEQ ID NO: 128920 - DNA, 540 bp, Homo sapiens
aatagcactcttgtatcaggttagagagccttcaaaatagcaaataatagcagagacatacaatgcaattaactttttaacccatcttcaaatcaatataattttaataacagtggaaaatctggatttataacagcttactrtattttattagctaatttgctttttaaatacatttttaaatcctgttgaaaaaactaattaaatacccttgatttcttttttagtattttccttaaggtggctgatgtgggcttttctaaactccttttcattaaatcatagataccaccagagcaagaagaagccaggagagtgatggtgttgaatacattttcatttccaagcatttgtttgagacagatgtacaaaataacaagtatgtggacatttttgagaattttcatgtgactgttttttataagcacatgcctgtcccgttttagacaactgagagttctccatttgaagtgtattttaattatcataataatatttgaaacagatgaaaaggtaataatttggttggtaattattgtt

SEQ ID NO: 128921 - DNA, 590 bp, Homo sapiens
aacttaatcgcaagagaacattggataattatgtaagacatattcctcagattatcccacctaaggggtgagggacttggggtatgtatacaccagctcctgttggttgttgattgagagctgctccagggaaatggaccactccttccccaggtctcttgggccacagagaaagccttcaggcagagagatgcacatgtctgtacttagaagttggcaggagttcccccaaatggtagatgcccaaagaaatgttmaggatctgctaaccacaggatggctaatctagcaaatatgctgtgttgagtgaaataagatttaagaatatggatctaaaatatttagaaattccatattaaaatgacctattttaataattctacttgtaaaagtttaacttgttagtcacagattgtcatacaaggtgtacagggctggcttgcagggtaatccctacaaaaacttttataagtttttgtataagacctgaacaaaggcgaagatgggctctgagagatgtaatgtgataagaatcaccagaatggggcaatctggtatatccagacagaacttttagatgagaggatctg

SEQ ID NO: 128922 - DNA, 444 bp, Homo sapiens
ccctaagtacccagtgtttagctcccacttataagtgaaaacgtggtatttggttttctgttcctgcattaattcccttagaataatggcctccagctgcatccatcttgctgaaaaggatatgatttaattcttttttatggctgcatggtattccatggtgtatatgtaccacattttctttatccaagtcactattgatgggcacctaggttgattctgtgtctttgctattgtgaatagtcctgcaaagaacatgcaagtgcatgtgtctgtctggtagacagatttgttttcttttggatatataccctaatgagattgctcggctgattkgtagttccgagttctttgagaaatctccaaattgctttctacactggctgaactaatttacattcccaccagcaatgtatatgtgttcccttttctttgcagccttgc

SEQ ID NO: 128923 - DNA, 548 bp, Homo sapiens
attggtaattatggttaccttattgtactaccaaatattagatcctatttattctatcaaactgtatttttgtacccattaaccatccctactttatcccccsatccactaccttttccagcctctgataatcatcattctatgctcctatttttatgaattcaatttttttagatccttcatgtaagtgagaacgtgtggtatttgtctttctgaccctggcttatttcactttacataatgttgtccagtttgattcacattgttgcaaatgacaagatctcattatttttaatatgaatactttctgaattatattccattgtgaataatattccatgtgtatatgtaccacatttttttttacccatgaatctgttgatggacacttagatggattcgaaatcttggttattgtatatagtgctgcaataaacagggagcacagatgtatcttcgttatactgatttcctttcttgtgggtacagtagtagatgttaaaaccaagcagcagtaagatcgctatggtagttctatttttagtact

SEQ ID NO: 128924 - DNA, 452 bp, Homo sapiens
ctaggacatagtacaagctctattcgtatttgagctagtgaatgaatgacaaagagataacaggaaaactgtctgatccaaaatcatcccaaataagacacatgattcttatctacaaaaggaagactgatgatctagatgcactaactaaaataataaaaaataaaatggggtgaatttatgctaaactaaataccatgaacaaccagaaacctgaggcttcaggagttctgttcccaagcaaattgatgtggtaatcactggagtctgggcctcctcaccatctctgcaagcggaagatgrtctttcattgaaggacacagctgggaataggaagacctggatctctggctccaaacatgtcagtggaatggggaggcaaaagaaaaacagtaaactcctctttatagccaagctgtaggagtcacaaaaactctcctaaacacttctca

SEQ ID NO: 128925 - DNA, 589 bp, Homo sapiens
cagatgatggggaaacagttcatggatgtaaaaaaaggacgccaagtatgggacccacatttgccatttgagaagaagtttttcatttagggaacggggtttcatttctagcttcacagaactctgcatgtctgggcctcacctctggaaattctggagacatttcggaaactccatagtgggctctaatgcgtagccatagtggaacccctttaccttagggagaaagaattgatgattaaattaagccatagacttttgatgcagaatataaattgctctatagtagactataagtgtccatgyaatgtgtctatagtagctgtttagtaagcctcagagagcaactgtagtgtatttttggtttgtttgttttttggggttctattaattctttatttcccaaagaccaaattaaagaatcttttccggaggcccagaggccctaaaaacatggtagatccactcaatcatcctgtcgtaatttgctgatggtatagactatcctttactgaggcaggtggatcaatagtcatacaacagggatatgggcttgctgagcatggccatccatttgttatgtgtatgc

SEQ ID NO: 128926 - DNA, 422 bp, Homo sapiens
atgaaacacatactgttttgcttactctgcaatagggttaagtcttaactggaaaagagcaggaaaaaaatcttaaaacatagatatctaaaggttatttgaagrccaatctggcatatagaatattcttattctgccattttctgacttcactttggattttaatatcttaggaagctattttcctctttaacactgatttttatggaaatcaaatgaagcttagttacctcaccatgtaccaattcctcagtgatatttttaacttctgattatcttattaatggttgtagtagccagattttcctaaaaattcttcagtataactatgggtaggcatttgtgctagctttgaacaaaacaaaacagaacttcctatgttcaatttacaaaggaaattttaatattgtgtgactaacttc

SEQ ID NO: 128927 - DNA, 636 bp, Homo sapiens
aatatacatttatatctgtaagagttaaagaaagaggaatgaaacatgaaaagcagcttaacagtcagacagttttattttggagaataaacctgagagggggtcctggccgattttggtcaggagtgctgtctcttacagagtatttattgacaagagagcttggaatgtttccatatgggggagaagtttatggctgggttggaatatctctgstaggaggggaagttattttggggctgacatctctacagccagaggggagatgtctcagggctggcatgtctgtcgtcggggaggagtttggaatctttctggtctgagatttcatttgtggtttatgggcatgctgaccttagacattaggctgatgccctttggatttaggcagtttttgatccaggtgaactttagaatggcagtgcttgtccaagattgcgatgctcctgccctgtcaatatcaatctaagtatatatagagataaataatatagtttataccaaccattgtattagatattgtgagttgttcaatggtatagtttttggttacccacttttaacttacatattatattttcaaaatttttcacagtgctgtatacagaagtgatgaatgcaagtttgctaatgact

SEQ ID NO: 128928 - DNA, 636 bp, Homo sapiens
aatatacatttatatctgtaagagttaaagaaagaggaatgaaacatgaaaagcagcttaacagtcagacagttttattttggagaataaacctgagagggggtcctggccgattttggtcaggagtgctgtctcttacagagtatttattgacaagagagcttggaatgtttccatatgggggagaagtttatggctgggttggaatatctctgctaggaggggaagttattttggggctgacatctctacagccagaggggagatgtctcagggctggcatgtctgtcgtcggggaggagtttggaatctttctggtctgagatttcatttgtggtttatgggcatgctgaccttagacattaggctgatgccctttggatttaggcagtttttgatccaggtgaactttagaatggcagtgcttgtccaagattgcgatgctcctgccctgtcaatatcaatctaagtatatatagagataaataatrtagtttataccaaccattgtattagatattgtgagttgttcaatggtatagtttttggttacccacttttaacttacatattatattttcaaaatttttcacagtgctgtatacagaagtgatgaatgcaagtttgctaatgact

SEQ ID NO: 128929 - DNA, 263 bp, Homo sapiens
agaaaatttaaacaatttacatactttattcaaccaaatttaaacttaaccaacgcccctacccttatcctgatccaaacaaaatacatagaatcattatatctgattaccattcttgattgcctcttctttttytttttcttttttttttctttttttttttgagacagatctctctctattgtcacccaggctggagtgcagtggtgcagtggcacaatcttggctcactgcaacctgcatcttccgggttcaagcgattc

SEQ ID NO: 128930 - DNA, 396 bp, Homo sapiens
agatctagaacatttctgaccctctggaaagcttcctgatgatcttttccagtcaattcaacacattcctttctcactccccaccacccctcccctccatcacagagccaaccactttcttatttccaccagcatagacctgttgtgcctgtttgtggactttatataaatggaatcctccaatctgattttttttgtgtgggtacatacattttgtgtgggtatatatatttataggatacatggcatattttgatataggcatacaatgggtaataattrcatcagggtaaatgggatatccatcacctcaagcatttatcctttcttttatgtgacaaacaatccaattatactcttttagttatttttaaatatacaataaattattgtgga

SEQ ID NO: 128931 - DNA, 396 bp, Homo sapiens
agatctagaacatttctgaccctctggaaagcttcctgatgatcttttccagtcaattcaacacattcctttctcactccccaccacccctcccctccatcacagagccaaccactttcttatttccaccagcatagacctgttgtgcctgtttgtggactttatataaatggaatcctccaatctgattttttttgtgtgggtacatacattttgtgtgggtatatatatttataggatacatggcatattttgatataggcatacaatgggtaataattgyatcagggtaaatgggatatccatcacctcaagcatttatcctttcttttatgtgacaaacaatccaattatactcttttagttatttttaaatatacaataaattattgtgga

SEQ ID NO: 128932 - DNA, 617 bp, Homo sapiens
gtgtctgatatagaaaaaagcagtcctagcactgtcctgggaagaaacaaagacagtgctgtgagaaacacatattcacccatccaaacccaaagaatggactccgagacatgargagtagccgaagtgagacttttgatgggggtcttgcaagatcgggtgtctggtagacaggtacaccctgggcagttacagcaggtaatttacctcctagcatgcaaatccctcccccagttcctcattggtcaagtactatggggttacaatcttcctggacgtcgcctaagtttaatcatcccccttataaggttataccctggtccccttcctgcttaagctttgatttcccaataacgaaactttcttcccttttatgggctgacccctcctctacattctgtttacatatcgtgaccttctagatgcatgcatgctgtttgttacatctgcaggctggctgccagtacttagatttatcatgccttgaaaatggaccatttaaaatgttttctcacagggccttgtggctctgcttttcagaaagactggaggacactcatagtcacaggaagactaggatattcatgggtagcaggcctgaattttctggcaagaac

SEQ ID NO: 128933 - DNA, 544 bp, Homo sapiens
tgtaaaggtgctgtacctactgctgaaaacatggactgctcctaaatgtgtgattttttgtgtgtgtagtcacccatccagagaaacgcttgttagacctcaatgccagaccaaggtttctcctcttgaactactggtttggtttccttttgaagatagtctgattcttcttgctgattctttttctgtcrtcatttgctcactacaaacctcaacggtgggaactttacaatgtgtgcttctcctcaccaaaattggtagcctttccttcaaaattcacatccacttggattctcagaatgtgaccttactaagaaatagggtctttgcaaaatgtaattaaactaagaagaggtcatacatgattagagtgggctctaaatcaatggctggtgtccttacaagaagaaaaacagaaacagacagaaatacaggaaagaaggctgtatgacgatagaggcggagactgggatgatgcagctgcaagccaaggaatgcctgggattgccagtgaccaccagaagttaggaagaggcatagcagg

SEQ ID NO: 128934 - DNA, 587 bp, Homo sapiens
tggcaattgctacaaatcagggttgttggggtcttttttccagaagagctttttacattttttttaaccagcacccactgcagtcacacccacccatggccctcactttgagatgaggcacttgttatcaaatttaccaaatttgggggcaccttacccagggactccaatatccaggccccagctgtctcctcttcacctgcttccctcaaaggggacactgaatcccaaagcccctatgctgacaccactcctgctcctcagcaccatcccaggcggtctcccatccaagtaccagcgaggcccaacactgcttagcttctgagcaggaagccaacagcaccatcccctgacagggcccctgcctgagtcctaagacacgcattcagtgggtccacagatgtttactgaatgctcaatgtgtccaaggactgtcctaagaactagagcaattttcttgggagtggttggtcaccaagtagttcagggatctcagacatgtgagaacgcacaytctggctgaatgcactcatcagagaggagaggagtgcaacagtttgcaataaaataggcctctcctttgccat

SEQ ID NO: 128935 - DNA, 448 bp, Homo sapiens
ttgcagggttatggggttataggaatacaaaggaaaacatggaaggatatcctgttttttttaaaatacaagttatatttggagatggagggacagatgtgaggggaaaggtagagaagaaaaaagtgtccacactccaacaggagtcatgtgatcccttttacgtaaatgtacatgtgtgtctctacataagaacgttacaactaagaaaccatctggcctcacatgtgtagtgaggaaggtaaatcctaacctttgtctgcctgaaacagtgaggaagtcaggaatgagaagggaatctgagccagaggataaacaagattttgacaagcaaagtcrgcagcaagatggaaagaactcctggcaaaggaaataatcttaaacaaaggaaggcatttggaagggcaggtgttttatccattcaacaaatgtattgagagccagtgtt

SEQ ID NO: 128936 - DNA, 488 bp, Homo sapiens
gggtggttgtgcctgctgcagataattgtgaccctgaatagctggaactgtgttcactgtgaaccaatgtttcctctgagagccccaaagaccctgagtgtgaatcgcttgagtggktggggtctcttaccctgtgagtcctcccaccaggggccccatccttccacccatctttcctcgggcctgtttcccttgaggtctgagctggggtgcccagtgaggggtcatccttgctgtgagataaaaccgaggtgtgactccccatctccatgcagggccctagagggtgtgcgcagcttcaaccatctgatcaagggtggattcaactccctgctcagggcagcagctcgtggttcattcagctccagcgacgtctcgatggggataaggtaaggggcacagagaaccaaagattgggtctgatgggattaaacccccaactggtgtccctgtgtcttctctttcctgacaccagacgccaagaagaa

SEQ ID NO: 128937 - DNA, 488 bp, Homo sapiens
gggtggttgtgcctgctgcagataattgtgaccctgaatagctggaactgtgttcactgtgaaccaatgtttcctctgagagccccaaagaccctgagtgtgaatcgcttgagtgggtggggtctcttaccctgtgagtcctcccaccaggggccccatccttccacccatctttcctcgggcctgtttcccttgaggtctgagctggggtgcccagtgaggggtcatccttgctgtgagataaaaccgaggtgtgactccccatctccatgcagggccctagagggtgtgcgcagcttcaaccatctgatcaagggtggattcaactccctgctcagggcagcagctcgtggttcattcagctccagcgacgtctcratggggataaggtaaggggcacagagaaccaaagattgggtctgatgggattaaacccccaactggtgtccctgtgtcttctctttcctgacaccagacgccaagaagaa

SEQ ID NO: 128938 - DNA, 559 bp, Homo sapiens
tgcaggggaggaagcagctgcaagaccagcattcccaccaaggccatattttctctttgaagaaaaaaatccttccatatggattacattcagcagaaatgttggaaaatatatagaaaataggaatatggtttaaattttaaaccttaaaatagctccaagggcaacaaggaattctctgggtctgggtttcaggtctgaaacaattgatgctaatgatgtccacattccccatcacaccgtgatttyggaaagttggtttggggaagtttaacagaagagagaaaactcaggaaacagtgaattgggagaagttgttgcatttcctcattctctctccgtctgtctcgttctcatccacttagtcacacacggcaaccaagcaaaagtgtaaatattacttttcatgcatttatctaggcatagttaggcaagcagaattgagcaaggccccaggtaaagggaccctttgaagtaatagcacttttttggctgttttgttggtcaatttttgggtgcattatgcttttaagatagaacttaataccaaccattaaaa

SEQ ID NO: 128939 - DNA, 626 bp, Homo sapiens
tttttttcccccacaggtcttttaatttaattaatataaagtatattatgagtattttcaaatacacacgaagtataggagaaagtgtaagaaacttccatttatttacccattacccagctttaacatgcgtggtaaatctcatttcatctctatgtcaccttatactagtttattttcttttggattattttgaggcctagaccttgtatcatttttatcataatactttagtatgtgtctctaaaagcgaaagactccatattaaaacacaaatataataccagtatcttgcctacaaataataagcaataattcttttaatattatcaaatatctagtcaacgttcaaattttcctgattatctcataaacttttcttgagctactttttaaaataaagattcaatgaaggcccatactttgtttcttccatctgttgttagtctgtaactttcctaacatcctgtgtgtgtgtgtgtgtgtgtgtgtgtgtgtgtgtgtgtgtstacatttatttcatgttctgatgaaaacttcgtgtcttataatggatccttcttcaaaagtttgggggaaaaaaacctgctctagagaatttgaacactgcttttttttttttttcc

SEQ ID NO: 128940 - DNA, 629 bp, Homo sapiens
ccagaggacaagcgttccaggcaagggaagagctgaagtgaaggcctcaaggtggagggagggaagaggaagccttgaaaggcactgtgaggacttcagcttctacattgggtgaaatgggaagtagagttgacccttgaacaaatgtgtctgaactgtgcagatccaattatacgtgggattttttcaataaacattgaaacaaattttggagatttgagacaaattgaaaaaacttgcagacaaaccacactgcctagaaatatcaaaaaacaaaattgaaaatcagcctggaccatatagtgagactctgtccctacaaaaaatgtaaaaattagccaggtgtggtggtgcacccctgtagtcccagctgcttgggaggctgaggcaggaggatcacttgagcccgggaggtcaaggctgcagtgagccatgatcacaccactacactccagcttaggtgacagagtgagatgctgtcaaaaaaaacaaaaagttaacaaaatgttagatatgtcattaatgtgtaaaatatacgtagatactagcttatrttatcatttactatcataaaatttacacaaatttattataggaagttaaaatttatcagaatgtatgcacacaac

SEQ ID NO: 128941 - DNA, 649 bp, Homo sapiens
caggctgatttagcaaacaarcatgcaagtaaattcaatgaagatcatttttctttgagacagggtcttgctctgttgccaggctgaagtgcagtggtgcagtcataattcattataacctcaaactcctgggctcaagctgtcctccctcttcagcctcccaagtagctgagactacaggtgtgcaccaccatgcccaactaaaattttttaagaaatagggtctttctatgttgggctgctcttgaactcctggccttaagtgatcctcctgcctcagcctccccaagtgctggtaatacaggcacgagccaccatgcctggactcaatgaagaacattctgatggaaaagacttcaaacatacttatctattagcaacaaaactaagaaataattatgtggtgagtccgaaatagggctctttgcactgatgattcacaagaaatattaaatgactgcagcaacaataagaatctgcttgttctttgtttaggagctgattgcagacccactttgcccatttaaacttcttttcaaggccaataaattcttattgagggatttttatgttcccctctattcagaaaatagaagccccttttgcaacagaaaatgtttcgctgacaaaaaatgttttttaaactttg

SEQ ID NO: 128942 - DNA, 505 bp, Homo sapiens
ttgtgttaaccacctgctcctgaataaaatgaaggttataggagcttttaataaaacattttctctcaaaaaccttartattccccaaatgatgtaaccaaacaatgttaaatacaaataagacagaagagcatttattattggtgctacagtccagctttcactattcatacagtgatttcaatttaactcaacatttttggagtccctattatgtctcctgcactgtgctcagacagtatgaacaaaaaagataacacaaggttcctacctttgagaagctctagctagaaaattaccttcagattactcagatgcgggggataacctgaatccctaaattactcgccattgtcgtgtcaaagcttcgcatcccatattcttcaaatgagctgatttcctctcattcctttgctcagatttatccagagcaacctactgcctccacaatagctaaatcgatagagattctgactaaagatatggacttcctcctccagaaaca

SEQ ID NO: 128943 - DNA, 419 bp, Homo sapiens
agccaaatacctgctcccaaatgaaaaactgaaataggtaggtattatcctaaattacataataaatgaaaagaatccatgtagtagtataatacattgattctatttattcttcctggtaatcccttcaaagtctatggcttcaacaactacatgaatactaatgacttctaaatctctagcccctgggcaatttctctcctgacctctaacctgtatattctactcctattaagcatctccaattagatatccctctaccacctcaaactcaacatacctaaaacttaattcagcatttccccctggaaaagtgttcttcttcctcccgtattctttgccttgaagaatkgtgccacccacctgctcaactagaatgcctgaaactgaatcatactagattctttcttcgtctccac

SEQ ID NO: 128944 - DNA, 573 bp, Homo sapiens
ataaacaaacatcttctactttttgtcatgatataagcaagatctgacttttataaaggaagcaaagatggggttgaaggcttaagaacagtgtgaaaagtttgaagcargcaaggataaatgaaatgataaccaatcaactccacttcttaagattatgtaaatgagagaaagcacaatcaatcaacaattgtgggcatgctttgtttggatctggaagtggaacatgaagtggaaggcaagctgcatttcatggaattagattaagtatgaatttaaaaaggtaagtattaagaattatcaagaaaaatcactaaatgcacacccatatagcatgcaattatatatgggctaatactaatacagtcaatgtagcactaccatgagtctgaacctgtcactattacttagtagcaatggcagaagctagaaggttcacacaatgaaggcaggcaacagaaaccataagtaaccagaaatgaagaggaatctcacatgtagagaagctatacagattagatcatgtaatgggaaaagaagtaaaacccaagacagactgttgactaatgataa

SEQ ID NO: 128945 - DNA, 573 bp, Homo sapiens
ataaacaaacatcttctactttttgtcatgatataagcaagatctgacttttataaaggaagcaaagatggggttgaaggcttaagaacagtgtgaaaagtttgaagcaagcaaggataaatgaaatgataaccaatcaactccacttcttaagattatgtaaatgagagaaagcacaatcaatcaacaattgtgggcatgctttgtttggatstggaagtggaacatgaagtggaaggcaagctgcatttcatggaattagattaagtatgaatttaaaaaggtaagtattaagaattatcaagaaaaatcactaaatgcacacccatatagcatgcaattatatatgggctaatactaatacagtcaatgtagcactaccatgagtctgaacctgtcactattacttagtagcaatggcagaagctagaaggttcacacaatgaaggcaggcaacagaaaccataagtaaccagaaatgaagaggaatctcacatgtagagaagctatacagattagatcatgtaatgggaaaagaagtaaaacccaagacagactgttgactaatgataa

SEQ ID NO: 128946 - DNA, 600 bp, Homo sapiens
aaccactgtatgactgtttccccaaaagaatggaatgatgctaggcacatgatggatgctcgatagtgtctgtcattgaaggaatgaatgacaggatataaagcagccattgcacagtaagcccaaatgtggaaagcacaaayagaaaagcagaaacaatactttgaggattcactaaatcaccaactcaaactatgcagcataattgtggatgtctggaaaacagcagcaactgatgcggtggcctaatatgctgctacaaaaaatgtaatggctctttctgagggaaaacttcaggctgtctatgaatctacaaacccaaagaaggaaatgtcatcaggcagtttagaaaaggaaatgcagatactgatcaaaacactattttccacattttctcagtagggaaaggattgctgatgctgcattgacctaacagtcaagatcacaacttgcctttcattctgtcacctttcaaaagaaagaaaaacatgtatactggaaagctcatcacattttaggactatggtcttttaagagattcccaccaaaagattccttctatggggcccagggccatgttttatgccactgactctgcca

SEQ ID NO: 128947 - DNA, 600 bp, Homo sapiens
aaccactgtatgactgtttccccaaaagaatggaatgatgctaggcacatgatggatgctcgatagtgtctgtcattgaaggaatgaatgacaggatataaagcagccattgcacagtaagcccaaatgtggaaagcacaaacagaaaagcagaaacaatactttgaggattcactaaatcaccaactcaaactatgcagcataattgtggatgtctggaaaacagcagcaactgatgcggtggcctaatatgctgctacaaaaaatgtaatggctctttctgagggaaaacttcaggctgtctatgaatctacaaacccaaagaaggaaatgtcatcaggcagtttagaaaaggaaatgcagatactgatcaaaacactattttccacattttctcagtagggaaaggattgctgatgctgcattgacctaacagtcaagatcacaacttgcctttcattctgtcacctttcaaaagaaagaaaaacatgtatactggaaagctcatcacattttargactatggtcttttaagagattcccaccaaaagattccttctatggggcccagggccatgttttatgccactgactctgcca

SEQ ID NO: 128948 - DNA, 495 bp, Homo sapiens
tgaattccataggaaaactcttaattgatcaaatagcagcaaaggtagatataatttatagccagataggtcttatataaaataagcagtttctgatggctctttgtgtgctgtaatcctcactataacaatacaaaatcacctaaatatgtgtttatgtagcctacatgcagaaaagcttctggcacaaacttcttaggcctsttctcaagagccttaagcctgagcccctgaagtgacagagctcaagtcaaatcaggaaggatgaagaccagaaaggaataagaagaacaatactttgtggtcacttgtttgttctacctttctaaactggtcctagttcaggttctcttatatatgccattatccattaattcagctattatgataaaatgtttccagtctgtctaatgtaggcaagtactgacacagtgctatttttcctacatgacccagatgaaatcttttgacagccctggaactctcatttatttc

SEQ ID NO: 128949 - DNA, 558 bp, Homo sapiens
aactcttaattgatcaaatagcagcaaaggtagatataatttatagccagataggtcttatataaaataagcagtttctgatggctctttgtgtgctgtaatcctcactataacaatacaaaatcacctaaatatgtgtttatgtagcctacatgcagaaaagcttctggcacaaacttcttaggcctcttctcaagagccttaagcctgagcccctgaartgacagagctcaagtcaaatcaggaaggatgaagaccagaaaggaataagaagaacaatactttgtggtcacttgtttgttctacctttctaaactggtcctagttcaggttctcttatatatgccattatccattaattcagctattatgataaaatgtttccagtctgtctaatgtaggcaagtactgacacagtgctatttttcctacatgacccagatgaaatcttttgacagccctggaactctcatttatttcctcctctagattcctattctgtggccccagaattactatggaggagacacactgtgaatggtcctgtagaaataggtg

SEQ ID NO: 128950 - DNA, 532 bp, Homo sapiens
ctatagcactggggacctgttggtacaatttctttgataggaaaaagcaatgtaacctttttattttacttaacagaattgtaatcatgcagaaatgtcctttagagatccagaatccttggttggcagagaatataagatattggggcaagagatgtcaaaatacaatttatctatgtaagctagtacataaaccaatgagtgcatgaattccccaagacagtgaaggtgactgtaaccaatagtgattcatgtgaccactatcacacacgttggggggcttgtagattaataatgtggtagtgaaactgaaggatttcatagagggatataagaggaaattktaaaatacttcaacaactttcataaaaatgtatttgcatacttatagctctttctgttaattttttctacttattcccatatggtttctgtttcttcatttaactctaggagactcagttatcattaaaagctatcacaggttttgaagcaaacattatcacagcctgaactgagccacagctcacca

SEQ ID NO: 128951 - DNA, 444 bp, Homo sapiens
gcattaggagaaatacctaatgtagatgacaggttgatgggtgcagcaaaccaccatggcacgtgtatacctatgtaacaaacctgaatgttctgcacatgtaccccagaacttaaagtgtaattaaaaaaaaaaaaaaagaaagaaagaacaagtaggggaataggggaagggagacaagaaaggaaaaatgagcagwttatgagtgtgagcaactggggctcaatcccactgggggcctctgggagacagtgaagaacatgactcagagttctcccacgtgaggggtgagggtgctggattatttattataataaagttacagggaacagagaaaaaattaaaaaattaaaaattaaaagtgggtataaatgagtgcagaactgcctctgaactgctactctgggcacactgactgtggggtagccctgttgtgcaaagaac

SEQ ID NO: 128952 - DNA, 597 bp, Homo sapiens
gcctagggcaccaggggctggagagcaggcagccagagaacctrtccaggggaggtagggaggcagcactttgggtaagtctaggccccatgtctccagcaaatgctccgttgtcctatcagacttcacttgcaaaacacaaaatcaaatataaaattattgaagttttaagacagcagccacagagcattaaaccccaggtgcagggactccacagaaaagggaacaatgttttcatacaagtagatctttgtggtatttcttcaatcatgtgtcatcataagagacaccaaaacatcctgcaaagagtataggatttggagtgagaagatctggagtgagaagatccagatttgtgtcctgagtttcagacttactttatcattaaagaaatgatattatcattaaactgtacaaaaccatgcattttccatcttatgatcgtctcatattaggtggtatcctctaacagctaaatggaataaggttagtgtcacagagaccatgagctagctaccaaaatctattcatctcatctttgggtacagaatagactagatttcccagactttcttacagataggtggagtcctatga

SEQ ID NO: 128953 - DNA, 597 bp, Homo sapiens
gcctagggcaccaggggctggagagcaggcagccagagaacctgtccaggggaggtagggaggcagcactttgggtaagtctaggccccatgtctccagcaaatgctccgttgtcctatcagacttcacttgcaaaacacaaaatcaaatataaaattattgaagttttaagacagcagccacagagcattaaaccccaggtgcrgggactccacagaaaagggaacaatgttttcatacaagtagatctttgtggtatttcttcaatcatgtgtcatcataagagacaccaaaacatcctgcaaagagtataggatttggagtgagaagatctggagtgagaagatccagatttgtgtcctgagtttcagacttactttatcattaaagaaatgatattatcattaaactgtacaaaaccatgcattttccatcttatgatcgtctcatattaggtggtatcctctaacagctaaatggaataaggttagtgtcacagagaccatgagctagctaccaaaatctattcatctcatctttgggtacagaatagactagatttcccagactttcttacagataggtggagtcctatga

SEQ ID NO: 128954 - DNA, 539 bp, Homo sapiens
gctcatcgtgggccttgggtaagattcagagacataccaacttcccagctgtggtcactatagggagagactccttctgcttgagaaaaggagagggacaagtaaagaggactttgccttgcagcctaggtaccagctcagccacagtggttgatatagtttggatatttgtccccacccaaatctcatgttgaaatgtaatcccmaatgctggaggtggggcctggtgggaggtgtttgaatcatggttgtggatccttcatgaatggcttcagccatccccttggtggtaagtgagctctcactctgagttcacatgagatgtggatggtttaaagtatgtggcatccgcctccccactttctgtctcgcttgctcctgcttttgcaatgtaacatgcctgcttcccctttgccttctgccatgattggaagcctcctaaagcctcctcggaaactgagtagatgtgggtaccatgcttcctgtaaagcctgcagaactgtgggctaagtaaacctcttttctttacaaattaccca

SEQ ID NO: 128955 - DNA, 539 bp, Homo sapiens
gctcatcgtgggccttgggtaagattcagagacataccaacttcccagctgtggtcactatagggagagactccttctgcttgagaaaaggagagggacaagtaaagaggactttgccttgcagcctaggtaccagctcagccacagtggttgatatagtttggatatttgtccccacccaaatctcatgttgaaatgtaatcccaaatgctggaggtggggcctggtgggaggtgtttgaatcatggttgtggatccttcatgaatggcttcagccatccccttggtggtaagtgagctctcactctgagttcacatgagatgtggatggtttaaagtatgtggcatccgcctccccacttyctgtctcgcttgctcctgcttttgcaatgtaacatgcctgcttcccctttgccttctgccatgattggaagcctcctaaagcctcctcggaaactgagtagatgtgggtaccatgcttcctgtaaagcctgcagaactgtgggctaagtaaacctcttttctttacaaattaccca

SEQ ID NO: 128956 - DNA, 613 bp, Homo sapiens
tttgaatgacagaatagataaaacacgtgaagtcatacacagctttctctgaacaaattaattagctttcctgcagccctccgtccatgccatagagagcaatcacacaagtgaatcaagcagccacgcacagccttgctcagtgttygtttcaggagaacttgtgtacgcacgtaatttcactctaggaaggaaaacagcatgggatagtgggaggatgctgcagcctttaacccatcacttaacctctgtgtggctcactgttctcatctctacaaggtgggtagaaaaacccatgcttcctacttcacagaggtgtaagcataaaagatgtaaacagactttgaaaaagttaaaagagctgtgcaaatacaaggtgctttatacttgaagaagatataaaaaggcagaatctgtgatgtagcagcagcaattctaccacccagccacaaggctgctggcgatgtctcacatgaaagcaaaggcattttaaaacacaaagacttaacagagagcagaaatgaaaagacatgctgtttgcaaaaatggttgtgtttagcctggggttttcacataagaaaataatattttgagaaattgtcatgttaaattt

SEQ ID NO: 128957 - DNA, 613 bp, Homo sapiens
tttgaatgacagaatagataaaacacgtgaagtcatacacagctttctctgaacaaattaattagctttcctgcagccctccgtccatgccatagagagcaatcacacaagtgaatcaagcagccacgcacagccttgctcagtgtttgtttcaggagaacttgtgtrcgcacgtaatttcactctaggaaggaaaacagcatgggatagtgggaggatgctgcagcctttaacccatcacttaacctctgtgtggctcactgttctcatctctacaaggtgggtagaaaaacccatgcttcctacttcacagaggtgtaagcataaaagatgtaaacagactttgaaaaagttaaaagagctgtgcaaatacaaggtgctttatacttgaagaagatataaaaaggcagaatctgtgatgtagcagcagcaattctaccacccagccacaaggctgctggcgatgtctcacatgaaagcaaaggcattttaaaacacaaagacttaacagagagcagaaatgaaaagacatgctgtttgcaaaaatggttgtgtttagcctggggttttcacataagaaaataatattttgagaaattgtcatgttaaattt

SEQ ID NO: 128958 - DNA, 613 bp, Homo sapiens
tttgaatgacagaatagataaaacacgtgaagtcatacacagctttctctgaacaaattaattagctttcctgcagccctccgtccatgccatagagagcaatcacacaagtgaatcaagcagccacgcacagccttgctcagtgtttgtttcaggagaacttgtgtacgcacgtaatttcactctaggaaggaaaacagcatgggatagtgggaggatgctgcagcctttaacccatcacttaacctctgtgtggctcactgttctcatctctacaaggtgggtagaaaaacccrtgcttcctacttcacagaggtgtaagcataaaagatgtaaacagactttgaaaaagttaaaagagctgtgcaaatacaaggtgctttatacttgaagaagatataaaaaggcagaatctgtgatgtagcagcagcaattctaccacccagccacaaggctgctggcgatgtctcacatgaaagcaaaggcattttaaaacacaaagacttaacagagagcagaaatgaaaagacatgctgtttgcaaaaatggttgtgtttagcctggggttttcacataagaaaataatattttgagaaattgtcatgttaaattt

SEQ ID NO: 128959 - DNA, 613 bp, Homo sapiens
tttgaatgacagaatagataaaacacgtgaagtcatacacagctttctctgaacaaattaattagctttcctgcagccctccgtccatgccatagagagcaatcacacaagtgaatcaagcagccacgcacagccttgctcagtgtttgtttcaggagaacttgtgtacgcacgtaatttcactctaggaaggaaaacagcatgggatagtgggaggatgctgcagcctttaacccatcacttaacctctgtgtggctcactgttctcatctctacaaggtgggtagaaaaacccatgcttcctacttcacagaggtgtaagcayaaaagatgtaaacagactttgaaaaagttaaaagagctgtgcaaatacaaggtgctttatacttgaagaagatataaaaaggcagaatctgtgatgtagcagcagcaattctaccacccagccacaaggctgctggcgatgtctcacatgaaagcaaaggcattttaaaacacaaagacttaacagagagcagaaatgaaaagacatgctgtttgcaaaaatggttgtgtttagcctggggttttcacataagaaaataatattttgagaaattgtcatgttaaattt

SEQ ID NO: 128960 - DNA, 578 bp, Homo sapiens
ggactcgtccctaaaactactaaccataagtcagtcttcatgcagttttgcatgccaaattcacacttcttggccaagaaatctcaagccaagaagtcagttaaagttgtcctgggctggtagttttccgggttcctggcagaaacaaattcaatcctctttggagtattagttttatcacagtctgaaagaattcatgcaaaaaaagttcacaaaaatatgaggccacagtaaacactgtatttgttctcatgttgctaataaagacatgcccgatactgggtaatttataaagaaaagaggcttaatggactcatagttccatattgctggggaagcctcacaatcatggcagaagagcaaggatgtctacatgtcagcaggcaagatgagagcatgcgcaggggaactcctctttataaaaccatcagatctcatgagacttattcactatcacgataacagcatggcaaagacygactcccatgatttaactacctcccctcaggtcccttccacaacacctgggaattgtgagagctacaattcaagattagatttgggtggggacacagcca

SEQ ID NO: 128961 - DNA, 503 bp, Homo sapiens
tgttaagtttcccaccactaggaaatgttcaaactttggccaggacattagtacaggtatggtgaaagggattcaaacacttgatgggaacttggagtaaaaagggtggctttaaagttaattccgaccctgacagtttgcaaaaatgaaagggataagactggtaattgaaccaaaccttcatgcctctgaattcatatatgtagaaatataacaaatctgaataaacttttctcacatgaaccatgcaataagaagtcagacttactgttttgatcttcctaattcaaagttagaatatactttgtactgaggtttctttcattaactgagacacaagccagcaacttgacctattaacaccaacactgagatcaagcattgctagtttatcctctataaatatcaagtacaattcaattgrttgagcacctactatatgccaatcatcgtactaaagtttgggggatataatggtgaacaacaacaaaaaaacgtgatct

SEQ ID NO: 128962 - DNA, 590 bp, Homo sapiens
tcacagcactcaaactaatattttgctttagaacctgaatctgaaactaatttaatactcattaaatacattaaatgccttaatacaggggacacaggtatagaaggtgaacttttaaaatatatatagacttgcgaaaagtatagggagtctactcattttatgttgcattttttaaaaatctacatttgttccaaaaccttctttaacaagtagtattttttggccaggcacggtggctcatgcctgtaaccccagcactttgggaggccraggtgggcggatcacctgaggtccaggagttttgagaccagcctgaccaacatgatgaaaccccatctctactaaaaatacaaaattagccgggtgtggtggcttatgcctgtaatcccagctacttgggaggctgaggcaggagaattgcttgaacccaggaggcggaaggtgtagtgagccgagattgcaccactgcactccagcctgggcaacaagagcgaaactccgtctcaaaaaaaaaaaaaaaaaagtagtatttttctttcttccaaatatgaattttacttttcttacgacacacaaccacaaaaaac

SEQ ID NO: 128963 - DNA, 570 bp, Homo sapiens
cttgtttagagtccttcaatcatttccccattgcccttagaatatagcccagacctcctgtcacaggatcctttgaactggcaactgaccacctatccctctcactcacctgatccaactacactggcttcctttttgtttcacctgcagcactcatacatatcaccacaaacattttcccaagtaagtccttcctggcctttctcatccttcagcctcagctcaacagaccttccctgaccaccccatctagtgttgtctcctcaccttccattatgacctcatcactctacttatttccttcctctttcaccacctgcattaatttgtgtattctgtttcccctactaacatgtagattccacagsgttattttctgcattgttcacagatgtaacatgagctcccatgagatagtaggtgttcaataaatattcattgaaagtaaaatgagcccatccatccattaatcaagaaccccttttgttattttcttccatgtatcctaactttgaaatatttttctataaaactatttaagttaaaacaccacccatttccaatattctc

SEQ ID NO: 128964 - DNA, 618 bp, Homo sapiens
gcatcatttgctaagttacttaaaaatttaactctcccacccactcattcccatcactgctgacttcaaactatcacctagcatttaattttcctcttctgctgatttccttactgtgcaatcactgctgtggttcaatttttcccccaagcatgtcagcactagaacattataaaataaaaagtcagtaattataactaacaaattgaagtcaataaactttaagctggcaaatattcgatttagactggcattctgccagccaatagtacatgatttgactcctgcaaataaagaagaatgttgataaggacgtttatgcaagtaagtttcctggctggcaatttcatggatttttagtgattatccgcattcacaaaatcttagtcttcaagtcattatttatctcccagctagcattcaggtactgattctgaacacctaatagcactggaaattctcatttactttctgttacctaagttagtaaacttagtagattagaagaaggtacgcatgaggttaaasgtcttcattcgagctccatttacacagggggaaaacccactccatttgcaaagaccaaaaagctgatttcataaatggacatcattggta

SEQ ID NO: 128965 - DNA, 543 bp, Homo sapiens
ggtgattcctctgggcctcctttatgagcctatccagaaaaatgaggtgctcttccctctgctcccaccaaaccctgagcatctctcttcacagcattcctgccactgttttggggctacttgtgtacttgcctatccacccccttccgcaaaatgcctggtttttatctttaaaggtaggtatttgtttttccttatacatctttgtcttccccgrcacccaaatacagcctggtgtaaactaccagcatttaataaatattgaataaataaatgaatggatggaaaataaacaaaaagcttaagtctctctctacattattataacctcttagtgaaggatatatgaaatgacatcacctacaagtattaatggcaaaataaaaacatagataatgagcactttaatgtgctttcattaatttatttatgaagaaataatgtgacattcaagtttggggggattcctataccctaatatctaccattattaaataatagttttcagtctctgtctacatagtcattatataacaagaacac

SEQ ID NO: 128966 - DNA, 561 bp, Homo sapiens
ccagcaaaggacaacagattctcaactttactgtaccaaagcaatgtggtcaggaaagcagcttccccgttctgcagcagctaaatgtcagagagccaagggttccaccaagatttcccaaagcacagcagttgccattagaaacttcctaaccctccaatgttcactttacagagtgttcagagggtgataaacagatcttttacttgatttgccatctgtgaattttaaagctgttaaggcacttttctgtctttatttccatgatgctcctgatcccatttgctagttagatgcactcactaatatattattcagttctattgagaaaaccatactgaggcatctccgatttgacattactgtccaaatttttttttttttataacatatcargtaaaataaaccagcttgaaaccctggccttttttagtgcttcaaataattcttttcatttctttgttactgagagctcacattagaaagctattaatacatttgagtacaatttatgttttcaatgcaacccagacaagaaatgaaaaggcatggagaagaaac

SEQ ID NO: 128967 - DNA, 596 bp, Homo sapiens
tgacattactgtccaaatttttttttttttataacatatcaagtaaaataaaccagcttgaaaccctggccttttttagtgcttcaaataattcttttcatttctttgttactgagagctcacattagaaagctattaatacatttgagtacaatttatgttttcaatgcaacccagacaagaaatgaaaaggcatggagaagaaacatggccttcctggacagcctgaatcagtaagtcgttactcttcaccaaatgtagcttatgtacaaatggcttcatttccattccccttcgctgtgggagcctcaagaaccacagttacaggagctagaggatgacgctgacagcggtcacacaggcagtacccactcgtttcaatagccttygccttttccatttgttggtttgcggaaagacaaaactgtgctgatcctgattgtatgagacaagaaaatccagccaattctattttacgtggtactcttgccttagtttctttttcagtgagaacagacgcgccactgctacagctggccctgtatgttatttttttccagcattagtaatggagtcattgattcaatctatatgaa

SEQ ID NO: 128968 - DNA, 625 bp, Homo sapiens
aactcttctggttatacaatgttgaactatatagcatttgtaagatcctcttatgttctgaaaattctgtgcttccaggtctgtggttttctcccagaactaagatattttggagccctggggccttccaggccacaaagaacaggagctacaggtgggatctgtggtttggaaagactaagaggctccaagcctttggggcagccccttcctcagctctaacaagaaggcaccagtgaaaagacagctttcctccctcagccaccgcctctctctcacccatacctccgttcagggctttttcccacttattcctatttcttggttcctcttttcccaggccagaagagaaagcagcagaaaggaakatcccaggcctttttcttccatctaatcaagacttcaggatggctttcttgcagtcagggaatggttgcctgggtaaccaagtattaactataaggatctccccttctctctttttgctagactaaccattctggtttctccctcctgtctgagtagggagttaatagtaaaaggatttatttaactaggctctggattttataacccttgctggcttccaacagcgaactccaaactgccttttactggaggcttg

SEQ ID NO: 128969 - DNA, 427 bp, Homo sapiens
ctatctccaaaacataaaagtgcaaggggaagcagcaagggctgatgtagaagctgcagcaagttatccagaagatccaactaagatcattgatgaaggcagctacactaaacagattttcagtgtagctgaaacagmcttctattggaagaagattccatccaggattaactagagaggaaagctcaatgcttggcttcaaagtttcaaaaggcaagctgattctcttattaagggctaatgtggctggtaactttaagttgaagccaatgctcattgactgttttgaaaatcctagggcccttaagaatgatgttaaatctacattgcctgtgctttataaatgcaataacaaagtctgaacaacagaacatctgtttacagcatgatttactgaaaattttaagcccactgttgagacctactg

SEQ ID NO: 128970 - DNA, 567 bp, Homo sapiens
gggacaatttcaaaaagtgtaacatacataatttgaataccagaaaaagaagaaaaagtggagcagaagaaatacttgaaagtaatgacaaacacaaaaccacagatccatgaggttcagagaaaagcaggataaacacttaaactacttgtaggcatagcatatgcaaactgcagaaaaccaactacaaagagaaaaccttaraagaagccagaaggaacaaacactttacctatagaaaaacaagtttaagaattacagcagacttctcatcagtaccatgcaagcaagaagagaatgaaatgaaatatttaaagtgttgaaagtcaaaaatcaccaacctggaaattctatatctagcaaaattgttcttcaaaagtaaaagagaaggacttccttcatgcaaaaaataataataactaccctgagggaattcattaccagaagacctgtaatgcagaaattttttaaaaaacattatttaaggggaatgaaaatgatataggtcagaaactcaaatctatgtaaaggaaaatcaatacagaaggaataaatggagatacaatc

SEQ ID NO: 128971 - DNA, 567 bp, Homo sapiens
gggacaatttcaaaaagtgtaacatacataatttgaataccagaaaaagaagaaaaagtggagcagaagaaatacttgaaagtaatgacaaacacaaaaccacagatccatgaggttcagagaaaagcaggataaacacttaaactacttgtaggcatagcatatgcaaactgcagaaaaccaactacaaagagaaaaccttagaagaagccagaaggaacaaacactttacctatagaaaaacaagtttaagaattacagcagacttctcatcagtaccatgcaagcaagaagagaatgaaatgaaatatttaaagtgttgaaagtcaaaaatcaccaacctggaaattctatatctagcaaaattgttcttcaaaagtaaaagagaaggacttccttcatgcaaaaaataataataactaccctgagggaattcattaccagaagacctgtaatgcagaaattttttaaaaaacattatttaaggggaatgaaaatgatataggtcagaaactcaaatctatgtaaaggaamatcaatacagaaggaataaatggagatacaatc

SEQ ID NO: 128972 - DNA, 576 bp, Homo sapiens
aaactgtattttcctaataaaaggaaaatacaaataaaaacgtttatgagataccacttcacatccagtaggatggttacaataaaaaagatagatgataacaagtgttggcaaggatacagaaaaattggaaccttcatacgttgctggtgggaatgtaaaatggtgcagccactgtggaaaacactttgaaagctcttcaaaagctaaacacagagttacatattacccagctattccaatcctagatatatagatatatatacaaaaaaaattgaaaacacacatccacacaaaaacttgtacatgaatgttcatagcagcactattcacaatagctaaaaagtggaaataacccaaaawtgtccattgattgataaatacataaataaaatgtggtatattcaatggaatattattcagctttaaaaagcaaatgattcgtgctgcaacataggtaaaccttgaaaatatgctaagtgaaagaagccagacacgaaagaacctgcatattatgtgattccatttacacaaaatgtccagaatagacaaattcatagagacagaaagtagttg

SEQ ID NO: 128973 - DNA, 437 bp, Homo sapiens
gtatttcatcctagatacttaacgaactatatcttattttatccttacaacagctctttcaactaggtattcttctttgcatttacagaagaggaaactgagcctggctcagtaatatttgcccaaagtcacatagttgataaataacaaagtcaggattcctgccattatgtcacattgttccagtaaggtgttgaactcttaatgactgtcacttaaataatggctgagctggtctgctgcttttagttagcaaaactgggattgcagcccatttctcagaatctgttgctagaatgacaagaccatgctgccctctatcagcttcaatgactgcagtcacctgtcattgtatatcataaacattgtagcccacacatgtatacacaaaaattgatacaaaaatatgaaccyaatttgtggtagtatcagtcact

SEQ ID NO: 128974 - DNA, 510 bp, Homo sapiens
taatagttattaagtttgttagactgaatccaaccatttttaaggtggtaaatacaagattagattcagattagaaaggatactagaaaatacaatgaaaagatatgtgcaatttttatgtctctgactttagaggattttttaacaattttgtgtccttccatttcagtttcataattgagttgaatgccgatgaaacaatatgtcatccaaacctaagtcctatgttgtaggtgattaataattgatgacaatattaaaactgctcttatcagttctaacttttctggctaggaactagctggctcacagcccaaacatcatagtaagccatagttaaaactgcctttggatcttattagaataacaccacttattttcttcctttgaactgataatgtttctttttttttttttccaatacaaattttattatggcagcacagrtcactgtgtggtaactgtctgaactctaagcaatcttggaagcagtggttcttaagtatagtt

SEQ ID NO: 128975 - DNA, 517 bp, Homo sapiens
gaatgaacaagtactggcagaattcatcaccttctgactaaagagcccccgaaccctgaatcaccaacagcaatactcaggtggtataccactggccttgggtaagactctgagacatgctggcttcagctaccagctcagccatagtagcgcagagcaccaagtgggctcktagggatccctgaatccaggaataggctattggatggcacttatagacctgccctaggccaaaggggagcccacttccctgaagagtgagccccaggcctggcagcattgaccacaatctgactgaagagcccctgggccttaagtgaatcttagtggtggcctggaaaaactccctatgggctagtggtggtggtggcaacagggaaaggcttctctgcctgtggaaaggggaaagaagaatggaaagagctttgtcttatggtctgagtaccagcttagccacaatgcaacagaacaccaggtagatttctaagttttttttttaattctaatccctggctcc

SEQ ID NO: 128976 - DNA, 524 bp, Homo sapiens
aacatcttccttgaagggaatgaacaagtactggcagaattcatcaccttctgactaaagagcccccgaaccctgaatcaccaacagcaatactcaggtggtataccactggccttgggtaagactctgagacatgctggcttcagctaccagctcagccatagtagcgcagagcaccaagtgggctcttagggatccctgaatccaggaataggctattggatggcacttatagacctgccctaggccaaaggggagcccacttccctgaagagtgagccccaggcctggcagcattgaccacaatctgactgaagagcccctgggccttaagtgaatcttagtggtggcctggaaaaactccctatgggctagtggtggtggtggcaacagggaaaggcttctctgcctgtggaaaggggaaagaagaatggaaagagctttgtcttatggtctgagtaccagcttagccacaatgcaacagaacaccaggtagatttctamgttttttttttaattctaat

SEQ ID NO: 128977 - DNA, 409 bp, Homo sapiens
agagcatagacaagctcagactgagaagactacaataaatacccaactctttaatgcccagacacagacaaacatccagaagtatcaagaccatctaggaaaacatgacctcaccatacaaactaaataagggaccagggaccaatcctggagaaacagagatatgtggcctttcaggcagagaattcaaaatagctctttcgaggaaactcaaagaaattcaacataacacaaagaagaattcagaattctatcagatamatttaacaaagagattgaaataattaaaaagaatcaagcagaaattctatagttgaaaatgcaactgatgtattgaagaatgtcttagagtctcttaataacataactgctcaacaaaaagaaagaattaatgagcttgaagacaggc

SEQ ID NO: 128978 - DNA, 550 bp, Homo sapiens
ttcaataacatcagactttttgtccttggtaattatggttaagcccaaatcattcccatgatctttctctgagtcgaggcctctaagaaaaacaataaatttatcaacataatgtcttccttcaggctcaaaattactgaaaaaaatcaatggacactttaatttttccacaaaatattactcttatagaaaaattcattcattcttaataagaataatagtacttaagtaacaacaacatacttaattcacaaagataygttgttgacaaatcagcagttaagatttgtgctctaagttgttcctttgttttgctctgtgttttcaaagtagtggaatggatttacaacctcatcgtacacatacaagatggtaaaatgcctagacacttggataagcaccttgaaaaaaatgcccaggacagacatcagcagcaccttgttgtaaacaagtttttacatcttgtccttcatcacaccctaagcttcagagttttaagaataaaaacgcaaaaagtcaaatatgacaataagaatattgcttaagtata

SEQ ID NO: 128979 - DNA, 357 bp, Homo sapiens
agcaactcaattttgctagccaccttggaactggctcacaataacccacgctatcatttgaaatgagaagatgattttcagacatgcctctcgagataacccaaagcatccttccccattatacaagttgctttgcctgtaagaccaaaatatttcatccagtctcctggccctgtctcctaacagtgctggatattaatcaactgccttctatatgctcaccactcccccttttaaaagctagactgataatatctcttgctggcacctcctcttggataagttagtgccttcctcctgccacagctggatagttggattcactgacasagtcaagccctgcctagggctcaccct

SEQ ID NO: 128980 - DNA, 649 bp, Homo sapiens
agcacctaacaggagggtcagcctgtcctgtgaagccagcattgacttctcctccctagctatcaaagtcctagacaacatcttccaatagaaggctgctttgtctacattgaaaacctcttgtttaacatagccaccttcatcaatgctcttcactaaatctcctagataagttgcttcagcttctacattagcaccttctgctttacctggcatttctggttatggaaacagcttctttcctgaaacctcagattctttttctgcagcttcttcrcctctctcccttcctttataaaattgaggagagtcagggccttgctctggattaggttttggcttatgggaatgttgtggctggtttgatcttctatccaaaccacaaaaactttctctatatcagcagtaaggctgttttgctttcttatcattcatgtgttcactggagtagcattttcaattcccttcaagaactttccagttgcattcacaatttggctgtttggcataagaggcttagctttcagtctgtctcagctttcgacctgctttcctcaccaagcttcatcatttctagcttttaattgaaagacagaggtatgaatcttccttccacttgataacatagggaccactgtagggttattaa

SEQ ID NO: 128981 - DNA, 538 bp, Homo sapiens
agtcttttttttttttaactgtcttattcttgcttcttttataataatattaaacttccttagtctgttaacgtggcacacctatctgcaagggaaagtggtacataaagaagatattgtcatatatctccmaaatggagtacaataatgctgtaaaaaagattaatgaagatctctttgaattgttacaggctaacttccaggatgtactgttaaggtaaaaaaagctaagtgcaaaagagtatctatattatgttactccttgtataagaaaagtgattataagaaaacacatacataactgcccatttgtacaaagaaaatatggaaggaactcaccagaaactaaagaaactatctacagagggcaggtgtcaaagagctggaaagaagacggaaatggttatgtgtatcaagacaggatggagtgacagatactgccttgggtgcatcattttgtaaagctctggctcttagaaccacagttatgattcatatttttcacatgcccctaagcaatcaacaactaaaactaaca

SEQ ID NO: 128982 - DNA, 538 bp, Homo sapiens
agtcttttttttttttaactgtcttattcttgcttcttttataataatattaaacttccttagtctgttaacgtggcacacctatctgcaagggaaagtggtacataaagaagatattgtcatatatctccaaaatggagtacaataatgctgtaaaaaagattaatgaagatctctttgaattgttacaggctaacttccaggatgtactgttaaggtaaaaaaagctaagtgcaaaagagtatctatattatgttactccttgtataagaaaagtgattataagaaaacayatacataactgcccatttgtacaaagaaaatatggaaggaactcaccagaaactaaagaaactatctacagagggcaggtgtcaaagagctggaaagaagacggaaatggttatgtgtatcaagacaggatggagtgacagatactgccttgggtgcatcattttgtaaagctctggctcttagaaccacagttatgattcatatttttcacatgcccctaagcaatcaacaactaaaactaaca

SEQ ID NO: 128983 - DNA, 538 bp, Homo sapiens
agtcttttttttttttaactgtcttattcttgcttcttttataataatattaaacttccttagtctgttaacgtggcacacctatctgcaagggaaagtggtacataaagaagatattgtcatatatctccaaaatggagtacaataatgctgtaaaaaagattaatgaagatctctttgaattgttacaggctaacttccaggatgtactgttaaggtaaaaaaagctaagtgcaaaagagtatctatattatgttactccttgtataagaaaagtgattataagaaaacacayacataactgcccatttgtacaaagaaaatatggaaggaactcaccagaaactaaagaaactatctacagagggcaggtgtcaaagagctggaaagaagacggaaatggttatgtgtatcaagacaggatggagtgacagatactgccttgggtgcatcattttgtaaagctctggctcttagaaccacagttatgattcatatttttcacatgcccctaagcaatcaacaactaaaactaaca

SEQ ID NO: 128984 - DNA, 463 bp, Homo sapiens
catacataactgcccatttgtacaaagaaaatatggaaggaactcaccagaaactaaagaaactatctacagagggcaggtgtcaaagagctggaaagaagacggaaatggttatgtgtatcaagacaggatggagtgacagatactgccttgggtgcatcattttgkaaagctctggctcttagaaccacagttatgattcatatttttcacatgcccctaagcaatcaacaactaaaactaacaatgatgaggatccaaaatgcaatacaaaaataacaaataagcctgttacaaatgagttacaaaactacactgaaaggatggggaatagtaacactaacctaaataactacagaaaacagtatcttgactggataccatgaagctaaagacaaatacaaatgcataaatgctagaatttagtcagtaaatatgtttctcgcaggggcataggatagca

SEQ ID NO: 128985 - DNA, 463 bp, Homo sapiens
catacataactgcccatttgtacaaagaaaatatggaaggaactcaccagaaactaaagaaactatctacagagggcaggtgtcaaagagctggaaagaagacggaaatggttatgtgtatcaagacaggatggagtgacagatactgccttgggtgcatcattttgtaaagctctggctcttagaaccacagttatgattcatatttttcacatgcccctaagcaatcaacaactaaaactaacaatgatgaggatccaaaatgcaatacaaaaataacaaataagcctgttacaaatgagttacaaaactacactgaaaggatggggaatagtaacactaacctaaataactacagaaaacagtatcttgactggataccatgaagctaaagacaaatayaaatgcataaatgctagaatttagtcagtaaatatgtttctcgcaggggcataggatagca

SEQ ID NO: 128986 - DNA, 325 bp, Homo sapiens
ttttgcaccaccaataaaggccttcaagagtactactgaatcagaraaaccgaaatgtttctatgtactccctgtcctcattttacatcagcctgacaggtgacactcagcaaaatatcgaacaggatgacctccaagtttccttccttctctaatgtcctctggttctctgttggccagtaggatttaaattttatttaaattatctcatattctgatggattcttgagccccttttcagttttagataatctccctgtggtttgctgaattggcatatctggagtctaggatctctgttggcaaagaactgaatattgctccc

SEQ ID NO: 128987 - DNA, 274 bp, Homo sapiens
gagctttggattttacaatgtraacttacatacattttctgaacttccctaattatctatatccaaatttagcatttaattatagaactttcctctctgattacgtatatgtttgtgtgtaccttcttttcccccaaccaaatcacatgatttaaaggtaacattggtctttaatgcctctccttaaagtttccatcaagatcctactctgcatttattctctttcactagttatcccttctttttttttttctgaaaacatgcttaaatgtgc

SEQ ID NO: 128988 - DNA, 622 bp, Homo sapiens
tgtttaacaattaagacgatcattctaactgcccgagtcttatcatctcctaaaaacaatatagcagagactaactccaacatatgttaattagccttatccttaacctcattcacatcattctgtctatcaccttygtttgtcttatctcatttggtccccaagttttactctgtaggtatttcagatttacaaactagaaggcagtctgttattggaaggcaattacaagcttttatgttgaacatgaaatatgttagaaagaggatatgggacacaaatctgaccctacatacagaagaaaagtaatcagcacctgatgtcatcctcattggcaaacataatcactgctcgagcattaggtgtttctagcaggcgtttgataattttttcaaattctccaggtcttggttcacgtgggattttctgtgactgagcaatgcaaacaccacctatttaaaaaagaagggaggtggtgattcagaaagagcatttatttaattagcaaacccaattacctactttataaaagcacatacttctgtatgaatattatttctcaaaatatgtgtcactctcacctattaagagcaattgtttgtttgcattataatatattcac

SEQ ID NO: 128989 - DNA, 474 bp, Homo sapiens
caaaataccatttcttaaacagaaaaattatgttacgaacttcacctactccaatgaatgggctgctcatcagagtcccctatgaaactttctccaaagacatgagcctgaaagtcacttctagagggtctggttcaatgggtctggtttcataaatgaaggacctgagaagattgatttaataccacacgtactgtcaaagtcagatttgaaattcagttgcctgaaacaacctgtgctgtttccacatctgctgcctctctttaaaggttacactaatgattcttccaaaagagagaaaaatctaccttcatcccctcacttaaaaatggcagcattgctatggctgagactgcaggggaaaaggaattttatcrtttttctgatcctaccaagatactaaaatgttcaaaaacaggaagagtgtattattctcacctcttctataagagcagtccgcttctgcaaatagcc

SEQ ID NO: 128990 - DNA, 541 bp, Homo sapiens
ggaaacttgcaatcatggcagaaggcaaaggggaagcaaggcacatcttacatggtggcaggaggaagaggaactrccacacacttttaaaccatcagatctcatgagaactcactatcaagagaagagcctggggaaaaccacccctatgacccaatcacctctcccaccaggtccctctcccaatacttggggattataatttgatgagatttgggtagggacacagagccaaaccatatcaaatggtatatgctgatctggaacatattgcctatttatcaaaatcttcttgcttcccctttacttccttttttctatcactccttgtcttctacaaagccataaataggggactgtcatcaggaagccaagtgagaccactatagctcacatgcattggtacctcctatgttgggggatttattaactcaaccctcctctcaatgaagagtaaacagccagctgtctctcaattccttagcatgttgacattcaaaaggacaacttgttacagcagcagcaggaaagcatttcagag

SEQ ID NO: 128991 - DNA, 413 bp, Homo sapiens
taattaactggtccaattttgtacagataaaatactagatttgccaaaatcatctatatccttgtagagccatattattggtttgtagtttgaatatgcatttataattattgatagtactttttgaggaagaattgcaagctaaaatatatgcaagtgagtgcaataagtactattttctgagaaacatctgtggccatattatcccaaacattggttggaaatacattttatttttatttatcaaaacaagtcaagatggaattattaattctcaatttcttcaagtctcaactawcagtttccttacatgaaaactgtaatttaagtaactggataccaggaaaaagaaaaagagaagaccttcaatttaatgatagatatctaccataaattaaacctcattcaagaac

SEQ ID NO: 128992 - DNA, 331 bp, Homo sapiens
tatcctcttctcatccctgcagtggagcacacccatgttccctctgcatgaccctgggcaagatgtgtaacatttgtggctatcagttccttcatttgtaaaaagaagggtgcttgacaggatgatgtcaagatgcctttgaatttcaacattttgtgtttctatgaatataccacatagctscctcccatgagtactgtgaattatgtaagttctaatacgggaatagaacatcatgttaaatacaataaattgctttttgaaaagcctacaggagatgaactagagggtacatcagaaaacttttccaattcaaaattataaatcctga

SEQ ID NO: 128993 - DNA, 331 bp, Homo sapiens
tatcctcttctcatccctgcagtggagcacacccatgttccctctgcatgaccctgggcaagatgtgtaacatttgtggctatcagttccttcatttgtaaaaagaagggtgcttgacaggatgatgtcaagatgcctttgaatttcaacattttgtgtttctatgaatataccacatagctgcctcccatgagtactgtgaattatgtaarttctaatacgggaatagaacatcatgttaaatacaataaattgctttttgaaaagcctacaggagatgaactagagggtacatcagaaaacttttccaattcaaaattataaatcctga

SEQ ID NO: 128994 - DNA, 331 bp, Homo sapiens
tatcctcttctcatccctgcagtggagcacacccatgttccctctgcatgaccctgggcaagatgtgtaacatttgtggctatcagttccttcatttgtaaaaagaagggtgcttgacaggatgatgtcaagatgcctttgaatttcaacattttgtgtttctatgaatataccacatagctgcctcccatgagtactgtgaattatgtaagttctaataygggaatagaacatcatgttaaatacaataaattgctttttgaaaagcctacaggagatgaactagagggtacatcagaaaacttttccaattcaaaattataaatcctga

SEQ ID NO: 128995 - DNA, 331 bp, Homo sapiens
tatcctcttctcatccctgcagtggagcacacccatgttccctctgcatgaccctgggcaagatgtgtaacatttgtggctatcagttccttcatttgtaaaaagaagggtgcttgacaggatgatgtcaagatgcctttgaatttcaacattttgtgtttctatgaatataccacatagctgcctcccatgagtactgtgaattatgtaagttctaatacgggaatagaacatcatgtwaaatacaataaattgctttttgaaaagcctacaggagatgaactagagggtacatcagaaaacttttccaattcaaaattataaatcctga

SEQ ID NO: 128996 - DNA, 602 bp, Homo sapiens
ctctctctgtctccattcaccgtgtgagaacacagtgagaaggccattgtctgcaagccaggaagacagccctcatgaaaaacccaaccaggctaacatcctaatctcagactttccagcctccagaactgtgataaataaatgtctcttgtttaagctactcagtttatggtattttgatttagcaacctgagctaaaacactctaattcctccaaatacccaactaagttgtctactataaaaaaaaagmggggaaaagaggagagaaatgtcaccaatgttttgaaagctgaaaagcagatgattaccaagttgcaattgacttaccagaatagaaaaagctcagtgagagcccacaaggagtggggctggggatgaggccaacagaaacaaagctggtgttctacttaacatgatgaaggccctggagtggaggtaccagaggctccagaaggtggggttgaaaatggagttggttgaaaatctctaaagtcccttccctcaactccagtccctctgcacagaagatcagagagtcattttctatagaggatgaactcagggacatcaaacacagctgaagacatagtgagtttctat

SEQ ID NO: 128997 - DNA, 542 bp, Homo sapiens
ggtcaggtgtcacagatatgagagataaaaggcttgtatgtattgatttgctagtgcatagagatggtggaatgagaaagaaaatagacttgtcagaagacctgagagtggccccacataatcttgaaaagtctctcatctctcagtttcctcatctctgtaatgaggttcataataactatctctcaggtatactgtgagaatccaattataaagggtaaattcctatgccartgtagcatattattattagtgttaataacagtaataatcatagccagacaagaatcatcaccaacactgagagatacttgacattcagccctaaaacacaggtttttcaacagatcatatttttgaatcttcaccattttatgtgtaatattatcaaacatcctaaattctgaaaagtgatacttgctcacttgcctgtgccaatagatgaaatgactagatttcactcttcatcattgttgattacaatgtgatcggggcaattttaaggtgagagaatgagaaaagttatttacattcttctccca

SEQ ID NO: 128998 - DNA, 578 bp, Homo sapiens
agtgttaataatgtataattgaaatttatacaaaaatgaagatatcatttttctgaaacaaccgtagactattgtttgccttataaggcaaataattaatagaatgttattatttaatgttaaaacttcctttcaaagacgtcttgttgcacaaacaaaggcaatctatacaaatgatagaaaactggaattgtagccwgcacaagtaggagaaataggaccttcattctttctggtttttcaataaagaagttttgttaaaacaatctaaaaggataaagaattatgtttttagttgttgctcatttataagacaaaaatctctattaataatttagtaggagaaaaataaaacaagaaacaatgtcacagcaccaagttccaactgtgatggaaattgaggattaacttattgggatgaaattacttacaaagctgtgtatagaatactaagtgtgcatttttaaaaaacaacatgactacagtattatcagtatctcaagttggttcacaatttccatcaaattaaattctacataaatcaactcaagtctgtggttatataatttgttagagct

SEQ ID NO: 128999 - DNA, 578 bp, Homo sapiens
agtgttaataatgtataattgaaatttatacaaaaatgaagatatcatttttctgaaacaaccgtagactattgtttgccttataaggcaaataattaatagaatgttattatttaatgttaaaacttcctttcaaagacgtcttgttgcacaaacaaaggcaatctatacaaatgatagaaaactggaattgtagcctgcacaagtaggagaaataggaccttcattctttctggtttttcaataaagaagttttgttaaaacaatctaaaaggataaagaattatgtttttagttgttsctcatttataagacaaaaatctctattaataatttagtaggagaaaaataaaacaagaaacaatgtcacagcaccaagttccaactgtgatggaaattgaggattaacttattgggatgaaattacttacaaagctgtgtatagaatactaagtgtgcatttttaaaaaacaacatgactacagtattatcagtatctcaagttggttcacaatttccatcaaattaaattctacataaatcaactcaagtctgtggttatataatttgttagagct

SEQ ID NO: 129000 - DNA, 578 bp, Homo sapiens
agtgttaataatgtataattgaaatttatacaaaaatgaagatatcatttttctgaaacaaccgtagactattgtttgccttataaggcaaataattaatagaatgttattatttaatgttaaaacttcctttcaaagacgtcttgttgcacaaacaaaggcaatctatacaaatgatagaaaactggaattgtagcctgcacaagtaggagaaataggaccttcattctttctggtttttcaataaagaagttttgttaaaacaatctaaaaggataaagaattatgtttttagttgttgctcatttataagacaaaaatctctattaataatttagtaggagaaaaataaaacaagaaacaatgtcacagcaccaagttccaactgtgatggaaaytgaggattaacttattgggatgaaattacttacaaagctgtgtatagaatactaagtgtgcatttttaaaaaacaacatgactacagtattatcagtatctcaagttggttcacaatttccatcaaattaaattctacataaatcaactcaagtctgtggttatataatttgttagagct

SEQ ID NO: 129001 - DNA, 592 bp, Homo sapiens
ttcagagctgaaggctgtctgcctatagcactcccagaaataggaataacaggtcatgcactgataggatcttgaaggtcaattcaccatatgtacattagtgttaataatgtataattgaaatttatacaaaaatgaagatatcatttttctgaaacaaccgtagactattgtttgccttataaggcaaataattaatagaatgttattatttaatgttaaaacttcctttcaaagacgtcttgttgcacaaacaaaggcaatctatacaaatgatagaaaactggaattgtagcctgcacaagtaggagaaataggaccttcattctttctggtttttcaataaagaagttttgttaaaacaatctaaaaggataaagaattatgtttttagttgttgctcatttataagacaaaaatctctattaataatttagtaggagaaaaataaaacaagaaacaatgtcacagcaccaagttccaactgtgatggaaattgaggattaacttattgggatgaaattacttacaaagctgtgtatagaatactaagtgtgcattttwaaaaaacaacatgactacagtattatca

SEQ ID NO: 129002 - DNA, 487 bp, Homo sapiens
tgggttatgtcttttattccattgaaggcaagttatcataaggctagttaccagaggaaagttaccaccaaggagatgaagagcatgtgcttcaatgaatgactgtgttaacagtgtgttaatcagaacaagtactaggaaaagtgggaatttaaatgtggcacaaaggccaaggcatgcaccaatgtaaatttagaaaactgtcgagaaaatatgtatggttactgctggaaataattcttcagccaatttggtaaaactctaagtgttaaagtgatgagagatccaatgggaaatctctagagtttggctgtgagttataaagttcataagaatgccaaaaaggccaaagaaaaaataaaagtaaaataaattagttgcaaaatcatatgtggggttggatctaaaggaaagttgaacacatagaaractgagttaaaacaaacttttaagtcctgaaaaggcagagaattagccggtgtaggaa

SEQ ID NO: 129003 - DNA, 648 bp, Homo sapiens
gcaaatcataagtatgagacaccacctgatacccattaggatggctactactataaaaacggaaagcacatgttggtgagaatatggagatattggaatctctgtgccctgtttgtagtaatgtaaaatggtaacgttgctttggaaaacaatatggcagttcctcataaaattaaaaatagaattactatataacccagcaattccacttctggrtatatgccacaaagtattgaaagcagggtcttgaggatatatttgtatgcccatgttgacagtagcattattcataagagataaaacctggaaacaacttaagtgtccactgacagatgaatggaaaaacaaaatgtggtataaacatactatggaatattattcagcctcaaaaaggaaactctgacatacacttcaacatgaatgaatctggaagacattatgctaagtgaaacaagcaagtcacaaaaaagacaaacatgattctgcttatataaggtacctagagtactcaaaatcacagacacaaagcagaatggtagatccagggtctggggggaagaggaattgagaagatattgtttaatgggtatagaatttcagttttgtaagatgcaaagagttatagagacaaatggtggtgctgattgc

SEQ ID NO: 129004 - DNA, 574 bp, Homo sapiens
tgtggaagagcctagttccattaccctggttctgtaaaaaacaaacaaacaaacaaaaaacaaattacagttcaccagtgagtccagttcaagttggccaracttgaactgagaagaacactaataatattcatgtagtttcatctaaaagatgttagtaccagaaaataaaaaggaaatgtgtgtgttcaacaattgatgagcgctagcatcaatgctcctgaagatcttgatgttattcgctcttggtctgtgtctatagatagatataagctacttggagcacttggatgacaaaatctttttgattaaaatgaaaacaattgttgtgctaaaacaaatgatcgaaacagttttcatgacactgatattcttatatcatttaatcttaaatgttgaagacctttaaatagttaaaaacatatctgtttttttgaaaagcactaggaattaaatccatgtccaaaaatacaattttttgtatgttaaaataacctctttcactaaataactatttggtacatatagaatgttcatattaatctatttatatgtaccatataaatattatatg

SEQ ID NO: 129005 - DNA, 457 bp, Homo sapiens
aaatatgtctgatgccgtgaccatatggcagtgttttccatggayagaaatgatacatccccaaggacagaagtcatgctgcaaaagaggatggttttcctcctattgaaaattagtctattcaatcaaaatctcatgaaaacattggctagttttctgtgtatagctcgcacttcacttaccagactgttgcctaaatcttccctattctggaagactgtatatacagtgcaagtattatatgatataaccaatttccaaatgctttctaattcccacagtggggaaagaacaactggcaacacagtgaattatttcagtttaacagctgattatcaagacaaataactggatattgtctgcagtgacaaccatgaccagggtccagggaaccacactcagaaaaggtcataatagataaccattttcccaaaaggaagaattattctctgtgagg

SEQ ID NO: 129006 - DNA, 457 bp, Homo sapiens
aaatatgtctgatgccgtgaccatatggcagtgttttccatggatagaaatgatacatccccaaggacagaagtcatgctgcaaaagaggatggttttcctcctattgaaaattagtctattcaatcaaaatctcatgaaaacattggctagttttctgtgtatagctcgcacttcacttaccagactgttgcctaaatcttccctattctggaagactgtatatacagtgcaagtattatatgatataaccaatttccaaatgctttctaattcccacagtggggaaagaacaactggcaacacagtgaattatttcagtttaayagctgattatcaagacaaataactggatattgtctgcagtgacaaccatgaccagggtccagggaaccacactcagaaaaggtcataatagataaccattttcccaaaaggaagaattattctctgtgagg

SEQ ID NO: 129007 - DNA, 457 bp, Homo sapiens
aaatatgtctgatgccgtgaccatatggcagtgttttccatggatagaaatgatacatccccaaggacagaagtcatgctgcaaaagaggatggttttcctcctattgaaaattagtctattcaatcaaaatctcatgaaaacattggctagttttctgtgtatagctcgcacttcacttaccagactgttgcctaaatcttccctattctggaagactgtatatacagtgcaagtattatatgatataaccaatttccaaatgctttctaattcccacagtggggaaagaacaactggcaacacagtgaattatttcagtttaacagytgattatcaagacaaataactggatattgtctgcagtgacaaccatgaccagggtccagggaaccacactcagaaaaggtcataatagataaccattttcccaaaaggaagaattattctctgtgagg

SEQ ID NO: 129008 - DNA, 457 bp, Homo sapiens
aaatatgtctgatgccgtgaccatatggcagtgttttccatggatagaaatgatacatccccaaggacagaagtcatgctgcaaaagaggatggttttcctcctattgaaaattagtctattcaatcaaaatctcatgaaaacattggctagttttctgtgtatagctcgcacttcacttaccagactgttgcctaaatcttccctattctggaagactgtatatacagtgcaagtattatatgatataaccaatttccaaatgctttctaattcccacagtggggaaagaacaactggcaacacagtgaattatttcagtttaacagctgattatcaagacaaataactggatrttgtctgcagtgacaaccatgaccagggtccagggaaccacactcagaaaaggtcataatagataaccattttcccaaaaggaagaattattctctgtgagg

SEQ ID NO: 129009 - DNA, 605 bp, Homo sapiens
actttgtctaatatatcccaagcctcattttctatgcaacacaagtaagagactagaatgaggtaaaaggcaactgttaatcaatttgttcttatagaacaacactagctttttccagtttttgtatgtgtgtgccaaagacttattcttatcaccttgagtacataatgaacctcctaggattaggcaggtggatgatatacaaagataaaaagtgagaagtgacaagtgttctagatatctaatgctgtgtaacaaaatgccccaaactgaatgagcaacagcaaaattyattttgcgtatgaccctgcaatctgggtaggatgtaaagtagatagatcatccctgttccactcagcatccactgatgccccttgaggtgtaggggctggtgtcatctgaagtaccaaacaaatagtattagagttggggatccctagacatctcttgtctccaggtggtctctccacatgatttctcctacatggtagcttcagaatagctgagctttttgcattttggctcagggatcccaagacatgagcccaagagagagaatcaggtgaaagccatactgcttttatgacctaactcagaagttaggc

SEQ ID NO: 129010 - DNA, 519 bp, Homo sapiens
caacctgcccctatgattcagttacctcccaccaggtcactcccacaacacatgggaattcaagatgagatttggatggggacacagccaaaccatatcaccctgtctcaaaagaaaaaaacagaaagaaagaaaagaaaatttaaaatgataaatacttgtcccattataattttactggacwgttggtctagttttgatgagaaagcatatagggaatactttaccctagctctacactatacctgaaagcatgggattgaatgatgtctcaaaggagggaattttaaaagggaaaaaagaggaactgagaagataatcttaggaattctcacaattaaagagtagagaaggtaataagcagaggagttcatagcttcatctcctacatttcctattatatgtttatgtaaatatttactgaaagaataagtacatggaaaatgaattaatgtttgcttaatttaagaaagttcttcatgctgctcagcaaacattctttatttccctaaaccccca

SEQ ID NO: 129011 - DNA, 592 bp, Homo sapiens
tcctggcattaagcatttatagaacaacattttgagacactgattattgtaccattcctttggggcagtgcccctaaattttagtgtacaaaagagcatctggaatttrttaaaatccaaattatttagccctttcagagagatcctaattctttaggtctaatgtgggtccaagaatctgtatttttaacaagcattctgaaagtgtctgagccatggggtgaggggtatgtaaccaaacttgttttgcaatcgtatataaatatggacaatatttttgctgaaacttttcttcttttctttaaatgtccaagtccttatgtacatgatctcttttagtcctcacaatgatcttgtgaagtaggtattattatttctattgtaacaaagagacaaagggtttagtcacttgctgtctgtttgctcaggctgccataataaaacactatagattgagtggctaaagaacagcagtgtattctctaacagttttggaggcttgaagtccaacatcaggatgccaccatggtcaggttctggggagagctctctttctggtttgcaaatggctgccttcttgctgtgtgctcac

SEQ ID NO: 129012 - DNA, 359 bp, Homo sapiens
tttctctctgcatttgttaccaccttaagttgaatcaccattatctcacaaatgcaccgaaacatctgcttgtaaaatgtctcacccttttcccatgttgttctcytccaatgcattttcttcatagcaaactaaatttctagaaacaaaatcatgtaattaccttaatcaaaattcttcaatggtgtgccattgtacattggaagaaatccaaagtttttactatcacttccaaaacaatgaacaatttagattctggctagctccttagctgcatcatatgtgccatctcacattcaattctccaggatcctacctcatttcacctccttaaaaccgataggcttttctgttttggg

SEQ ID NO: 129013 - DNA, 507 bp, Homo sapiens
tcaccaactgtacgaagctcaagggatatccgagctttctggctgggcggatgggcttcgcgcttggcatggctgagcggtccatctctacctctccgtttctatctctaccataacagcgaccactcagcccgccaggagcccctgtttcccagcgcaggttcctttttcttctcagttccttgggctgttgaagccgggttctgggtagatagagactggggccgtggggagagcgccaggctgcttttgcctttcccgcgccccggggcattccggcgcgctggggatgcagcctccgcccccgccgcacctggccgcccgagcgcccgcgcccacgccccgcgcggggccgcccgaaactggggccgcgccagccgcgggagctaccgaggagctgttggggtgcgtttgcctttgctttttaaacaagatccccgagaccttttctccatccccccaacccccarcaggacacggaactccggcgtttctcgaaagccacaa

SEQ ID NO: 129014 - DNA, 507 bp, Homo sapiens
tcaccaactgtacgaagctcaagggatatccgagctttctggctgggcggatgggcttcgcgcttggcatggctgagcggtccatctctacctctccgtttctatctctaccataacagcgaccactcagcccgccaggagcccctgtttcccagcgcaggttcctttttcttctcagttccttgggctgttgaagccgggttctgggtagatagagactggggccgtggggrgagcgccaggctgcttttgcctttcccgcgccccggggcattccggcgcgctggggatgcagcctccgcccccgccgcacctggccgcccgagcgcccgcgcccacgccccgcgcggggccgcccgaaactggggccgcgccagccgcgggagctaccgaggagctgttggggtgcgtttgcctttgctttttaaacaagatccccgagaccttttctccatccccccaacccccagcaggacacggaactccggcgtttctcgaaagccacaa

SEQ ID NO: 129015 - DNA, 610 bp, Homo sapiens
cctctcaattcaaagcattttttttctctctctctcctcgcctcttttaatgtgtatctttctcattttgcagctgccccaaagactctctttcttctttcataactcttaaaatctcccaccaaacccaacccatgcttctttctctattccctccttttcatctcctaatctattcatttccttctcttatgtttttagtgtaaatcaatcaaactgatttcaatgattcctgactctccctctcattcatcagtctgattatgggcagcaaagatgtttctttttaaagagaagactaaagtgagaaactcttactagtcttatatccatatttttcctgttacatataaaaagcaatacccatcataatgggttgaytggaaactctatgaaattatgtatttacatatatttctgacatgtaggttttttaaagaatttttggttaaagtaataaaaatagtaagatggaaaacaggatacaatttgtcctctctggatacagctgttcagtctccctatcccatttccacttagcatcctaaagatcgaatggaaataacagaaaagagaaggataaaagatggcagaaaggagattagtagtt

SEQ ID NO: 129016 - DNA, 636 bp, Homo sapiens
tttgtagtttcatgtatgttggtttacaacatggtttactgaatattttaaacatatcattgggatgaacttctcataaaaaaagattccctttaaaatattactggtctttgacaaggtacttagtcaccccaaagctccagtggagatatatagagagatcaatgttgttttcatgcctgaatatacaacatccaatctgtaggccaaatatcaaggagtaatattgaatttcatgtcttattacttaagaaatgcacttcttgccaggagtggtggctcatgcctgtagtcccagcactttgggaggctaaggcgggtggatgacctgaggtcaggagtttgagaccagcctggccaacatggtgaaaccccatctctactaaaaatacaaaaattagctgagtgtggtcatgsgcgcctgtagtcccagctacttggaaggctgaggcaggaaaattgcttgaacccgggaaaggaggttgcagcaagccaagattgtaccattgcactcccagcccgggtgacaggagtgaaactctgtctcacacacacacacataaaataataaaaataaaaaaataagaaagaaaagaaaagtaatacatttcttaatgctgtagctgccatactgat

SEQ ID NO: 129017 - DNA, 563 bp, Homo sapiens
ccgcttctctggtcatctttaattagacaatactctggtgaaaccctcacaattaatattaagagttgttcttcttctacagtaagtggaaggggaattatgtagtggcttgttctttgttataattttattgagagggttgtggaggaaggattggaatataatagaattgttctattttctaccatttacagaaaactagatgaatcacaaaattgaagaaaaaatgatgcttatcttttaaatatgtattttataaatatttaacttatattaaaattactttccacatattacaaaatgctctaggcatatcagtgcatgtgtgctactcattaaatgttactatgtctttctaccacagagatttatttaggagggagattgtcatgttatttcctatacctggaatgactcacacttcwgtgcctgttaacattttatccatctgatacaatctagaccgtgaaacctttcctaatcaagctattttttcataaatttaacaactgtcataaatgaattgtctgtcatgaatgaatgaagcaacaaaacaatgaatg

SEQ ID NO: 129018 - DNA, 540 bp, Homo sapiens
tgtgtgtgtgtccacgtgttgagtgaaatagacacagagactgtgattaaaccatagtgtttgtattttttcttctctttctgagcttttgtactgtaagcttttggtaatatcttttggcaccatggagatataactagaatacttaaccatgttggcatccacaaaacagatgactattaaaattacataaactagaatcaaaataggaaaagggtgaagacaaaattgtgtaagaaaaagacatcgcaaaatttaatcagcacactattcgctaaatagcataacttaattcaggagracaacacagaagaaatgaccacaaaagaagatttcactctgggtttctgtctcttaattggggagtgcaaaaggacttcctcaattctaactctcaagtagccaaaatgtgcctatacttgtaatttctatagaaaacactgtagaactgacacactgctccatgctatcagttctcaatatgtgtgttcatacagacatgaagtgtccttgaagttatgaagtgtccctgaagtcaca

SEQ ID NO: 129019 - DNA, 569 bp, Homo sapiens
tacctatgacatagaaagcatgtggtcttgtaagaaagagaaatggaagaaacaactagagaagtgtaaagttaagtagcattgataaaattaccattaatttttctkccttctaaatttagatatacttttcagaagtctatgggcttccaggaacatctattaataattccagctattccctacaacagtcctctcaactatttcctctaatcattaatttcaacatattttatttcaatttcaagactgtactttatattttaatcaaatttttatgttatgaagaaaacattcacattgtcaaaaactaaaaaaatacacaaatttcaagtagaatatttaaacaatttatgcttctttaaccaacataaaaaaatttcaaaatttgacatatttcctctcttttgtatttgttagtgctttatttatactttatatgttatattatagtttgctatttttattttaacactttttctgagtatttctcatgccaaaatttttttatgaacagcatgcataatgtcagcataagcttcttattaaatgaaaagaccattctttga

SEQ ID NO: 129020 - DNA, 569 bp, Homo sapiens
tacctatgacatagaaagcatgtggtcttgtaagaaagagaaatggaagaaacaactagagaagtgtaaagttaagtagcattgataaaattaccattaatttttcttccttctaaatttagatatacttttcagaagtctatgggcttccaggaacatctattaataattccagctattccctacaacagtcctctcaactatttcctctaatcattaatttcaacatattttatttcaatttcaagactgtactttatattttaatcaaatttttatgttatgaagaaaacattcacattgtcaaaaactaaaaaaatacacaaatttcaagtagaatatttaaacaatttatgcttctttaaccracataaaaaaatttcaaaatttgacatatttcctctcttttgtatttgttagtgctttatttatactttatatgttatattatagtttgctatttttattttaacactttttctgagtatttctcatgccaaaatttttttatgaacagcatgcataatgtcagcataagcttcttattaaatgaaaagaccattctttga

SEQ ID NO: 129021 - DNA, 598 bp, Homo sapiens
tttctcttaggcatgtaatcactctaggaaggatatgagatttttcrgttattcaattcacacatacacacttacacaattattaatttagtgaaaacaaaaagaaaatgagctttcttatatctaggagcaaaattcatttcttcaacacaggcacacaaaaaaataagtctcacatatatgaagtcaaggtcttgcatagaaattcttaatcagtgggtactttttacctggtagccactcagtagtctcttcgctcttttcctcattgcttttaaattgaaaaaaggttaaggaaaaaaatgacactctgctcctctggtaatttctagaattgcaattagtgaggaaagatatttgagaaagttatcatcaactagtcttcttttctttgatatgtaaggtgaaattgtgtgtgtctgtgtgtttgtgtctatgtgtgtatgtgccacattcatagaagtcagaatgcatcatttctacaacacaagaattgggatcaatctcctctgccaagaacttgaactttggactaaagtgtaaatcaacattgatcaaaaaaattgaaatccaaaaggtgaagaaattttgcaagacc

SEQ ID NO: 129022 - DNA, 598 bp, Homo sapiens
tttctcttaggcatgtaatcactctaggaaggatatgagatttttcagttattcaattcacacatacacacwtacacaattattaatttagtgaaaacaaaaagaaaatgagctttcttatatctaggagcaaaattcatttcttcaacacaggcacacaaaaaaataagtctcacatatatgaagtcaaggtcttgcatagaaattcttaatcagtgggtactttttacctggtagccactcagtagtctcttcgctcttttcctcattgcttttaaattgaaaaaaggttaaggaaaaaaatgacactctgctcctctggtaatttctagaattgcaattagtgaggaaagatatttgagaaagttatcatcaactagtcttcttttctttgatatgtaaggtgaaattgtgtgtgtctgtgtgtttgtgtctatgtgtgtatgtgccacattcatagaagtcagaatgcatcatttctacaacacaagaattgggatcaatctcctctgccaagaacttgaactttggactaaagtgtaaatcaacattgatcaaaaaaattgaaatccaaaaggtgaagaaattttgcaagacc

SEQ ID NO: 129023 - DNA, 563 bp, Homo sapiens
atgctgaattttgtcaaatgcttctcctgtatctattgagatgatcttgtgatttttgtttttaattctgtttatgtggtctgtcacatttattgacttgtggatattaagccttccctgcatcccttgtatgaaacccacttgatcatggtggattatccttttgatatactgttgggtttggttagctagtattttgttgaggatttttacatctatgttcatcacagactatggtctgtaattttctttttctttttggcatcaattcttctttgaatgtctgatagaattcagctgtgaattcatctggtactggactttttttattggcaatttttttattaygatttcagtctcactgcttgttattggtctgttcagagtttctatgtcttcctggtttaatctaagatggttgtatatttccaggaatttgtccatttcctctaggtttactagtttatgcacataaaggtattcatagaagccttgaataatcttttgtatttctgtggtattggatgtaatatctcctgttttgtttctattgagcttatttg

SEQ ID NO: 129024 - DNA, 586 bp, Homo sapiens
aagctctttgaacctttgtgtttcagggtgctgtgcaattcaataatcatttctctgcccaaatacactaagttaaatttaatttttctaaagtttttgttttaacaaagctattactygtaaacctttgaaataaatacttaagtatttagtatgtacacatatttatttctttaaatccattttaagaattaaaatgttggcaggtagaattataaagtttattattaaaattgtgtgggctttgtcacaagactctcataagtaggaatttatgcattcatctcttacatacttatatgcaccagatatcattaagtgctaggtatacagcaataaaaataaataaataacctattctcatgttttcttgatttttaaaatttctgcttcatatagtcaagtaaagaatgtcattgtttttaatctactagttacaagacatcctcctcaaactgattttttaaaaaaggaaatgaacttgctcacacatctgcagaggtagtacagtgtccccattgatacaccctgtggcttcagcttgaattgccttttagccttgtccttctccgtgtgtgcctacagc

SEQ ID NO: 129025 - DNA, 586 bp, Homo sapiens
aagctctttgaacctttgtgtttcagggtgctgtgcaattcaataatcatttctctgcccaaatacactaagttaaatttaatttttctaaagtttttgttttaacaaagctattactcgtaaacctttgaaataaatacttaagtatttagtatgtacacatatttatttctttaaatccattttaagaattaaaatgttggcaggtagaattataaagtttattattaaaattgtgtgggctttgtcacaagactctcataagtaggaatttatgcattcatytcttacatacttatatgcaccagatatcattaagtgctaggtatacagcaataaaaataaataaataacctattctcatgttttcttgatttttaaaatttctgcttcatatagtcaagtaaagaatgtcattgtttttaatctactagttacaagacatcctcctcaaactgattttttaaaaaaggaaatgaacttgctcacacatctgcagaggtagtacagtgtccccattgatacaccctgtggcttcagcttgaattgccttttagccttgtccttctccgtgtgtgcctacagc

SEQ ID NO: 129026 - DNA, 586 bp, Homo sapiens
aagctctttgaacctttgtgtttcagggtgctgtgcaattcaataatcatttctctgcccaaatacactaagttaaatttaatttttctaaagtttttgttttaacaaagctattactcgtaaacctttgaaataaatacttaagtatttagtatgtacacatatttatttctttaaatccattttaagaattaaaatgttggcaggtagaattataaagtttattattaaaattgtgtgggctttgtcacaagactctcataagtaggaatttatgcattcatctcttacatacttatatgcaccagatatcattaagtgctaggtatacagcaataaaaataaataaataacctattctcatgttktcttgatttttaaaatttctgcttcatatagtcaagtaaagaatgtcattgtttttaatctactagttacaagacatcctcctcaaactgattttttaaaaaaggaaatgaacttgctcacacatctgcagaggtagtacagtgtccccattgatacaccctgtggcttcagcttgaattgccttttagccttgtccttctccgtgtgtgcctacagc

SEQ ID NO: 129027 - DNA, 591 bp, Homo sapiens
ttctccagcacatgcacaattattacaatgatcatggtattatcaatacatatatgtattcatataatttctatcataaatatttttccagagacaatgagactatatcattttattatttcctcattttctatgatgtctaataaatatccataaataaaaaataaatctaagtaatcaattaagtatattatttgtattattaaggagtattttcccctttttaaatgagatgttcttaaagcaatactgtaaagaattctaacagataatatatattttctattttgagggtataacatcatttgatattggaagaattgycatggggtaaaaactggaatatggaaagctaccatattgacaatccctcagcatgcaagtatcaccaaaactcttacttaaatgtgctagtagttatttcttgtatacagtcattaaatttagtttgtagccagaacaaacattatcataatatattttttcaccatattaaatgtttaatataatttcaataaactaatttatactatacgactgaaaaactacaggcagattattaatgatgataaaagaccagttgtaaaagaa

SEQ ID NO: 129028 - DNA, 487 bp, Homo sapiens
aatgcacagggttaattttttatgttagattgaatctgtkggcatagtcccttgtgttatcaaatagaatacctaaacttgtatatgtcaattaaacacctttcccatggggccattcagaatgcagtatttaaaaacctgcaataaatcgctaaagttttaaaatagctcattacattaatctgcaacagtatcatgcctaaattatgatgctcttaaaatgtagtaaagtagatagatgttgtccacagtactctgagcatatttgattcttgttcaattcttaagattaaaaacaataataacaatataggtagtgaactggctctggaaacattttcggtaaatgccagccaaaagctaacacaagctcaaatgtcatttggtttatcccagtcactgttcaaagatatgaagcaattcaaaatctacttttactcaatatctctatgaagttagaaaaatttatcttgacattggcaagaaa

SEQ ID NO: 129029 - DNA, 487 bp, Homo sapiens
aatgcacagggttaattttttatgttagattgaatctgttrgcatagtcccttgtgttatcaaatagaatacctaaacttgtatatgtcaattaaacacctttcccatggggccattcagaatgcagtatttaaaaacctgcaataaatcgctaaagttttaaaatagctcattacattaatctgcaacagtatcatgcctaaattatgatgctcttaaaatgtagtaaagtagatagatgttgtccacagtactctgagcatatttgattcttgttcaattcttaagattaaaaacaataataacaatataggtagtgaactggctctggaaacattttcggtaaatgccagccaaaagctaacacaagctcaaatgtcatttggtttatcccagtcactgttcaaagatatgaagcaattcaaaatctacttttactcaatatctctatgaagttagaaaaatttatcttgacattggcaagaaa

SEQ ID NO: 129030 - DNA, 545 bp, Homo sapiens
ctcccatatcttaccctaaggttctaataagaaatcaagggttcaggaggtgactgcaagagaaaaaagaaagggcaaactaaaaagtctaaaccttttgggaatagatgaataacaccttgaagaaataagaaattaaattcagatagcacaatattactgattacaggagatttatcagatgctttgaaatctaaggcatgtaaaggaatttgtgtggatgggcatgtatttggtgagtttttatgtgtgtatgcttgaaattcagtaaatatatactgagggtttattgtcaggagcagaaaaaaataatagttaccatttattgcatatttacactgtrccaggcatcgtgttaagttcttaagcacgaattatctcattaaatgctcacaataaagctatgagctaggtattattattttttccatccaaagatgaggccataaaggcttataaaatataaataacttatccaagatcttacaacattagtagaagagctaggatatgagctcatgtctgtctctgaaaagttcacgatc

SEQ ID NO: 129031 - DNA, 476 bp, Homo sapiens
ctccagtaatgaggttgtcacaaacagttataaagagagatcattggggaagttaagatacttctttggtttctagtcaaagcacagtacctagaacagagtcatcattcaaataattctgtatttccttcctctatctttgacttctttccatttcacatgtacctttactttcctattttagatactattttctcattgtgactactggaactatctcttaaacataccatcsctgcctttaatctcagttgcttcagttttcaaattgctgccatagtttcttttctaaaacacttaccctagcacttcactgtcctgctcaaaaagctccattcctttttccctgctgtgtcaaattcaaagccaaactcggcacaggtttctaaccaggaccaagctcatcttactgtctcatcacctgactgcccccacaaccactgtgttacattcttccacagtggatgctcaacttt

SEQ ID NO: 129032 - DNA, 476 bp, Homo sapiens
ctccagtaatgaggttgtcacaaacagttataaagagagatcattggggaagttaagatacttctttggtttctagtcaaagcacagtacctagaacagagtcatcattcaaataattctgtatttccttcctctatctttgacttctttccatttcacatgtacctttactttcctattttagatactattttctcattgtgactactggaactatctcttaaacataccatcgctgcctttaatctcagttgcttcagttttcaaattgctgccatagtttcttttctaaaacacttaccctagcacttcactgtcctgctcaaaaagctccattcctttttccctgctgtgtcaaattcaaagccaaactyggcacaggtttctaaccaggaccaagctcatcttactgtctcatcacctgactgcccccacaaccactgtgttacattcttccacagtggatgctcaacttt

SEQ ID NO: 129033 - DNA, 570 bp, Homo sapiens
aatcactgaaaatcaacagaattatgtattctatgatcatttgcttatcttcaggtctcttatcctgtattatcagctactggaacacaaccaagactcaagcccagcaaaatcaatctccaaagagctcaaagagattgtcttttaagttcatatactaagatttatttattttccataaccctcatctgagctatatgtwgccttatatcagacacagcacagttctattatgctccaataggttcttgttgctttcgagatgaagaacaaaccttaataatggcctataagacctcacatggtattcatggcctggcctattgccctacccttatctcagacacctactcccttcagatttcatctgttcctaaatccctatattagggaaatgtccactattataaactctaaatccagaatatctcccttttcagcactcattgcagattacataattatatttttgtgtgcttatttgattaatacctaagttctccaggaaactcgaagtgccatgaatgttttgtctatgttccccagtaaagtatcgtcagcacctgtcct

SEQ ID NO: 129034 - DNA, 641 bp, Homo sapiens
caatttaatacatatactcttcctcagcatttcttaaaaaataaacagcctggtgtggtggctcacagctgtaatcccaacatttcgaaaggctgaggtgggaggattgcttgatgtcaggagttcaagaccagcctgggcagcagagtgagaccctgtccctaccaaaaaataaaactaaaaattcaactttatatccaataggtctaaatgaacaatcaaatacacataatcttattaaagaaacatatttaaaattktactattcaaattattcattttcttttctagttataaactccaattattttgactgttgattaaacatattcaactttgtacatttttgttcttttaaagagttcagaagtctgcctagtaactggtgccacatgtgaatcaatgaacactgtaagaatctccccataaatcaacataagcatatggtgacaaactgaaagactgaatactattaccatttctaaacttaaaagtggatcatttgatttcttttcaggctgtttagacaatgtatttttctgttccttaacacttcaacctcatgatgacacttaagattttacagcagctagaatttgctcctcacttcctatatttgattctctcattcatctaaaaga

SEQ ID NO: 129035 - DNA, 641 bp, Homo sapiens
caatttaatacatatactcttcctcagcatttcttaaaaaataaacagcctggtgtggtggctcacagctgtaatcccaacatttcgaaaggctgaggtgggaggattgcttgatgtcaggagttcaagaccagcctgggcagcagagtgagaccctgtccctaccaaaaaataaaactaaaaattcaactttatatccaataggtctaaatgaacaatcaaatacacataatcttattaaagaaacatatttaaaattgtactattcaaattattcattttcttttctagttataaactccaattattttgactgttgattaaacatattcaactttgtacatttttgttcttttaaagagttcagaagtctgcctagtaactggtgccacatgtgaatcaatgaacactgtaagaatctccccataaatcaacataagcatakggtgacaaactgaaagactgaatactattaccatttctaaacttaaaagtggatcatttgatttcttttcaggctgtttagacaatgtatttttctgttccttaacacttcaacctcatgatgacacttaagattttacagcagctagaatttgctcctcacttcctatatttgattctctcattcatctaaaaga

SEQ ID NO: 129036 - DNA, 506 bp, Homo sapiens
ggaaacaggataacccagggaagtgaaaacaaaggaatgagagaaaatatgttttagakgccaaattgacagaatctaactatctgattaaatatggcagtaaatgtcaggaggcaatgaacaactcagggttctgatgctaggtagtagaaaattggcaccatgaacagtttgaaaaatcaggtgaagatttggttaatgatatctccccaagggcatcaagacctcaattaaaaggactgatttttaatgttctgtgctatttattatatcctctaacagagtatagactttatatagatgtttaattattaaaagaataaaaggcccaaatgtttagagtaatcacataccaataacgtggttgatcatttatttgcaacactggcataatcaaagaagctacgttggagtagagcaccttatgcaatgttgcagtaaaaccaacggcctgagaagccagacttgcattctggttctaacaccacaaccaattaactttgtgg

SEQ ID NO: 129037 - DNA, 488 bp, Homo sapiens
aaacttaaggaaatcactgaatgagtttgcccatgaggaattaaaagcattgaaggaataatgaagtatgaaaataaatgaataacaagaaagtatgagtaatgggcaggttctctcttactccaaagggaaactatcagtgaaaaccaacaacaaagaaccacagcttttggttttgaaaaccaaaaaaatctaaacacaaacgattttataacagaaacttaaatttgtaaataaaggcccataagtgcctgaagtttatgatgcatatcctttaagtgaaaattttagggtgtctgtgtgtaktattggaccacccaaatgaaaaatgaaaacaattcttgcctctgtacaatgcagtcaatcctctggatgactgactaggtctttcacttttcttcccaattttaggggtcacagcacaggcataggtatagtgccagtggctgattaaagcaggtcgcaatctgtctgggagagtttctgtg

SEQ ID NO: 129038 - DNA, 585 bp, Homo sapiens
ctgttgatatgttggctggctcacactcctaaaagtacccagttttgggactgaaaaccagcaggggcatcaccatcccaagcatgcacaaagctgctatgaccggtgttcaacagcgacacctggtggcagccaccaaaactgcatgctgctgtattgcctcaaactccctctcccccatgtctttgctggtgcatctggaaatcagaatgatctttggtctgaggaagttcctggcattcttggataattggggataagggaggcctccaaaggaagatactggaactcctggtaataaagggtatatggaaacgtgggcttgaaaagtaaagaactgtagctgtatttttatcctcagctggtgtagcaggtcatagtgattatgctcaccgtatgcacagagacccacacacattcacactcccagtttcaaatggatgcacrcaatcaaccacaaagtgtcacccacatgctgaaacctgcaaactcagccattcccgatctttccctctgccctccctgctcacttccccaaccccatccttaccccactgggcccctggggagagcagcaagccaggc

SEQ ID NO: 129039 - DNA, 492 bp, Homo sapiens
tatgtgtttgaataacatttaccatacaaatgttcacaatataataattttgatatgatatttacaatactatattcacaataaaatattttcaayttttataatcgacaaaagttttatcaccaggacatatagggcttacatatcaatggcaagcaaaaaacaatcgaaatatttggcatagtatttaaaaagacacttaacaaaagaagttatagaatgaatatgagcatatcaatcaatattcgcatcattactcaccaaagaattgcacactgaaatctcaatgaaagacctcattggaaaaattaagtagcctgataatactaagatgaagatgtgaagcaagaactttttacgtttcaggtaagaatgtaaaataacataaccgttttggaagggctgtatttctttatataattaaacatacacttaccatatgacccagccattctactcctagatatcagccaaaggaaatgaaaaaatgtg

SEQ ID NO: 129040 - DNA, 492 bp, Homo sapiens
tatgtgtttgaataacatttaccatacaaatgttcacaatataataattttgatatgatatttacaatactatattcacaataaaatattttcaatttttataatcgacaaaagttttatcaccaggacatatagggcttacatatcaatggcaagcaaaaaacaatcgaaatatttggcatagtatttaaaaagacacttaacaaaagaagttatagaatgaatatgagcataycaatcaatattcgcatcattactcaccaaagaattgcacactgaaatctcaatgaaagacctcattggaaaaattaagtagcctgataatactaagatgaagatgtgaagcaagaactttttacgtttcaggtaagaatgtaaaataacataaccgttttggaagggctgtatttctttatataattaaacatacacttaccatatgacccagccattctactcctagatatcagccaaaggaaatgaaaaaatgtg

SEQ ID NO: 129041 - DNA, 492 bp, Homo sapiens
tatgtgtttgaataacatttaccatacaaatgttcacaatataataattttgatatgatatttacaatactatattcacaataaaatattttcaatttttataatcgacaaaagttttatcaccaggacatatagggcttacatatcaatggcaagcaaaaaacaatcgaaatatttggcatagtatttaaaaagacacttaacaaaagaagttatagaatgaatatgagcatatcaatyaatattcgcatcattactcaccaaagaattgcacactgaaatctcaatgaaagacctcattggaaaaattaagtagcctgataatactaagatgaagatgtgaagcaagaactttttacgtttcaggtaagaatgtaaaataacataaccgttttggaagggctgtatttctttatataattaaacatacacttaccatatgacccagccattctactcctagatatcagccaaaggaaatgaaaaaatgtg

SEQ ID NO: 129042 - DNA, 575 bp, Homo sapiens
tatcaatcaatattcgcatcattactcaccaaagaattgcacactgaaatctcaatgaaagacctcattggaaaaattaagtagcctgataatactaagatgaagatgtgaagcaagaactttttacgtttcaggtaagaatgtaaaataacataaccgttttggaagggctgtatttctttatataattaaacatacacttaccatatgacccagccattctactcctagatatcagccaaaggaaatgaaaaaatgtgaacacaatcttgtatgtgaatgttcatagtaaatattaatatatccataatagcccaaactaggaacaacctacatgaagagcaacaagtgaatggacaaycagaaacattgagatttatgtaatgggatattactcagaaataaaatgaagtaaatggctgataccagcaaccacatggagttacctcaaaaacatcatgctgagcaaagaaagacaatacaaaagagtatatgctgtatgatttcatttctataaagctaaagaaggaaattataatctaaagtatcagaaatcagattagtggttgcttgta

SEQ ID NO: 129043 - DNA, 424 bp, Homo sapiens
atataataaaagaaaaaaactataaaaatatgtaattaggttttaagtctttgataaaaataaaaacgctcaaattataaattatattagtcatgatctataaaacattttagaatcattgtatgttaaaatgaccttatctttaaatatttctaagatattcagacttctaagctaaaaaatatcctagttcatgtccacagtcaaaatacctaagaagaaatttaaaataatggaaaagttatcatctcatggggaaactaccaaattcccttgaacttgactcattatgtaatattaataaataataatattactrtaaatgtttcaattacatgttcatctagatgattaatacagattgttctatatcccaaatttcttatctattgtaatatgtgaaaaaaatctagaatatatgttc

SEQ ID NO: 129044 - DNA, 575 bp, Homo sapiens
aatgaaataagcaaggcacagaaagacacatattgcaggttctcacttatatgtaagtgggagcttaaaaagttgatctcgtagaagtggagagtagaatagaggttaccagaggttgggaagtgtagggggtagatggtagggagaaaatatgcacaggtttgtcaaggrgtacaaaattatagttagataggaggaatgagttctaatattctatattatagtagagtgactgcaactaaaattaatgtattctacatttcaaaataatttagaggaaatattttgaatgttctcaacacaaataaacaataaatgtatgagatgacagacatgccaattaccctgatttgagcattacacattgtttacatgtattgaaaatatcacatttgccccataaatatatacaattattatatttcaatttaaataaataaatagaaatgtacatagataatataagctatttggcaaagttgtttcccatgaatgtaaggattcaccatgccaatattgatatacatacatacttgaaataaacaatgaagtatatggatggtagagagggtaag

SEQ ID NO: 129045 - DNA, 450 bp, Homo sapiens
ctatacataggtaaaaatacatgtgtatggtatctacatacacacataaaaacaaatatataagtatttaggaatccaccaataaatgttattttttaaaatataactaagtattttggacatatcttagattaaaaaatctcctaggtaatttatatgtaatagatatcttacatatctattaggcgcccatcacatttagatttctccctctatcccatcctgctccccttctctgttttcatagtgattgaacccaaaagtcctcctttataagcactcttcaagctaatctgtttcagagccatctttacagaraaaccaacttgcaacaccctctcaggaaatgagttaacttccatactaaatgaaatgtatttctacttgtccttgtaaatttcaacccaatattcctttctctttaaggtactttataacctctccagacaa

SEQ ID NO: 129046 - DNA, 593 bp, Homo sapiens
aactagaggttattatgttaagcaaaataagccaggcaacaaaagagaaacttactatgttctcacttatttgtgggatgtgaaaattaaaaccaccgaattgatggagacagagagtatagaatgattactaggggaagtaaagggtagtggggtggtgggggaaagtgtaaatggttaatgggtacaaaatatagtaagaaataatgaataagaactaatgtttgatagcatgacagggtgactatcaacaataataataataattgtacattttaaaatasctaaaatcggacaggtacagtggctcacacctgtaatcccagcactttgggaggctgaggcaggcagatcacgtggtcaggagttcaatatggtgactaatacggtgaaatgccgtctctactaaaaataccaatatggtgaaacatcgtctctactaaaaatacaaaaattagtcggtcgtggtggcaagcgcctgtaatcccagctactcagaaggctgaggcaggagaatcacttgaagcggagaggcagaggttgcagtgagctgagttcatgccactgcactccagcctgggcaacagagtgag

SEQ ID NO: 129047 - DNA, 577 bp, Homo sapiens
tcattgaggagaaatgtttattgtgtggacattcattatattttatctatttatcactctttgaggttttacaattaagaacgtctataagatgaaactcctttgaagaattaaaaaaaaaaaaaaaaaaagctaggcattggagctcacttttggaatcccagagctttggaaggccaaggtgggaagatctgttgaagccaggagcgtcagacaagcgtaagcaacatagtgagaatccaattctacaaaataatattaataataataataawaaaagtgtaaaagtaaaaaacaaatatgcaaaaaaattccaaatgacaacaacaaaaatcagtgttagccagtattaactttagaaaaccgcatcaatgattgcttttactctcagcaaagaactcttcttacataaaatgtgccttatgatttttatgctgatctctagtctaagtttgtacataattaaatcgcaaagtcaaaagtgctatggagaattaaactctacttactcccatttgcttgcatatgttgtgtgcttagcctggtgtttctaattctatcatgtactttatataat

SEQ ID NO: 129048 - DNA, 557 bp, Homo sapiens
ttgattcttgaatttttttaatccaatttgacaatctctgccatttgattggggtgtttagaaaaagcacatttaatataacattgatatggctgaaattgcattttttattctgctattattttccatatatccattgtcttttttcattgttcttttgtwcctccgtgaccgcctcatttgattctaaacactagattttagttattactctgtttatattttgtctataattttaatgttttactttagtagttgctttaaggattactgtgtgtgtatacataacatataatatataacataaattatatgtgatatatatatatatacacatgtgtacaaaagcactattgagttatagttcatgtacatacgctagagtggactctttaaagtgtacaatttaacaagttttgacatatgtatataaccataaaagataatattcaccacccctaaatggtttttaatttctctttgtaatacctctgtcttggccttcccaacccacttccccaggcaaccactaatatgctttctgtctcagtggattt

SEQ ID NO: 129049 - DNA, 557 bp, Homo sapiens
ttgattcttgaatttttttaatccaatttgacaatctctgccatttgattggggtgtttagaaaaagcacatttaatataacattgatatggctgaaattgcattttttattctgctattattttccatatatccattgtcttttttcattgttcttttgtacctccgtgaccgcctcatttgattctaaacactagattttagttattactctgtttatattttgtctataattttaatgttttactttagtagttgctttaaggattactgtgtgtgtatacataacatataatatataacataaattatatgtgatatatatatatatayacatgtgtacaaaagcactattgagttatagttcatgtacatacgctagagtggactctttaaagtgtacaatttaacaagttttgacatatgtatataaccataaaagataatattcaccacccctaaatggtttttaatttctctttgtaatacctctgtcttggccttcccaacccacttccccaggcaaccactaatatgctttctgtctcagtggattt

SEQ ID NO: 129050 - DNA, 557 bp, Homo sapiens
ttgattcttgaatttttttaatccaatttgacaatctctgccatttgattggggtgtttagaaaaagcacatttaatataacattgatatggctgaaattgcattttttattctgctattattttccatatatccattgtcttttttcattgttcttttgtacctccgtgaccgcctcatttgattctaaacactagattttagttattactctgtttatattttgtctataattttaatgttttactttagtagttgctttaaggattactgtgtgtgtatacataacatataatatataacataaattatatgtgatatatatatatatacacaygtgtacaaaagcactattgagttatagttcatgtacatacgctagagtggactctttaaagtgtacaatttaacaagttttgacatatgtatataaccataaaagataatattcaccacccctaaatggtttttaatttctctttgtaatacctctgtcttggccttcccaacccacttccccaggcaaccactaatatgctttctgtctcagtggattt

SEQ ID NO: 129051 - DNA, 563 bp, Homo sapiens
agtgcccagcaaagggagaagscccttataaaaccatcagatctcatcagaactcactcactatcatgagaacaggatggcggaaactgccgccataattcaattatctctacctggttcccccaatgacatgtggggattatgggaactacaattcaagatgagatttgggtggggacacagccaaaccatatcattgagattcagtcattttttcttgaataaactccgcttgaattattataaacttctggataatttcaagaattttgaaaaacatgtttattatgacaattgctgccagtgttgccatttttaataagaaaaagattttacgagcttctatttccagcattatgaaagtccatttccccaggatatgtagtactctttaattgactagttttgcacataaaatgatttgacccctatataaaatgtaaaatgtatatcaaactctattatgcagaatgaaaaaattaactgtaaaaatagaagaagagacaaattctgaaaactttatttaaatttctttctctggtggctcatttttattgtcaatt

SEQ ID NO: 129052 - DNA, 563 bp, Homo sapiens
agtgcccagcaaagggagaaggcccttataaaaccatcagatctcatcagaactcactcactatcatgagaacaggatggcggaaactgccgccataattcaattatctctacctggttcccccaatgacatgtggggattatgggaactacaattcaagatgagatttgggtggggacacagccaaaccatatcattgagattcagtcattttttcttgaataaactccgcttgaattattataaacttctggataatttcaagaattttgaaaaacatgtttattatgacaattgctgccagtgttgccatttttaataagaaaaagattttacgagcktctatttccagcattatgaaagtccatttccccaggatatgtagtactctttaattgactagttttgcacataaaatgatttgacccctatataaaatgtaaaatgtatatcaaactctattatgcagaatgaaaaaattaactgtaaaaatagaagaagagacaaattctgaaaactttatttaaatttctttctctggtggctcatttttattgtcaatt

SEQ ID NO: 129053 - DNA, 574 bp, Homo sapiens
ccatctagaagtgtgattcaaacagcccagtattctattggaaaagagagagaaggtaagagagagcacagcaggcaaaaacacagccttatgccagtaatcctgagactctctagggaaaggagtgtcctttcatttcctacataataactgttacttccattttatcacatgtggggtttaacttagctgtgaattcctgctctaatccaatctgttactaaattaccaatgtaacaggagagatggaaggggttagcataaacttagactgctataagtttacaacaatcctccataacacaagtttaccaatataacaaacctgcacrtgtacccctaaacttaaaataaaagtaagattaaaaaaataacatgataaatatcaaagaggaatttatgtttctttttctctaaggagaggcatgcattatttgttgactttgatatttgtttaaataacatgtactttgcctacattttgatattatgtactaaatgaagataaatgttacatctatgtataattatattatattctctctactactctacaagtgacattgataaattg

SEQ ID NO: 129054 - DNA, 331 bp, Homo sapiens
atgttatatttacacaactaatgacttgattccaaatctattacattttaaaattaaataaatatgatagacaaaacattatttgtgatatgggaaaatattataaaagtactccagttcttttgaaataaattcactcatcacttcttttagaataactttgatgggttctgagtagttacagaatagtagtctcaagaagaattttcagtttgggaagctgaaggtgaacatgatgaatacakgaaaaatcttataactactcaagatatatcacaagtgagaatgtaagagactactaaatgctaaatgctaatgtccaggcagagag

SEQ ID NO: 129055 - DNA, 521 bp, Homo sapiens
tatgactataccaggaagaaatatcaatgttgtcactactttaaaaacagttattctttttcttttacatgtcagataccataggtcttagaaaatatagttcattttacattttcctgtgcaactggtgacagtgtagcagtctgttctgaaatttataaaccttgttttcagtaagtaagttcttgttatgcatgcattgtatgttcagtattataaacaaacacacacacacaccataaaacccgttaactagaaagtttatactyattctgaagaatacgaaagataaatacataaagcattttctttgggaaatattctgcattgctaaaggatgagtcctctaaatatcaatttttacatttctagtaatgcaaatttgtaggttaatgtgattaaataaaacttatagtgactgatcatttttgtctttgcttgtttcaatacatcaggaaaaaaaaacaaaatttgcttagccctatttgaaagaattattttaaacctaagttaagaaaatc

SEQ ID NO: 129056 - DNA, 521 bp, Homo sapiens
tatgactataccaggaagaaatatcaatgttgtcactactttaaaaacagttattctttttcttttacatgtcagataccataggtcttagaaaatatagttcattttacattttcctgtgcaactggtgacagtgtagcagtctgttctgaaatttataaaccttgttttcagtaagtaagttcttgttatgcatgcattgtatgttcagtattataaacaaacacacacacacaccataaaacccgttaactagaaagtttatactcattctgaagaataygaaagataaatacataaagcattttctttgggaaatattctgcattgctaaaggatgagtcctctaaatatcaatttttacatttctagtaatgcaaatttgtaggttaatgtgattaaataaaacttatagtgactgatcatttttgtctttgcttgtttcaatacatcaggaaaaaaaaacaaaatttgcttagccctatttgaaagaattattttaaacctaagttaagaaaatc

SEQ ID NO: 129057 - DNA, 573 bp, Homo sapiens
atttatgacaattagtctgtcttacacttacatatactaattctctaacaaaaatcttacttatcattgtgcttgattgcaaataaatgctttgcattttcttcacatgcatttgatattgtcagtattctgaattttggccaatctaataggtgtgtagtggtgtcttgttgttttaattttcatttcctttgtgacatgctatggagtatcttttgatattctcacttgcattttatgtggaagttgtagtcattttaacaattttaggtgttrtctaaattttgtaattcttaaaagttaaatgcacttttcttcaaaagtaaaaaagagttctttcaatgccttcttgcaaacttctttatctcacagtagagggacattgcgaaactgtcataaaaattatccacaaacatttttctgggatcattgaactcctgagagaattacagtgtttactcaattcatggctacaaacaatacccagattatttatatctcatgaaaagtttttgaaattatctatggataatttagcaattacattgacacaacattatcacccaaagtcca

SEQ ID NO: 129058 - DNA, 490 bp, Homo sapiens
agaggtataactctctaatccttcctacttacctttattatttatgacaattagtctgtcttacacttacatatactaattctctaacaaaaatcttacttatcattgtgcttgattgcaaataaatgctttgcattttcttcacatgcatttgatattgtcagtattctgaattttggccaatctaataggtgtgtagtggtgtcttgttgttttaattttcatttcctttgtgacatgctatggagtatcttttgatattctcacttgcattttatgtggaagttgtagtcattttaacaattttaggtgttgtctaamttttgtaattcttaaaagttaaatgcacttttcttcaaaagtaaaaaagagttctttcaatgccttcttgcaaacttctttatctcacagtagagggacattgcgaaactgtcataaaaattatccacaaacatttttctgggatcattgaactcctgagagaattaca

SEQ ID NO: 129059 - DNA, 263 bp, Homo sapiens
ttattccctttccttaggtgagataggatggctagcatgggctgaaattgagtatttcccttacctcargtaggttaggtgctcataaaaccctaacaggttaggttctggtaaatagtttatgttgagagaaggacttattaagaagaacagaatgttctggcatatttcaaaatgttacttgccccctattcctgcttgaagcagacaatttgtctctgatatttactgtgagaacatggtagaacaaaactttgcatttg

SEQ ID NO: 129060 - DNA, 263 bp, Homo sapiens
ttattccctttccttaggtgagataggatggctagcatgggctgaaattgagtatttcccttacctcaggtaggttaggtgctcataaaaccctaacaggttargttctggtaaatagtttatgttgagagaaggacttattaagaagaacagaatgttctggcatatttcaaaatgttacttgccccctattcctgcttgaagcagacaatttgtctctgatatttactgtgagaacatggtagaacaaaactttgcatttg

SEQ ID NO: 129061 - DNA, 535 bp, Homo sapiens
tttctttaagtgtttttaatcacattttgtggtaggcattactagcattcacaattatttaagatttttctcctcaactcatagatgatgaccctccccagctgcattacacaaaggtagggccatgtgactaatggcagccaatgagctataactaaaaacggtgcatgtcttttgtgggcggaagcactgaaaagcagataagagtaacaatatggaagatatttatatgtctgtgaggagcagatgtccctaccaatacaaaatggttaagttgcatacgtaagatctaggcttttgttttcttgagctcctgagatttgaaattatttgtcactatggcrtagtctatcccatatttcctaatataatgaatatcaaatgcatacaaaacagtattgataataggattataaatattttaatgcgttttctctttctgtatataaacagaaatacacacacacacacacacacacatatatatatgtaagatttatataaaagaactggcttatgtgattgtggaagctgg

SEQ ID NO: 129062 - DNA, 544 bp, Homo sapiens
tgaattggcatatccgtggttgcctaaacattaaaacagcaaaaatataattaaaaattaaattgcattgactttttcatktatacctgatagttatactgtactacaagaaaaaaatgtagttttattcatttgaaagaacaggaaaaatagtgtttgaacaactatgataatcctcttccaatagtgacgtagtcagattatcataatgcacatattcaaccttctgcttaaagagtgaaaatatgtacttgatccatggctgttgcaataaaggccatttgtgaattgaattgaagtgatattgttcttgttcattgtattaaataaattctaattttaaatatgtgcttccatatgaaagataccattttatggaaatgctgcagaaatgttaagaaattgcaatgcggaatactatcttcaagtttttttcctgtcatttggaatcataatatcttcatgtccatacttttaaaaaaatcaatccaggaccaatcctaatagaagaaaaatgacgttcatctagagagacaaatttgct

SEQ ID NO: 129063 - DNA, 544 bp, Homo sapiens
tgaattggcatatccgtggttgcctaaacattaaaacagcaaaaatataattaaaaattaaattgcattgactttttcatttatacctgakagttatactgtactacaagaaaaaaatgtagttttattcatttgaaagaacaggaaaaatagtgtttgaacaactatgataatcctcttccaatagtgacgtagtcagattatcataatgcacatattcaaccttctgcttaaagagtgaaaatatgtacttgatccatggctgttgcaataaaggccatttgtgaattgaattgaagtgatattgttcttgttcattgtattaaataaattctaattttaaatatgtgcttccatatgaaagataccattttatggaaatgctgcagaaatgttaagaaattgcaatgcggaatactatcttcaagtttttttcctgtcatttggaatcataatatcttcatgtccatacttttaaaaaaatcaatccaggaccaatcctaatagaagaaaaatgacgttcatctagagagacaaatttgct

SEQ ID NO: 129064 - DNA, 544 bp, Homo sapiens
tgaattggcatatccgtggttgcctaaacattaaaacagcaaaaatataattaaaaattaaattgcattgactttttcatttatacctgatagttatactgtactacaagaaaaaaatgtagttttattcatttgaaagaacaggaaaaatagtgtttgaacaactatgataatcctcttccaatagtgacgtagtcagattatcataatgcacatattcaaccttctgcttaaagagtgaaaatatgtacttgatccatggctgttgcaataaaggccatttgtgaattgaattgaagtgatattgttcttgttyattgtattaaataaattctaattttaaatatgtgcttccatatgaaagataccattttatggaaatgctgcagaaatgttaagaaattgcaatgcggaatactatcttcaagtttttttcctgtcatttggaatcataatatcttcatgtccatacttttaaaaaaatcaatccaggaccaatcctaatagaagaaaaatgacgttcatctagagagacaaatttgct

SEQ ID NO: 129065 - DNA, 500 bp, Homo sapiens
tatcctaaagtcaaacaggaggtacggaataattagaaggtaataactattagttaattggtgacaatagttaaatacaaaaatcttaaatatactttttaacaataaaagattaaaaaggctactaagaaacgtgttcatttctataatgattcttatcrtaagtacaatcataaggagagtagtattgtttacagttttaaaaaatttatttatttattttaaattaagcatgaaatttatatatactctcagaaaaacattagaggaatgcagccctatagaacttgctgcagtgataaaagcattctatgtatgcatcatagctacaaggtccatgtgcctagtgagcatttgagatgtggctagtgagaatgagaaactgatttttaagttttatttaattataattaacttaaaagcaacagggagtagtgcgtacaatatcagagagctaaacaatggatgaatgtgtataataaatattccttaatagttgc

SEQ ID NO: 129066 - DNA, 596 bp, Homo sapiens
acatccaggtgcagcacctttccttaaacttgtttatgacacagagtcctttgttcacatgttttcctgctgtccctctccccaccattaccctatagtcctgccacatccccctctccgagataatagagatagtggtcaataaataacgagataactcagagaccagtgccggtgtgggtcctctgtatgccgagcaccggtcccctgggcccacttttcttcctctatactttgtctctgtgtcttatttcttttctcagtctcttgtctccaccttgcgaaaaatacccacaggtgtggagaggcaggcccccttcactttacattgatgacattatgctgattggatccagtgagtgagaagyagaaaacatactggacttattagtgagacatttgcatgccagaggatgggaaataaattagactaaaattcagtaaacttctacctcagtaaaatttctaggggtccagtggtgtggggcctgacgagatagtccttctaaggtgaaggatcaagttctttccaaacaagagttatgacacaaagacggagagttgatatacccctggtaggacagtaaaggtatact

SEQ ID NO: 129067 - DNA, 599 bp, Homo sapiens
aagtaccacttttcaagccatataatcttattacttttattacatcagcaatgtggcttagttaactactgaacaaagtggaagaaggagataagaggcttacataagttaatagcttggccctgaggaaagaaaattcgacatatacttcctggaatttcttgataattgatatattttctccttagcacttatcaccccctgacatagtatacatttgtatttgtttatcatagccactagaataacatttctaagagaagaatatatttattgcacartgtctagaaaagtgatgcatactaaatgtgtaataaattattattgagtgagtggaggctctactgagaaaagtttgctagagaaaacaatatggtaattaactcatgatcgcaaacaactttaaaatgcaaggactttaaaccatatagccaagggctagagccaaaaataactggaggcccacaaactacagagaaaatagcatgtaagggaaatgcttgaaatgtttccgtggcagtttgttttcaatatgtccatgatccatctcccatcctgcatccagaattggagtctattcctctccacctcgcatctgg

SEQ ID NO: 129068 - DNA, 493 bp, Homo sapiens
ttatctctttgttaattatacttatttttctgtttcaaatgttaattcaaaataatcagttctgctaagacgtacttttgcctagttttacttgttaatgtcacaccgatggccrtatcagcttcaaaccagcatctcccatattttgttcctatagactatgtccaacatgcatacaacttgctccagaaatttcagctcttctccctttgcagcctgataatggaggatgtataagatgggagaggtggtacctttttcatcatggaatagaatcattagtctttaaactatgagattttagccatagttaatactccagggttagtggtgaagggtactgataatgtacttaattcctactgaagaattacgttccttccaatatctagtcactaaaaggaagatactttaagggcaactgtgccttaaaaatcacatctacttttgctctgtatctgaaaatgtccccccaaaataaaataaaataaaa

SEQ ID NO: 129069 - DNA, 508 bp, Homo sapiens
cttaataaaatatcatatacttataacagactagtaacaactgtaaattcttaagtagcaacttaactaaatttaaatagaaaactcygtattttctccctcatatgcatgcattgtgggtttttttatgttatgatatgcaactctttatattatgtatccctaaaaattactgtagctatgtatttttaaatagtttttgtcttttaaactttatgtttaaatgatagatgcaccaccattacagtattaaagtattctgaattttaatgtatatattcaattttacaccttttatataaaggtgagttttacacctttatgtcttatcatgttactaattaacctctttttatttcagcttgaaaaactctctgcagcatttcttacaaggcagatccagtaacaatgagcttcctcagccctggtatttctgggaaagttttatctctctcatttctgaaggacaactttgccaaataatgtattattcatagtttctttattc

SEQ ID NO: 129070 - DNA, 508 bp, Homo sapiens
cttaataaaatatcatatacttataacagactagtaacaactgtaaattcttaagtagcaacttaactaaatttaaatagaaaactccgtattttctccctcatatgcatgcattgtgggtttttttatgttatgatatgcaactctttatattatgtatccctaaaaattactgtagctatgtatttttaaatagtttttgtcttttaaactttatgtttaaatgatagatgcaccaccattacagtattaaagtattctgaattttaatgtatatattcaattttacaccttttatataaaggtgagttttacacctttatgtcttatcatgttactaattaacctctttttatttcagcttgaaaaactctctgcagcatttcttacaaggcagrtccagtaacaatgagcttcctcagccctggtatttctgggaaagttttatctctctcatttctgaaggacaactttgccaaataatgtattattcatagtttctttattc

SEQ ID NO: 129071 - DNA, 436 bp, Homo sapiens
tgctttttcctttttatgcttgactggataatttcgaatgacaaacttttgagtttagagattatttccccttcttaatagagtctgctgtgaaagctctctattgcatttttcagttcagtcattatattcttcaactacaaaatgtttctttgttgttttttcttatgttatctcttagttgaacttttcattctgtcattkcattttttctaattttgttaaattgtttatctgtattcttcttgctcattgagcttccttattaatgattttgaagtatttgtcaggcaatttgtgaatcttcataatatggatttaattatagaaattttattgtgtttcttgttgctgttatatttccctgattctttgtgactcttgtagccttggataactatctgtgcatttgaagaagtagtcacttcttccaggt

SEQ ID NO: 129072 - DNA, 512 bp, Homo sapiens
agtgatttccagaatacatttttaataaaaaaawtgaagacattgtcagagttctgtaatgaaaatcaagggaggcagggcattttctgtataatgccacagagaggaaatacaataaatgcaaagatgacccattggatttgacaattaggaagccatttggtaaatgttagaaagaattaagaagaagaaaaggaaagatgtaaaataaaagaagagattaaaatgtccctgaaagtattgcttcaccattttgcccaaggcttatgccagaaataatgtctgataaccttaattaaaatttttcaattttaatacaagttaaggagggaacagtgaaacaaaacaaaacaaaataaagaaaaaaagcaaacaggaaaatcccaaatgatagcttaaattaatctttttacaacaggatttgttttagctttctttgtttctctatgctcaaatgtgactatttttcaggaaaccatgtacagggctagattaattctctaaaggcctta

SEQ ID NO: 129073 - DNA, 512 bp, Homo sapiens
agtgatttccagaatacatttttaataaaaaaaatgaagacattgtcagagttctgtaatgaaaatcaagggaggcagggcattttctgtataatgccacagagaggaaatacaataaatgcaaagatgacccattggatttgacaattaggaagccatttggtaaatgttagaaagaattaagaagaagaaaaggaaagatgtaaaataaaagaagagattaaaatgtccctgaaagtattgcttcaccattttgcccaaggcttatgccagaaataatgtctgataaccttaattaaaatttttcaattttaatacaagttaaggagggaacagtgaaacaaaacaaaacaaaataargaaaaaaagcaaacaggaaaatcccaaatgatagcttaaattaatctttttacaacaggatttgttttagctttctttgtttctctatgctcaaatgtgactatttttcaggaaaccatgtacagggctagattaattctctaaaggcctta

SEQ ID NO: 129074 - DNA, 587 bp, Homo sapiens
tctatcatctcacatatttacctatttgtgtgacaagaatagttaaaatctacttgtttacaaagatccctaaaacagtgcaattttattaactttagtcttcatgctgtatattaatctctaaacttgttcatcctacatgtctactattttgtctcatttcacytttatctctctatttccttcccctgaaataagagaaaaggaagaggagcatttgagtaaatgaagaaaaaaaaaattacctctagatcttaattcaatgaattgttagagagcatttcatgctataaatgataaataacttgtgtgattataaatagcttcagccataattccagttgcttttgttatgtagatgaatgcagtgcagctttattttgatattaataagtttcaaaagctatgttttagaataaatataaaacagtaagtattaggaaagctattaacaataaaatgtgtgctgtacttctataatggaaatgtgaaatgcaagaacaagaaatgtactactaactagtttctacacaagataacgttacttgtcaaatattataaaatagtaatttcctttggaaagagat

SEQ ID NO: 129075 - DNA, 587 bp, Homo sapiens
tctatcatctcacatatttacctatttgtgtgacaagaatagttaaaatctacttgtttacaaagatccctaaaacagtgcaattttattaactttagtcttcatgctgtatattaatctctaaacttgttcatcctacatgtctactattttgtctcatttcacttttatctctctatttccttcccctgaaataagagaaaaggaagaggagcatttgagtaaatgaagaaaaaaaaaattacctctagatcttaattcaatgaattgttagagagcatttcatgctataaatgataaataacttgtgtgattataaatagcttcagccataattccagttgcttttgttatgtagwtgaatgcagtgcagctttattttgatattaataagtttcaaaagctatgttttagaataaatataaaacagtaagtattaggaaagctattaacaataaaatgtgtgctgtacttctataatggaaatgtgaaatgcaagaacaagaaatgtactactaactagtttctacacaagataacgttacttgtcaaatattataaaatagtaatttcctttggaaagagat

SEQ ID NO: 129076 - DNA, 575 bp, Homo sapiens
tgctattgactgaatctttatgtctttcccaaattcatatatttcaatctatccaatgtgatgatatttggaagtgaggcctgtgggaggtgattagggaataagggaagagccttcatgaatgacattagtgcccttataaaagaaacacagagcccagcctggccartatggtgaaacaccatttctactaaaaatagaaaaattagctgggcgtggtggcaggcacctgtagtcccagatactcgggaggctgaggcaggagaatcgcttgaacctgggaggcagaggttgtagtgagctgagatcacgccactgcactccagcctgggtgacagagcgagactccgtctcaaaaaaaaaaaaaagagacacagaaagctccttcacttcttcaactatgtgaagacagtgaaaagacagctgtctctgaataaggaagtaggcccacaccagacaccaaatctgccagtgacttcatcttggactttccagccttcaaaactgtgggaaataaatttctgttgtttataagacactcagtctgtagtgttctattataacagcttgaacaa

SEQ ID NO: 129077 - DNA, 575 bp, Homo sapiens
tgctattgactgaatctttatgtctttcccaaattcatatatttcaatctatccaatgtgatgatatttggaagtgaggcctgtgggaggtgattagggaataagggaagagccttcatgaatgacattagtgcccttataaaagaaacacagagcccagcctggccaatatggtgaaacaccatttctactaaaaatagaaaaattagctgggcgtggtggcaggcacctgtagtcccagatactcgggaggctgaggcaggagaatcgcttgaacctgggaggcagaggttgyagtgagctgagatcacgccactgcactccagcctgggtgacagagcgagactccgtctcaaaaaaaaaaaaaagagacacagaaagctccttcacttcttcaactatgtgaagacagtgaaaagacagctgtctctgaataaggaagtaggcccacaccagacaccaaatctgccagtgacttcatcttggactttccagccttcaaaactgtgggaaataaatttctgttgtttataagacactcagtctgtagtgttctattataacagcttgaacaa

SEQ ID NO: 129078 - DNA, 568 bp, Homo sapiens
tttagttctcataatgtactcaatgtctcatgagttagttcaaatgtaagtatgactcagttctcaggtgttggtgaaaacctttaataatgtttaaactaaacgataaaggaaacatggtaagtatgacaacaacaaacactttcaaaacctgctgtgtgctggatgccaggttagtctaggttcctcagatctatcactaaattgtaaaacaaaaaccagtattttatccttcttgatcctttccggaattattttttaccttacataaaatttctacacctatgttctgttgtgggtatgatgtcatatcataaaatgtacaggctaaaaaagactaaatcytaatttgcatatatatatatatatatatacatatttagtttttggtataagaaaaatttcccaatagaactagacagtaaaattcccatatcatagagttctaagatctggaagctcagcatcttgatagcagatgggagtttattaaatgttactttatgttaaagacagtgaatgcagaagaaaggactagagtgacagaataggataatctgatcagagg

SEQ ID NO: 129079 - DNA, 558 bp, Homo sapiens
acttaatgaaaacaactagttttcttcaaagtgagtgctttttaattgagtcagtgcaggatcatgacaacctctaacacagtggaccttaaatggaatggaattctactacatatcaaggaagagataaaggaggaaacatgggatggattattcaagacttttgaggccatgtggaatgatggcaacacctcagatagagagcaagatcatgaattagttgcttacaatcaatgggtattgtatgacggaaggaattattggtgtrgattgaatcttatttttctgcttgaatacaggataaataggaaatagcattaaagagtgttgagaatgttactattacctctaaaccctgaggtttatggttatggaagaaactgcattttatatggatgcgtaggaagcaatgccctcgagagagccttaggttgcaaataaatcaagaaaatagagaaacttttaaggaaaaaaaaaaaatgaggatataagagatctctgtatcatggactgaaagttccaaaatacaaagctgaaagttttgagaaggcagggagc

SEQ ID NO: 129080 - DNA, 558 bp, Homo sapiens
acttaatgaaaacaactagttttcttcaaagtgagtgctttttaattgagtcagtgcaggatcatgacaacctctaacacagtggaccttaaatggaatggaattctactacatatcaaggaagagataaaggaggaaacatgggatggattattcaagacttttgaggccatgtggaatgatggcaacacctcagatagagagcaagatcatgaattagttgcttacaatcaatgggtattgtatgacggaaggaattattggtgtggattgaatcttatttttctgcttgaatacaggataamtaggaaatagcattaaagagtgttgagaatgttactattacctctaaaccctgaggtttatggttatggaagaaactgcattttatatggatgcgtaggaagcaatgccctcgagagagccttaggttgcaaataaatcaagaaaatagagaaacttttaaggaaaaaaaaaaaatgaggatataagagatctctgtatcatggactgaaagttccaaaatacaaagctgaaagttttgagaaggcagggagc

SEQ ID NO: 129081 - DNA, 558 bp, Homo sapiens
acttaatgaaaacaactagttttcttcaaagtgagtgctttttaattgagtcagtgcaggatcatgacaacctctaacacagtggaccttaaatggaatggaattctactacatatcaaggaagagataaaggaggaaacatgggatggattattcaagacttttgaggccatgtggaatgatggcaacacctcagatagagagcaagatcatgaattagttgcttacaatcaatgggtattgtatgacggaaggaattattggtgtggattgaatcttatttttctgcttgaatacaggataaataggaaatagcattaaagagtgttgagaatgttactattacctctaaaccctgaggtttatggttatggaagaaactgcattttatatggatgcgtaggaagcaatgccctcgagagagccttrggttgcaaataaatcaagaaaatagagaaacttttaaggaaaaaaaaaaaatgaggatataagagatctctgtatcatggactgaaagttccaaaatacaaagctgaaagttttgagaaggcagggagc

SEQ ID NO: 129082 - DNA, 392 bp, Homo sapiens
attttagaaagatttattgggtggtaacacctcagaaagaaaacagaagaaagcaggattgggcaggaggagtcatcagacattcctgcagacctgaagaagtaaatctctgccagcccactgggggagttccaaagcaaggattgccatttatatgagtcttgttgtaagcggaaatgtctaggtctttgtcactccatcttgcatcatctggggaccatcctggaaagagtgtggcctttgctcaagagatgagactgaccrtgtaacagcaaacagctacataatgcctgctagctacactcttagaaactggactatgaagaagcttcttgaaggaagatctgagtgttctatatccatgtctgccatacatgtttatcatgaaatta

SEQ ID NO: 129083 - DNA, 513 bp, Homo sapiens
ggaccacatgcaggcattcaagattttcaagccagggatgaraggaacaagatctatgctttatttttattttatttattattttgtgacagggtctcactttgtcacccaggctggagtgcagtggtgcaatctcagctcactgcagcctcaatcgcccaggctaaagagttcctcccaccgcagcccctcaagtagctgggactacatccatgcaccaccatgcccaggtacgctttttgtatttttcgtagagacaaggtttcaccaggttggccaggctgatcttgaactcctgtgctcaagcgatctgcccacctcggcctcctaaattgctgagattacaggtgtgagctgctaagcgcagaagcacgatccatgttttagaaaggttaattctggagctgggaggagattttgtaaaatccagagagccagaggcagaggaagttaggaggctgatgacatcatttgggtgagagaaggcaagggtggaggcagtggcaatggaga

SEQ ID NO: 129084 - DNA, 285 bp, Homo sapiens
cgcggcggcgggcgacgctagaaggccgctgccgccgggcttgcggacattggcagccgcgggcggcggctgctgctgctgctgctgctgctgytgctgctgctgctgctgctgctgctgctgctgctgctgctggggcttcagcgacatggtgaggggcccatacaccggctcgcacgccgggcggggacagccgggagccgggcgcgccaaggagacgccggaacgcggcggggacgcgcgggcgccgagcggggaggcgcgggttggcgcggccggaggggc

SEQ ID NO: 129085 - DNA, 465 bp, Homo sapiens
cacggggcggggacggcggcgcgggccgcgggggaggggacgccgggcccggagcggagggggctggggtgccgacacccacctgcccaggccgggcctcccgccgccggaggtcgccgcgaccaccgaggagggagccgtggccgaggacgaggagaccgaggacgaggacggcgaaggcgcggcggcgggcgacgctagaaggccgctgccgccgggcttgcggacattggcagccgcgggcggcggctgctgctgctgctgctgctgctgttgctgctgctgctgytgctgctgctgctgctgctgctgctggggcttcagcgacatggtgaggggcccatacaccggctcgcacgccgggcggggacagccgggagccgggcgcgccaaggagacgccggaacgcggcggggacgcgcgggcgccgagcggggaggcgcgggttggcgcggccggaggggc

SEQ ID NO: 129086 - DNA, 269 bp, Homo sapiens
caaggtcatacagcaagcaaggagcagagctagaatttcaatcccagtttgactctttaaacctgactttaacttcaaggcaatactgtctcccacagccctcaaatacttcattctyattttacagctcgagccagacaagcctgaaagcctgttgggccttttgcccaagctcacagaatactgcaccaagattcagtgactcctattacagtgctcattaattgcatggtaatcaacactactggtgaacaagggtagtttattcg

SEQ ID NO: 129087 - DNA, 450 bp, Homo sapiens
ataaacactttccaaaggattttgcccaaaggatatataggctagcagtgtcctcctaggagaatagaccaacataaatctaaatatcatctcaaagatttcacttgagtgtatgataagtatttaaagccttgatgatttcagctgatcaacttcaaacccaaatgccccttttcttatctggcaaaacaaaataataaacaaaaaccctttgcatctattaggttccatttgttaattaacatataattggcgtacagtaaactgcacatatttaaagtgtgtgatttaatgagttttgacatacatayacaaatgtgaaaccatcaccacaatcaaaatagggaaagagccatcgccccaaaagtttcttcatgctcctttatactccgtccctctcatcctttcctgcctgcctgcctctatccccaggtaaccactacagattag

SEQ ID NO: 129088 - DNA, 586 bp, Homo sapiens
acagtatttaccacatgaacaaacttttcatagacgttttgcaggaagtatttacttcaatgaaaaacactttccccccaggcactagatctgaaaattcaaaatgtaataaatccccaaatttaaaacacccttagtctctttccatttagttactttgaaaaaaagaaagacaaaacatatttgaaaaacttaagagaaaaaaatgaagtggaaagcatgaagggcagcaggtttcatctacagaaatcaaaaagcggaaatacagccactagaagagagttacaactccatctcaagcaatcaacctcagcaaaataagggttaagatagatttctaataatatatatcaacttttggaaacagtttatataaagttatctctcttaaataaatattttaatgatctttctagtaaagaaaattgttttaatattttctcttctgttctagagctgtgctgtatcatagccactagccayatgtggctttttagcactttaaatgtagctggcttgaattgagatttaccgcaggtataaaatacacacctatttcaaagacttagtacaaaaaataaaatat

SEQ ID NO: 129089 - DNA, 330 bp, Homo sapiens
tcttcaccactttgattaatgcatctctcttccttcaacttatcctaccttctactattgaactgatatttrcagtgagatttaaaaaataaaaacactacagtaaaacttcctcatattttctatgaaataaggacaaatgtttctatgaaggaagatagaaatgtacacttgtattgtggagactcacaaagtagaatactgaatactatatgtcaaggaatatgaacaaagtacaactacatacagtaaaactcattatagaaaaactggtgcacttaatgttgcacaaaaatgccagacataaataaatatgtatttataatttca

SEQ ID NO: 129090 - DNA, 539 bp, Homo sapiens
ctgattttacaggtataggggatcattggacataatcttttcgggataattcagtcgtgccaactttgggctatgtgttaagaattcccaaatctggtcatattttcttgcctacgtgactgtgaactatttcatcagttttagtgttaacacagaagaggccaggmttttcaatatttggcgcactattccaaatatctaagaacctataggtatttataaggtaggggaaagagtaaaacttcaattcttgtagcgttaatttgagagattctttaacagaattcaagtgaattatactcccctagcagaaagtaagtggagaaaaaaactgcaaaatttctggcctgtccatggtaattcacttttaatattaaaccttctttattatattgatacaaatcattgagccccacattctgactttaatagtagcaccataggatgttatatggatatcactcttcaacaatatattcacctaaaatatagattagaaaatatttgatatggcaatcctaatgtcccattatataata

SEQ ID NO: 129091 - DNA, 409 bp, Homo sapiens
aacaattctttgcatccttcaatgcaatgggacattaagtaaagtacccaaaaggcctttgtctcagatgtaagggcaaacaagtcatagacaaaatattgtcagtatttaccatcatacctacccaaaacaatgaagatggtcttttatattttactatgaaagttttatcattttagcttttaaatttaggtgtagattcaatttcaaattaatttttgtgtatgttcatttttatctcaaatggagaaccaaatggtttcagcataatttttarcaaaatttttctttttaccattgaattatcttgacaccattggtgaaaattaactgaagatttatgagtgggcctgtttttggattctattctgttccaccaatctgtgtctattctttcaccaataccata

SEQ ID NO: 129092 - DNA, 467 bp, Homo sapiens
ggtactgaggcaacttcaattctatgcaaaggatatytggttggattttgtaagcaccactatataataaccttggcaatatttgattaatatcaatcagttagaagaaacctgttttataagaatagaaacttaacatttattttaaaacaaacaaaataaacggtcatgatgatatacatacaagacatttgaaggttaactgttcttacttcaatattcaattagtcaatttaggcagtcattattccaacttagtagttacttaatttgaactacttggttttgcaactgaaactacttaacctgaatttataggtgaaacactctgtgtacacacataatctaagaaacatcttgctaagagaactgcatgacatactaatcttatgcagcatgttattccctctttaacatgtgtagctatttctgcagctgtcctcaggactcttcattttatctgagaa

SEQ ID NO: 129093 - DNA, 467 bp, Homo sapiens
ggtactgaggcaacttcaattctatgcaaaggatatttggttggattttgtaagcaccactatataataaccttggcaatatttgattaatatcaatcagttagaagaaacctgttttataagaatagaaacttaacatttattttaaaacaaacaaaataaacggtcatgatgatatacatacaagacatttgaaggttaactgttcttacttcaatattcaattagtcaatttaggcagtcattattccaacttagtagttacttaatttgaactacttggttttrcaactgaaactacttaacctgaatttataggtgaaacactctgtgtacacacataatctaagaaacatcttgctaagagaactgcatgacatactaatcttatgcagcatgttattccctctttaacatgtgtagctatttctgcagctgtcctcaggactcttcattttatctgagaa

SEQ ID NO: 129094 - DNA, 583 bp, Homo sapiens
tactcttactgtagatcttagaaatctacagcacacaatgattttcccttcacctttcatttaaaggaagcactttgtggcttctctttggcatatcccaattgccagcatcactagtgttgtgctttgaggccattcttaagcaaaataagggttactggagcacaagtacttcagtactgagacagtcaatctgataaccaagatggctcttaactagaagcagggagtgtagacagtgtggagattccgggcaaagagatgattcacatcccgggcaggaggaagcagaagagaaggagatttcataattctgcccaraatgatgcacaatttaaaacttgtgaattgtttatttctgaaattttatgtttaatattttcagaccacggttgactggttaactgaaactgcaggaagcaaaatcgtggataagaagggactaccgtgtgtgccattttcccacattttaaagactggcattaaatgattttataaaatatagctatgagttattaaaaaatcaaaaaagtaaaattcaagcaaaatcataactaaaacctaaaatgcctgtgatagttaa

SEQ ID NO: 129095 - DNA, 583 bp, Homo sapiens
tactcttactgtagatcttagaaatctacagcacacaatgattttcccttcacctttcatttaaaggaagcactttgtggcttctctttggcatatcccaattgccagcatcactagtgttgtgctttgaggccattcttaagcaaaataagggttactggagcacaagtacttcagtactgagacagtcaatctgataaccaagatggctcttaactagaagcagggagtgtagacagtgtggagattccgggcaaagagatgattcacatcccgggcaggaggaagcagaagagaaggagatttcataattctgcccagaatgatgcacaatttaaaacttgtgaattgtttatttctgaaattttatgtttaatattttcagaccacggttgactggttaactgaaactgcaggaagcaaaatcgtggataagargggactaccgtgtgtgccattttcccacattttaaagactggcattaaatgattttataaaatatagctatgagttattaaaaaatcaaaaaagtaaaattcaagcaaaatcataactaaaacctaaaatgcctgtgatagttaa

SEQ ID NO: 129096 - DNA, 581 bp, Homo sapiens
tcaattgcccttgaaatcatatccatggagttagaagtttctaaacattttttattggaaaagctggaactttaaacacagtctctgtattttaraaatatatttttttcttctcacctaagtatggaatgggtttaatttaggacactcatttaaaaggaagatttaaagacaatgctccactgggcaattccttttggacattatctccgtttgccagagaagttttcagaaatttagagaagaaaaataacctctttcaaagtagttcaaagtaattggttagagactattcttgatggagtgtaaagcctgaacataagttgaaaaataaaatacattctcacatagattgtaatgtgtttaaaaagagaatttctatagatgaatttaatttcttggacagagttaatttctaagtctatagtgacatattatctggctgaattatgtaagcagtgttttacttcattatcttacttggtgattattttcattgaacaccagactctaacagattgaatattgcctgcatttgctaatgaaagagcccaccagagtccagttaaaaataaagatca

SEQ ID NO: 129097 - DNA, 581 bp, Homo sapiens
tcaattgcccttgaaatcatatccatggagttagaagtttctaaacattttttattggaaaagctggaactttaaacacagtctctgtattttagaaatatatttttttcttctcacctaagtatggaatgggtttaatttaggacactcatttaaaaggaagatttaaagacaatgctccactgggcaattccttttggacattatctccgtttgccagagaagttttcagaaatttagagaagaaaaataacctctttcaaagtagttcaaagtaattggttagagactattcttgatggagtgtaaagcctgaacataagttgaaaaataaaatacattctcacatagattgtaatgtgtttaaaaagagaatttctatagatgaatttaatttcttggacagagttaatttctaagtctatagtgacatattatctggctgaattatgtaagcagtgttttacttcattatcytacttggtgattattttcattgaacaccagactctaacagattgaatattgcctgcatttgctaatgaaagagcccaccagagtccagttaaaaataaagatca

SEQ ID NO: 129098 - DNA, 567 bp, Homo sapiens
gtgcataatatcagtttccacataaggaaaagcataagaacaactgagttaaagaataataatctaaagatagaaatattatttttggaaaaattgaaaggaatgcacatttattaagcaccaagcacttaacagatactatgaacttaacagataatatgaacttccgaaatgttatacttcaattctaataacaacctcaaacagtcattctagtcttgctttatttgaagataattaaggtgaagctcaaaaatatagttttaaatgctaagaaataaacgcagagaggaagtggatgaaaattgtatgtgggacataaagcaaagagaaaagacacagaggagggactcagtgaaacacaaacaaacaaacaaaaaaaaaaaacagtaggacctggatgtttagctacacatattgggcatgacccagggatgggaggccttgaagatgaatatgagaacttggaaacttggatttgatttcgcagaaacagggaaccactacagattcttrggtcaagatgtgtgcaaaaggatgctttagggtgatggatatgagtgggat

SEQ ID NO: 129099 - DNA, 532 bp, Homo sapiens
gcaaatctgtgtacacagctaaaaatgagaagagttcatgtggaaatttaaaacattatttgaattttatrtgttttaccttcttccacctggatatatttataattctagctccatgtatttttaaattttcatccaaaacaattaaatagtcccttctgtcttcaaatatttttttcaggcctctcttggtataaaggtatgattagcaagttaaaactgggaagattcaccttgacccaacctgcttcatagtttaatcagaaaatggtaggcagacaattatttggggcttttgttgattatggttgatttagcaaacagcatggaagagtttcagagcacaggctagaaatatgaaaaagtcctgcagctagaagaagcatggagttgccaattccttcagcatcatatagatatgtttacctggctgagaatgtaattgatatatcatggattacactgcaaaagagtgacctcactctctgccattctttttatatgtgggttttttatgtgttaataaaacagt

SEQ ID NO: 129100 - DNA, 618 bp, Homo sapiens
ctatccctgctctcttatggtttccatttacctggaatgtatcttacattccttcactttcagtcaatgtgtgtctttaaaaggaaggtgaatctcttgtatgaagcacatagtaagaccctgcattttaaaaaatccattcagttattctacaactttttattggaaaacttcattaatttaaatttaaaataattattgattggtaaggacttactactgtcaatttgttaattgttttctggtgcttttgcaaatttttaagttatttcttcttctcttgctgtctttatttgtgttttgatgtttttcttaaaagtggtatcttttaatcttttctatttctacttttggtgaatgtgtctactatagaactttgtggttaccataagacttacatgaaatttcytatacttatgacagtctattttaagttgataaaaacttagctttgattacatatcactctacacttttatccgccacacacattttgtttttgatgttagaacttatattactttttaatatacatccattgacaagttattttaactataattgttactaatagttcattcttttaactctcattataacgaaaaaattgtaccacca

SEQ ID NO: 129101 - DNA, 424 bp, Homo sapiens
agattatgtaaatatatatacrtatcctgtttcttattaaacctttatcccttttttggcagccattaatgaaatcatcatttctaactgtatcatttctcttagattgattagttgacattgtgctacaagagtttcccttctctccatttatttatccatttatatcactatcaactcatttttattttaatatattgtttataatccattataatatgtatttattttgttaagttgttgtagaattggccaatggcccctcattcaagctggcttcaggttaaagtctgctgattttctcttcccttgatggttgttgaaatttttcttgttctgtgtgtgtcaactgattttacattgtatcctaaacatttttgctcttacattatgtgaagttcaattctgtaaaaaaccctgtgga

SEQ ID NO: 129102 - DNA, 424 bp, Homo sapiens
agattatgtaaatatatatacgtatcctgtttcttattaaacctttatcccttttttggcagccattaatgaaatcatcatttctaactgtatcatttctcttagattgattagttgacattgtgctacaagagtttcccttctctccatttatttatccatttatatcactatcaactcatttttattttaatatattgtttataatccattataatatgtatttattttgttaagttgttgtagaattggccaatggcccctcattcaagctggcttcaggttaaagtctgctgattttctcttcccttgatggttgttgaaatttttcttgttytgtgtgtgtcaactgattttacattgtatcctaaacatttttgctcttacattatgtgaagttcaattctgtaaaaaaccctgtgga

SEQ ID NO: 129103 - DNA, 355 bp, Homo sapiens
actatctctgtgtccagagtatattcccgtccctcctgagagacttccttttccattactccaactgcaatgagtattcccaatgacctaaagatatgagtgtttgctgccttatttgaatagggaaaagggttcagctttggtttcctgtccctcctattcagactgttgctcctctcccacgggcctgcatgctaagagaaaatttctcagggctctcaccaatcttcatccygtgtgtatgtgagtgcgtgtgtgtctgtctgtcttgtgaagatggtggagaaaagcctataggaggctataaactctcctaatttctgtaacccctaggggcttcacattcttgtaccag

SEQ ID NO: 129104 - DNA, 355 bp, Homo sapiens
actatctctgtgtccagagtatattcccgtccctcctgagagacttccttttccattactccaactgcaatgagtattcccaatgacctaaagatatgagtgtttgctgccttatttgaatagggaaaagggttcagctttggtttcctgtccctcctattcagactgttgctcctctcccacgggcctgcatgctaagagaaaatttctcagggctctcaccaatcttcatcctgtgtgtatgtgagygcgtgtgtgtctgtctgtcttgtgaagatggtggagaaaagcctataggaggctataaactctcctaatttctgtaacccctaggggcttcacattcttgtaccag

SEQ ID NO: 129105 - DNA, 403 bp, Homo sapiens
ttcatgagttcaattttttaagattccacatataaatgagatcatgcaatatttgtttttctgttcctggcttatttcacttaacataatgtccttcagtttcattcatgttattgcaaatgacaggttttccttctgttttaaggatgaatactactctactgcatatatataaaacccattttctttatccatttatacastgatggacacttaggttgcttccacatcttggctattgtgaacattgctgcaatgaacataggaatgcagaaatatgttgcaaatactgattttattacctcgggatatatacctagcagtgggattggaaaccagctctatttttaataatcaggtaacaatccagtcccttctgctggtattaaaactgtttccaata

SEQ ID NO: 129106 - DNA, 514 bp, Homo sapiens
tcaaacgtcctttatttgaacatgcctggtaatcagactccaaatactgagccattttaaacgtcattcagggcagtaagagtgtaagaataaaagagaaactcacttatcccccaacctgtctggaatctttttcatggtaaaagagtaaatcattaaactgtgataaatcatcaatttatggtaaatcattaaactatygtgccagaacttcttatgttctgcatcaaaatttgaacacaaatagagatttacccacagtatttttctgcaaatcatataaagatctttttttttctggcttacacaacagaattaggagcctcaaataatagtcttctgttctcagaatagcaatataaatattgtttccctatgcaacatgacactccaggacttttttgaaagaagtgtagatagctatctatgctgaagacaattagagatttgaaatatgctaagatctcagtttgtctgaaggataatgagttggtaacagcagttattcactaat

SEQ ID NO: 129107 - DNA, 517 bp, Homo sapiens
tgcaatcatggctcactgcagcctcgaactcctgggcttaagccatccacctgcctcagtctcctaagtagctggcaccacaggtgcacaccatcacgccgagctaatttttaaatttttttgtagagaaagggtcccactatttgcccaggctggtctcraactctcaagtgattctcccacctttgtcttccaaagtgctggaagactgggtccgccgcagagaatacatttcatagcccggcagactggtggtttcagtgccttcatgaattttactccctgtagtaagaggctttccatgagcagtcttgtggtcaccacattttattagtgggttttccccagtcaccttccataaaacaggcctgcacaggctgggggcggtggcttatgcctgtaatcccagcactttgggaggccgaggtgggtggatcactggaggtcaggagttcaaaaccaacctggccaacatcgtgaaaccctgtctctactaaaaatacaaaaattagccggg

SEQ ID NO: 129108 - DNA, 517 bp, Homo sapiens
tgcaatcatggctcactgcagcctcgaactcctgggcttaagccatccacctgcctcagtctcctaagtagctggcaccacaggtgcacaccatcacgccgagctaatttttaaatttttttgtagagaaagggtcccactatttgcccaggctggtctcgaactctcaagtgattctcccacctttgtcttccaaagtgctggaagactgggtccgccgcagagaatacatttcatagcccggsagactggtggtttcagtgccttcatgaattttactccctgtagtaagaggctttccatgagcagtcttgtggtcaccacattttattagtgggttttccccagtcaccttccataaaacaggcctgcacaggctgggggcggtggcttatgcctgtaatcccagcactttgggaggccgaggtgggtggatcactggaggtcaggagttcaaaaccaacctggccaacatcgtgaaaccctgtctctactaaaaatacaaaaattagccggg

SEQ ID NO: 129109 - DNA, 517 bp, Homo sapiens
tgcaatcatggctcactgcagcctcgaactcctgggcttaagccatccacctgcctcagtctcctaagtagctggcaccacaggtgcacaccatcacgccgagctaatttttaaatttttttgtagagaaagggtcccactatttgcccaggctggtctcgaactctcaagtgattctcccacctttgtcttccaaagtgctggaagactgggtccgccgcagagaatacatttcatagcccggcagactggtggtttcagtgccttcatgaattttactccctgtagtaagaggctttccatgagcagtcttgtggtcaccacattttattagtgggttttccccagtcaycttccataaaacaggcctgcacaggctgggggcggtggcttatgcctgtaatcccagcactttgggaggccgaggtgggtggatcactggaggtcaggagttcaaaaccaacctggccaacatcgtgaaaccctgtctctactaaaaatacaaaaattagccggg

SEQ ID NO: 129110 - DNA, 450 bp, Homo sapiens
gaattcggccctgtgaagagttgggttcggcctgtctcaggccctgcccacatcccatcacagggccgtggacttgaagccggaacgtgaaatccccatagactgaatgcatttcctttctacctgttctcyctccccttttatttttatttttatattattttatttttaatttttattttatttttttgtagagacggggatttcgctatgttgcccaagctggtctggaactccggagctcaagcagtccgcccgccttggccccccaaagcgctggaattacaggcgtaatgcactgtgcctggccttttaaaaaaaaattgaggttattttggggacagtagagcatccagacatatcctaatttgcgtagctgctcagttttaaaaaatgcaatgcatttttacctgttagggtatgtgatttctggctggtaagctacaccga

SEQ ID NO: 129111 - DNA, 440 bp, Homo sapiens
gtctcaggccctgcccacatcccatcacagggccgtggacttgaagccggaacgtgaaatccccatagactgaatgcatttcctttctacctgttctccctccccttttatttttatttttatattattttatttttaatttttattttatttttttgtagagacggggatttcgctatgttgcccaagctggtctggaactccggagctcaagcagtccgcccgccttggccccccaaagckctggaattacaggcgtaatgcactgtgcctggccttttaaaaaaaaattgaggttattttggggacagtagagcatccagacatatcctaatttgcgtagctgctcagttttaaaaaatgcaatgcatttttacctgttagggtatgtgatttctggctggtaagctacaccgaatcttggctagcacagttgaatt

SEQ ID NO: 129112 - DNA, 450 bp, Homo sapiens
gaattcggccctgtgaagagttgggttcggcctgtctcaggccctgcccacatcccatcacagggccgtggacttgaagccggaacgtgaaatccccatagactgaatgcatttcctttctacctgttctccctccccttttatttttatttttatattattttatttttaatttttattttatttttttgtagagacggggatttcgctatgttgcccaagctggtctggaactccggagctcaagcagtccgcccgccttggccccccaaagcgctggaattacaggcgtaatgcactgtgcctggccttttaaaaaaaaattgaggttattttggggacagtagagcrtccagacatatcctaatttgcgtagctgctcagttttaaaaaatgcaatgcatttttacctgttagggtatgtgatttctggctggtaagctacaccga

SEQ ID NO: 129113 - DNA, 440 bp, Homo sapiens
gtctcaggccctgcccacatcccatcacagggccgtggacttgaagccggaacgtgaaatccccatagactgaatgcatttcctttctacctgttctccctccccttttatttttatttttatattattttatttttaatttttattttatttttttgtagagacggggatttcgctatgttgcccaagctggtctggaactccggagctcaagcagtccgcccgccttggccccccaaagcgctggaattacaggcgtaatgcactgtgcctggccttttaaaaaaaaattgaggttattttggggacagtagagcatccagacayatcctaatttgcgtagctgctcagttttaaaaaatgcaatgcatttttacctgttagggtatgtgatttctggctggtaagctacaccgaatcttggctagcacagttgaatt

SEQ ID NO: 129114 - DNA, 474 bp, Homo sapiens
gaattctcacatttcaaacatacactaaatatcaaataaaaatttatttttacaagaatttaggggaactaccacatagctataaatgtaatatatatgttaactaagtatcatagataaaaaccatgctccccttcagcagcacgtgtaataatagatacaaagattgaaaggtaaaagatttaggatgaaaagaatcctctcttaaaaaggaaaacaaaattatatgtatgtgtatacaacagttataacacccatcacacagctttgtagaaacagcatctattcaaaaataccagtatttccaaaatatttaaaataatatttaaagtaataataatatttaaataaataaacatatttaataaatatttcartaaataaaataatatttaaataattctatacccatgtttttcaaaataaaccaataaaatagatagtatatattagacgtgttagtatatatatctg

SEQ ID NO: 129115 - DNA, 423 bp, Homo sapiens
cacaaacctaaacagcaaataaaaatttctatcaccagaattatgtttttttctggtggggaactaccaatagctataaatagaagagattattatggaagtatcatagataaaaagagtgctcgcttcaggagcacatataataatacagaaaaaaatttaaagataataaaagatttaggataaaaagaattstcacttaaaaatgaaaagaaaattatctttaggtatatataacaactataactctcatcaaaaaactctacaggaacagcatgttttcaaaagtacaacaatttccaaactatttgaaataaacctattaataattcaatggccaacattttccaaacaaaccaataaaatgcatagtgtgcatgaagctatctgttacagtctgtggcactcatatttcacaaagaa

SEQ ID NO: 129116 - DNA, 423 bp, Homo sapiens
cacaaacctaaacagcaaataaaaatttctatcaccagaattatgtttttttctggtggggaactaccaatagctataaatagaagagattattatggaagtatcatagataaaaagagtgctcgcttcaggagcacatataataatacagaaaaaaatttaaagataataaaagatttaggataaaaagaattctcwcttaaaaatgaaaagaaaattatctttaggtatatataacaactataactctcatcaaaaaactctacaggaacagcatgttttcaaaagtacaacaatttccaaactatttgaaataaacctattaataattcaatggccaacattttccaaacaaaccaataaaatgcatagtgtgcatgaagctatctgttacagtctgtggcactcatatttcacaaagaa

SEQ ID NO: 129117 - DNA, 423 bp, Homo sapiens
cacaaacctaaacagcaaataaaaatttctatcaccagaattatgtttttttctggtggggaactaccaatagctataaatagaagagattattatggaagtatcatagataaaaagagtgctcgcttcaggagcacatataataatacagaaaaaaatttaaagataataaaagatttaggataaaaagaattctcacttaaaaatgaaaagaaaattatctttakgtatatataacaactataactctcatcaaaaaactctacaggaacagcatgttttcaaaagtacaacaatttccaaactatttgaaataaacctattaataattcaatggccaacattttccaaacaaaccaataaaatgcatagtgtgcatgaagctatctgttacagtctgtggcactcatatttcacaaagaa

SEQ ID NO: 129118 - DNA, 583 bp, Homo sapiens
aagcttgaagcgtgttggggtctcctcttctctgtacatgcccgtttcagagtccagtctggtgggagagggatcaggatgggaaagaaaagtagggtaagcagaaacgatgaaaccttacaagagtgagattatcatgtacaagagatcccaggaacattgacttgatgaaaaagtcacatcagagcactcaatttggcagaggttttctgccgartgtctactgacattcactgtccgagattctgtactgggggtacacgcgtcctctgccctaaggcatctttgagtccaagagatactttgaggactggaaatcataggaaactgcccatgagttcacacatatttccaatggtgtccccaatttcagggagtccacggatcacctaaagccagcccctccagtttggctaagaaactctatatatcaagttttgtatcatatgtattgctcttaactcagaaaattccaccatttatagcagtggtttatttatttataccattgaaggaaatggtttatttatgaatctatattacggatattctataagatactgggtgtacaaaaagactaagt

SEQ ID NO: 129119 - DNA, 583 bp, Homo sapiens
aagcttgaagcgtgttggggtctcctcttctctgtacatgcccgtttcagagtccagtctggtgggagagggatcaggatgggaaagaaaagtagggtaagcagaaacgatgaaaccttacaagagtgagattatcatgtacaagagatcccaggaacattgacttgatgaaaaagtcacatcagagcactcaatttggcagaggttttctgccgaatgtctactgacattcactgtccgagattctgtactgggggtacacgcgtcctctgccctaaggcatctttgagtccaagagataytttgaggactggaaatcataggaaactgcccatgagttcacacatatttccaatggtgtccccaatttcagggagtccacggatcacctaaagccagcccctccagtttggctaagaaactctatatatcaagttttgtatcatatgtattgctcttaactcagaaaattccaccatttatagcagtggtttatttatttataccattgaaggaaatggtttatttatgaatctatattacggatattctataagatactgggtgtacaaaaagactaagt

SEQ ID NO: 129120 - DNA, 583 bp, Homo sapiens
aagcttgaagcgtgttggggtctcctcttctctgtacatgcccgtttcagagtccagtctggtgggagagggatcaggatgggaaagaaaagtagggtaagcagaaacgatgaaaccttacaagagtgagattatcatgtacaagagatcccaggaacattgacttgatgaaaaagtcacatcagagcactcaatttggcagaggttttctgccgaatgtctactgacattcactgtccgagattctgtactgggggtacacgcgtcctctgccctaaggcatctttgagtccaagagatactttgaggactggaaatcataggaaactgcccatgagttcacacatatttccaatggtgtccccaatttcagggagtccacggatcacctaaagccagcccctccagtttggctaagaaactctatatatcaagttttgtatcatatgtattgctcttaactcagaaaattccaccatttatagcagtggtttatttatttataccattgaaggaaatggtttatttatgaatctatattayggatattctataagatactgggtgtacaaaaagactaagt

SEQ ID NO: 129121 - DNA, 390 bp, Homo sapiens
aaccagctgaccctgaggtgggcagatygcttgagcccaagagttcaagaccagcctgggcaacatgttgaaaccctatctctattattaaaaaaaaaaaaaaaaatcaactaaccatgtatgtgttggtttatggagtttcaaaacatggttaacaggatagagcttttcgtgttagggagaaagaaaggggaatttagatagataaaattctttaattttttcaagattttgtttgttttatttatttagttagtttagtttagtttttgagatggagtctcactctgctgctcagggtggaatgcagtggcacaatcttggctcattgcaacctccatctcctgagttcaggcaattctgcctcagcctcctgagtagctgggatta

SEQ ID NO: 129122 - DNA, 390 bp, Homo sapiens
aaccagctgaccctgaggtgggcagatcgcttgagcccaagagttcaagaccagcctgggcaacatgttgaaaccctatctctattattaaaaaaaaaaaaaaaaatcaactaaccatgtatgtgttggtttatggagtttcaaaacatggttaacaggatagagcttttcgtgttagggagaargaaaggggaatttagatagataaaattctttaattttttcaagattttgtttgttttatttatttagttagtttagtttagtttttgagatggagtctcactctgctgctcagggtggaatgcagtggcacaatcttggctcattgcaacctccatctcctgagttcaggcaattctgcctcagcctcctgagtagctgggatta

SEQ ID NO: 129123 - DNA, 556 bp, Homo sapiens
aaaatacaacaacaacaacaaaattagccgggtgtggtggtacacgtctgtaatcccaggtactcaggaggctgaggcggaagaatcacttgaacccgggaggcagaggttacagtgagccgagatcaygccaccacactccagcctgggcgacagagcatgactctgtctcaaaaataaataaataaataaataaaaataaaaaaatacatacatataaaaaagaagagaaaatacttattttcatgattgtttcatttttttccaagctgaggtcctgaccaaatgtttccccgtggtttttgtatatttctgatccccttaaagtggcccttgcagcgtgctggggaggaggcctctcggtgggtgggtgattgggaagccacgcccacagggaagggagaaaaaaactgaagttgcctgctctaagggctgcacctctgtttagccaacaattttcttgaggccagtcatagtgctgggctcattccatcatctccagttctgagaccaacactgtctggtaggtgttttatggatgaggaaaccaaagctc

SEQ ID NO: 129124 - DNA, 556 bp, Homo sapiens
aaaatacaacaacaacaacaaaattagccgggtgtggtggtacacgtctgtaatcccaggtactcaggaggctgaggcggaagaatcacttgaacccgggaggcagaggttacagtgagccgagatcacgccaccacactccagcctgggygacagagcatgactctgtctcaaaaataaataaataaataaataaaaataaaaaaatacatacatataaaaaagaagagaaaatacttattttcatgattgtttcatttttttccaagctgaggtcctgaccaaatgtttccccgtggtttttgtatatttctgatccccttaaagtggcccttgcagcgtgctggggaggaggcctctcggtgggtgggtgattgggaagccacgcccacagggaagggagaaaaaaactgaagttgcctgctctaagggctgcacctctgtttagccaacaattttcttgaggccagtcatagtgctgggctcattccatcatctccagttctgagaccaacactgtctggtaggtgttttatggatgaggaaaccaaagctc

SEQ ID NO: 129125 - DNA, 556 bp, Homo sapiens
aaaatacaacaacaacaacaaaattagccgggtgtggtggtacacgtctgtaatcccaggtactcaggaggctgaggcggaagaatcacttgaacccgggaggcagaggttacagtgagccgagatcacgccaccacactccagcctgggcgacagagcatgactctgtctcaaaaataaataaataaataaataaaaataaaaaaatacatacatataaaaaagaagagaaaatacttattttcatgattgtttcatttttttccaagctgaggtcctgaccaaatgtttccccgtggtttttgtatatttctgatccccttaaagtggcccttgcagcgtgctggggaggaggcctctcggtgggtgggtgattgggaagccacgcccacagggaagggagaaaaaaactraagttgcctgctctaagggctgcacctctgtttagccaacaattttcttgaggccagtcatagtgctgggctcattccatcatctccagttctgagaccaacactgtctggtaggtgttttatggatgaggaaaccaaagctc

SEQ ID NO: 129126 - DNA, 413 bp, Homo sapiens
tgtttctctgccattttgttattattttttgagacagagtcttgctctgttgcccagtggagtgcagtggcatgatcatggctcactgcaacctctgtctcctgggctcaagygatcctcctgtctcagcctcctgagtagctgactataggcatgcatcaccacgcctgcctaatttttgtattttttgtagacatgaggtttcaccatgttactcaggctggtctcgaactcctggactcaagcaatttgcctgccttggcctcccaaaatgttgggattacagctgtaaaccacggcgccaggccattctctgccctttaaatctggccctggctgtgtgacttgctttggtcaatgggacatcagccgatgggatgcaaagagaggcttgagaagagcttgatcatctg

SEQ ID NO: 129127 - DNA, 393 bp, Homo sapiens
gccattttgttattattttttgagacagagtcttgctctgttgcccagtggagtgcagtggcatgatcatggctcactgcaacctctgtctcctgggctcaagcgatcctcctgtctcagcctcctgagtagctgactataggcatgcatcaccacgcctgcctaatttttgtattttttgtagacatgaggtttcaccatgttactcaggctggtctcgaactcctggactcaagcaatttgcctgccttggcctcccaaaatgttgggattacagctgtaaaccayggcgccaggccattctctgccctttaaatctggccctggctgtgtgacttgctttggtcaatgggacatcagccgatgggatgcaaagagaggcttgagaagagc

SEQ ID NO: 129128 - DNA, 394 bp, Homo sapiens
tctgccattttgttattattttttgagacagagtcttgctctgttgcccagtggagtgcagtggcatgatcatggctcactgcaacctctgtctcctgggctcaagcgatcctcctgtctcagcctcctgagtagctgactataggcatgcatcaccacgcctgcctaatttttgtattttttgtagacatgaggtttcaccatgttactcaggctggtctcgaactcctggactcaagcaatttgcctgccttggcctcccaaaatgttgggattacagctgtaaaccacggcgccaggccattctctgccctttaaatctggccctggctgtgtgacttgctttggtcaatgsgacatcagccgatgggatgcaaagagaggcttgagaaga

SEQ ID NO: 129129 - DNA, 544 bp, Homo sapiens
agtggaccaggcaggagcagggcatcccaagtgcaggtcatggacctgggtgtcaagggaagcagagccttcttgagcaagggggtctccagggtcaggtcaggtgcagaccccatggcagccacgtgtttccatcctgggcctgacaggcctgctgggcttcctggtgggctctccaggtaggagctgcctgctcaggactggaaggggaggaacactgagctgtaggtggagggcggaacccacagtgggcagggcctgccctggtgtgcaggtgcttctgcaggaaaggagggcctggggaaagagggagagaaaggccttgtgtgtgacccagcccaggcctggaagtacgtggagccagggcctctctctggggaggcctcccactgtgtccgagctggccaggcttgagaggaggggagggcactgagtttcttctggagtcttgtcatttagtcctgcggccctttcagtccytacagagtgcatagtgggcacagggcaagtgctgatcttcatgaagtcatgggaggggactggc

SEQ ID NO: 129130 - DNA, 498 bp, Homo sapiens
aagatcatattccaaggtgctgttagtgaagtatggtttttaggtaaagatcccaaggatgtgactataatacccattgttgaaagctcagaaagataatggggaagcctagaatagtttctaaaaatcttaagacaggcctcttaagccctctatgttagacacagaggtcactaygagtcttatggacatgccttgtcaacatttccagctagaggcaaaaatgtttccagaaatcttattttagctttattgaggtacaattgacataaaaaaattatatgtctttaatgtatacatcgtgatgagtttgggcatatgtacacatactatcatcaccacaaccagggtagtaagcatatccaccacctccaaaaatgtcctcatgctcttttgtgttgtttttgtttctgtaaaagcacttatcatgagatctatagtcttgttaacatattttaaagtgcaaaatactattttctagttataggtaatatgttg

SEQ ID NO: 129131 - DNA, 498 bp, Homo sapiens
aagatcatattccaaggtgctgttagtgaagtatggtttttaggtaaagatcccaaggatgtgactataatacccattgttgaaagctcagaaagataatggggaagcctagaatagtttctaaaaatcttaagacaggcctcttaagccctctatgttagacacagaggtcactacgagtcttatggacatgccttgtcaacatttccagctagaggcaaaaatgtttccagaaatcttattttagctttattgaggtacaattgacataaaaaaattatatgtctttaatgtatacatcgtgatgagtttgggcatatgtacacatactatcatcaccacaaccagggtagtaagcatatccaccacctccaaaaatgtcctcatgctcttttgtgttgtttttgtttctgtaaaagcacttatsatgagatctatagtcttgttaacatattttaaagtgcaaaatactattttctagttataggtaatatgttg

SEQ ID NO: 129132 - DNA, 495 bp, Homo sapiens
aacaacatgaattattagtggttagatatgggactgtggtagattaaggatgtccacacaatttttgacactctttccattgaaggttacagaagctcagttggcctgcgatttctttggccaatagagtatgatagaagttatgttaatgctggttcttggtttttgtctttgagacaactaacartttttgtcttggtttgctgtcccccatgaaaaagtctgtcccgaggcttccctgttaaagaagcacatgacagtcaactgagaaactggagagagagaaagagagagagagagagagagagagagagagagcagatccagatatcactgagcatagtcaaccctttcctgctgtgccctccccaatttctgacccacagaatcctgggatttgattaaataaattaagccatttagatttaggctactatttgttatgcagcagtagataactagaacccatgtgttttcctacagttcacagcttcc

SEQ ID NO: 129133 - DNA, 469 bp, Homo sapiens
ttttaaaagtacaaatgatagataaaatattatttttggttctctgacccataaaataaaattgtatcaaaaatctatttggtaaaaagaaaatttaaaaaataataaataataaaacaacattttcytaacgtttaaagaatgttgtttagccaacttctctgtacgaaaatatttctttcactgcaatttcaatatttagggatttcagatttgctttagcgaatatctagagagccaggcatgttgaatagagaaggagatatggcaataaaagtgcggaaaacaaaatgctttcataatctacaactacaatgaagactccatcataaaaataggaaaccagctctaaatcctgggcatctaactttaatactcgcaagcagtcaggtcactcattaacagataaaaaatacgagcagcttcccaacctgtctcctattctattctctcacccggattgagagtt

SEQ ID NO: 129134 - DNA, 469 bp, Homo sapiens
ttttaaaagtacaaatgatagataaaatattatttttggttctctgacccataaaataaaattgtatcaaaaatctatttggtaaaaagaaaatttaaaaaataataaataataaaacaacattttcctaacgtttaaagaatgttgtttagccaacttctctgtaygaaaatatttctttcactgcaatttcaatatttagggatttcagatttgctttagcgaatatctagagagccaggcatgttgaatagagaaggagatatggcaataaaagtgcggaaaacaaaatgctttcataatctacaactacaatgaagactccatcataaaaataggaaaccagctctaaatcctgggcatctaactttaatactcgcaagcagtcaggtcactcattaacagataaaaaatacgagcagcttcccaacctgtctcctattctattctctcacccggattgagagtt

SEQ ID NO: 129135 - DNA, 560 bp, Homo sapiens
tttttgctattttttaggtaagaaaattctgtctgaattacaccagggtatctatgcgtgaccttccatcaatccaaggattctactaacagttgtaactatgatgtattttttccatctttctattgagtttccatttttgttgcttggcaaaagtttattatatatatttatcacaataatatcttattttaattttttaattttgtttttttttttaaatctttaattttttttcttgttttgagtcagagtcttgctctgtcatccaggctggagtgcagtgatgcaatcataactcactgcagcctctaattcctggtctcaagcaatccaccaatatcatccccccaaaatkttgggattataggtatgagccattccacatacaaataattccttattttatatactgctaatatattataaataaataacatttattgcatgctcattatgtataagttattgttctgagttcttcacatatattagctcatttaattctcacaaaaacccaatgtaaaagtattaaaattattcctttactacaagaaaac

SEQ ID NO: 129136 - DNA, 560 bp, Homo sapiens
tttttgctattttttaggtaagaaaattctgtctgaattacaccagggtatctatgcgtgaccttccatcaatccaaggattctactaacagttgtaactatgatgtattttttccatctttctattgagtttccatttttgttgcttggcaaaagtttattatatatatttatcacaataatatcttattttaattttttaattttgtttttttttttaaatctttaattttttttcttgttttgagtcagagtcttgctctgtcatccaggctggagtgcagtgatgcaatcataactcactgcagcctctaattcctggtctcaagcaatccaccaatatcatccccccaaaattttgggattataggtatgagccattccacatacaaataattccttattttatatactgctaatatattataaataaataacatttattgcatgctcattrtgtataagttattgttctgagttcttcacatatattagctcatttaattctcacaaaaacccaatgtaaaagtattaaaattattcctttactacaagaaaac

SEQ ID NO: 129137 - DNA, 622 bp, Homo sapiens
gaattctacagacaaggtcatgttatctgtgaatagagttttatgttttcctttttatctggatgcctttaacttttaattatttgccttattgcaccagctgcaatctccagtacaatgttaartagaagtgttggatgggacatccttgcattgatctccatcttaggagaaaagcattcagtatttcttcagcaagcatgattttagttgtgggttttttatagatgccctttatcagggtgaggaaggtcccctccattcctattttgttgaaacttatgaacatgagtggtgttaacatttttgtcaactgtttcttctgtatcttttgagataattatgtcttttattcccttactacagtgcattccattaattgatttctaattgttaatccagccatatattcctgggatgaatcccactggtcatggaatgtaatccttttttacgtggctttctattgtctgccaatgtttgttaaggatgttttcatttatgtttattggtgacactggtctatggtattcttttcttgtcagtcttgctctgactttgatattagggtaatgtcagttctgtaaatgagctagaaagtcttgcctcctctcttcttgtc

SEQ ID NO: 129138 - DNA, 622 bp, Homo sapiens
gaattctacagacaaggtcatgttatctgtgaatagagttttatgttttcctttttatctggatgcctttaacttttaattatttgccttattgcaccagctgcaatctccagtacaatgttaagtagaagtgttggatkggacatccttgcattgatctccatcttaggagaaaagcattcagtatttcttcagcaagcatgattttagttgtgggttttttatagatgccctttatcagggtgaggaaggtcccctccattcctattttgttgaaacttatgaacatgagtggtgttaacatttttgtcaactgtttcttctgtatcttttgagataattatgtcttttattcccttactacagtgcattccattaattgatttctaattgttaatccagccatatattcctgggatgaatcccactggtcatggaatgtaatccttttttacgtggctttctattgtctgccaatgtttgttaaggatgttttcatttatgtttattggtgacactggtctatggtattcttttcttgtcagtcttgctctgactttgatattagggtaatgtcagttctgtaaatgagctagaaagtcttgcctcctctcttcttgtc

SEQ ID NO: 129139 - DNA, 622 bp, Homo sapiens
gaattctacagacaaggtcatgttatctgtgaatagagttttatgttttcctttttatctggatgcctttaacttttaattatttgccttattgcaccagctgcaatctccagtacaatgttaagtagaagtgttggatgggacatccttgcattgatctccatcttaggagaaaagcattcagtmtttcttcagcaagcatgattttagttgtgggttttttatagatgccctttatcagggtgaggaaggtcccctccattcctattttgttgaaacttatgaacatgagtggtgttaacatttttgtcaactgtttcttctgtatcttttgagataattatgtcttttattcccttactacagtgcattccattaattgatttctaattgttaatccagccatatattcctgggatgaatcccactggtcatggaatgtaatccttttttacgtggctttctattgtctgccaatgtttgttaaggatgttttcatttatgtttattggtgacactggtctatggtattcttttcttgtcagtcttgctctgactttgatattagggtaatgtcagttctgtaaatgagctagaaagtcttgcctcctctcttcttgtc

SEQ ID NO: 129140 - DNA, 622 bp, Homo sapiens
gaattctacagacaaggtcatgttatctgtgaatagagttttatgttttcctttttatctggatgcctttaacttttaattatttgccttattgcaccagctgcaatctccagtacaatgttaagtagaagtgttggatgggacatccttgcattgatctccatcttaggagaaaagcattcagtatttcttcagcaagcatgattttagttgtgggttttttatagatgccctttatcagggtgaggaaggtcccctccattcctattttgttgaaacttatgaacatgagtggtgttaacatttttgtcaactgtttcttctgtatcttttgagataattatgtcttttattcccttactacagtgcattccattaattgatttctaattgttaatccagccatatattcctgggatgaatcccaytggtcatggaatgtaatccttttttacgtggctttctattgtctgccaatgtttgttaaggatgttttcatttatgtttattggtgacactggtctatggtattcttttcttgtcagtcttgctctgactttgatattagggtaatgtcagttctgtaaatgagctagaaagtcttgcctcctctcttcttgtc

SEQ ID NO: 129141 - DNA, 348 bp, Homo sapiens
tcctgggtctcaagtatgtggtttgcattgccaagctcaaaaaggcaaagggtaaagaacatgccactraattgggtgaaatgtatgctgttgagttttctgtatgtaaaaataattaaaataatataaattttccttcaaaaaacaaaaacaaaacaaaaacagaaaagaggtttaaattgggtcatggttctgcaggctatacagaaagtatgattctggcatctgctcatcttatgagagggcctcagggaactttcgattatgctggaaggctaaggggaagcagacattacttacatgcctggagcaggagggagagagagcagggaggtgacacagattttt

SEQ ID NO: 129142 - DNA, 457 bp, Homo sapiens
ttaattacctcagaattgcaagtgcttaatgcagccaaagtgcccttcgccagtgctcatgcactccctttattattaatttttttattttttatttatttacagacaggkcgtcactctgttaccctggctaaagtgcagtggcacgctcatgactcactgaagcctcgacctccttggctcatgtgatcaatgctcctccctcagcctcccaagtagctggcaccacaggcttgtgccaccactcctggctaatttttctaaaaataatatttgtagagatgaggtctccctaaattgctctggctggtcttgaactcctgggctcaagcaatcctcccgcctcagcctcccaaaatgctggtattacaggcatgagctataatggccggcccatgcacttgcctattattatgaattattcacatctaagctatgtgtatattttattgagaca

SEQ ID NO: 129143 - DNA, 486 bp, Homo sapiens
ctctctgttcctttacctcacctcctgcttctccagcccttctctctgtycctgtcatccttcaggccctcctctccccttagtctctactactctgtcactactgaattgtgtccctagctctgtccctcgcctgctgcccatgactgttctccccacaaaggtcagcaatcctgctaatgtgagtcagattgtgtcatttcttcacttaaaagcctctaatggctccatcttactctcaagaagcctctagaatggaaggcacaagcacaggggctttgggttgttttgatcaaagttgtatctacagaatataaaagtatatctgccacatagtaggcactaagttaatttttgttgaatgaatgaatgaaatataattgtgttcaaaattgtatcacacaaaaatcatgaaatggaaaatgcaaagcaagttaggaaatatttggttttatgcaactactatgcatatcagttcatgaattc

SEQ ID NO: 129144 - DNA, 486 bp, Homo sapiens
ctctctgttcctttacctcacctcctgcttctccagcccttctctctgtccctgtcatccttcaggccctcctctccccttagtctctactactctgtcactactgaattgtgkccctagctctgtccctcgcctgctgcccatgactgttctccccacaaaggtcagcaatcctgctaatgtgagtcagattgtgtcatttcttcacttaaaagcctctaatggctccatcttactctcaagaagcctctagaatggaaggcacaagcacaggggctttgggttgttttgatcaaagttgtatctacagaatataaaagtatatctgccacatagtaggcactaagttaatttttgttgaatgaatgaatgaaatataattgtgttcaaaattgtatcacacaaaaatcatgaaatggaaaatgcaaagcaagttaggaaatatttggttttatgcaactactatgcatatcagttcatgaattc

SEQ ID NO: 129145 - DNA, 472 bp, Homo sapiens
gaattctttctctctgttcctttacctcacctcctgcttctccagcccttctctctgtccctgtcatccttcaggccctcctctccccttagtctctactactctgtcactactgaattgtgtccctagctctgtccctygcctgctgcccatgactgttctccccacaaaggtcagcaatcctgctaatgtgagtcagattgtgtcatttcttcacttaaaagcctctaatggctccatcttactctcaagaagcctctagaatggaaggcacaagcacaggggctttgggttgttttgatcaaagttgtatctacagaatataaaagtatatctgccacatagtaggcactaagttaatttttgttgaatgaatgaatgaaatataattgtgttcaaaattgtatcacacaaaaatcatgaaatggaaaatgcaaagcaagttaggaaatatttggttttatgcaactac

SEQ ID NO: 129146 - DNA, 486 bp, Homo sapiens
ctctctgttcctttacctcacctcctgcttctccagcccttctctctgtccctgtcatccttcaggccctcctctccccttagtctctactactctgtcactactgaattgtgtccctagctctgtccctcgcctgctgcccatgactgttctccccacaaaggtcagcaatcctgctaatgtgagtcagattgtktcatttcttcacttaaaagcctctaatggctccatcttactctcaagaagcctctagaatggaaggcacaagcacaggggctttgggttgttttgatcaaagttgtatctacagaatataaaagtatatctgccacatagtaggcactaagttaatttttgttgaatgaatgaatgaaatataattgtgttcaaaattgtatcacacaaaaatcatgaaatggaaaatgcaaagcaagttaggaaatatttggttttatgcaactactatgcatatcagttcatgaattc

SEQ ID NO: 129147 - DNA, 537 bp, Homo sapiens
gtattgtcatggcatcctgtaaggagcctctctgtcatgtggctccttacaattctctgtggctttcttccaatgtaagtagttcttgttaaggatccttgcaatgaactttgatatttttttctttcattttttaagaaacaggtatattttagtttgaaaaatactgtttaaggagttataatctagtagttacctgggttcccagcactggcataagacacagaacccgcaaagccaccctgggctgctgcccaatcacatcccccagaatgagaccccatcctgagtcttgtttttattattactttgtatttctttaaatatttgtacaataagtatatataatctcaaaccaaatattagtttcactggtttttaagcttcctgtacagaaattcctactrcatttcttttctcatgatgcacattatgtataggagttatctgttttgtgggaggctgtcattcactcatttttactgctgaaggtttacattttatggttataccacaatttcactactttgctattga

SEQ ID NO: 129148 - DNA, 610 bp, Homo sapiens
gtcaacatgaagttgtaaatgaaatgagctgatttaatatcctttaggatatccagtatgtctagtatagtcataagactatactatagaggacaggggagttacaaaagtcctgaggcaaactataattcaatgtgttgtggatcccacatgaatgtgaatcactccatatcccctttgtaattggaatggaaagaaatgcactcaccaaatccacagctgcacactgtgtgcccaaggctttgttaatctgctctaccagtgatatccagacagcacaaaagctgcacttataactcctacttggccatatctggagtaatctcattcattctttaggcctcactaggcttcctcagggacagattgctggattacacggagacaataggcagcctcaacaccaccccgcctccttcagctttgtartggtggtgtgacccccacaatacttgcagtgtccttcacaagacccatgctgggacacactatgatttttgatttggccaggatgggggcagtttcagaggtttccctttggcctttggcatcaagagatcccttataccacagactggggacccagtgtgggggtgactccacttaccag

SEQ ID NO: 129149 - DNA, 610 bp, Homo sapiens
gtcaacatgaagttgtaaatgaaatgagctgatttaatatcctttaggatatccagtatgtctagtatagtcataagactatactatagaggacaggggagttacaaaagtcctgaggcaaactataattcaatgtgttgtggatcccacatgaatgtgaatcactccatatcccctttgtaattggaatggaaagaaatgcactcaccaaatccacagctgcacactgtgtgcccaaggctttgttaatctgctctaccagtgatatccagacagcacaaaagctgcacttataactcctacttggccatatctggagtaatctcattcattctttaggcctcactaggcttcctcagggacagattgctggattacacggagacaataggcagcctcaacaccaccccgcctccttcagctttgtaatggtggtgtgacccccacaatacttgcagtgtccttcacaagacccaygctgggacacactatgatttttgatttggccaggatgggggcagtttcagaggtttccctttggcctttggcatcaagagatcccttataccacagactggggacccagtgtgggggtgactccacttaccag

SEQ ID NO: 129150 - DNA, 537 bp, Homo sapiens
gtattgtcatggcatcctgtaaggagcctctctgtcatgtggctccttacaattctctgtggytttcttccaatgtaagtagttcttgttaaggatccttgcaatgaactttgatatttttttctttcattttttaagaaacaggtatattttagtttgaaaaatactgtttaaggagttataatctagtagttacctgggttcccagcactggcataagacacagaacccgcaaagccaccctgggctgctgcccaatcacatcccccagaatgagaccccatcctgagtcttgtttttattattactttgtatttctttaaatatttgtacaataagtatatataatctcaaaccaaatattagtttcactggtttttaagcttcctgtacagaaattcctactacatttcttttctcatgatgcacattatgtataggagttatctgttttgtgggaggctgtcattcactcatttttactgctgaaggtttacattttatggttataccacaatttcactactttgctattga

SEQ ID NO: 129151 - DNA, 537 bp, Homo sapiens
gtattgtcatggcatcctgtaaggagcctctctgtcatgtggctccttacaattctctgtggctttcttccaatgtaagtagttcttgttaaggatccttgcaatgaactttgatatttttttctttcattttttaagaaacaggtatattttagtttgaaaaatactgtttaaggagttataatctagtagttacctgggttcccagcactggcrtaagacacagaacccgcaaagccaccctgggctgctgcccaatcacatcccccagaatgagaccccatcctgagtcttgtttttattattactttgtatttctttaaatatttgtacaataagtatatataatctcaaaccaaatattagtttcactggtttttaagcttcctgtacagaaattcctactacatttcttttctcatgatgcacattatgtataggagttatctgttttgtgggaggctgtcattcactcatttttactgctgaaggtttacattttatggttataccacaatttcactactttgctattga

SEQ ID NO: 129152 - DNA, 602 bp, Homo sapiens
tcccccatgtaggggaacttcagagygggtcacatcctcaggaagacctggttcctgctagagcttcgaggtgagggagcatcctgagagagaatgaggaggttttgctgatcatggactgaggattccagggagtacagagggaagatttctggagttaggtaggggacatggtggggggacagaatagagcgtgcggagccttgtggggatgcaagtgctgggtatatgggggacccagtgtgactgacacaaacagggaaagggcatgaggagctcagtcctggtggactcgaggcagacgatggtgctgaggctgtgggagatgaaggaggaggagcaggggtggctgtcacctgggctctctccatggaggtgaagacagtgaggtggttgggtcttagtgctgtgtggaccttctgatgactggatggagtgtctgagggaggaggggtcttagaggattcactcgtgaccctgagggagggtatgttctcacttcaggtctcaggtgtgccctgacacctttctttgtggcttagggctccctactgtaaattattggggattagtaccttttggaatttgtaacttaaagcaga

SEQ ID NO: 129153 - DNA, 602 bp, Homo sapiens
tcccccatgtaggggaacttcagagtrggtcacatcctcaggaagacctggttcctgctagagcttcgaggtgagggagcatcctgagagagaatgaggaggttttgctgatcatggactgaggattccagggagtacagagggaagatttctggagttaggtaggggacatggtggggggacagaatagagcgtgcggagccttgtggggatgcaagtgctgggtatatgggggacccagtgtgactgacacaaacagggaaagggcatgaggagctcagtcctggtggactcgaggcagacgatggtgctgaggctgtgggagatgaaggaggaggagcaggggtggctgtcacctgggctctctccatggaggtgaagacagtgaggtggttgggtcttagtgctgtgtggaccttctgatgactggatggagtgtctgagggaggaggggtcttagaggattcactcgtgaccctgagggagggtatgttctcacttcaggtctcaggtgtgccctgacacctttctttgtggcttagggctccctactgtaaattattggggattagtaccttttggaatttgtaacttaaagcaga

SEQ ID NO: 129154 - DNA, 602 bp, Homo sapiens
tcccccatgtaggggaacttcagagtgggtcacatcctcaggaagacctggttcctgctagagcttcgaggtgagggagcatcctgagagagaatgaggaggttttgctgatcatggactgaggattccagggagtacagagggaagatttctggagttaggtaggggacatggtggggggacagaatagagcgtgcggagccttgtggggatgcaagtgctgggtatatgggggacccagtgtgactgacacaaacagggaaagggcatgaggagctcagtcctggtggactcgaggcagacgatggtgctgaggctgtgggagatgarggaggaggagcaggggtggctgtcacctgggctctctccatggaggtgaagacagtgaggtggttgggtcttagtgctgtgtggaccttctgatgactggatggagtgtctgagggaggaggggtcttagaggattcactcgtgaccctgagggagggtatgttctcacttcaggtctcaggtgtgccctgacacctttctttgtggcttagggctccctactgtaaattattggggattagtaccttttggaatttgtaacttaaagcaga

SEQ ID NO: 129155 - DNA, 464 bp, Homo sapiens
ttatcttcattaggtttactaataaaagcagacataatattgtgaagtagcttcttctttgttcttttcattaggctgtaatggattagctcttgtatattgggagggaagaagtcaggatgtgtggggaacttacagaagtgagaggcactgagagagctagtagaactgtaaagaaattgaaaagagatgctgacattggagtgcttcctataaaaggagtatcattcaaggttttagaaaccactgaggagaaaagaatataatttgatgtgactagggtaaaaaaaaataatgaacaagggaacacttctagagagcccatgggttttttggcttcatagctgggaagaarttttgaaaaacaatctaacttttactatacctccatgaaggactgccttcaaataattcacaataactttcttgaatgaccatgtatattttgtatatttaaaaattac

SEQ ID NO: 129156 - DNA, 464 bp, Homo sapiens
ttatcttcattaggtttactaataaaagcagacataatattgtgaagtagcttcttctttgttcttttcattaggctgtaatggattagctcttgtatattgggagggaagaagtcaggatgtgtggggaacttacagaagtgagaggcactgagagagctagtagaactgtaaagaaattgaaaagagatgctgacattggagtgcttcctataaaaggagtatcattcaaggttttagaaaccactgaggagaaaagaatataatttgatgtgactagggtaaaaaaaaataatgaacaagggaacacttctagagagcccatgggttttttggcttcatagctgggaagaagttttgaaaaacaatctaacttttactatacctccatgaaggactgccttcaaataattcayaataactttcttgaatgaccatgtatattttgtatatttaaaaattac

SEQ ID NO: 129157 - DNA, 411 bp, Homo sapiens
tgttgagaaagattttaggaattagcaggatgcctttccacacctgtaatatgaatcagtggccttggggaattcctgtgtgaagtttcatttgtttttttcattcttgttttttttttttccttactaagtttgttcsttagttttagaactatggccaacacaggtctcaatggcttaatatgttttcttagtcaaatttctttttatttcctaggacagagatatggatttactttcccatttttgggactttcctgaaagaataccctggtatttttcaggaaacctgttttggctactgttgctctgtagtatagcttgaagtagggtaacatgatgcctccaaatttgttctttttgcttagaattgcttggctattcaggttcttttttggtttcacatgaatt

SEQ ID NO: 129158 - DNA, 430 bp, Homo sapiens
agcatggtggggcatagagagcactgaacaatggcgagaaatgggatccaccagagaataaaggaagggttttgcatgttccagtgaggtgttgggcttcatgtcgttcattttgttttattctattgaattttattgctattattccacataaaattcaccattttaagttacacaatttaattttaaatatattcacaagatttggaactatcattgctatctaattccagatcacttatatcacccttaagagaaagcttatactcattagcygtcagttcctattctcccctcctgcagcccctggcaaccattaatctgtgtttagtctgtatggattcacctattctggacactttacatacatggaattatataatatgtggtcttctgtgcctggcttctttcactgaacatgctgttttca

SEQ ID NO: 129159 - DNA, 625 bp, Homo sapiens
ctgtgcttcttcacaggaatcccaccctgcagaatgtcatgcattcttccccaccctgaccagggtgttgcccggcacccaccatggtcagaaccttaatgagagcccctgaccagccccagctccatcccgtcaatgmtctatagccatcacagcagcacatcaccctgcttcatttgttcaattgcaccccagccagcgtaactcttagatttcaggatggtgtccaccccctgagttgtcctcaggtgcaccatttgaccttgtcccatgacatcctcacacaggattcactctctcccttgtttgcaccagactcgcgcccaaccttgcaaggtccctttctcccttccctgcttagagcactccctcaacactatctgtacattttactctttttcacccttcactccttaaagatgtttgtccagaccaccccatttaaatctccacccctttttgactcttctctaaaaggtttgtttcttttaatgtgaagataattgtctataattattttctatgtattctgtgttgtgtgttgttatcagtttattgtactcctgcctcatttgcacttgaagccccagtagggcagaggccacaccttcctcctaccctagca

SEQ ID NO: 129160 - DNA, 625 bp, Homo sapiens
ctgtgcttcttcacaggaatcccaccctgcagaatgtcatgcattcttccccaccctgaccagggtgttgcccggcacccaccatggtcagaaccttaatgagagcccctgaccagccccagctccatcccgtcaatgctctatagccatcacagcagcacatcaccctgcttcatttgttcaattgcaccccagccagcgtaactcttagatttcaggatggtgtccaccccctgagttgtcctcaggtgcaccatttgaccttgtcccatgacatcctcacacaggattcactctctcccttgtttgcaccagactcrcgcccaaccttgcaaggtccctttctcccttccctgcttagagcactccctcaacactatctgtacattttactctttttcacccttcactccttaaagatgtttgtccagaccaccccatttaaatctccacccctttttgactcttctctaaaaggtttgtttcttttaatgtgaagataattgtctataattattttctatgtattctgtgttgtgtgttgttatcagtttattgtactcctgcctcatttgcacttgaagccccagtagggcagaggccacaccttcctcctaccctagca

SEQ ID NO: 129161 - DNA, 540 bp, Homo sapiens
agctgcttctgcattggtgtagttttccagttggcggcttcatctcacctcatacagtctctggaaaactccactttcactcaggagtgcatgagtgtgagaaacacagactcacttcaatacttcaagtattacctgaagattatgtyggcctcccttcccctaaaaaggtgttggggaccacatctcaagaattactcctctggggtgatccccacctggaaataagggctgagggagtggaggcacccaccctctcacaccagttcccttgtttggaatttttaaagagagaggcatcccagcattcaccccgcagtagggcagaactgtgtggcacatcctgagaagggatcagcgggtgaccaggactgagcctctgccacctggaagaaactgtaccccaggactgaccagagtgtcttgtggagtttcggcctcaccaggaggcacttgaatcatggtaaccataagacgctgcacgggacaggaagatgaatagtagcaatagcaactagagcaaatatgttcactgatgat

SEQ ID NO: 129162 - DNA, 598 bp, Homo sapiens
ggttattgcaggtattgtggggggtatcaccaccattagagagctgtaggaggtgggatagtgctggagttgcctattatctccgtgtattctgtccttgcagaagcccaataggacctaaagaatgaacaggattacttcacatttgaccaagtagtggtcttgattgcagctgccatgctggctggatatcactgctagcagaggttaatgaggctgcaggccaatggtgtgcagccgaggatttgctgagtgcattcctttccagctagaaagtggatatggagttattcacattcataccacatttatttacagtttccctgagagctattataactcttctgtcatctgtaacatagtcttaagagatgctggacattctacagaatattaaatctgttcatttcattggcaacatcatagattgggatggatgagaaagaaggtggaaagtatgctggaggtcttggtaaaacacatgcaccccagaaagaggaggataaatcttacaraactttaggagtggcaactgcagtgaaattttatgggtccagtggctaggtgcatgcagagatatttcttccaagtaaaaaca

SEQ ID NO: 129163 - DNA, 545 bp, Homo sapiens
ggagtggcaactgcagtgaaattttatgggtccagtggctaggtgcatgcagagatatttcttccaagtaaaaacaaaagaaaacagaaaaaaaacccgttgcatctttcatcttcagtgagaaaaaaaaaaaaaagagagagaagcagactgcctggtgaatctctttgggttctgacaacaccacattccatatctaggtatatcattttggccacattttgggtgacataggaggatgccagattcaagtggagcctayacaggaaaggactctgcagcagatccaggctgtggtgcaggcagccaccatccctcagaccccctggtgctggaggtggcagggctggggaaagatgcaggatggagtgaactgagcatcagtggggaaagtcacaatggagggcctgggattctggagtaagttcatgtcatccacagcagaaatatatgcccccttctcgaagcaacttttagtgttgctggccctgatcagatagaattcttgaccacaggacactgagaaccacgtaattccaagtggt

SEQ ID NO: 129164 - DNA, 437 bp, Homo sapiens
tctctcacaagaaggagctgtttccctttgtctttcttttgcctattaaaccmtttgatcctaactcactcctcgtgtgtcagtgtccttaatcttcttggcgtgagatgacgaacacttagtatttacctgagacaatgacacctcttcagcaggtggtcatcagactggtggagcttaaaactcatgtccatgagcaactgcaggggtgactggggtgttgttgtcctcttccagggagggaggtggtgtctgtctcctctcaacattttacatgttgtaaaccaaaaataaacatcaaagccaccccttcccaatcattttaatggacacccttagccagggtgctcaaaagttaacctgaaagactggctcaggccaccaagggaagcaggtattgaacatgtcttattatgccctcttccctcttggaattc

SEQ ID NO: 129165 - DNA, 427 bp, Homo sapiens
gaattcccttttgggtgcccctctctctcacaagaaggagctgtttccctttgtctttcttttgcctattaaaccctttgatcctaactcactcctcgtgtgtcagtgtccttaatcttcttggcgtgagatgacgaacacttagtatttacctgagacaatgacacctcttcagcaggtggtcatcagactggtggagcttaaaactcatgtccatgagcaactgcaggggtgactggggtgttgttgtcctcttccagggagggaggtggtgtctgtctcctctcaacattttacatgttrtaaaccaaaaataaacatcaaagccaccccttcccaatcattttaatggacacccttagccagggtgctcaaaagttaacctgaaagactggctcaggccaccaagggaagcaggtattgaaca

SEQ ID NO: 129166 - DNA, 427 bp, Homo sapiens
gaattcccttttgggtgcccctctctctcacaagaaggagctgtttccctttgtctttcttttgcctattaaaccctttgatcctaactcactcctcgtgtgtcagtgtccttaatcttcttggcgtgagatgacgaacacttagtatttacctgagacaatgacacctcttcagcaggtggtcatcagactggtggagcttaaaactcatgtccatgagcaactgcaggggtgactggggtgttgttgtcctcttccagggagggaggtggtgtctgtctcctctcaacattttacatgttgtaaaccaaaaataaacatcaaagccaccccttcccaatcattttaatggacaccctyagccagggtgctcaaaagttaacctgaaagactggctcaggccaccaagggaagcaggtattgaaca

SEQ ID NO: 129167 - DNA, 500 bp, Homo sapiens
ttgtgtctaactttctcttatttttgttttaataaaatctacagttttataatgtcccttctcatagtgttcatttgtkttttttctcttcttatgattaatctttctgggaattttgaaatagtttgcccatcttttcctctattttccttaacatattaatcataaatattttgaagaatgtccttgtttgctgacttcaatattcagatcatctttgagttggcttctgttgattatttcttctttagttgctgcattctctctgctgcttggcatggcacatattctacatgatggattttagaagatctgggttttgttatcttcctccaaagactggtaatagtttgacagttaggtaattatcaaagaatcacctttagtaaaaatcagacccactttgattctgcttactcttgattttagcctttgctagggtgagcctatttcagtgtggttcttactccaaggtcacggtcctcacttacgcggcttcc

SEQ ID NO: 129168 - DNA, 500 bp, Homo sapiens
ttgtgtctaactttctcttatttttgttttaataaaatctacagttttataatgtcccttctcatagtgttcatttgtgttttytctcttcttatgattaatctttctgggaattttgaaatagtttgcccatcttttcctctattttccttaacatattaatcataaatattttgaagaatgtccttgtttgctgacttcaatattcagatcatctttgagttggcttctgttgattatttcttctttagttgctgcattctctctgctgcttggcatggcacatattctacatgatggattttagaagatctgggttttgttatcttcctccaaagactggtaatagtttgacagttaggtaattatcaaagaatcacctttagtaaaaatcagacccactttgattctgcttactcttgattttagcctttgctagggtgagcctatttcagtgtggttcttactccaaggtcacggtcctcacttacgcggcttcc

SEQ ID NO: 129169 - DNA, 500 bp, Homo sapiens
ttgtgtctaactttctcttatttttgttttaataaaatctacagttttataatgtcccttctcatagtgttcatttgtgttttttctcttcttatgattaatctttctgggaattttgaaatagtttgcccatcttttcctctattttccttaacatattaatcataaatattttgaagaatgtccttgtttgctgacttcaatattcagatcatctttgagttggcttctgttgattatttcttctttagttgctgcattctctctgctgcttggcatggcacatattctacatgatggattttagaagatctgggttttgttatcttcctccaaagactggtaatagtttgacagttaggtaattatcaaagaatcacctttagtaaaaatcagacccactttgattctgcttmctcttgattttagcctttgctagggtgagcctatttcagtgtggttcttactccaaggtcacggtcctcacttacgcggcttcc

SEQ ID NO: 129170 - DNA, 500 bp, Homo sapiens
ttgtgtctaactttctcttatttttgttttaataaaatctacagttttataatgtcccttctcatagtgttcatttgtgttttttctcttcttatgattaatctttctgggaattttgaaatagtttgcccatcttttcctctattttccttaacatattaatcataaatattttgaagaatgtccttgtttgctgacttcaatattcagatcatctttgagttggcttctgttgattatttcttctttagttgctgcattctctctgctgcttggcatggcacatattctacatgatggattttagaagatctgggttttgttatcttcctccaaagactggtaatagtttgacagttaggtaattatcaaagaatcacctttagtaaaaatcagacccactttgattctgcttactcttgattttagcctttgctagggtgagyctatttcagtgtggttcttactccaaggtcacggtcctcacttacgcggcttcc

SEQ ID NO: 129171 - DNA, 576 bp, Homo sapiens
cagagtttctgatacagtaggtccaggccaggccctgaagattgcatatctaagttcccaggtgatgccaatgctgcttcccccaggaccacactttgagaaccaccaccctaaggcaatctgtgttggtttctaatatcagaagagggctgggagtgggctgggaggcagaggtgtaggatcagtgagaccacacctgacccaccctggacagctccccaccccaatcttgcagcattttatttcctgggagtcctgggaatggaagacacccaggaagggaccaaatgtggggtcacagggtgatccagaggctcggcttcatacagcacctggggctcccgccactccacaactggcccccacaccctcagtcttcccacccctcacgacactgacctccagaccttcctcgactrctctcagcaggttgggcctgggatgtgacactaggagctctgagtgtaccttctgatccaaagatagggtgactgcgtatgacaagtactcagatgggccattaataagaccttgaacatttggcaaatggcttcagtcacgtgtgcttgagaattc

SEQ ID NO: 129172 - DNA, 576 bp, Homo sapiens
cagagtttctgatacagtaggtccaggccaggccctgaagattgcatatctaagttcccaggtgatgccaatgctgcttcccccaggaccacactttgagaaccaccaccctaaggcaatctgtgttggtttctaatatcagaagagggctgggagtgggctgggaggcagaggtgtaggatcagtgagaccacacctgacccaccctggacagctccccaccccaatcttgcagcattttatttcctgggagtcctgggaatggaagacacccaggaagggaccaaatgtggggtcacagggtgatccagaggctcggcttcatacagcacctggggctcccgccactccacaactggcccccacaccctcagtcttcccacccctcacgacactgacctccagaccttcctcgactgmtctcagcaggttgggcctgggatgtgacactaggagctctgagtgtaccttctgatccaaagatagggtgactgcgtatgacaagtactcagatgggccattaataagaccttgaacatttggcaaatggcttcagtcacgtgtgcttgagaattc

SEQ ID NO: 129173 - DNA, 576 bp, Homo sapiens
cagagtttctgatacagtaggtccaggccaggccctgaagattgcatatctaagttcccaggtgatgccaatgctgcttcccccaggaccacactttgagaaccaccaccctaaggcaatctgtgttggtttctaatatcagaagagggctgggagtgggctgggaggcagaggtgtaggatcagtgagaccacacctgacccaccctggacagctccccaccccaatcttgcagcattttatttcctgggagtcctgggaatggaagacacccaggaagggaccaaatgtggggtcacagggtgatccagaggctcggcttcatacagcacctggggctcccgccactccacaactggcccccacaccctcagtcttcccacccctcacgacactgacctccagaccttcctcgactgctctcagcaggttgggcctgggatgtgacactaggagctctgagtgtaccttctgatccaaagatagggtgacygcgtatgacaagtactcagatgggccattaataagaccttgaacatttggcaaatggcttcagtcacgtgtgcttgagaattc

SEQ ID NO: 129174 - DNA, 576 bp, Homo sapiens
cagagtttctgatacagtaggtccaggccaggccctgaagattgcatatctaagttcccaggtgatgccaatgctgcttcccccaggaccacactttgagaaccaccaccctaaggcaatctgtgttggtttctaatatcagaagagggctgggagtgggctgggaggcagaggtgtaggatcagtgagaccacacctgacccaccctggacagctccccaccccaatcttgcagcattttatttcctgggagtcctgggaatggaagacacccaggaagggaccaaatgtggggtcacagggtgatccagaggctcggcttcatacagcacctggggctcccgccactccacaactggcccccacaccctcagtcttcccacccctcacgacactgacctccagaccttcctcgactgctctcagcaggttgggcctgggatgtgacactaggagctctgagtgtaccttctgatccaaagatagggtgactgcgtatgacaagtactcagatgggccattaatargaccttgaacatttggcaaatggcttcagtcacgtgtgcttgagaattc

SEQ ID NO: 129175 - DNA, 500 bp, Homo sapiens
tgggagttactggtttggttttggcacttgtttagtcagcttgtgctgccataacaaaacaccacagatggattggttaacaacagacatttctttctcacaattctggaccctggaaatctgaggttagggaaccagcagattcagttcctggkgagggccctcttcctgcctggcagacagctgccttcttgccatatcctcacgtggtgaagagagtgggagctccagtctcttctttttcttaaaaggacactaatcccatcatgggggccccaacctctcaacctcttctgaatctaatcacttcccaagatggccaccagtctcaaggagtttactgtcacagtgggagcaaagatgctacagcaggttgtaaaattaggtgtcatcccagtcagtggggagaggacaggtaattcagggaaggggacctggatagagctcacccataggatatggcaggtcccagaactctactgaaatcaagtctggataaa

SEQ ID NO: 129176 - DNA, 426 bp, Homo sapiens
aacctattggttggctaattcagttattaaagaattcagtaaatgagaataacaccttgtctctcttgactcttggtccaaatctcttgcaaataggccacaccgtagtcatagagcaagaggactcagatacagtttggttggtcctttaccttcaaaagttcaagtgctggctgccgagacttctccaactcagtgatcagggtcmcaagctggaccacctcctcagaatccttgatgacacggctgttcctccttttggtgagttcttgctctagccctaccagctgctccaacaggtactgttccctttctctcaaaaaccgatggccctattcaaacactgatacaatgtcttgcctgtggttctgaaatgttgtctccagtaaatgcagaaagagaaaagtgacctttttgagaggctag

SEQ ID NO: 129177 - DNA, 426 bp, Homo sapiens
aacctattggttggctaattcagttattaaagaattcagtaaatgagaataacaccttgtctctcttgactcttggtccaaatctcttgcaaataggccacaccgtagtcatagagcaagaggactcagatacagtttggttggtcctttaccttcaaaagttcaagtgctggctgccgagacttctccaactcagtgatcagggtcccaagctggaccacctcctcagaayccttgatgacacggctgttcctccttttggtgagttcttgctctagccctaccagctgctccaacaggtactgttccctttctctcaaaaaccgatggccctattcaaacactgatacaatgtcttgcctgtggttctgaaatgttgtctccagtaaatgcagaaagagaaaagtgacctttttgagaggctag

SEQ ID NO: 129178 - DNA, 426 bp, Homo sapiens
aacctattggttggctaattcagttattaaagaattcagtaaatgagaataacaccttgtctctcttgactcttggtccaaatctcttgcaaataggccacaccgtagtcatagagcaagaggactcagatacagtttggttggtcctttaccttcaaaagttcaagtgctggctgccgagacttctccaactcagtgatcagggtcccaagctggaccacctcctcagaatccttgatgacacggctgttcctccttttggtgagttcttgctctagccctaccagctgctccaacaggtactgttccctttctctcaaaaaccgatggccctattcaaacactgatrcaatgtcttgcctgtggttctgaaatgttgtctccagtaaatgcagaaagagaaaagtgacctttttgagaggctag

SEQ ID NO: 129179 - DNA, 478 bp, Homo sapiens
tatatggtctgtgcatattatagacccctgcccactgcactttggggcttaaaacctattggttggctaattcagttattaaagaattcagtaaatgagaataacaccttgtctctcttgactcttggtccaaatctcttgcaaataggccacaccgtagtcatagagcaagaggactcagatacagtttggttggtcctttaccttcaaaagttcaagtgctggctgccgagacttctccaactcagtgatcagggtcccaagctggaccacctcctcagaatccttgatgacacggctgttcctccttttggtgagttcttgctctagccctaccagctgctccaacaggtactgttccctttctctcaaaaaccgatggccctattcaaacactgatacaatgtcttgcctgtggttctgaaatgttgtctmcagtaaatgcagaaagagaaaagtgacctttttgagaggctag

SEQ ID NO: 129180 - DNA, 453 bp, Homo sapiens
agccattgactattgcactgcacgatggtggaatcaatagttaagattacttgttctctttctttttgtatttttttcttattttttaatttatttaaataaataaaaatattctacctccccaaaacccctcaggacccacacacaggcactgcagcagcgacaggaggagggggcgctgggaacaggaaggacaccaccgcttggcctccggcaccggagggacaacctggagggctccgggagcaccgcaaaggtccaagcggagccaatcctcacaagcccagggaagggcaacgtgacaggccggcgcgacagccccaccgccgcgaagaggggctgcccaaaaggcaacagccataggagatgagcaggggtgcctgctgcgtcggagaactcatctccccaaccccaccgaygccacaaggtagagggcgaggacagcgaggtcgg

SEQ ID NO: 129181 - DNA, 470 bp, Homo sapiens
gatccgggaggcgccctgtggcccctggtacccgcgcgctgcagcgtctccttcccgttctccaggtatctgcggagccactccacgaactcgccctccaggtaggctctcagctgctccgccwcacgggccgcctcccacttgcgcttggtgatctgagctgccatgtccgccgcggtccaggagcgcaggtcctcgttcagagcgatgtaatccttgccgtcgtaggcgtgctgttcatacccgcggaggaagcgcccgtcgggccccacgtcgcagccatacatcacctgcatggtgtgggaacctggccccgcccccgcggtcagcccggtcccccgagccccgccctgccccgaccaacccgcggggattttggcctaaactgaaaatgaaaccgggtaaaggcgcctgggcctctcccaggtcaagggtctcggggtcccgcggtttcggggaggatctcggac

SEQ ID NO: 129182 - DNA, 470 bp, Homo sapiens
gatccgggaggcgccctgtggcccctggtacccgcgcgctgcagcgtctccttcccgttctccaggtatctgcggagccactccacgaactcgccctccaggtaggctctcagctgctccgccasacgggccgcctcccacttgcgcttggtgatctgagctgccatgtccgccgcggtccaggagcgcaggtcctcgttcagagcgatgtaatccttgccgtcgtaggcgtgctgttcatacccgcggaggaagcgcccgtcgggccccacgtcgcagccatacatcacctgcatggtgtgggaacctggccccgcccccgcggtcagcccggtcccccgagccccgccctgccccgaccaacccgcggggattttggcctaaactgaaaatgaaaccgggtaaaggcgcctgggcctctcccaggtcaagggtctcggggtcccgcggtttcggggaggatctcggac

SEQ ID NO: 129183 - DNA, 470 bp, Homo sapiens
gatccgggaggcgccctgtggcccctggtacccgcgcgctgcagcgtctccttcccgttctccaggtatctgcggagccactccacgaactcgccctccaggtaggctctcagctgctccgccacacgggccgcctcccacttgcgcttggtgatctgagctgccatgtccgccgcggtccaggagcgcaggtcctcgttcagagcgatgtaatccttgcygtcgtaggcgtgctgttcatacccgcggaggaagcgcccgtcgggccccacgtcgcagccatacatcacctgcatggtgtgggaacctggccccgcccccgcggtcagcccggtcccccgagccccgccctgccccgaccaacccgcggggattttggcctaaactgaaaatgaaaccgggtaaaggcgcctgggcctctcccaggtcaagggtctcggggtcccgcggtttcggggaggatctcggac

SEQ ID NO: 129184 - DNA, 566 bp, Homo sapiens
aggcgccctgtggcccctggtacccgcgcgctgcagcgtctccttcccgttctccaggtatctgcggagccactccacgaactcgccctccaggtaggctctcagctgctccgccacacgggccgcctcccacttgcgcttggtgatctgagctgccatgtccgccgcggtccaggagcgcaggtcctcgttcagagcgatgtaatccttgccgtcgtaggcgtgctgttcatacccgcggaggaagcgcccgtcgggccccacgtcgcagccatacatcacctgcatggtgtgrgaacctggccccgcccccgcggtcagcccggtcccccgagccccgccctgccccgaccaacccgcggggattttggcctaaactgaaaatgaaaccgggtaaaggcgcctgggcctctcccaggtcaagggtctcggggtcccgcggtttcggggaggatctcggacccagagactcgaggcgacccggccctccgtgggggatggggaggggtcgtgacctgcgtcccgggccggggtcactcaccgccctcgctctggttgtagtagcg

SEQ ID NO: 129185 - DNA, 595 bp, Homo sapiens
gggtgagggacagtgagtagatggcaggatcactggattgggaatcccaggagggtggaacgattgttggaattgatgtactacagggtagactccaagcrtggaaagcaagcacatatgcaatgagtggtccactgatattacatcacagcatatgataaaatgatagtatctgtgtcctcagagcctgtggccaccttgcaaggggatgagtggaaagatggtcagagagtgggaagtgtgagatagagagtatggaagggctggggttcttagccatgatgaggcctaggggataacaagggcatgagattcaggcagacaggagaagatcatggaggagaggagttccaggatctgagaggccaggaagcgagggcatcttctctgctgtgtgggtgtctattgctgccataaaaattaccacaaaccaaatggctttaaacagcacctatgtatcatggcacagtcgtgtggattgcaagtccacccagtctcatggggctaagatcaacatacgggaaggtctgcattcctttccatagactctggggaagaatccacttccaagctcattcaggttcttgcctgaatt

SEQ ID NO: 129186 - DNA, 559 bp, Homo sapiens
gggtgagggacagtgagtagatggcaggatcactggattgggaatcccaggagggtggaacgattgttggaattgatgtactacagggtagactccaagcatggaaagcaagcacatatgcaatgagtggtccactgatattacatcacagcatatgataaaatgatagtatctgtgtcctcagagcctgtggccaccttgcaaggggatgagtggaaagatggtcagagagtgggwagtgtgagatagagagtatggaagggctggggttcttagccatgatgaggcctaggggataacaagggcatgagattcaggcagacaggagaagatcatggaggagaggagttccaggatctgagaggccaggaagcgagggcatcttctctgctgtgtgggtgtctattgctgccataaaaattaccacaaaccaaatggctttaaacagcacctatgtatcatggcacagtcgtgtggattgcaagtccacccagtctcatggggctaagatcaacatacgggaaggtctgcattcctttccatagactctggggaagaa

SEQ ID NO: 129187 - DNA, 405 bp, Homo sapiens
cttccgagctgggcccttggcttagtttgtcttccctgcccagccacctgtcccagagctggagaygcccaggtttaagccagagattttggatactttccttgatggtgacataatttttgtcttctctcctggaagagaagccccagaaccatcagagtgatccagtctgcccactcttcttattattctgtctctccaatcactctccctgagctggactctccacccaccctcacattctggatagtgcagagatgtgagcatggccctggggcaggattgtctgcgtgcaagcccagctccaccacgacttgtaggcgaccttctttcctattgtatcacctgaaaacggaaaattagcaggcacaccccatagatgtatcgtgacaattaaatgaattc

SEQ ID NO: 129188 - DNA, 405 bp, Homo sapiens
cttccgagctgggcccttggcttagtttgtcttccctgcccagccacctgtcccagagctggagacgcccaggtttaagccagagaytttggatactttccttgatggtgacataatttttgtcttctctcctggaagagaagccccagaaccatcagagtgatccagtctgcccactcttcttattattctgtctctccaatcactctccctgagctggactctccacccaccctcacattctggatagtgcagagatgtgagcatggccctggggcaggattgtctgcgtgcaagcccagctccaccacgacttgtaggcgaccttctttcctattgtatcacctgaaaacggaaaattagcaggcacaccccatagatgtatcgtgacaattaaatgaattc

SEQ ID NO: 129189 - DNA, 389 bp, Homo sapiens
ttggcttagtttgtcttccctgcccagccacctgtcccagagctggagacgcccaggtttaagccagagattttggatactttccttgatggtgacataatttttgtcttctctcctggaagagaagccccagaaccatcagagtgatccagtctgcccactcttcttattattctgtctctccaatcactctccctgagctggactctccacccaccctcacattytggatagtgcagagatgtgagcatggccctggggcaggattgtctgcgtgcaagcccagctccaccacgacttgtaggcgaccttctttcctattgtatcacctgaaaacggaaaattagcaggcacaccccatagatgtatcgtgacaattaaatgaattc

SEQ ID NO: 129190 - DNA, 405 bp, Homo sapiens
cttccgagctgggcccttggcttagtttgtcttccctgcccagccacctgtcccagagctggagacgcccaggtttaagccagagattttggatactttccttgatggtgacataatttttgtcttctctcctggaagagaagccccagaaccatcagagtgatccagtctgcccactcttcttattattctgtctctccaatcactctccctgagctggactctccacccaccctcacattctggatagtgcagagatgtgagcatggccctggggcaggattgtctgcgtgcaagcccagctccaccacgacttgtaggcgaccttctttcctattgtatcacctgaaaacggaaaattagcaggcacaccccatagwtgtatcgtgacaattaaatgaattc

SEQ ID NO: 129191 - DNA, 405 bp, Homo sapiens
cttccgagctgggcccttggcttagtttgtcttccctgcccagccacctgtcccagagctggagacgcccaggtttaagccagagattttggatactttccttgatggtgacataatttttgtcttctctcctggaagagaagccccagaaccatcagagtgatccagtctgcccactcttcttattattctgtctctccaatcactctccctgagctggactctccacccaccctcacattctggatagtgcagagatgtgagcatggccctggggcaggattgtctgcgtgcaagcccagctccaccacgacttgtaggcgaccttctttcctattgtatcacctgaaaacggaaaattagcaggcacaccccatagatgtatmgtgacaattaaatgaattc

SEQ ID NO: 129192 - DNA, 600 bp, Homo sapiens
atgttttcctttttatctggatgcctttaatttttaattttctgccttattgcactggctacaatctccagtataatattaaataaaagtggtgggattggacatccttgcattgatccccatcttaggagaaaagcattcagtcttcagtctttcttcattaagtttgattttagctgtgggttttttatagatgcsctttatcagagtgaagaaggtctcctccattcctattttgttgaaacttatgaacatgagtgatgttaacatttttgtcaactgtttcttctgcatcttttgagataattatgtctttttttccatcaatacagtgcattccatgaattgattttcaaatgttaatccaaccatatgttcctgggatgaatcccattggtcatggagtgtaatccttttttatgtggctttgtattatctgccaatgtttgttaaggatgttttcatttatgtttattggtgacactggtgtatggcactcttttcctgtgagtcttgctgtgactttgatatgagggtaatgccagttctgtaaatgggctggaaagtcttccctcctctcttcttgtctgaaagagcttt

SEQ ID NO: 129193 - DNA, 594 bp, Homo sapiens
catcagctcacttcctagcatgcctcacactagtctgctggaaatacttacacagccttgccctgaaaacctgggatacaggtccccagtgcctcctcctttcctacactcccactcccagggcagaaaaccagcctgtctcctaccatgaggtctgcagacaaatgtcagatgccagcccattgcagtctgtccactggggagggggaagctttatgcaggacaataggaaaaaagagtgaaactattctgaattagatgtttrtatacataaaatgatattgcttgacacctgaagggaacaagaaaaactctggagctttcttgatctagtgacatgaaagaaagatgaggtccatgtgctgtggctcatgcctgtaatcccagcactttgggaggctgaggctggaagataccttgagtccaggagttcaaggccagcctgggcaacatggtgagacctaatctttattgaaaaaataaaaataaaacgtagcagggcatggtggtgcatgcctatgatcccagctatttgggaagctgaggtgggaagactacttgagccagtgagattaaggcttctatgagccatga

SEQ ID NO: 129194 - DNA, 551 bp, Homo sapiens
tgttttctaaggtgtcaaacaatacctcgctaagggagagtgttgaatcactgttgcttcaccaaacattcttgtttagaaagacaggggactggaccagagtgtgcattcgcagacgttttaatgagaggtgacactccccaaaaggcataaatcctgttcaggcayaatctagaggggtgtgcttacttgcctggtgtcctcaatctggacttgtgcaagttgggttcagctggatctggtatgactccttgatgacacctgaagaggtcctttaaacactggacttcataaagagaaaaggaggattagctgtatgattaactgtatgcatttaccaaaggcatggaatgcacagatatgtgcgacaacttacaagtgtcatctgagtgtgagtatattatggtttgagagtcaactaccaaatcttgtagttcaggtcccaggagtggttagaaaggtatttcccttattcattgaggcttcattttttttttcttcccttctgggtgttctgcagcatcttctccttgtcttttctaccttcaata

SEQ ID NO: 129195 - DNA, 551 bp, Homo sapiens
tgttttctaaggtgtcaaacaatacctcgctaagggagagtgttgaatcactgttgcttcaccaaacattcttgtttagaaagacaggggactggaccagagtgtgcattcgcagacgttttaatgagaggtgacactccccaaaaggcataaatcctgttcaggcacaatctagaggggtgtgcttacttgcctggtgtcctcaatctggacttgtgcaagttgggttcagctggayctggtatgactccttgatgacacctgaagaggtcctttaaacactggacttcataaagagaaaaggaggattagctgtatgattaactgtatgcatttaccaaaggcatggaatgcacagatatgtgcgacaacttacaagtgtcatctgagtgtgagtatattatggtttgagagtcaactaccaaatcttgtagttcaggtcccaggagtggttagaaaggtatttcccttattcattgaggcttcattttttttttcttcccttctgggtgttctgcagcatcttctccttgtcttttctaccttcaata

SEQ ID NO: 129196 - DNA, 536 bp, Homo sapiens
gtcaaacaatacctcgctaagggagagtgttgaatcactgttgcttcaccaaacattcttgtttagaaagacaggggactggaccagagtgtgcattcgcagacgttttaatgagaggtgacactccccaaaaggcataaatcctgttcaggcacaatctagaggggtgtgcttacttgcctggtgtcctcaatctggacttgtgcaagttgggttcagctggatctggtatgactccttgatgacacctgaagaggtcctttaaacactggacttcataaagagaaaaggaggattagctgtatgattaactgtatgcatttaccaaaggcatggaatgcacagatatgtgcgacaacttayaagtgtcatctgagtgtgagtatattatggtttgagagtcaactaccaaatcttgtagttcaggtcccaggagtggttagaaaggtatttcccttattcattgaggcttcattttttttttcttcccttctgggtgttctgcagcatcttctccttgtcttttctaccttcaa

SEQ ID NO: 129197 - DNA, 551 bp, Homo sapiens
tgttttctaaggtgtcaaacaatacctcgctaagggagagtgttgaatcactgttgcttcaccaaacattcttgtttagaaagacaggggactggaccagagtgtgcattcgcagacgttttaatgagaggtgacactccccaaaaggcataaatcctgttcaggcacaatctagaggggtgtgcttacttgcctggtgtcctcaatctggacttgtgcaagttgggttcagctggatctggtatgactccttgatgacacctgaagaggtcctttaaacactggacttcataaagagaaaaggaggattagctgtatgattaactgtatgcatttaccaaaggcatggaatgcacagatatgtgcgacaacttacaagtgtcatctgagtrtgagtatattatggtttgagagtcaactaccaaatcttgtagttcaggtcccaggagtggttagaaaggtatttcccttattcattgaggcttcattttttttttcttcccttctgggtgttctgcagcatcttctccttgtcttttctaccttcaata

SEQ ID NO: 129198 - DNA, 536 bp, Homo sapiens
gtcaaacaatacctcgctaagggagagtgttgaatcactgttgcttcaccaaacattcttgtttagaaagacaggggactggaccagagtgtgcattcgcagacgttttaatgagaggtgacactccccaaaaggcataaatcctgttcaggcacaatctagaggggtgtgcttacttgcctggtgtcctcaatctggacttgtgcaagttgggttcagctggatctggtatgactccttgatgacacctgaagaggtcctttaaacactggacttcataaagagaaaaggaggattagctgtatgattaactgtatgcatttaccaaaggcatggaatgcacagatatgtgcgacaacttacaagtgtcatctgagtgtgagtatattatggtttgagagtcaactaccaaatcttgtagttcaggtcccaggagtggttagaaaggtatttcccttattcattgaggcttcattttttttttcttcccttmtgggtgttctgcagcatcttctccttgtcttttctaccttcaa

SEQ ID NO: 129199 - DNA, 513 bp, Homo sapiens
caagtaagatatggcctgggccatgtccattggattcagagacaatatggaagtgagtttagtttattgaaaacagatttgcatgatggggtagaccccaattggaatgaataaaagaataagtatatatggaggcttayggatttcatagaagaataaaaagtagagaaataacaaaacacatacctccacaaggacaaacgatggagagataacagcagagaagatatttttgtttttttgaaggtaataggcagatgagtggtaactctccaacacaacagagaaagcttcaacatacaggcctccattgggggtgagagtaagtcaactactggtagattattaattctgtggaatcctggaaagattcgggaattgcaactgggttcctctaaagatttgggtgtggcatgtgactaaatacaggaaggatagttgaaatacaatgtagctaggaactgtctctcagctccagatcactccttccactcaagcacttggatgaataca

SEQ ID NO: 129200 - DNA, 513 bp, Homo sapiens
caagtaagatatggcctgggccatgtccattggattcagagacaatatggaagtgagtttagtttattgaaaacagatttgcatgatggggtagaccccaattggaatgaataaaagaataagtatatatggaggcttacggatttcatagaagaataaaaagtagagaaataacaaaacacatacctccacaaggacaaacgatggagagataacagcagagaagatatttttgtttttttgaaggtaataggcagatgagtggtaactcyccaacacaacagagaaagcttcaacatacaggcctccattgggggtgagagtaagtcaactactggtagattattaattctgtggaatcctggaaagattcgggaattgcaactgggttcctctaaagatttgggtgtggcatgtgactaaatacaggaaggatagttgaaatacaatgtagctaggaactgtctctcagctccagatcactccttccactcaagcacttggatgaataca

SEQ ID NO: 129201 - DNA, 513 bp, Homo sapiens
caagtaagatatggcctgggccatgtccattggattcagagacaatatggaagtgagtttagtttattgaaaacagatttgcatgatggggtagaccccaattggaatgaataaaagaataagtatatatggaggcttacggatttcatagaagaataaaaagtagagaaataacaaaacacatacctccacaaggacaaacgatggagagataacagcagagaagatatttttgtttttttgaaggtaataggcagatgagtggtaactctccaacacaacagagaaagcttcaacatacaggcctccattgggggtgagagtaagtcaactactggtagattattaattctgtggaatcctggaaagattcgggaattgcaactgggttcctctaaagatttgggtgtggcatgtgactaaatacaggaaggatagttgaaatacaatgtagctrggaactgtctctcagctccagatcactccttccactcaagcacttggatgaataca

SEQ ID NO: 129202 - DNA, 581 bp, Homo sapiens
gaaactgtgaacgcatgcgaacatcggaaagaacaagctccagacgcgccacmttaagtgctgtaacagtaaccgcgagggtctgcggcttcattcttgaagtcagtgagaccaagaagccaccaattctggacacatcatgatgaccagtggtccacttttgcatagcaaagtgcactgcagcacagtcttcaaacaatgcctgctgcataaataacccttcacaaacatgcttctttaacctccggagtggttatgggttttggcaagaaagtctgagatgtgaccagctgcatatattttaccctaagaccttgctatagaaaggatgttttctggagtgtccatcgtcttgcagctctcccagacgtggcttctgttgcttagtccttgttcaaaatttcttttggagaaactggatttgttagccacttatttcattcagcctttgttccataaaagggtcatacatgtaaagtggctcccaaacgctgaaggagccaagaaaccaaaaacaaggcagatagatccagtttgtcagtaaatggtgatttgctggggaatttacagacagaagtgta

SEQ ID NO: 129203 - DNA, 581 bp, Homo sapiens
gaaactgtgaacgcatgcgaacatcggaaagaacaagctccagacgcgccaccttaagtgctgtaacagtaaccgygagggtctgcggcttcattcttgaagtcagtgagaccaagaagccaccaattctggacacatcatgatgaccagtggtccacttttgcatagcaaagtgcactgcagcacagtcttcaaacaatgcctgctgcataaataacccttcacaaacatgcttctttaacctccggagtggttatgggttttggcaagaaagtctgagatgtgaccagctgcatatattttaccctaagaccttgctatagaaaggatgttttctggagtgtccatcgtcttgcagctctcccagacgtggcttctgttgcttagtccttgttcaaaatttcttttggagaaactggatttgttagccacttatttcattcagcctttgttccataaaagggtcatacatgtaaagtggctcccaaacgctgaaggagccaagaaaccaaaaacaaggcagatagatccagtttgtcagtaaatggtgatttgctggggaatttacagacagaagtgta

SEQ ID NO: 129204 - DNA, 457 bp, Homo sapiens
gtgggaatccaccatcctgtggccacctcagacatcacttctctttggaagactccattaaatatttctctgtgagaaactggatttgtcagtctctttctttgatctcttttcccctcaaaatttaggggtaggtttgtgtagacctgttcatggtagaacatytggtgatcccccagccagtagctgggagaacaaggaatgggtaaggagaatgaagcatctgtaaggaaaccccagggcggcagccacgtctgtgtagggttggatggcacaactgttcgatacctgtgtacctctgtgtgagtgcagggatgccttgaaaatgccaggtggcctagagcagttattaactgaaagccgcatagtgcactggggtacggaaggtcggccaatagccactgcagagggttgggtgcttcttttggcaatgaagatccggctagcagcagaagcc

SEQ ID NO: 129205 - DNA, 300 bp, Homo sapiens
tccactgaggtttctcctaaaacaagaggcttgactctggtctgggccctgtggccctstgggaagctttgtacctcttttgcaggatctgggggtggggagggacaagctagttccccaacctcctatgactgctttctatgctcacagccttttttccataagaaccttcttgaaacttctccccgcacatactcacggaaaggaaccaatggtgctatttcccctctctcctcctcaacctgggaatacttcagacatctccaaactcatccttgtgtatagtctcacacccttccc

SEQ ID NO: 129206 - DNA, 657 bp, Homo sapiens
tttttttagaagagcagcttaaaaagttgtagatgtgtgcactacaggaaatggagttttgtaccgcttggatctgagggagtgccagatgaagcttgacaggtaggcagtggttatatggaagaacctgtatgctttgctaagaaattaagcttaatccaatcactgttatgggccagagaaaggcttaaagtagggtagaaacatgaacaggtttgtttcagatttcaggagtgkgtcaggaaagtcaactgccagaacagttcaaacgtacagtggggaagactgccctgcccattctccaggttgctgtgggggtcaaacaagatagctatgtttgagagctctgaatatatataaagggccacacaattatatgataattattacagtaaccccttgatcactatttgagccaaggaatgcgggacctgagtatgcatttgttccccttgaaagtttttagttcaaacagaaaaaagcaagatatagttcagcatgtctagtccattaaaaaaaccaaacacatatatagcaacacacatatacagagccacatacatatacacaagcacagatatacagtataatttggttatctctgtggagtaggattccttgtgactttacttttttctttctttctatataagaatc

SEQ ID NO: 129207 - DNA, 438 bp, Homo sapiens
ggcttcattaccataaaatgtcatctctctatatataccttttcttgctcttagaaaggattcagtaaaagcttgataaatggatggattaatggacagatggaaagatagattgataattagatgtatggatagacagatgaagaaacagcactttgtaccaacttatagtactgactatatagtaacttctactagttacttaggtacttttcttgattttcctactggtttattgagcaacttgaaggcagaaatccactgtatttaactagcagtagcttgagaatgtttcaaatgtagaaaccataaaaggaaagaaagataaattcagccacattaaaaaagacctgcatgggggaaaaaaaaccgtaagtgcaatgtcaagagacaaatgaygaaataccattggaagaagaaaaatatttacaactgcca

SEQ ID NO: 129208 - DNA, 373 bp, Homo sapiens
gctgcttgtgtgtcctccctccctccctccctccccccacaccaactctcctgcacactgcagcacacaaccatatttttctcttcaggaaagataaccctaggcttatgggtmcaattttccaaccacatatgaatctaaactagactctgctttataaattgatgagtttctattggagccagcactaggattactacaactcagggcaggaagaagagtaggagtgcagaagaggagttccaacagaaagttacctatgatgagaaactatgggaccctgcctcttggcaaatttcagaatctggttcctttaaaaagattgcagaaaagatggaaaatacaatgaggaaagagccctgggaagagggca

SEQ ID NO: 129209 - DNA, 373 bp, Homo sapiens
gctgcttgtgtgtcctccctccctccctccctccccccacaccaactctcctgcacactgcagcacacaaccatatttttctcttcaggaaagataaccctaggcttatgggtccaattttccaaccacatatgaatctaaactagactctgctttataaattgatgagtttctattggagccagcactaggattactrcaactcagggcaggaagaagagtaggagtgcagaagaggagttccaacagaaagttacctatgatgagaaactatgggaccctgcctcttggcaaatttcagaatctggttcctttaaaaagattgcagaaaagatggaaaatacaatgaggaaagagccctgggaagagggca

SEQ ID NO: 129210 - DNA, 373 bp, Homo sapiens
gctgcttgtgtgtcctccctccctccctccctccccccacaccaactctcctgcacactgcagcacacaaccatatttttctcttcaggaaagataaccctaggcttatgggtccaattttccaaccacatatgaatctaaactagactctgctttataaattgatgagtttctattggagccagcactaggattactacaactcagggcaggaagaagagtaggagwgcagaagaggagttccaacagaaagttacctatgatgagaaactatgggaccctgcctcttggcaaatttcagaatctggttcctttaaaaagattgcagaaaagatggaaaatacaatgaggaaagagccctgggaagagggca

SEQ ID NO: 129211 - DNA, 373 bp, Homo sapiens
gctgcttgtgtgtcctccctccctccctccctccccccacaccaactctcctgcacactgcagcacacaaccatatttttctcttcaggaaagataaccctaggcttatgggtccaattttccaaccacatatgaatctaaactagactctgctttataaattgatgagtttctattggagccagcactaggattactacaactcagggcaggaagaagagtaggagtgcagaagaggagttccaacagaaagttacctatgatgagaaactatgggaccctgcctcttggcraatttcagaatctggttcctttaaaaagattgcagaaaagatggaaaatacaatgaggaaagagccctgggaagagggca

SEQ ID NO: 129212 - DNA, 587 bp, Homo sapiens
tcgttgtaattgagtcccagaaggcctcagttcttagccagatggaccttcctgcagggctgctcatggcacagcagctgactttccccagagctcatgatcccagagacagagagagagaaggtggaagccacagggagttttaggttctacacccagagtcacaagctgttacgtcggcattgctctatcagttagaagttgtattagtctgttctcacactgctataaagaaatacctgagactgggtaatttataaaggaaagaggtttaactgactcccagttctgcatggctgaggaggccgccccaggaaacttacaatcatggcagaagtggaagaaaacctgtccttcttcacatggtggcaggagagagaaatgcagagggaagcggggaaaagccccttrtaaaaccatcagatctcatgagaattcactcactatcattagaacagcatgatccaatcacctcccatgaggttcctccttcaatactggggattacaattcgcatgacaattgaagatgagatttgggtgggaacacagaaccaggccatatcagaagtgcatcattaagtccaa

SEQ ID NO: 129213 - DNA, 587 bp, Homo sapiens
tcgttgtaattgagtcccagaaggcctcagttcttagccagatggaccttcctgcagggctgctcatggcacagcagctgactttccccagagctcatgatcccagagacagagagagagaaggtggaagccacagggagttttaggttctacacccagagtcacaagctgttacgtcggcattgctctatcagttagaagttgtattagtctgttctcacactgctataaagaaatacctgagactgggtaatttataaaggaaagaggtttaactgactcccagttctgcatggctgaggaggccgccccaggaaacttacaatcatggcagaagtggaagaaaacctgtccttcttcacatggtggcaggagagagaaatgcagagggaagcggggaaaagccccttataaaaccatcagatctcatgagaattcactcactatcattagaacagcatgatccaatcacctcccatgaggtycctccttcaatactggggattacaattcgcatgacaattgaagatgagatttgggtgggaacacagaaccaggccatatcagaagtgcatcattaagtccaa

SEQ ID NO: 129214 - DNA, 587 bp, Homo sapiens
tcgttgtaattgagtcccagaaggcctcagttcttagccagatggaccttcctgcagggctgctcatggcacagcagctgactttccccagagctcatgatcccagagacagagagagagaaggtggaagccacagggagttttaggttctacacccagagtcacaagctgttacgtcggcattgctctatcagttagaagttgtattagtctgttctcacactgctataaagaaatacctgagactgggtaatttataaaggaaagaggtttaactgactcccagttctgcatggctgaggaggccgccccaggaaacttacaatcatggcagaagtggaagaaaacctgtccttcttcacatggtggcaggagagagaaatgcagagggaagcggggaaaagccccttataaaaccatcagatctcatgagaattcactcactatcattagaacagcatgatccaatcacctcccatgaggttcctccttcaatactggggattacaattcgcatgacaattgragatgagatttgggtgggaacacagaaccaggccatatcagaagtgcatcattaagtccaa

SEQ ID NO: 129215 - DNA, 456 bp, Homo sapiens
gctgttggaaaaggcctggttccttgttgtctgttcccagaaggcctcagttctcagtcatgtggaccttcctgcagggctgcttatggcacagtggctggcttcccccagagctcatgatcccagattcagagagagagagaaggtggaagccgcagttagttttatgttctacacccagagtcacaaactgttatgttggcactattctataagttagaagtattagtccattctcacactgccataaagaaatacctgagactgggtaatttataaaggaaagaggtttaattgactcacagttctgcatgactgaggmggctgccccaggaaacttacagtcatggcagaagtggaagcaaacccgtccttcttcacgtggtgacaggagagagaaatgcacaatgaagcagggaaaagccccttataaaaccatcagatctcatgagaatt

SEQ ID NO: 129216 - DNA, 410 bp, Homo sapiens
aatctaccagggcccagtagtaagccagaagctattactcaaattcagaaaaagaatggaactttttccccaaaccctgaaacttgggcaatgagtcctatgactgccacacacacacacacacacacacacacacacacacacacacayacactcaacaatatccaaatgagcatttagggccaaatggcagatatgcttgacttttgcctggatcaaaatgacatttccatttattatggaatgtttctgtacttgtactagctcataggattttggattagagaaatacccttgcaggatatgaagtcatactttttcattggtgaaatcatctgtcctcattagagtttaataatatcatgcagttatttctcaaagagcttgtactccttagatttgctggaatt

SEQ ID NO: 129217 - DNA, 418 bp, Homo sapiens
gtcattttctgtatcatgatcatagaattcagaatctaccagggcccagtagtaagccagaagctattactcaaattcagaaaaagaatggaactttttccccaaaccctgaaacttgggcaatgagtcctatgactgccacacacacacacacacacacacacacacacacacacacacacacactcaacaatatccaaatragcatttagggccaaatggcagatatgcttgacttttgcctggatcaaaatgacatttccatttattatggaatgtttctgtacttgtactagctcataggattttggattagagaaatacccttgcaggatatgaagtcatactttttcattggtgaaatcatctgtcctcattagagtttaataatatcatgcagttatttctcaaagagctt

SEQ ID NO: 129218 - DNA, 410 bp, Homo sapiens
aatctaccagggcccagtagtaagccagaagctattactcaaattcagaaaaagaatggaactttttccccaaaccctgaaacttgggcaatgagtcctatgactgccacacacacacacacacacacacacacacacacacacacacacacactcaacaatatccaaatgagcatttagggccaaatggcagatatgcttgacttttgcctggatcaaaatgacatttccatttattatggaatgtttctgtacttgtactagctcataggattttggattagagaaatacccttgcaggatatgaagtcatactttttcattggtgaaatcatctgtyctcattagagtttaataatatcatgcagttatttctcaaagagcttgtactccttagatttgctggaatt

SEQ ID NO: 129219 - DNA, 580 bp, Homo sapiens
tgaagaggagcatctaatcccagcatttgcaccagggaactctgcctgaagggattaccagtgacttgaaagtgtaaccaacaacaatcttgtcactattacgcaccagctaagcaatctgaacatacatgctgaagacayatttggtgagctatttaaggaggctaactgcttccacattagatcaaattctcttagaatttgttgcctcatggtcaaagtcactcagctggattcagcagtggaagaggtgtcaccacaggacatcaacatggaaaaagccctcaaaagttccccagcccaagaccagcaagcagtttcaaagagcagcattcctactcctgctgctgacatttacaatcagagtgattgaccacctcccctgaatagcatgagagcacatggagatgataaagacaggctgaagttctatactgatccttcccatttatttgacctctggaaagaagtgctgcaggacacagaagacaaaaggaaagacagaaggcatcaaaagtagcaaaaccacatagatggcaccacttatgatgtgaaaaggattacaaaagccagaaacaag

SEQ ID NO: 129220 - DNA, 580 bp, Homo sapiens
tgaagaggagcatctaatcccagcatttgcaccagggaactctgcctgaagggattaccagtgacttgaaagtgtaaccaacaacaatcttgtcactattacgcaccagctaagcaatctgaacatacatgctgaagacacatttggtgagctatttaaggaggctaactrcttccacattagatcaaattctcttagaatttgttgcctcatggtcaaagtcactcagctggattcagcagtggaagaggtgtcaccacaggacatcaacatggaaaaagccctcaaaagttccccagcccaagaccagcaagcagtttcaaagagcagcattcctactcctgctgctgacatttacaatcagagtgattgaccacctcccctgaatagcatgagagcacatggagatgataaagacaggctgaagttctatactgatccttcccatttatttgacctctggaaagaagtgctgcaggacacagaagacaaaaggaaagacagaaggcatcaaaagtagcaaaaccacatagatggcaccacttatgatgtgaaaaggattacaaaagccagaaacaag

SEQ ID NO: 129221 - DNA, 456 bp, Homo sapiens
attttaatgctgttccatagtatgttatatgcacctactcccctggggtaaatatttaggtggtttcatttatttgtcacccactctacagacgtctatatgcacatattctcccagccatcccagagttttctgatttcccataacgtcagtgattaaactcctgatctgtctgactagctagacatgctgactgactgacagttccattgctactttrcataatttaagatcaacagctacatttggatctcagatcatctaggcccagctgcagttagtctttcctagtctcagagattccctctctgcctgttaatttctctatccctgaaactgcccttgtactccagcccaagcggtttcctagccccgtagtcctggatctgccacttgctaactagaaggtgtcatctgcagaaggtaagtaaggcatttatctccattcactttata

SEQ ID NO: 129222 - DNA, 456 bp, Homo sapiens
attttaatgctgttccatagtatgttatatgcacctactcccctggggtaaatatttaggtggtttcatttatttgtcacccactctacagacgtctatatgcacatattctcccagccatcccagagttttctgatttcccataacgtcagtgattaaactcctgatctgtctgactagctagacatgctgactgactgacagttccattgctactttgyataatttaagatcaacagctacatttggatctcagatcatctaggcccagctgcagttagtctttcctagtctcagagattccctctctgcctgttaatttctctatccctgaaactgcccttgtactccagcccaagcggtttcctagccccgtagtcctggatctgccacttgctaactagaaggtgtcatctgcagaaggtaagtaaggcatttatctccattcactttata

SEQ ID NO: 129223 - DNA, 456 bp, Homo sapiens
attttaatgctgttccatagtatgttatatgcacctactcccctggggtaaatatttaggtggtttcatttatttgtcacccactctacagacgtctatatgcacatattctcccagccatcccagagttttctgatttcccataacgtcagtgattaaactcctgatctgtctgactagctagacatgctgactgactgacagttccattgctactttgcataatttaagatcaacagctacatttggatctcagatcatctaggcccagctgcagttagtctttcctagtctcagagattccctctctgcctgttaatttctctatccctgaaactgcccttgtactccagcccaagcrgtttcctagccccgtagtcctggatctgccacttgctaactagaaggtgtcatctgcagaaggtaagtaaggcatttatctccattcactttata

SEQ ID NO: 129224 - DNA, 456 bp, Homo sapiens
attttaatgctgttccatagtatgttatatgcacctactcccctggggtaaatatttaggtggtttcatttatttgtcacccactctacagacgtctatatgcacatattctcccagccatcccagagttttctgatttcccataacgtcagtgattaaactcctgatctgtctgactagctagacatgctgactgactgacagttccattgctactttgcataatttaagatcaacagctacatttggatctcagatcatctaggcccagctgcagttagtctttcctagtctcagagattccctctctgcctgttaatttctctatccctgaaactgcccttgtactccagcccaagcggyttcctagccccgtagtcctggatctgccacttgctaactagaaggtgtcatctgcagaaggtaagtaaggcatttatctccattcactttata

SEQ ID NO: 129225 - DNA, 577 bp, Homo sapiens
tgggtgcagagaggggttggaaagaatgtggtatttcagactatgcttactatgcttaaaaatcacaattccgtggtgactagagtttatcttaaactttcctccctggcattccattgcatccagttgagagagcactctagctccctacatcccagaacatgtagatctgtccgtggttctgaaagacacactggcaggtcccgccaactacatgaatggcattcatattgtggaaaactgcccactagtaaaaatgtacagttgaatttgtacattcgttacttacaagrttggagaacgtgaagtactggacaatccaacaatagcttggaaagataccataaaaagacccgcagaatattcttttatatgcattatactgaaatgtacaaaacaaaaccagaatgggacacattatgagtgagaagtttatcttgaaattttaatcagaatatgaagaaaagaaatccaacattagacctggaaaaagataaaataatttgtatttcatttaacaatatttatagattctcaatatatacactatccttttaaacctcaatttatatttaac

SEQ ID NO: 129226 - DNA, 577 bp, Homo sapiens
tgggtgcagagaggggttggaaagaatgtggtatttcagactatgcttactatgcttaaaaatcacaattccgtggtgactagagtttatcttaaactttcctccctggcattccattgcatccagttgagagagcactctagctccctacatcccagaacatgtagatctgtccgtggttctgaaagacacactggcaggtcccgccaactacatgaatggcattcatattgtggaaaactgcccactagtaaaaatgtacagttgaatttgtacattcgttacttacaagattggagaacgtgaagtactggacaatccaacaatagcttggaaagataccataaaaagacccgcagaatattcttttatatgcattatwctgaaatgtacaaaacaaaaccagaatgggacacattatgagtgagaagtttatcttgaaattttaatcagaatatgaagaaaagaaatccaacattagacctggaaaaagataaaataatttgtatttcatttaacaatatttatagattctcaatatatacactatccttttaaacctcaatttatatttaac

SEQ ID NO: 129227 - DNA, 524 bp, Homo sapiens
tccaagtccaatggattttctatcccagggatgagcatgtcctagtcatcttctgtgaagtagagggaggcttctgttcccttctgggcttcaattctgcacttccagagttccccattcttcacgtttagtcactctacctccctacacatatttttggaatcaaccaaccaggctagatggaccagccagtccccaacgtgagagctggcagggaagttcttaaataayggtttagttttcctatagtgtgacaaaactggctccaaatgccaaatgaaacccctttagtgcatgccccgtgtgctcagaaatttgccttatactccttcactcacacagaaaagcaaagacaaaaataaaataacaaaattcaatttccacaactaaatttcccatgtattatttttcccaacagagttcatcaacaagcctgtgataccttaggatatactgtgttctgtaaatctaaaacaccaccttacatttgtaaggctaacatttacagagcacttggtatgtcc

SEQ ID NO: 129228 - DNA, 524 bp, Homo sapiens
tccaagtccaatggattttctatcccagggatgagcatgtcctagtcatcttctgtgaagtagagggaggcttctgttcccttctgggcttcaattctgcacttccagagttccccattcttcacgtttagtcactctacctccctacacatatttttggaatcaaccaaccaggctagatggaccagccagtccccaacgtgagagctggcagggaagttcttaaataacggtttagttttcctatagtgtgacaaaactggctccaaatgccaaatgaaacccctttagtgcatgccccrtgtgctcagaaatttgccttatactccttcactcacacagaaaagcaaagacaaaaataaaataacaaaattcaatttccacaactaaatttcccatgtattatttttcccaacagagttcatcaacaagcctgtgataccttaggatatactgtgttctgtaaatctaaaacaccaccttacatttgtaaggctaacatttacagagcacttggtatgtcc

SEQ ID NO: 129229 - DNA, 620 bp, Homo sapiens
tttcgggatgaaactgttccacctcagatgatcaggcactggagtcttataaaggagcgtgcagcctaaatccctcgcatgcacagtttacaatagggttcgtgctcccatgagaatctaatgccaccactgatctgaccagaggcggagctcaggcggtcatgctcatgctttctcgcccacccttcacctcctgctgtgcggtctggttcccaacaggccacaaacctgtaccggtccactgcaggggagttagggacccctggtttaaattatgccactataacagaacacctgagactggataacttacaatgaacacaaatttaattggctcatggttgtcgaggatgggaattccaaaatcaagggaatgtatctggcagaagggagaagygcaagagagggtgagagctagagggagtaagaggtcgaactcacaggctcaggtcctttatgatcagcattaatgagggcagccttgatcagttcattaatgaaggcagagctctgatggtccaatcacctctcaaaggtcccatctcttaacattgttgcactggggattaagtttccaacagacgcttttctggggaaacattcaaacaatagcagttgta

SEQ ID NO: 129230 - DNA, 595 bp, Homo sapiens
tttgtagcctaggagcaataggctttatgatatagcgtaggtgtgcagtaggctatatcatctagctttgtgtatggacactttatgatgttcacgtaagaccaaatcacctaaggacacatttctcagaacctatcttatcattaagaaagaatgactatatatgtaatgtaagtcctttgaagtttaagcattttcactttcatatatttgtctcatttaagaaatattttccattccagcaggtacagctaaaaaaaaagaaaaaagaaaaaaagaaaaattttcttrctcaaatgttttaaggttatcctcctaataacattggtagtagttttattttttcatatttgtctttaccgcttatataattttttgtttatctcaaggtgtagagatataatttaatcatagggtgtttagtaaaatatcaatgctgggaaagggcttaggagataacgatgaatcaaaacacagcacaaaggccaggtactgtggctcactcctgtaatcccagcactttgggaggccaaggagggtgaaccacttgagcccagaggttctagaccagcctgggaaacatactgagacctcg

SEQ ID NO: 129231 - DNA, 595 bp, Homo sapiens
tttgtagcctaggagcaataggctttatgatatagcgtaggtgtgcagtaggctatatcatctagctttgtgtatggacactttatgatgttcacgtaagaccaaatcacctaaggacacatttctcagaacctatcttatcattaagaaagaatgactatatatgtaatgtaagtcctttgaagtttaagcattttcactttcatatatttgtctcatttaagaaatattttccattccagcaggtacagctaaaaaaaaagaaaaaagaaaaaaagaaaaattttcttgctcaaatgttttaaggttatcctcctaataacattggtagtagttttattttttcatatttgtctttaccgcttatataattttttgtttatctcaaggtgtagagatataatttaatcatagggtgtttagtaaaatatcaatgctgggaaagggcttaggagataaygatgaatcaaaacacagcacaaaggccaggtactgtggctcactcctgtaatcccagcactttgggaggccaaggagggtgaaccacttgagcccagaggttctagaccagcctgggaaacatactgagacctcg

SEQ ID NO: 129232 - DNA, 556 bp, Homo sapiens
aaaaactaagaaaaatttagcaaagacatagaaaattgaaaagcattatcaagcacccagacttaatttatttatatgcatatgcacatcaatgaaaaacacaaattatctgaagtatgaatgatacatttaccaggagaaaccatatttcaggccataaaacaataaatttgaaaacattgaaatcatacagaatatattttctggccataatggaaatacattagaaatctgtaacaataagatgatcwtgtgggactgaatgcttttgtcatccttaaactcataattgaaacctaatctctaatgtgatggtgtttggaggttgtgccattagaaagtgatcatgcagtgaaggcaaaaccctcattaataaaatgaatgcccttataaaagggaccccagattgcttgctccttccaccacgtggggacaccaagaaaaggcaacatccatgaatcaggaagcagccctcaccatacactgactcttcccaggccttgatctttgacttcccagcctccggaactgtgagaaatagatttctgttgtatgc

SEQ ID NO: 129233 - DNA, 590 bp, Homo sapiens
gaaaaaagactttgaattttcccacaaaattttgccacaaaaatgtggttaaaagattttttaaaaactggcacatttgtctagagcacttaccatgaatggagcttacaggactggaaattgctctgggtgtcagtgagtggcgagtgaatgtgaagtctagggcattactatacactacttagactttataaacactgtacatttaggctacactaaattaattttaaaaatcattttctttctttaataataaattaatcttagcttactgtaactttttaatctttttttctccaccctttttttaagttcaggggtacatgtacagaatgtgcaggtttgttacgtaggtaaatgtgtgccatggtggtttgctgcagagatcgtcccatcacctaggtattaaggccaacatccattggctattcttcctggtgcttccctcccmcagccccatgccctctaacagaccccagtgtgtgttgttctcccccatgtatccatgtgttgtcatcattcagctcccacttataagtgagaacacatggtgttttgttttctgttcctgggtcagtttgctgaggata

SEQ ID NO: 129234 - DNA, 507 bp, Homo sapiens
ccattgcactccagccacctgggtgacagagaaaaccctcatctgttaaaaaaaaaaaaaagaaagaaagaaagaagaaagaaggaagaaagacagagagaaagaaagaaagagaaagagaaaaagaaagaaagaaaaagaaggaaaagaaagaaaatgaaggtgggacatctgtgaactgggaacagaaaaaggaccttcaccaagcaccttaactgccagtgccttgatacctgaacttcccagccccawgaactgtgaaaaataaacctctgttgtctataagccatccaggctgtggtgttgttatagcagcccaaactaactaaggcactaatttaagtggaaatgctaaatcaaaggttatgaaaatgtttaatattaataggtactaaattacttcccccaaaggtgataagtttacactcttatcaacaagaggttaaaacattgttttaagctgggtgcagtggctcatgcctgtaatcccagcattttgggaggcca

SEQ ID NO: 129235 - DNA, 409 bp, Homo sapiens
gaattccttctttacccacagagctacagcagcctgtggcaaaggctgctccaraaagagcatccgcatcacccagttcttagccaaggatgggagctccctgtacaggaacagaggtcaaaggttagtatcagaagctgcattgtatctgcatctctgccctcaattacctctcaaacatctcatctcactccagcacaactttaccagtcctgctgttttggcctccacactttagagcaatttccaacccttgcccccagtccccaccccgactccaggctgctacacttttacctatgatattttattccactccgcagaccccattacatttccctgccatgaaggggcttctcacctgaagacagccagacatgtggcagggtgcccatacaatcggtccaat

SEQ ID NO: 129236 - DNA, 371 bp, Homo sapiens
cagagctacagcagcctgtggcaaaggctgctccagaaagagcatccgcatcacccagttyttagccaaggatgggagctccctgtacaggaacagaggtcaaaggttagtatcagaagctgcattgtatctgcatctctgccctcaattacctctcaaacatctcatctcactccagcacaactttaccagtcctgctgttttggcctccacactttagagcaatttccaacccttgcccccagtccccaccccgactccaggctgctacacttttacctatgatattttattccactccgcagaccccattacatttccctgccatgaaggggcttctcacctgaagacagccagacatgtggcagggt

SEQ ID NO: 129237 - DNA, 409 bp, Homo sapiens
gaattccttctttacccacagagctacagcagcctgtggcaaaggctgctccagaaagagcatccgcatcacccagttcttagccaaggatgggagctccctgtacaggaacagaggtcaaaggttagtatcagaagctgcattgtatctgcatctctgccctcaattacctctcaaacatctcatctcactccagcacaactttaccagtcctgctgttttggcctccacactttagagcaatttccaacccttgcycccagtccccaccccgactccaggctgctacacttttacctatgatattttattccactccgcagaccccattacatttccctgccatgaaggggcttctcacctgaagacagccagacatgtggcagggtgcccatacaatcggtccaat

SEQ ID NO: 129238 - DNA, 409 bp, Homo sapiens
gaattccttctttacccacagagctacagcagcctgtggcaaaggctgctccagaaagagcatccgcatcacccagttcttagccaaggatgggagctccctgtacaggaacagaggtcaaaggttagtatcagaagctgcattgtatctgcatctctgccctcaattacctctcaaacatctcatctcactccagcacaactttaccagtcctgctgttttggcctccacactttagagcaatttccaacccttgcccccagtccccaccccgactccaggctgctacacttttacctatgatattttattccastccgcagaccccattacatttccctgccatgaaggggcttctcacctgaagacagccagacatgtggcagggtgcccatacaatcggtccaat

SEQ ID NO: 129239 - DNA, 599 bp, Homo sapiens
ttgagcattcataagactaatcactataatggactatagtgaactgaagtacatcaaatatgtttcaatccatgatttcataatggtatcttaaataattggtcrcttgtggaggactctacgtaaccaactcaacaacttgaaaactggtaataaagagaaatcctttattctgcctttcctatagaaaccataactgaaccccatggttgatgaagcaatttctcttacacaagcagtctacctaataactgaagaaaggagcgagcagggcaggagagtgggtgtgggggagaaaaaagaataaatacataaatgaagaaagaaataatagaattccaatattactattttgcaactcctaatgaaataatggattagtcgatgatcacgaatgacttagaacatcaccaaaagagacggacacaagcagacagcatgtacctctgggtgaatgttcacaacattccctgagaaggggccctgcaaaaacaaacactgaacttcaatctgatcagacctctagatgaaattagcaattcacaagaagtcagcgatcagaggagtgtcttacatagcacctccagggtagaatcagc

SEQ ID NO: 129240 - DNA, 599 bp, Homo sapiens
ttgagcattcataagactaatcactataatggactatagtgaactgaagtacatcaaatatgtttcaatccatgatttcataatggtatcttaaataattggtcgcttgtgraggactctacgtaaccaactcaacaacttgaaaactggtaataaagagaaatcctttattctgcctttcctatagaaaccataactgaaccccatggttgatgaagcaatttctcttacacaagcagtctacctaataactgaagaaaggagcgagcagggcaggagagtgggtgtgggggagaaaaaagaataaatacataaatgaagaaagaaataatagaattccaatattactattttgcaactcctaatgaaataatggattagtcgatgatcacgaatgacttagaacatcaccaaaagagacggacacaagcagacagcatgtacctctgggtgaatgttcacaacattccctgagaaggggccctgcaaaaacaaacactgaacttcaatctgatcagacctctagatgaaattagcaattcacaagaagtcagcgatcagaggagtgtcttacatagcacctccagggtagaatcagc

SEQ ID NO: 129241 - DNA, 426 bp, Homo sapiens
caatgggagtgagaaatggggccgcgttatgagtatccaggawgaaggacctgacacgggttgggagagaaagagaaactctggggagatggggaattctcaatactgagcctcccaaccccagacaccgcctcggggcctgagcccttgagagccactcctggggccctgggactttgccctccccctccccctccccctcctgtgcagggtgtgtctcaatgtctccctgagtcttcgcccgggggctgagaaaccagggagaaaccttcggcatggacccagtccatctcccttcattattcattccgaaatcccagtcccttgattgaactttctgcctcccattccatacctggactccccggactcttttggaagaaaattcaccccaaggagcttggtgccagacaatgaacttgtcct

SEQ ID NO: 129242 - DNA, 415 bp, Homo sapiens
aaatggggccgcgttatgagtatccaggaagaaggacctgacacgggttgggagagaaagagaaactctggggagatggggaattctcaatactgagcctyccaaccccagacaccgcctcggggcctgagcccttgagagccactcctggggccctgggactttgccctccccctccccctccccctcctgtgcagggtgtgtctcaatgtctccctgagtcttcgcccgggggctgagaaaccagggagaaaccttcggcatggacccagtccatctcccttcattattcattccgaaatcccagtcccttgattgaactttctgcctcccattccatacctggactccccggactcttttggaagaaaattcaccccaaggagcttggtgccagacaatgaacttgtcctga

SEQ ID NO: 129243 - DNA, 530 bp, Homo sapiens
gaagaattaatattagtaaaatgaccatagttcccaaagcaatctaaagattcaagggaattccaacaaaaataccaaggttatttttccacagaattagaaaaaataattctaatatttctatggacccaaaacatttttaaaaagtccaaatagccaaagaaatcytgagcaaaaagaacaaagctagggccatcacactacttgactttaaaatacattacaaggctatagtatccaaaacagaatggtattgatataaaaacagacatgccaatcaatggaacataatagagaatgcagaaataaatccatatatttacagccaactgacttttaacaaaggtgccaagaacacacatttgggaaaaggacaccctcttcagtaaaagggctgggaaaatggatatcccgtatgcagaagaatgaaattagattcttatctctcaccctattaaaaatcaactcaagttgacttaaataaaatgaaagacctgaaactataaaacaactggaagaaaacaggggaa

SEQ ID NO: 129244 - DNA, 492 bp, Homo sapiens
aaattcctggaaatatacaaccctccagattaaatcaggaaaaaacagaaactgaacagaccaataacaagtagcaagattgaaagagcaataaaaaaaaattgccaaccaaaaaaagtccaggaccagatgaattcacagctgaattccatcagacattcaaagamgaattggtctcaatcttactgaaactatttcaaaaggtaaagagggcatcctccctaaatcattctatgaagccaaaagcaggaaaagacataaccaaaaaagtaaactacacaccaatatccctaataaacatagatgcaaaaattctcaacaaaatactggttaatccatccaacagcatatcaaaaagataatccaccatgatcaagtgggtttcataccagggatgcagggatggtttaacatacgcaagtcaataaatgtgatacatcacataaacagaatgaaaaacaaaaataatattgttatctcgatagatacatg

SEQ ID NO: 129245 - DNA, 501 bp, Homo sapiens
attgataaattcctggaaatatacaaccctccagattaaatcaggaaaaaacagaaactgaacagaccaataacaagtagcaagattgaaagagcaataaaaaaaaattgccaaccaaaaaaagtccaggaccagatgaattcacagctgaattccatcagacattcaaagaagaattggtctcaatcttactgaaactatttcaaaaggtaaagasggcatcctccctaaatcattctatgaagccaaaagcaggaaaagacataaccaaaaaagtaaactacacaccaatatccctaataaacatagatgcaaaaattctcaacaaaatactggttaatccatccaacagcatatcaaaaagataatccaccatgatcaagtgggtttcataccagggatgcagggatggtttaacatacgcaagtcaataaatgtgatacatcacataaacagaatgaaaaacaaaaataatattgttatctcgatagatacatgtat

SEQ ID NO: 129246 - DNA, 436 bp, Homo sapiens
tgagtaggtctaaactgactaatccattccaccatcccaatctccctaagctttttaattccttcctctacattaaaccaagggagatcagacatttccagcttgctcacagtgggccaycttttaatccatatttcagctaaccaagaaaataaactattacgaccttctttaactccccgagctgcaacattaaaagcagagtccttacttaatggcccaaatcaataaattcagccttatccaactctatgttcctttcaccattatcccatacctgtaatatccattcccatgcctgttctccacatttctattgatataaattagaaaactgaaacagctctttttgagtgtagtgcacctcctcatgggtcacactctcaacctcacctctaggggaccgctgggactttagtctagtcataggtctaga

SEQ ID NO: 129247 - DNA, 394 bp, Homo sapiens
ggatgagtaggtctaaactgactaatccattccaccatcccaatctccctaagctttttaattccttcctctacattaaaccaagggagatcagacatttccagcttgctcacagtgggccaccttttaatccatatttcagctaaccaagaaaataaactattacgaccttctttaactccccgagctgcaacattaaaagcagagtccttacttaatggcccaaatcaataaattcagccttatccaactctatgttcctttcaccattatcccatacctgtaatayccattcccatgcctgttctccacatttctattgatataaattagaaaactgaaacagctctttttgagtgtagtgcacctcctcatgggtcacactctcaacctc

SEQ ID NO: 129248 - DNA, 436 bp, Homo sapiens
tgagtaggtctaaactgactaatccattccaccatcccaatctccctaagctttttaattccttcctctacattaaaccaagggagatcagacatttccagcttgctcacagtgggccaccttttaatccatatttcagctaaccaagaaaataaactattacgaccttctttaactccccgagctgcaacattaaaagcagagtccttacttaatggcccaaatcaataaattcagccttatccaactctatgttcctttcaccattatcccatacctgtaatatccattcccatgcctgttctcyacatttctattgatataaattagaaaactgaaacagctctttttgagtgtagtgcacctcctcatgggtcacactctcaacctcacctctaggggaccgctgggactttagtctagtcataggtctaga

SEQ ID NO: 129249 - DNA, 408 bp, Homo sapiens
gggatgagtaggtctaaactgactaatccattccaccatcccaatctccctaagctttttaattccttcctctacattaaaccaagggagatcagacatttccagcttgctcacagtgggccaccttttaatccatatttcagctaaccaagaaaataaactattacgaccttctttaactccccgagctgcaacattaaaagcagagtccttacttaatggcccaaatcaataaattcagccttatccaactctatgttcctttcaccattatcccatacctgtaatatccattcccatgcctgttctccacatttctattgayataaattagaaaactgaaacagctctttttgagtgtagtgcacctcctcatgggtcacactctcaacctcacctctaggggac

SEQ ID NO: 129250 - DNA, 436 bp, Homo sapiens
tgagtaggtctaaactgactaatccattccaccatcccaatctccctaagctttttaattccttcctctacattaaaccaagggagatcagacatttccagcttgctcacagtgggccaccttttaatccatatttcagctaaccaagaaaataaactattacgaccttctttaactccccgagctgcaacattaaaagcagagtccttacttaatggcccaaatcaataaattcagccttatccaactctatgttcctttcaccattatcccatacctgtaatatccattcccatgcctgttctccacatttctattgatataaaytagaaaactgaaacagctctttttgagtgtagtgcacctcctcatgggtcacactctcaacctcacctctaggggaccgctgggactttagtctagtcataggtctaga

SEQ ID NO: 129251 - DNA, 384 bp, Homo sapiens
agcatcattcaatgactgattaatgcatacttgtgggaaaaaagtgttgtgttcaggatttttaggacaagctatttttatgcaaagttcacartaaagtgtgattcctttttatgattaattttaaaaaatgaactgtagatctattcaaagtgaagactgttatgttattttttgagttatcaaactctcttaaactctgtatatatttacgtcagtaaaataaacttatatttcacttgaaatactgttctagatccaactaatcccaacttaaaaaataattaccaagacacccataatcaattatccaatatctagtatctaaataagctgcaatacatgaaattttagccaaataaataaataaacatcagttatgta

SEQ ID NO: 129252 - DNA, 576 bp, Homo sapiens
ttatgtgatcataattggtagttgtcagatatccactgtacagagtaaattgtacttcaaaattggtagcttcaaactgtgacacaaagatagcaaaatatcataaacgcttgatcctacagttgttttactgtgtgttaaaaaaaaaaccrtatctgactgtgagaaagtttgtgatagcttgaagcaaaatataaattcttttatatttaatataactaagatatataaatatgttaatatttatgtatactatatgggatatctgtgcccatatataatttatttatatgtaaaatacaaacaaatacctgaaagagacataacccaaggactagataattttattttatttatttttttgttatgatcaattttttattataaaggttacaaagccgtacagctaaatgaagagatgtatattgatgggtaaggtttgcgaggttccaaacacaaagttttccaaacacaaagcttccgtgtcctcaggatgtttcatgcttgcagcacaccgatgtgtgattaccagtcagggaagttcactcaggctttcagtgtccacagcttttattg

SEQ ID NO: 129253 - DNA, 434 bp, Homo sapiens
attatattgtaatacatctctgcagggaaagtatattataattgtggaggtgcacataaaacataaagaggaacacataaaatgctttttgaattataatcattcatatttgcccactattatgatttcataatatcttggctgtattattgacatattcctactttttctctatgtactagtactctatcacatgatcaatttacagtagaaaaccagataattctttctaatacacatattgcatctattccatgccttcaatgaatttcccrttgtttaaactataggtcaagaaactgtccaattgctatacttgtttgggaagttttatacaaaatacagatttctgtgattaagcatgtctagagagaagcatataaatcttaatgaattttagtactttctagcatgtaaatatattttttctaatt

SEQ ID NO: 129254 - DNA, 513 bp, Homo sapiens
tcaaacgtcctttatttgaacatgcctggtaatcagactccaaatactgagccattttaaacgtcattcagggcagtaagagtgtaagaataaaagagaaactcacttatcccccaacctgtctggaatctttttcatggtaaaagagtaaatcattaaactstgataaatcatcaatttatggtaaatcattaaactatcgtgccagaacttcttatgttctgcatcaaaatttgaacacaaatagagatttacccacagtatttttctgcaaatcatataaagatcttttttttttctggcttacacaacagaattaggagcctcaaataatagtcttctgttctcagaatagcaatataaatattgtttccctatgcaacatgacactccaggacttttttgaaagaagtgtagatagctatctatgctgaagacaattagagatttgaaatatgctaagatctcagtttgtctgaaggataatgagttggtaacagcagttattcacta

SEQ ID NO: 129255 - DNA, 359 bp, Homo sapiens
ctatttacaatagtcctgagtggcccrtgaaaaaggcaaatgatttacagagactaacagtagattaccaaggctttgataaagtaattccacctatagcaacagcagtccttgatagtgcaaaagatacaacaagctaaaagagactagaactcagtgattaaatctgcaactgcttttttctttatttcaatcttggtttggagtcaaaagcagttttcctggaaggacaccaatttacctttattgtattggtagcgttatttgaattcaccagcttactgtcattatttaaatgaacaaggggtttggccttaaagcaggtctcaagtgtgaatatacactacattgatgacagc

SEQ ID NO: 129256 - DNA, 534 bp, Homo sapiens
ctagactaactactttgccagattgataaactaacaaataggtcaaccaaaattttgatgaagtctaggaaatggtagtcatatgtgaatcccaaattatctctgtaattaaaaagaaagatagtagaaaaaccttttttttaaatccaatactcttcaaaactatgtgaagcccaaaaaaatcacatgccttttttttttggtattcagtccacattaagtcccaaattaaatattttcagtctcatttatccaatgctaaaaatgcaataattgcaatgattgcagacttcacaggtttactgtagcacagagattagaagataatcytacttttcatcttattgttttatttatcagagactgctgataagtgtcttggctcatatttcaagtgacttgtttttttgaagagccttaaatgcgaatatataaatgcagtgcaaatattgatagctattttttgtaactctaattcctcgaaaataaaacttaaaacaaaagttaaagcttccatcaataatttaatgattt

SEQ ID NO: 129257 - DNA, 534 bp, Homo sapiens
ctagactaactactttgccagattgataaactaacaaataggtcaaccaaaattttgatgaagtctaggaaatggtagtcatatgtgaatcccaaattatctctgtaattaaaaagaaagatagtagaaaaaccttttttttaaatccaatactcttcaaaactatgtgaagcccaaaaaaatcacatgccttttttttttggtattcagtccacattaagtcccaaattaaatattttcagtctcatttatccaatgctaaaaatgcaataattgcaatgattgcagacttcacaggtttactgtagcacagagattagaagataatcctacttttcatcttattgttttatttatcagagactgctgataagtgtcttggctcatatttcaagtgacttgtttttttgaagagccttaaatgcgaatatataaatgcagtgcwaatattgatagctattttttgtaactctaattcctcgaaaataaaacttaaaacaaaagttaaagcttccatcaataatttaatgattt

SEQ ID NO: 129258 - DNA, 598 bp, Homo sapiens
aagttttaaatggatttttacaattgcatttgtatcagatttttccagaatgtttatgccacatactgaaaataaattaaatctttagccacattcagtttctcagactactcatgcccactttatggcaatgtcaaaaaatttaccagtctaagaataatctatatattaagacattcaggaaaacaataatcctaagaagggaattagtragcccattaagttgcaaccacaattcctttgtttcctcattgacatcactgtcctaactctgctttcttttgcagtgtccccgaggttgtctgggtccatgtacatgaacacagctccaggcatgaagtctggcccttcaagatggccaaatctacactggctcagctatagaaaatgtcagcatgggggcatcttctaggcaacttattttggtggccctggaggcatcattgcaaagccacatctctgcaataattcccagacagcatggtaaggcatcatcctacacccatgatgctggtttattgccaggccaagcaggcgtttaaaaattaccgtaaaatcattgtgtttactcctgaaaacctcagaagagacctcagaa

SEQ ID NO: 129259 - DNA, 598 bp, Homo sapiens
aagttttaaatggatttttacaattgcatttgtatcagatttttccagaatgtttatgccacatactgaaaataaattaaatctttagccacattcagtttctcagactactcatgcccactttatggcaatgtcaaaaaatttaccagtctaagaataatctatatattaagacattcaggaaaacaataatcctaagaagggaattagtaagcccattaagttgcaaccacaattcctttgtttcctcattgacatcactgtcctaactctgctttcttttgcagtgtycccgaggttgtctgggtccatgtacatgaacacagctccaggcatgaagtctggcccttcaagatggccaaatctacactggctcagctatagaaaatgtcagcatgggggcatcttctaggcaacttattttggtggccctggaggcatcattgcaaagccacatctctgcaataattcccagacagcatggtaaggcatcatcctacacccatgatgctggtttattgccaggccaagcaggcgtttaaaaattaccgtaaaatcattgtgtttactcctgaaaacctcagaagagacctcagaa

SEQ ID NO: 129260 - DNA, 598 bp, Homo sapiens
aagttttaaatggatttttacaattgcatttgtatcagatttttccagaatgtttatgccacatactgaaaataaattaaatctttagccacattcagtttctcagactactcatgcccactttatggcaatgtcaaaaaatttaccagtctaagaataatctatatattaagacattcaggaaaacaataatcctaagaagggaattagtaagcccattaagttgcaaccacaattcctttgtttcctcattgacatcactgtcctaactctgctttcttttgcagtgtccccraggttgtctgggtccatgtacatgaacacagctccaggcatgaagtctggcccttcaagatggccaaatctacactggctcagctatagaaaatgtcagcatgggggcatcttctaggcaacttattttggtggccctggaggcatcattgcaaagccacatctctgcaataattcccagacagcatggtaaggcatcatcctacacccatgatgctggtttattgccaggccaagcaggcgtttaaaaattaccgtaaaatcattgtgtttactcctgaaaacctcagaagagacctcagaa

SEQ ID NO: 129261 - DNA, 606 bp, Homo sapiens
tagttgacatttttcaaatccttttaataacattttgatccttagaactataaatttttagagtaggtggaaatcttgccagatcatctgatatagctccctgttgtttcacaggtaaatttttgactagccagggtccctcccccactgcatgagattctaatgagattgtcaatcatggagataggtggggagtcagggaattcagagaggctagagaacaaaatccaaattaaactaaactcacagagtaattgaaatatttatttctctggaaactaattaatccagaagtgttcacatgactcaaacagggataatcagactatttctgtagagaagaggattgttctctttatcttggctcacaggtcaacagaacatgtgtgtttggaactgtcattcaaactttgagtgatagatctgcttggcccaactccttggacttcccagaagttgtattaagccaaaaagttgtctatgtgtgtgtgtgtgtgtgtgtgtgtgtgtgtgygcgtgtttgctgaaggtttgcattcattttctgtcacatacatcagaaggaattcttaataaacaatcacccataactaatgccatctgtcc

SEQ ID NO: 129262 - DNA, 606 bp, Homo sapiens
tagttgacatttttcaaatccttttaataacattttgatccttagaactataaatttttagagtaggtggaaatcttgccagatcatctgatatagctccctgttgtttcacaggtaaatttttgactagccagggtccctcccccactgcatgagattctaatgagattgtcaatcatggagataggtggggagtcagggaattcagagaggctagagaacaaaatccaaattaaactaaactcacagagtaattgaaatatttatttctctggaaactaattaatccagaagtgttcacatgactcaaacagggataatcagactatttctgtagagaagaggattgttctctttatcttggctcacaggtcaacagaacatgtgtgtttggaactgtcattcaaactttgagtgatagatctgcttggcccaactccttggacttcccagaagttgtattaagccaaaaagttgtctatgtgtgtgtgtgtgtgtgtgtgtgtgtgtgtgtgcgtgtttgctgaaggtttgcattcattttctgtcacatacatcagaaggaattcttaataaacaaycacccataactaatgccatctgtcc

SEQ ID NO: 129263 - DNA, 517 bp, Homo sapiens
aactaaacacaccatatttaagggtaaacacatgagtggcacaatcataaagaaaaacaaggaaaacattggtccaaaagttaggatgtcatttcytctgagggttgagggaaggaaagagaatgtattaagaaggaattttaagggtatgaaagctctgataatttatttatttttctaatctgtgtcatgggtacataagtattcattttactaatctttaaacatgtatataaagattttacacaattccatagtcataacattttacacataaaaaagtattttactggttatttatttactgggtcatagataatacactcatatgatagcaatgcataaaataaagtaagaaatttcacacagctgtttcttataagatcctcaatataaactgaagggataatttaaaagtaaagttccagtaaaagtattgcatgggatacaataaacaaaagtccaagtaggcagcagtgactgggcagctgtcagtcaataatgagacactccgcag

SEQ ID NO: 129264 - DNA, 644 bp, Homo sapiens
aaaagccttaaaaaattagtcttttagttttaggaatgctgctcaactgtaaagtaaatcaggtcagatactaaatattgyacagaagacacttctaaatattacatagaagatacttctactttaacattaataaagagctattaatatcatttgataatgagtggtcttttcccttatattttatgtaaacaatatatactggatggagctgaaaccatctacagccattgacattggaagaagaaccacagacagccatctagaaagacccaaatgctctaaggtaaaagctgctccctcatgttaccttaagcagtagtctacagactttttttacaccaaaactacagtaagaagtaagacttcacacatctcagcacacacacgtatacacgtacatacagcaaatggaatatactgttccataacaatatattagatattccataacaatatatggaatatatattgcttatgttcaaatgcctatgaatattcaaaatttatgccaggcactgtggctcatgcctgtaatcccagcactttggaagctgagatgggcagatcactcaagcccaggaagttgagactagtctgggcaacatagcaaaccctgtctctacaaaaaatacaaaaaaatt

SEQ ID NO: 129265 - DNA, 644 bp, Homo sapiens
aaaagccttaaaaaattagtcttttagttttaggaatgctgctcaactgtaaagtaaatcaggtcagatactaaatattgtacagaagacacttctaaatattacatagaagatacttctactttaacattaataaagagctattaatatcatttgataatgagtggtcttttcccttatattttatgtaaacaatatatactggatggagctgaaaccatctacagccattgacattggaagaagaaccacagacagccatctagaaagacccaaatgctctaaggtaaaagctgctccctcatgytaccttaagcagtagtctacagactttttttacaccaaaactacagtaagaagtaagacttcacacatctcagcacacacacgtatacacgtacatacagcaaatggaatatactgttccataacaatatattagatattccataacaatatatggaatatatattgcttatgttcaaatgcctatgaatattcaaaatttatgccaggcactgtggctcatgcctgtaatcccagcactttggaagctgagatgggcagatcactcaagcccaggaagttgagactagtctgggcaacatagcaaaccctgtctctacaaaaaatacaaaaaaatt

SEQ ID NO: 129266 - DNA, 644 bp, Homo sapiens
aaaagccttaaaaaattagtcttttagttttaggaatgctgctcaactgtaaagtaaatcaggtcagatactaaatattgtacagaagacacttctaaatattacatagaagatacttctactttaacattaataaagagctattaatatcatttgataatgagtggtcttttcccttatattttatgtaaacaatatatactggatggagctgaaaccatctacagccattgacattggaagaagaaccacagacagccatctagaaagacccaaatgctctaaggtaaaagctgctccctcatgttaccttaagcagtagtctacagactttttttacaccaaaactacagtaagaagtaagacttcacacatctcagcacacacacgtatacacgtacatacagcaaatggaatatactgttccataacaatatattagatattccataacaatatatggaatatatattgcttatgttcaaatgcctatgaatattyaaaatttatgccaggcactgtggctcatgcctgtaatcccagcactttggaagctgagatgggcagatcactcaagcccaggaagttgagactagtctgggcaacatagcaaaccctgtctctacaaaaaatacaaaaaaatt

SEQ ID NO: 129267 - DNA, 601 bp, Homo sapiens
ctatccctaaagaaggtacacgaacctttaatctgaatggttatgtaaattccagcacattatacaatgaattccaaaaggctgtgacatcaaaaatcttatttttaggaatgaagaagcaacaataaaagatcattccttgtattcaaggcctaagcagtgtaccatactgggaagaacacgaaactgtgatgagaaaacatgagtttcagttctgactctcacgctgactagttatgacatttagacatgtcaccatctttctgggtttcagatccctcatactttaaataagggtataaatamctgcattatccattgaaaaaatctttttttttttttggaaataaggtggctgctctattagttcgttttcacgctgctgataaagacatacccaaaactggaaacaaaaagaggtttaattggacttacagatccacgtggctaaggaagcctcagaatcacggtatgaggcaaaaggcacttgtttaattggacttacagttccacatggctgaggaagcctcagaatcacggtatgaggcaaaaggcacttcttacatggcggcagcaagagaaaatcaggaagaagcaaaag

SEQ ID NO: 129268 - DNA, 609 bp, Homo sapiens
tgcttgaatcatcccaaaaccatctaccctctggtcagtggaaaaactgtctttcacgaaaccagtcctgggtgctaaaaaggctggggaccgctggtgtaaagtgagggtccagtgtcttttcttgtgcatggagacgcagccttcccagccccatgggtttatctgtgctgatttttcacttcttgttctgaccaggagacgcctggctcccatgatgcacaacttacttatttgttcaatcccagtgttcrttgtttcagaattgctaagatgtacccctgggagaaccaaacctactaactagagtccagtgtttgtacacagttggttttgtcctgagcttcaggatgtagacaaaacagtgttgtccaaaatcattgagagcagcctctcccccactccctctccctgagtgatgtcacacatttgtaattcaattagagtccgttgtcacaggccgcgttcctcctgggttcccctgacatcctggctcatttaaaaaaatttgcatacagcgaagttcattctttgtgctgtggacttgcatgggttttgaaaaatgcaaggagtcacgcgtccaccgctgcacccgacagaacagctcca

SEQ ID NO: 129269 - DNA, 505 bp, Homo sapiens
tgcgggtccctggggacagataggttcaaaggagcctttcccagagaattgggagggggacacaggacaattagaaaccacattcgccctcagctggttaatccagcaagcagttccctggccgggaggatcttggggaccccagtggccgagaggagccacggggtctagggaggcaccaatgggtgggaccaagcaccccaccatcggacagcccaccccaccccackctggctcacaaatttgtaaactgagatcccaggagaccagggccagccactggttctcgggagtcagtggcagggctggggctgggtccctggggcttcctggcttctagccagcacttttccactacctaagtgaactaactcccttttctttatgtttttctccttccaaagatgaagacaatcaaaagacaggatgacttggggcagctcctgtacacacagccccactgcgtgtgccagccatcggccaggcctgggctgcaggaggaatc

SEQ ID NO: 129270 - DNA, 491 bp, Homo sapiens
agaccgctgcgtgcctgcaactgtccacacacctgatcgcggtgcgccctgctgctgcaggaccgctkcgtgcctgcgactgtccacacacctgatcgcggtgtgccctgatgctgggagaccgctgcgtgcctgcaactgtccacacacctgatcgcggtgcgccctgctgctgcaggaccgctgcgtgcctgcgactgtccacacacctgatcgcggtgtgccctgatgttgggagaccgctgcgtgcctgcgactgtccacacgcctgatcgatgccacagcgcacggtaaggtggactttttccttcacacggatgcttcacgatggcattggcagggcatttggacagtcggtggcacacagccatctcgcgtcggaggacgcagcagtgctttagggcactgggcagccatgacctcctcacagtggtgcagctcggggtgcctggcggcggcgaggacagccaccttcagggacagcacagctc

SEQ ID NO: 129271 - DNA, 491 bp, Homo sapiens
agaccgctgcgtgcctgcaactgtccacacacctgatcgcggtgcgccctgctgctgcaggaccgcttcgtgcctgcgactgtccacacacctgatcgcggtgtgccctgatgctgggagaccgctgcgtgcctgcaactgtccacacacctgatcgcggtgcgccctgctgctgcaggaccgctgcgtgcctgcractgtccacacacctgatcgcggtgtgccctgatgttgggagaccgctgcgtgcctgcgactgtccacacgcctgatcgatgccacagcgcacggtaaggtggactttttccttcacacggatgcttcacgatggcattggcagggcatttggacagtcggtggcacacagccatctcgcgtcggaggacgcagcagtgctttagggcactgggcagccatgacctcctcacagtggtgcagctcggggtgcctggcggcggcgaggacagccaccttcagggacagcacagctc

SEQ ID NO: 129272 - DNA, 491 bp, Homo sapiens
agaccgctgcgtgcctgcaactgtccacacacctgatcgcggtgcgccctgctgctgcaggaccgcttcgtgcctgcgactgtccacacacctgatcgcggtgtgccctgatgctgggagaccgctgcgtgcctgcaactgtccacacacctgatcgcggtgcgccctgctgctgcaggaccgctgcgtgcctgcgactgtccacacacctgatcgcggtgygccctgatgttgggagaccgctgcgtgcctgcgactgtccacacgcctgatcgatgccacagcgcacggtaaggtggactttttccttcacacggatgcttcacgatggcattggcagggcatttggacagtcggtggcacacagccatctcgcgtcggaggacgcagcagtgctttagggcactgggcagccatgacctcctcacagtggtgcagctcggggtgcctggcggcggcgaggacagccaccttcagggacagcacagctc

SEQ ID NO: 129273 - DNA, 587 bp, Homo sapiens
tgcattagtctgttcacacactgcttataaagacatactggagacggggtaattcataaaggaaagaggtgtaatggactcacagttccacatggctggggaggcctcacaatcatggccaaaggcaaaggagaagcaaaggcacgtcttccaaggtgcagacaggagcgtgtgtgcaggggaaccgcccttaataaaaccaccagatcacgtgagacttactcactatctcgagaacagcacaggaaaaacctgcccccacgattcagttacttcccaccagatccctctgaaaacacgtggggattacaggagataygctgcaagatgacatttgggtggggacacagccacccacagcaataggttttatacaaatatacacgtatgcttgtatgtatatgccattcaccaccttccccaagctaatttttaggcatatatataacatatatgccattcaccaccttccccaagctaatttgtaggcatatatataacatatatataacctatgatgcatcaggtacttattacacatatatgtaacatacacacacatgtaacatatatatacacacacgcat

SEQ ID NO: 129274 - DNA, 309 bp, Homo sapiens
agattcaacatccgcctaatagaaattctagaaagaggaagtagagaatagagaggccaggtgcagtggctcacacctataatctcagcactttgggaggctgaagtaggaggattgcttraggccaggagtttgaggctgcagtgagctatgattgagccactgtactccagcctggaaaacaaagcaagacctcgtctctaaaagtaataatatgccgggacagtggctccccacactttgggaggctaaggtgggcggatcacttgaggtcaggctttcgagaccagcctggccaacatgatgaaa

SEQ ID NO: 129275 - DNA, 533 bp, Homo sapiens
taataaatatgttcaaataascacaaccccattaaggaaaaatgtcacttgacagcaaataatcaatccagaccacaatatgatcacactcactgtgaaggtgagaaaagttcatctttattatgtttccccaagagatgcactgcactgttctcttgaaaacacacagctcatgtcctcctttagaacacacatcctctttaaagtaacatacaaacatgccaaaacaagataaaaaattccatctgaattctcacatttcaaacatacactaaatatcaaataaaaatttatttttacaagaatttaggggaactaccacatagctataaatgtaatatatatgttaactaagtatcatagataaaaaccatgctccccttcagcagcacgtgtaataatagatacaaagattgaaaggtaaaagatttaggatgaaaagaatcctctcttaaaaaggaaaacaaaattatatgtatgtgtatacaacagttataacacccatcacacagctttgtagaaacagcatctat

SEQ ID NO: 129276 - DNA, 485 bp, Homo sapiens
tcaaacatacactaaatatcaaataaaaatttatttttacaagaatttaggggaactaccacatagctataaatgtaatatatatgttaactaagtatcatagataaaaaccatgctccccttcagcagcacgtgtaataatagatacaaagattgaaaggtaaaagatttaggatgaaaagaatcctctcttaaaaaggaaaacaaaattatatgtatgtgtatacaacagttataayacccatcacacagctttgtagaaacagcatctattcaaaaataccagtatttccaaaatatttaaaataatatttaaagtaataataatatttaaataaataaacatatttaataaatatttcaataaataaaataatatttaaataattctatacccatgtttttcaaaataaaccaataaaatagatagtatatattagacgtgttagtatatatatctgagacatgttaaaaatcacaactga

SEQ ID NO: 129277 - DNA, 485 bp, Homo sapiens
tcaaacatacactaaatatcaaataaaaatttatttttacaagaatttaggggaactaccacatagctataaatgtaatatatatgttaactaagtatcatagataaaaaccatgctccccttcagcagcacgtgtaataatagatacaaagattgaaaggtaaaagatttaggatgaaaagaatcctctcttaaaaaggaaaacaaaattatatgtatgtgtatacaacagttataacacccatcacacagctttrtagaaacagcatctattcaaaaataccagtatttccaaaatatttaaaataatatttaaagtaataataatatttaaataaataaacatatttaataaatatttcaataaataaaataatatttaaataattctatacccatgtttttcaaaataaaccaataaaatagatagtatatattagacgtgttagtatatatatctgagacatgttaaaaatcacaactga

SEQ ID NO: 129278 - DNA, 485 bp, Homo sapiens
tcaaacatacactaaatatcaaataaaaatttatttttacaagaatttaggggaactaccacatagctataaatgtaatatatatgttaactaagtatcatagataaaaaccatgctccccttcagcagcacgtgtaataatagatacaaagattgaaaggtaaaagatttaggatgaaaagaatcctctcttaaaaaggaaaacaaaattatatgtatgtgtatacaacagttataacacccatcacacagctttgtagaaacagcatctattcaaaaataccagtatttccaaaatatttaaaataatatttaaagtaataataatatttaaataaataaayatatttaataaatatttcaataaataaaataatatttaaataattctatacccatgtttttcaaaataaaccaataaaatagatagtatatattagacgtgttagtatatatatctgagacatgttaaaaatcacaactga

SEQ ID NO: 129279 - DNA, 416 bp, Homo sapiens
tgtagtcccagctactcaggaggctgaggcaggaggatcccttgaacccaggaagtcaacgctgcagtgaggtatgatcgctccactgcactccagcctgggtgacagagtrcaaccctgctcttaaaaaaataggaagttcatttataaacagaagtgaacaggaatctgactcttgtactttggtgggagtttgggttatcttttacttgaggctgaggctatgccaaaactagggatgtaataacaagcaccatgtaccgagtgctgcttctgtgccacaggctctcctacatgcttgccacacattcgtctatttcatcctcccaatagtcctactccatgtccagcaaggagtgaaaaggctgaggcgagtcacagggagaagagggccccagtgaacagacgaaatgagg

SEQ ID NO: 129280 - DNA, 416 bp, Homo sapiens
tgtagtcccagctactcaggaggctgaggcaggaggatcccttgaacccaggaagtcaacgctgcagtgaggtatgatcgctccactgcactccagcctgggtgacagagtgcaaccctgctcttaaaaaaatagraagttcatttataaacagaagtgaacaggaatctgactcttgtactttggtgggagtttgggttatcttttacttgaggctgaggctatgccaaaactagggatgtaataacaagcaccatgtaccgagtgctgcttctgtgccacaggctctcctacatgcttgccacacattcgtctatttcatcctcccaatagtcctactccatgtccagcaaggagtgaaaaggctgaggcgagtcacagggagaagagggccccagtgaacagacgaaatgagg

SEQ ID NO: 129281 - DNA, 301 bp, Homo sapiens
ctgctcttaaaaaaataggaagttcatttataaacagaagtgaacaggaatctgactcttgtactttggtgggagtttgggttatcttttacttgaggctgaggctatgycaaaactagggatgtaataacaagcaccatgtaccgagtgctgcttctgtgccacaggctctcctacatgcttgccacacattcgtctatttcatcctcccaatagtcctactccatgtccagcaaggagtgaaaaggctgaggcgagtcacagggagaagagggccccagtgaacagacgaaatgaggaa

SEQ ID NO: 129282 - DNA, 416 bp, Homo sapiens
tgtagtcccagctactcaggaggctgaggcaggaggatcccttgaacccaggaagtcaacgctgcagtgaggtatgatcgctccactgcactccagcctgggtgacagagtgcaaccctgctcttaaaaaaataggaagttcatttataaacagaagtgaacaggaatctgactcttgtactttggtgggagtttgggttatcttttacttgaggctgaggctatgccaaaactagggatrtaataacaagcaccatgtaccgagtgctgcttctgtgccacaggctctcctacatgcttgccacacattcgtctatttcatcctcccaatagtcctactccatgtccagcaaggagtgaaaaggctgaggcgagtcacagggagaagagggccccagtgaacagacgaaatgagg

SEQ ID NO: 129283 - DNA, 416 bp, Homo sapiens
tgtagtcccagctactcaggaggctgaggcaggaggatcccttgaacccaggaagtcaacgctgcagtgaggtatgatcgctccactgcactccagcctgggtgacagagtgcaaccctgctcttaaaaaaataggaagttcatttataaacagaagtgaacaggaatctgactcttgtactttggtgggagtttgggttatcttttacttgaggctgaggctatgccaaaactagggatgtaayaacaagcaccatgtaccgagtgctgcttctgtgccacaggctctcctacatgcttgccacacattcgtctatttcatcctcccaatagtcctactccatgtccagcaaggagtgaaaaggctgaggcgagtcacagggagaagagggccccagtgaacagacgaaatgagg

SEQ ID NO: 129284 - DNA, 450 bp, Homo sapiens
aacaacaacaacaactagctgggcatggtggcgtgaacctgtagtcccagctactcaggaggctgaggcaggaggatcccttgaacccaggaagtcaacgctgcagtgaggtatgatcgctccactgcactccagcctgggtgacagagtgcaaccctgctcttaaaaaaataggaagttcatttataaacagaagtgaacaggaatctgactcttgtactttggtgggagtttgggttatcttttacttgaggctgaggctatgccaaaactagggatgtaataacaagcaccatgtaccgagtgctgcttctgtgccacaggctctcctacatgcttgccacacattcgtctatttcatcctcccaatagtcctactccrtgtccagcaaggagtgaaaaggctgaggcgagtcacagggagaagagggccccagtgaacagacgaaa

SEQ ID NO: 129285 - DNA, 301 bp, Homo sapiens
ctgctcttaaaaaaataggaagttcatttataaacagaagtgaacaggaatctgactcttgtactttggtgggagtttgggttatcttttacttgaggctgaggctatgccaaaactagggatgtaataacaagcaccatgtaccgagtgctgcttctgtgccacaggctctcctacatgcttgccacacattcgtctatttcatcctcccaatagtcctactccatgtccagcaaggagtgaaaaggctgaggcgagycacagggagaagagggccccagtgaacagacgaaatgaggaa

SEQ ID NO: 129286 - DNA, 501 bp, Homo sapiens
gtagctgtgacacaacagcatgaagcaaagtgacttcattaatactctgcaaagtaccagaatgctgcacaagacaacacttcgtttccaaaccaaacacaaccagagtttaccactattgattttaagtagcagctgcctaattgctagaaagcagatacttgagcagttgttgagatatgcaaatgcaaataagcattgtcacaaatatatctgtatcacagcgagtatggcttttggtttagttagttacacaatgaytgtgatatttagccatcagagtaattgaactttataaagtaatcagcagtagcaaacaggtatataaatagcagttacttagatgatagtcaaatcacaattaaaaaatatataaagaactttattactgtgcttttatttcctaattttaaaaacattttaatctattccaacaataatttactttaaaatgataatctttgtcacaagaatgtttattctatgaatatttactcagca

SEQ ID NO: 129287 - DNA, 592 bp, Homo sapiens
ttctattacatagctaaatataacaaagctaaaatattgtcttctctcaagcatatcttgatttgtacattcattctggaacagatactcagactcaaagctcactggagagcagaatgagtattccaaaaatggccatcatatgtctggacccatattctcttctagaacattgcccctactccrtcaagaagttgagtgtatgtacttctctctgaacctgggtaggtccttatgactttttgactttttcaactgatatggtatggcagaagcaaagctgtgtacatctaaggctaggcattaaaaggggatagtgcatccacctggtgctagtgctctctcgctctctctcttttctccctctctctgtctctttctctccttctcttaaaatgatcacccctggaaatgagccaagtaacccaggctacttggaccagcccatgttgaaagaacagaagttcccactctgtagtcatggctatgctttacagctgacagagcaccaccttgcctgctgtgtgagtgaaccatcttagaagcagatcctccagtgttcagatgactcacatcatctggtgttgtatag

SEQ ID NO: 129288 - DNA, 592 bp, Homo sapiens
ttctattacatagctaaatataacaaagctaaaatattgtcttctctcaagcatatcttgatttgtacattcattctggaacagatactcagactcaaagctcactggagagcagaatgagtattccaaaaatggccatcatatgtctggacccatattctcttctagaacattgcccctactccatcaagaagttgagtgtatgtacttctctctgaacctgggtaggtccttatgactttttgactttttcaactgatatggtatggcagaagcaaagctgtgtacatctaaggctaggcattaaaaggggatagtgcatccacctggtgctagtgctctctcrctctctctcttttctccctctctctgtctctttctctccttctcttaaaatgatcacccctggaaatgagccaagtaacccaggctacttggaccagcccatgttgaaagaacagaagttcccactctgtagtcatggctatgctttacagctgacagagcaccaccttgcctgctgtgtgagtgaaccatcttagaagcagatcctccagtgttcagatgactcacatcatctggtgttgtatag

SEQ ID NO: 129289 - DNA, 440 bp, Homo sapiens
aagatgaatgttttactcatgaaagttatgaggtagaaaaatagctattccattttgtttttcacttttgatatgatataaatttcagtggagaccttagagattcataagaaagaaaatgaaaaacaaagtcctcaaaaatacttttttttttgtcagaagagcatcattatttttaagtttctcacaaacttgtttgttctgtctccagtactytgatctcctggtaattttagagtaattgagaatattttctaacatacgtgtcaacataatgaaggagctgggacctaaatgaagaagcgacagaatttacagtggctttgaatgctggttcctgaatggatttgcttgactgcaattcaatcttttttgtggctcaaggctcactcacctctaaaaggtactttgtcagaatcgatttaaatcaatttctgtgg

SEQ ID NO: 129290 - DNA, 440 bp, Homo sapiens
aagatgaatgttttactcatgaaagttatgaggtagaaaaatagctattccattttgtttttcacttttgatatgatataaatttcagtggagaccttagagattcataagaaagaaaatgaaaaacaaagtcctcaaaaatacttttttttttgtcagaagagcatcattatttttaagtttctcacaaacttgtttgttctgtctccagtactttgatctcctggtaattttagagtaattgagaatattttctaacatacgtgtcaacataatgaaggagctgggacctaaatgaagaagcgacaraatttacagtggctttgaatgctggttcctgaatggatttgcttgactgcaattcaatcttttttgtggctcaaggctcactcacctctaaaaggtactttgtcagaatcgatttaaatcaatttctgtgg

SEQ ID NO: 129291 - DNA, 433 bp, Homo sapiens
tttactaaaaaaaaagtctttttatcgagttgttggcatgacgtgattactaactagtagttatatatatatatttatatatatataaaactactcatatatatgcatatatatatacatatgagattatttgaagtagaaagtaggttttctaggaaaaaataaaaaataaaaccaaagaaaaatagagttaataacctttacaagagtaatatgatatttaattatrtaaatgacatactattcatatgttttatgtcatacagtattaatgtatattatacataataatacatttttctaaagacccaaatatttttcctatatggtccataagcttagaaataacaattgcttttattatatcaaattacaagctagctctaagaagtcactcttactaattagggttgaataacgaagacaattacaa

SEQ ID NO: 129292 - DNA, 619 bp, Homo sapiens
aagcttccactttttttctaagagcatgtagcttgttaagttgcaaagatgcaaatgaaagctgtgtttctcattgcaattcaagacctgtgctgctcccatttttatgcatgtagctttatatacctaaatctttttttatgttactaatatcattttgtagatttctatgtaaagtttgtgcacacttttcataaagtatgcacattactaaagtatttataaagttgttgctgatatgaatgagacttatttttcaattttattctccaactggttatggtaggaatgaaaataatatcatttatattaaattctcttatttattctaaagtgttttgagtacctactatgtgcaaggaactatgctaggaattgggataagtgggaaaaatacaaagaatctgtcttcaaggagcttwtggcctacatgggccaataaccctgtcttgagtgagggcagaatggaagaattgtaattgagactgttgagacaattatcctgtggcattcttgcacctctctatatctcgatagcagaggtactgactgcctttgtcccaactatcttttcaatgatatttgtacagtgaatagacttggaagatatagtatctca

SEQ ID NO: 129293 - DNA, 557 bp, Homo sapiens
agactgaacagggtaggagagagagagagacaggggaaaataaaaaagtaggaggcaagataccagtgtctttagttctccatttcatctcaatctggttcactataggataagcctcaagatgaagattgagcagtgatggaaagccccaagagagggatggaggtgggggtggctaaaagaaaaggaggctggggccctacaacmtattgggacttgaggaggccacttggctgaatatcccacaacaatagtaagcaaccgcagctgagtaatgatggctaaatgttcgtagatagtcctccaccctactctcacctttgattccacacattctaaacctaatgagggaactgtctcaaaagtcactgtgtgcccacaatggggaagagagaaaccactgggtaattaggaaggggtcagatgaatatcatgatggagcttcagcagaacagcagtggcaggggaagctgaagtggagccatgtcagaacagtgtaacctgtttgtacaaggaaaaggacctgcaggcactcactgtgcagaaaaaaaaaacaa

SEQ ID NO: 129294 - DNA, 635 bp, Homo sapiens
aactttaacatgatatattctttagaaataatatcttcataaacaaaaaataaattgacctgtcaataatgctagctctgagataatatttcagctgtattaaaaggtttacattaagatttgctaactttactccaactatgatcaacaaatcattataaatattttataactcatatttatgttagaaacatatggtcataggggaaaaattagaatatatagatgaagaaaaaatgaaacttwcctcttatatcatacctagacatgcagattaatattttgctgtagaatttgaataggtatagttcatatattctaaagaattcatattagaaattttgagaaccataggcacagactatgaccaaataaaaaccaaaaaccaaaaacaccttctcatattcccacctccacctctgactccttaatttagatggtcattacttccacctaaattatagatacacttagcctcctacctagtttttgtcatcagttttgttttttcgtacctattctcattttgatcagaaggatttcaatcatactttatcattccatcacttaaatttcctcaacgaattctcaccaagattaaataaattctcaacttctcaatataacacacaaca

SEQ ID NO: 129295 - DNA, 635 bp, Homo sapiens
aactttaacatgatatattctttagaaataatatcttcataaacaaaaaataaattgacctgtcaataatgctagctctgagataatatttcagctgtattaaaaggtttacattaagatttgctaactttactccaactatgatcaacaaatcattataaatattttataactcatatttatgttagaaacatatggtcataggggaaaaattagaatatatagatgaagaaaaaatgaaactttcctcttatatcatacctagacatgcagattaatattttgctgtagaatttgaatakgtatagttcatatattctaaagaattcatattagaaattttgagaaccataggcacagactatgaccaaataaaaaccaaaaaccaaaaacaccttctcatattcccacctccacctctgactccttaatttagatggtcattacttccacctaaattatagatacacttagcctcctacctagtttttgtcatcagttttgttttttcgtacctattctcattttgatcagaaggatttcaatcatactttatcattccatcacttaaatttcctcaacgaattctcaccaagattaaataaattctcaacttctcaatataacacacaaca

SEQ ID NO: 129296 - DNA, 635 bp, Homo sapiens
aactttaacatgatatattctttagaaataatatcttcataaacaaaaaataaattgacctgtcaataatgctagctctgagataatatttcagctgtattaaaaggtttacattaagatttgctaactttactccaactatgatcaacaaatcattataaatattttataactcatatttatgttagaaacatatggtcataggggaaaaattagaatatatagatgaagaaaaaatgaaactttcctcttatatcatacctagacatgcagattaatattttgctgtagaatttgaataggtatagttcatatattctaaagaattcatattagaaattttgagaaccataggcacagactatgaccaaataaaaaccaaaaaccaaaaacaccttctcatattcccacctccacctctgactccttaatttagatggtcattacttccacctaaattatagatacacttagcctcstacctagtttttgtcatcagttttgttttttcgtacctattctcattttgatcagaaggatttcaatcatactttatcattccatcacttaaatttcctcaacgaattctcaccaagattaaataaattctcaacttctcaatataacacacaaca

SEQ ID NO: 129297 - DNA, 635 bp, Homo sapiens
aactttaacatgatatattctttagaaataatatcttcataaacaaaaaataaattgacctgtcaataatgctagctctgagataatatttcagctgtattaaaaggtttacattaagatttgctaactttactccaactatgatcaacaaatcattataaatattttataactcatatttatgttagaaacatatggtcataggggaaaaattagaatatatagatgaagaaaaaatgaaactttcctcttatatcatacctagacatgcagattaatattttgctgtagaatttgaataggtatagttcatatattctaaagaattcatattagaaattttgagaaccataggcacagactatgaccaaataaaaaccaaaaaccaaaaacaccttctcatattcccacctccacctctgactccttaatttagatggtcattacttccacctaaattatagatacacttagcctcctacctagtttttgtcatyagttttgttttttcgtacctattctcattttgatcagaaggatttcaatcatactttatcattccatcacttaaatttcctcaacgaattctcaccaagattaaataaattctcaacttctcaatataacacacaaca

SEQ ID NO: 129298 - DNA, 608 bp, Homo sapiens
ctgcttccccttcgccttctgccgtgattgtcagtttcctgaggcctccccagccatgcttcctgtacagcctgcagaactgtgagtcaattaaacctcttttcttcataaattacccagtttctcatagttctttatagcagtgtgaaaacagactaatggcccttctggttgaaggaatgcagccattctgcttgtttgactatgtcctttctattcatctctatttcctgggaggtgtttatccaagtgcaataggaggtattggtgaccgcacagtcccctcagtgttctgctagtaaatagttgaaggttgatcaktgatctcctgcgttttcagtctggcatggaaaagcccccgtgcaactggtaaagatatcaataagcaccaggaggtatctaaatccaccaggagccataggcatcacgttgacgtccatttaccagtcttccctggcaagattcttctgaattgtgctgccttgaccaaaagaggtatgggaggggctgggcgcagtggcttgtgcctgtaatcccaacattttgggaaaccaattcaggtggatcattagaggtcaggggttcaagaccatcctggccaacatggt

SEQ ID NO: 129299 - DNA, 608 bp, Homo sapiens
ctgcttccccttcgccttctgccgtgattgtcagtttcctgaggcctccccagccatgcttcctgtacagcctgcagaactgtgagtcaattaaacctcttttcttcataaattacccagtttctcatagttctttatagcagtgtgaaaacagactaatggcccttctggttgaaggaatgcagccattctgcttgtttgactatgtcctttctattcatctctatttcctgggaggtgtttatccaagtgcaataggaggtattggtgaccgcacagtcccctcagtgttctgctagtaaatagttgaaggttgatcattgatctcctgcgttttcagtctggcatggaaaagcccccrtgcaactggtaaagatatcaataagcaccaggaggtatctaaatccaccaggagccataggcatcacgttgacgtccatttaccagtcttccctggcaagattcttctgaattgtgctgccttgaccaaaagaggtatgggaggggctgggcgcagtggcttgtgcctgtaatcccaacattttgggaaaccaattcaggtggatcattagaggtcaggggttcaagaccatcctggccaacatggt

SEQ ID NO: 129300 - DNA, 608 bp, Homo sapiens
ctgcttccccttcgccttctgccgtgattgtcagtttcctgaggcctccccagccatgcttcctgtacagcctgcagaactgtgagtcaattaaacctcttttcttcataaattacccagtttctcatagttctttatagcagtgtgaaaacagactaatggcccttctggttgaaggaatgcagccattctgcttgtttgactatgtcctttctattcatctctatttcctgggaggtgtttatccaagtgcaataggaggtattggtgaccgcacagtcccctcagtgttctgctagtaaatagttgaaggttgatcattgatctcctgcgttttcagtctggcatggaaaagcccccgtgcaactggtaaagatatcartaagcaccaggaggtatctaaatccaccaggagccataggcatcacgttgacgtccatttaccagtcttccctggcaagattcttctgaattgtgctgccttgaccaaaagaggtatgggaggggctgggcgcagtggcttgtgcctgtaatcccaacattttgggaaaccaattcaggtggatcattagaggtcaggggttcaagaccatcctggccaacatggt

SEQ ID NO: 129301 - DNA, 608 bp, Homo sapiens
ctgcttccccttcgccttctgccgtgattgtcagtttcctgaggcctccccagccatgcttcctgtacagcctgcagaactgtgagtcaattaaacctcttttcttcataaattacccagtttctcatagttctttatagcagtgtgaaaacagactaatggcccttctggttgaaggaatgcagccattctgcttgtttgactatgtcctttctattcatctctatttcctgggaggtgtttatccaagtgcaataggaggtattggtgaccgcacagtcccctcagtgttctgctagtaaatagttgaaggttgatcattgatctcctgcgttttcagtctggcatggaaaagcccccgtgcaactggtaaagatatcaataagcaccaggaggtatctaaatccaccaggagccataggcatcacgttgaygtccatttaccagtcttccctggcaagattcttctgaattgtgctgccttgaccaaaagaggtatgggaggggctgggcgcagtggcttgtgcctgtaatcccaacattttgggaaaccaattcaggtggatcattagaggtcaggggttcaagaccatcctggccaacatggt

SEQ ID NO: 129302 - DNA, 522 bp, Homo sapiens
attttcaattacagcccatccacctcacttgttgtgtgagcgcacacacacacacacacacacacacacacacacaccacatcacagagtattctgtgatggtggtgtcccagatgatttggggaatcacaggaagggaaagtgagtccttcctgtataaataactgcatacatactttctgttttttctcttgtctcttcttacctattcagagccacctacmaaattctttttatgttttatgcacatgaattttatccactcctaggacataaaacttctttatttctactctaagcaatacgccaaagaattttcccaataaatgttgatcttcttctacaaggactccttttccaactgcaaaatatatatatacacacacatatatatgtgtatatattcatatatgtatatatacatatatgtatgtatatatatattcccattgaaaagtgcacttctttttcaaatttatgtgaaaattggcttaattaggaggaagatgttcttaggatact

SEQ ID NO: 129303 - DNA, 522 bp, Homo sapiens
attttcaattacagcccatccacctcacttgttgtgtgagcgcacacacacacacacacacacacacacacacacaccacatcacagagtattctgtgatggtggtgtcccagatgatttggggaatcacaggaagggaaagtgagtccttcctgtataaataactgcatacatactttctgttttttctcttgtctcttcttacctattcagagccacctaccaaattctttttatgttttatgcacatgaattttatccactcctaggacataaaacttctttatttctactctaagcaatacrccaaagaattttcccaataaatgttgatcttcttctacaaggactccttttccaactgcaaaatatatatatacacacacatatatatgtgtatatattcatatatgtatatatacatatatgtatgtatatatatattcccattgaaaagtgcacttctttttcaaatttatgtgaaaattggcttaattaggaggaagatgttcttaggatact

SEQ ID NO: 129304 - DNA, 430 bp, Homo sapiens
aaaaaatgggaaaatgtgttaaagaaaaattataaacaaawttgaagaaaatgtagaataatacatatatatcttaggaggaaagctcttaagcatatagaaaattaagaaactatgaaacaagattaacatagttgactatacacaaactttaattgctaatacaggcatactttgttttatgctttgctttattgcacttcacagaatttttttagaaattgaagttttgtggcaagcttgcatcaagcaagtccatcagcaccattttcccaaaagcctgtgctcactttctgtctctgtgtcatatttggtaattctcacagtatttcaaacttttaaattattattatatctgttatggtgttctgtggtcagtgattttccatgttactatggtaattgctttgaggcatcacaactcatgccc

SEQ ID NO: 129305 - DNA, 430 bp, Homo sapiens
aaaaaatgggaaaatgtgttaaagaaaaattataaacaaaattgaagaaaatgtagaataatacatatatatcttaggaggaaagctcttaagcatatagaaaattaagaaactatgaaacaagattaacatagttgactatacacaaactttaattgctaatacaggcatactttgttttatgctttgctttattgcacttcacagaatttttttagaaattgaagttttgtggcaagcttgcatcaagcaagtccatcagcaccattttcccaaaagcctgtgctcactttctgtctctgtgtcayatttggtaattctcacagtatttcaaacttttaaattattattatatctgttatggtgttctgtggtcagtgattttccatgttactatggtaattgctttgaggcatcacaactcatgccc

SEQ ID NO: 129306 - DNA, 430 bp, Homo sapiens
aaaaaatgggaaaatgtgttaaagaaaaattataaacaaaattgaagaaaatgtagaataatacatatatatcttaggaggaaagctcttaagcatatagaaaattaagaaactatgaaacaagattaacatagttgactatacacaaactttaattgctaatacaggcatactttgttttatgctttgctttattgcacttcacagaatttttttagaaattgaagttttgtggcaagcttgcatcaagcaagtccatcagcaccattttcccaaaagcctgtgctcactttctgtctctgtgtcatatttggtaattctcacagtatttcaaacttttaaattattattatatctgttatggtgttctgtgrtcagtgattttccatgttactatggtaattgctttgaggcatcacaactcatgccc

SEQ ID NO: 129307 - DNA, 430 bp, Homo sapiens
aaaaaatgggaaaatgtgttaaagaaaaattataaacaaaattgaagaaaatgtagaataatacatatatatcttaggaggaaagctcttaagcatatagaaaattaagaaactatgaaacaagattaacatagttgactatacacaaactttaattgctaatacaggcatactttgttttatgctttgctttattgcacttcacagaatttttttagaaattgaagttttgtggcaagcttgcatcaagcaagtccatcagcaccattttcccaaaagcctgtgctcactttctgtctctgtgtcatatttggtaattctcacagtatttcaaacttttaaattattattatatctgttatggtgttctgtggtcagtgattttccatgttastatggtaattgctttgaggcatcacaactcatgccc

SEQ ID NO: 129308 - DNA, 596 bp, Homo sapiens
ttgggtggtcttcctagttcctgggcgaggagatctccttgtccccagttgggctcagcccaggtccttgtttgcacacttctcccttcaggaatgccttttcctcatyctgtcaggtgtcacctcctccaggaagccaccagtgagcatttcacgtgcaccaattagctctatctctgataaattgagggaagcagtggaatgctcagtaaagattggaccctggctgggtgtggtggctcacacctgtaatcccagcactttgggaggccgtggtgggtggatcacctgaagtcaggagttcaagaccagcctggccaatatggtgaaaccccgtctctacaaaaattagccggccatgatggcgggtgcctgtaatcccagctactcgggaggctgaggcaggagaactgcttgaacccaggaggtggaggttgcagggagtggagattgtgccactgcactctagcctgggcaacaaagcaaaagtccaatctcaaaaaaaaaaaaaaaaaaaaaaaagattggacccaaatttctcccctctgggtggctccatctggcaccctatgtcataccagctgtgatcttttgat

SEQ ID NO: 129309 - DNA, 521 bp, Homo sapiens
agatctcactgcctcagggatcttcctaagaaataaatctgaccacctaccttcctggttagaatcctccatcagtcagctcctatctgccatggtctgtgaggatggtaagaactactgttaactcttctccatgccaggccctggacgatgtggtttatatgcatcatctcagccagccatctccacaaccctacaaggcagatactatgagtagyagtaagcagtagagccgcattttggaccgaaggtgtttcactttaaccattgcactataacacctcccatttattcattgattcagcaaatccaaagcaatcaccaacatcatgtgcagtcccgttcttcaagcacagtctcactcactcgacagctccctttcccagtgctttccttcagatccagccagtccagtaccagggactgaatgtcacccatgggagagaagctacagccaaggtggtaacacatggtgtcaccttagtagcatctcagtgctgcttcccattcctgtgtcctgt

SEQ ID NO: 129310 - DNA, 464 bp, Homo sapiens
gaattcttttctttttttttgaaacagagtttcgttcttgtcgcccaggctggagtacagtggcccaatctccactcgttgcaaccgctgcctcccaggttcaagctattctcctgcatcagcctccccagtagctgggattacaggcacatgccaccatgcccggctatttttttttttttttttttttgkatttttagtagagacggggtttcaccatgttggccaggatggtctcaaattcctgacctcaggcgatactcccatctcggcctcccaaagtgctggcattacaggcgtgagccactgcacccagctgaacttgatttcttaaaacattaatttggtttctgcaagagttcaaaatagaaaacagataaacagaaaagactaacccactagattctctgctatctctcacctagcagagatctctgttaactattaattcatttacagagatc

SEQ ID NO: 129311 - DNA, 460 bp, Homo sapiens
ttcttgtcgcccaggctggagtacagtggcccaatctccactcgttgcaaccgctgcctcccaggttcaagctattctcctgcatcagcctccccagtagctgggattacaggcacatgccaccatgcccggctatttttttttttttttttttttgtatttttagtagagacggggtttcaccatgttggccaggatggtctcaaattcctgacctcaggcgatactcccatctcggcctcccaaagtgctggcattacaggcgtgagccactgcacccagctgaacttgatttcttaaaacattaatttggtktctgcaagagttcaaaatagaaaacagataaacagaaaagactaacccactagattctctgctatctctcacctagcagagatctctgttaactattaattcatttacagagatcatcaaataatcagatcataaaagtgaattc

SEQ ID NO: 129312 - DNA, 562 bp, Homo sapiens
ttgcagaattcaaagcaaagttgaccatgacaccagaagcacagcaacaaaattaaaaatagatacgttgcccatcaccaaaattaagaacttttgtgcttcaaagtgcaccactaagaaagtaaaaagacaagccacagaatgacagaaaaatatttgcaaatcatatctctggctagggacttgagtctagattgtatagagagctgaaaaacacaccacacaaaaacatatacatgagcggtcatagcagcatcatttataatagccccagaagtagaaacaacccaaatgttcactgactgatgaataataagcaaaatgtggtatatctatgtaacagaatattatttggcaataaaagagaaatgaagtacgggtaatgctacaatrcggtaaatcctgaaaatgtaaatgaaagaagccagccacacagggctacatattgtatgacttcatttatatgggatatccagaagagacaaatccatagagacagaaagtagattagagaatgccaggggctggggagagggagaatggggaaatgactgctaatgaa

SEQ ID NO: 129313 - DNA, 441 bp, Homo sapiens
ctgtctcaggccctgcccacatcccatcacagggccgtggacttgaagccggaacgtgaaatccctatagactgaatgcatttccttyctacctgttctctctccccttttatttttatttttatattattttatttttaatttttactttatttttttgtagagacggggatttagctatgttgcccaagctggtctggaactccggagctcaagcagtccgcccgccttggccccccaaagcgctggaattacaggcgtaatgcactgtgcctggcctttaaaaaaaaattgaggttattttggggacagtagagcgtccagacacatcctaatttgcatagctgcgcagttttaaaaaatgcaatgcatttttacctgttagggtatgtgatttctggctagtaagctacaccgaatcttggctagcacagttgaatt

SEQ ID NO: 129314 - DNA, 441 bp, Homo sapiens
ctgtctcaggccctgcccacatcccatcacagggccgtggacttgaagccggaacgtgaaatccctatagactgaatgcatttccttcctacctgttctctctccccttttatttttatttttatattattttatttttaatttttactttatttttttgtagagacggggatttagctatgttgcccaagctggtctggaactccggagctcaagcagtccgcccgccttggccccccaaagcgctggaattacaggcgtaatgcactgtgcctggcctttaaaaaaaaattgaggttattttggggacagtagagcgtccagacacatcctaatttgcrtagctgcgcagttttaaaaaatgcaatgcatttttacctgttagggtatgtgatttctggctagtaagctacaccgaatcttggctagcacagttgaatt

SEQ ID NO: 129315 - DNA, 441 bp, Homo sapiens
ctgtctcaggccctgcccacatcccatcacagggccgtggacttgaagccggaacgtgaaatccctatagactgaatgcatttccttcctacctgttctctctccccttttatttttatttttatattattttatttttaatttttactttatttttttgtagagacggggatttagctatgttgcccaagctggtctggaactccggagctcaagcagtccgcccgccttggccccccaaagcgctggaattacaggcgtaatgcactgtgcctggcctttaaaaaaaaattgaggttattttggggacagtagagcgtccagacacatcctaatttgcatagctgckcagttttaaaaaatgcaatgcatttttacctgttagggtatgtgatttctggctagtaagctacaccgaatcttggctagcacagttgaatt

SEQ ID NO: 129316 - DNA, 542 bp, Homo sapiens
ctaataaatatgttcaaataaccacaaccccattaaggaaaaatgtcacttgacagcaaataatcaatccagaccacaatatgatcacactcactgtgaaggtgagaaaagttcrtctttattatgtttccccaagagatgcactgcactgttctcttgaaaacacacagctcatgtcctcctttagaacacacatcctctttaaagtaacatacaaacatgccaaaacaagataaaaaattccatctgaattctcacatttcaaacatacactaaatatcaaataaaaatttatttttacaagaatttaggggaactaccacatagctataaatgtaatatatacattaactaagtatcatagataaaaagtctgctcccttcagcagcatatgtagtaatagatacaaagattgaaaggtaaaagatttaggataaaaagaatcctctcttaaaaaggaaaacaaaattatatttatgtgtatataacagttataatacccatcacacagctttatagaaacagcatctattcaaaaata

SEQ ID NO: 129317 - DNA, 542 bp, Homo sapiens
ctaataaatatgttcaaataaccacaaccccattaaggaaaaatgtcacttgacagcaaataatcaatccagaccacaatatgatcacactcactgtgaaggtgagaaaagttcatctttattatgtttccccaagagatgcactgcactgttctcttgaaaacacacagctcatgtcctcctttagaacacacatcctctttaaagtaacatacaaacatgccaaaacaagataaaaaattccatctgaattctcacatttcaaacatacactaaatatcaaataaaaatttatttttacaagaatttaggggaactaccacatagctataaatgtaatatatayattaactaagtatcatagataaaaagtctgctcccttcagcagcatatgtagtaatagatacaaagattgaaaggtaaaagatttaggataaaaagaatcctctcttaaaaaggaaaacaaaattatatttatgtgtatataacagttataatacccatcacacagctttatagaaacagcatctattcaaaaata

SEQ ID NO: 129318 - DNA, 542 bp, Homo sapiens
ctaataaatatgttcaaataaccacaaccccattaaggaaaaatgtcacttgacagcaaataatcaatccagaccacaatatgatcacactcactgtgaaggtgagaaaagttcatctttattatgtttccccaagagatgcactgcactgttctcttgaaaacacacagctcatgtcctcctttagaacacacatcctctttaaagtaacatacaaacatgccaaaacaagataaaaaattccatctgaattctcacatttcaaacatacactaaatatcaaataaaaatttatttttacaagaatttaggggaactaccacatagctataaatgtaatatatacrttaactaagtatcatagataaaaagtctgctcccttcagcagcatatgtagtaatagatacaaagattgaaaggtaaaagatttaggataaaaagaatcctctcttaaaaaggaaaacaaaattatatttatgtgtatataacagttataatacccatcacacagctttatagaaacagcatctattcaaaaata

SEQ ID NO: 129319 - DNA, 542 bp, Homo sapiens
ctaataaatatgttcaaataaccacaaccccattaaggaaaaatgtcacttgacagcaaataatcaatccagaccacaatatgatcacactcactgtgaaggtgagaaaagttcatctttattatgtttccccaagagatgcactgcactgttctcttgaaaacacacagctcatgtcctcctttagaacacacatcctctttaaagtaacatacaaacatgccaaaacaagataaaaaattccatctgaattctcacatttcaaacatacactaaatatcaaataaaaatttatttttacaagaatttaggggaactaccacatagctataaatgtaatatatacattaactaagtatcatagataaaaagtctgctcccttcagcagcayatgtagtaatagatacaaagattgaaaggtaaaagatttaggataaaaagaatcctctcttaaaaaggaaaacaaaattatatttatgtgtatataacagttataatacccatcacacagctttatagaaacagcatctattcaaaaata

SEQ ID NO: 129320 - DNA, 422 bp, Homo sapiens
aaaaatcacaactgaattctcacaattcagtcacaaacctaaacagcaaataaaaatttctatgaccagaatttgggggaactaccaatagctataaatagaagagattattatggaagtatcatagataaaaagagtgctcgcttcaggagcacatataataatacagagaaaaatttaaagataataaaagatttaggataaaaagaattstcacttaaaaatgaaaagaaaattatctttatgtatatataacaactataactctcatcaaaaaactctacaggaacagcatgttttcaaaagtacaacaatttccaaactatttgaaataaacctattaatgattcaatggccaacattttccaaacaaaccaataaaatgcatagtgtgcatgaagctatctgttacagtctgtggc

SEQ ID NO: 129321 - DNA, 422 bp, Homo sapiens
aaaaatcacaactgaattctcacaattcagtcacaaacctaaacagcaaataaaaatttctatgaccagaatttgggggaactaccaatagctataaatagaagagattattatggaagtatcatagataaaaagagtgctcgcttcaggagcacatataataatacagagaaaaatttaaagataataaaagatttaggataaaaagaattctcwcttaaaaatgaaaagaaaattatctttatgtatatataacaactataactctcatcaaaaaactctacaggaacagcatgttttcaaaagtacaacaatttccaaactatttgaaataaacctattaatgattcaatggccaacattttccaaacaaaccaataaaatgcatagtgtgcatgaagctatctgttacagtctgtggc

SEQ ID NO: 129322 - DNA, 422 bp, Homo sapiens
aaaaatcacaactgaattctcacaattcagtcacaaacctaaacagcaaataaaaatttctatgaccagaatttgggggaactaccaatagctataaatagaagagattattatggaagtatcatagataaaaagagtgctcgcttcaggagcacatataataatacagagaaaaatttaaagataataaaagatttaggataaaaagaattctcacttaaaaatgaaaagaaaattatctttatgtatatataacaactataactctcatcaaaaaactctacaggaacagcatgttttcaaaagtacaacaatttccaaactatttgaaataaacctattaatrattcaatggccaacattttccaaacaaaccaataaaatgcatagtgtgcatgaagctatctgttacagtctgtggc

SEQ ID NO: 129323 - DNA, 438 bp, Homo sapiens
ggaaagtctcaggattgtggccgcgggtgaggtggatgggagaggggagaatgactttcactgggcaagggagagaggctcctgctctgagactcccctgagaagaggccgaaggaggccctgggtgtgagaatctacaggatgtagagctgggaatcagccrggaccccctccagcagacacggagggaccactgcagagtcataaaggaattcccatcatttcctcatgagacagtcacacatcagggtgtgaccatggccttggtatcccccactatggatggagacacttaggtttagaaaagtcagtaagaaacattaagtttcagagggcacagctgaaaccacttttttgatttttgattttgtttttctttgtttgatttttatttttatttatttattaatttattttgagacagagtcttgctctgtg

SEQ ID NO: 129324 - DNA, 438 bp, Homo sapiens
ggaaagtctcaggattgtggccgcgggtgaggtggatgggagaggggagaatgactttcactgggcaagggagagaggctcctgctctgagactcccctgagaagaggccgaaggaggccctgggtgtgagaatctacaggatgtagagctgggaatcagccgggaccccctccagcagacacggagggaccactgcagagtcataaaggaattcccatcatttcctcatgagacagtcacacatcagggtgtgaccatggccttggtatcccccactatggatggagacacttaggtttagaaaagtcagtaagaracattaagtttcagagggcacagctgaaaccacttttttgatttttgattttgtttttctttgtttgatttttatttttatttatttattaatttattttgagacagagtcttgctctgtg

SEQ ID NO: 129325 - DNA, 439 bp, Homo sapiens
cgcgggtgaggtggatgggagaggggagaatgactttcactgggcaagggagagaggctcctgctctgagactcccctgagaagaggccgaaggaggccctgggtgtgagaatctacaggatgtagagctgggaatcagccgggaccccctccagcagacacggagggaccactgcagagtcataaaggaattcccatcatttcctcatgagacagtcacacatcagggtgtgaccatggccttggtatcccccactatggatggagacacttaggtttagaaaagtcagtaagaaacattaagtttcagagggcacagctgaaaccacttttttgattwttgattttgtttttctttgtttgatttttatttttatttatttattaatttattttgagacagagtcttgctctgtgggccaggctggaatgcattggc

SEQ ID NO: 129326 - DNA, 438 bp, Homo sapiens
ggaaagtctcaggattgtggccgcgggtgaggtggatgggagaggggagaatgactttcactgggcaagggagagaggctcctgctctgagactcccctgagaagaggccgaaggaggccctgggtgtgagaatctacaggatgtagagctgggaatcagccgggaccccctccagcagacacggagggaccactgcagagtcataaaggaattcccatcatttcctcatgagacagtcacacatcagggtgtgaccatggccttggtatcccccactatggatggagacacttaggtttagaaaagtcagtaagaaacattaagtttcagagggcacagctgaaaccacttttttgatttttgattttgtttttctttrtttgatttttatttttatttatttattaatttattttgagacagagtcttgctctgtg

SEQ ID NO: 129327 - DNA, 439 bp, Homo sapiens
cgcgggtgaggtggatgggagaggggagaatgactttcactgggcaagggagagaggctcctgctctgagactcccctgagaagaggccgaaggaggccctgggtgtgagaatctacaggatgtagagctgggaatcagccgggaccccctccagcagacacggagggaccactgcagagtcataaaggaattcccatcatttcctcatgagacagtcacacatcagggtgtgaccatggccttggtatcccccactatggatggagacacttaggtttagaaaagtcagtaagaaacattaagtttcagagggcacagctgaaaccacttttttgatttttgattttgtttttctttgttkgatttttatttttatttatttattaatttattttgagacagagtcttgctctgtgggccaggctggaatgcattggc

SEQ ID NO: 129328 - DNA, 583 bp, Homo sapiens
gaggatctgaacatgaattaaccctgaagaaagaatgagaagccagaggtcaagattatgtgtgggaaggacatgccagggaaagaacaggaggcaaatgcaagttcaagaactgggaggcaagaaagagcacagcttgtttaaggattagccatgtttagttgcatggctggaatgcaactgtgtgttgttggggtttttgaggttggaaggggaggagtagaataaggagaaatgacaggagatgacagaagaaagcaagccagggaccagatcttgcccgctattttgcccataaaggaatgtagccaragcaaagtttcctggatacagtgttcctttcactaatctcccttggctcccagtctaccttccagctaattagaacttgctaaatgctccagcatcctctcttttggatggctgtgtatctagttggttttgatttatttgatacatgagaatgtcatgaggccattaatttacctctttgtagatttctcaaggaataagaccaagattaaatctgtttttccatacccggatgttgccttgtataatcttccaaccaaaaagtttcaaa

SEQ ID NO: 129329 - DNA, 442 bp, Homo sapiens
tgacattatcttaagctaaattaatcaagcctccacagtgttcttctctcaatagtggtgtgggccttcctagaagtaatttttcccaaattcagtgatacattttaagttcagattttaattgatatgaatctgtgatacactctaaaataagattattttattgaaaagtggactgtaactttccctttatctaggaagagctctaagttagaagatgttttgcacttttaccraaggctgtgtctcgtaagcacccccgagcaactctgagagccttgatttttgtgtcctcagcatatgtttgtgtaatacaggaaagagaagcagttgccaagtgaaagggatgttggtctccaaaattatagtttgatcccacaaacacacaaacaacatacatgcaaaggattgtttgcttcacggtttttgatatttaattcaa

SEQ ID NO: 129330 - DNA, 442 bp, Homo sapiens
tgacattatcttaagctaaattaatcaagcctccacagtgttcttctctcaatagtggtgtgggccttcctagaagtaatttttcccaaattcagtgatacattttaagttcagattttaattgatatgaatctgtgatacactctaaaataagattattttattgaaaagtggactgtaactttccctttatctaggaagagctctaagttagaagatgttttgcacttttaccaaaggctgtgtctygtaagcacccccgagcaactctgagagccttgatttttgtgtcctcagcatatgtttgtgtaatacaggaaagagaagcagttgccaagtgaaagggatgttggtctccaaaattatagtttgatcccacaaacacacaaacaacatacatgcaaaggattgtttgcttcacggtttttgatatttaattcaa

SEQ ID NO: 129331 - DNA, 504 bp, Homo sapiens
aacttctcagccctcaaaatccyccacagtctggtcccaatctcatttctcatgaaatcttccttctcctgcctcccctcccacacccccaattcttggtattctggaaacatgaaatcgtttcagagttccaaaaaacatctaatattttggtatctctgtgcattttctaatgctattcttcccactaggaatactcttcttcaatgtggattctttaaatccaacccaaaacctaatttaaggtccaggtcaaactacttctgccctatgaaagaatcctgctttctcaggtgtaaattcttcttcaaactcctatgtgtctctcttgggattctcttcactgcttccttgtatctcagttagttgtgttgatatctttcctccacaactagactatacttcttgagggcaggagccacatagttgggagccaccatagttagcctggctcctctatgacatcggcttgaacaaaagttagcaaatgaatggatgacagag

SEQ ID NO: 129332 - DNA, 448 bp, Homo sapiens
tctcatgaaatcttccttctcctgcctcccctcccacacccccaaytcttggtattctggaaacatgaaatcgtttcagagttccaaaaaacatctaatattttggtatctctgtgcattttctaatgctattcttcccactaggaatactcttcttcaatgtggattctttaaatccaacccaaaacctaatttaaggtccaggtcaaactacttctgccctatgaaagaatcctgctttctcaggtgtaaattcttcttcaaactcctatgtgtctctcttgggattctcttcactgcttccttgtatctcagttagttgtgttgatatctttcctccacaactagactatacttcttgagggcaggagccacatagttgggagccaccatagttagcctggctcctctatgacatcggcttgaacaaaagttagcaaatgaatgg

SEQ ID NO: 129333 - DNA, 497 bp, Homo sapiens
tctagaatgaagtaaaacttctcagccctcaaaatcctccacagtctggtcccaatctcatttctcatgaaatcttccttctcctgcctcccctcccacacccccaattcttggtattctggaaacatgaaatcgtttcagagttccaaaaaacatctaatattttggtatctctgtgcattttctaatgctattcttcccactaggaatactcttcttcartgtggattctttaaatccaacccaaaacctaatttaaggtccaggtcaaactacttctgccctatgaaagaatcctgctttctcaggtgtaaattcttcttcaaactcctatgtgtctctcttgggattctcttcactgcttccttgtatctcagttagttgtgttgatatctttcctccacaactagactatacttcttgagggcaggagccacatagttgggagccaccatagttagcctggctcctctatgacatcggcttgaacaaaagtt

SEQ ID NO: 129334 - DNA, 633 bp, Homo sapiens
gtcatcagttacagtaacaattagaaaactaatacaattggttgatccagtggcaacaagaatctggcaaggtcacagcaagagagaaatgacagagaaagctccagaggcaggcaccagaggttaggctctggttaaatagtttctcctgaggggcatcgttaagaagaccagaaggctctgggtgtatttaagaaaggctacttttccccttcccctctcagaagtgctgggggattttctctaatcttcrttgtgaaaacctggtttggctccacgaggaaacactcatgggaagtacaggaggcaagttgtagctctcaaaattgttcccagtcgtaatttgtcaattacacgttgacatttcctggtctccaggaggtttctgcttctgagcccctcttctggtaagttgagattctctgtatctacctgtttgtctctctaattttggagggcagtagcttgtcctgttgcctaaatcctgcggtggacctatgaagagttttcagtttgttcagctttttttcttactgcagggatgggagagatcaattccaagcttctttatatgccaaatgggaactggaagtccactaacagaatttaaaaattttccctacagtttattat

SEQ ID NO: 129335 - DNA, 633 bp, Homo sapiens
gtcatcagttacagtaacaattagaaaactaatacaattggttgatccagtggcaacaagaatctggcaaggtcacagcaagagagaaatgacagagaaagctccagaggcaggcaccagaggttaggctctggttaaatagtttctcctgaggggcatcgttaagaagaccagaaggctctgggtgtatttaagaaaggctacttttccccttcccctctcagaagtgctgggggattttctctaatcttcattgtgaaaacctggtttggctccacgaggaaacactcatgggaagtacaggaggcaagttgtarctctcaaaattgttcccagtcgtaatttgtcaattacacgttgacatttcctggtctccaggaggtttctgcttctgagcccctcttctggtaagttgagattctctgtatctacctgtttgtctctctaattttggagggcagtagcttgtcctgttgcctaaatcctgcggtggacctatgaagagttttcagtttgttcagctttttttcttactgcagggatgggagagatcaattccaagcttctttatatgccaaatgggaactggaagtccactaacagaatttaaaaattttccctacagtttattat

SEQ ID NO: 129336 - DNA, 457 bp, Homo sapiens
cttcttgaagcacagctccagtcttcacatggtattatttcagtgtgcatgtctgtctccacgtttccctttattataaagacactagtcacattggacaggacctaccctattccagtatgacctcattttaactaataacgtctgcaataaccctatctacaaaaaaggtcacattttaaggtactaagaattaggacctcaatatgtgaattttgttcaaccaaataacaacccctccaactaacaagtaaagaaattgaagcatagggaagtcaaataacctgcacagagtcacaaggctagcaatatggtttgcctgtctccccatccaaatcttatcttgaattgtagttcccataatcccctcatgycaagggaggggcccagtgggaggtaattgaatcatggtggaggttctccccatgctattttcatgatagtgagtgagttctca

SEQ ID NO: 129337 - DNA, 457 bp, Homo sapiens
cttcttgaagcacagctccagtcttcacatggtattatttcagtgtgcatgtctgtctccacgtttccctttattataaagacactagtcacattggacaggacctaccctattccagtatgacctcattttaactaataacgtctgcaataaccctatctacaaaaaaggtcacattttaaggtactaagaattaggacctcaatatgtgaattttgttcaaccaaataacaacccctccaactaacaagtaaagaaattgaagcatagggaagtcaaataacctgcacagagtcacaaggctagcaatatggtttgcctgtctccccatccaaatcttatcttgaattgtagttcccataatcccctcatgtcaagggaggggcccagtgggaggtaattgaatcatggkggaggttctccccatgctattttcatgatagtgagtgagttctca

SEQ ID NO: 129338 - DNA, 501 bp, Homo sapiens
gttttatgaggaccatcgcttataagggttttccccctttgttcagcacttctctttcatgccacatgtgaaggatgtgtttgcttccccatccaccttgattgtaagcttcatgaggcctccccagccctgcagaaccatgagacaattaaaactctttcttttataaattagtcagtcttgggtatgtccttatagcagtgcaggaacagactaatacagctagtgagtgaccaggctggaatttgaacccagggctgtatgattccagaggcctgttactggttttcaaattttggcacccaaggtcacctgcagggcttattaaacacagattgctgttaaaacgcagatgctgggtggggccagagcatctgcctttctagcaagttccaggtcctgctgctggtacaacaccagactttgaaagcagctttccmagcagctcttggactttcatggccataaaaatcacctgggaagttttgtttgttcatttga

SEQ ID NO: 129339 - DNA, 602 bp, Homo sapiens
cctgttgctagggtatgtttactacttaaaaggattccccccactctggttcctcctcccttcccgcagtctagtccagacacatgatgaaacattatgcagccatttcagatgttttaaagagtcttaacacatggaaatattttgatgaaaagagaaaaataaaaataagtaaaagtaaagagacagtataagatcaacaatacccaataaacaaacagaatggaatacaccaaarcgctaacagaatgggttctgtgtcatagctagattgttgtttttccctcttcccaaacttccacatttttgatgttggatattgtcaggtccagggtcaggatccagcccatgctgaggtccgaaggcaatgggtggatgagtggcagacaggtaaaagaacactcagggggccacaggcaggtacaagatatttttattcagcagttgtcttagactgtctctgtctccactaactgctcccgccgctcccacacacagctgcatggccagctctctcttcagggtcagcaacttaactccttccctctgggcacaagcaaacagagctgtgtcctggctccccacagtctgtctacaagaca

SEQ ID NO: 129340 - DNA, 372 bp, Homo sapiens
gtgagctttgttagtttgtttctttcaaggaaattgtgtatttcatgaaagttttcaaatttattcagatamagttgttcataattcctttattaccctttcagtatctgcagaatattttgtaatatgtaatgagatcatctctgttattcttaatatgggtaatttgtttctactgttttttcctaatccatctggctagaagtttggcaattttacttatcttttcaaagaaccagtttttggtttcaatatttcttgttttcattttctggttcattgatatctgttctcagagctttattattttatttcttctgattactttggtttttatttgctcttcttttccatattcttaaaatggaagtt

SEQ ID NO: 129341 - DNA, 425 bp, Homo sapiens
tttactttatttgaggttttggtttgaggcaggcaagagaaacctgatattctataaaccaactgacatgttcccatttggttgtggtccagtggatagctcaaatatagcacattatattcctattaccccttgctatgctaatcagggtgatgatagagaaagatgcccatatccatgctgaccaataccattttctacytaaaacaagtctagcccatttactcctaatagtgtgatctcttcttgttttattcttttctgtttttctgataggttatcagagttcacacatttcagtcaagtaatttgggacctgccacatttctctcagatatctttagagatgaagtagtgcgctcctgttattctacctgaacctgaacgcagaatgatggtagtactctatgtacaatttctcagtg

SEQ ID NO: 129342 - DNA, 604 bp, Homo sapiens
gatttcttatagatctaaagtcacctgggagttctgacacagtatgaagaaaactctgaaagagagacatccaatgttgtgctataggtggtggaggcttgaaaaattaattggaaatagatgtgaacccatttgcatggacttcaataatgaaaatcacgagcatcagatggtagcttctgcctgatgcttcayagactctgtacaagctgcgtaatgggagataaaggtgaagttgtccagggagtaaatattagggtagactcaaacttgtaagttatctcaggaagcgagcattctcagcatgtggaatagaaggcctggcacttactacagagtgctcccactaccacttaaagaaggtgaaaacagctccagacaacttctgtctgtacccacatgcatgggaaagaagccaaggaatgtgctttgtagcctgcaaatgcattccactgaaatgccttcctacactttacagccaaccaaccttttcctcatggaataaaacagacccagcatgaagattgcctttcccttttgtctaggacaacatatttgaacagctacccatccccacccaaggccccatgacaggcagctgtgc

SEQ ID NO: 129343 - DNA, 604 bp, Homo sapiens
gatttcttatagatctaaagtcacctgggagttctgacacagtatgaagaaaactctgaaagagagacatccaatgttgtgctataggtggtggaggcttgaaaaattaattggaaatagatgtgaacccatttgcatggacttcaataatgaaaatcacgagcatcagatggtagcttctgcctgatgcttcacagactctgtacaagcwgcgtaatgggagataaaggtgaagttgtccagggagtaaatattagggtagactcaaacttgtaagttatctcaggaagcgagcattctcagcatgtggaatagaaggcctggcacttactacagagtgctcccactaccacttaaagaaggtgaaaacagctccagacaacttctgtctgtacccacatgcatgggaaagaagccaaggaatgtgctttgtagcctgcaaatgcattccactgaaatgccttcctacactttacagccaaccaaccttttcctcatggaataaaacagacccagcatgaagattgcctttcccttttgtctaggacaacatatttgaacagctacccatccccacccaaggccccatgacaggcagctgtgc

SEQ ID NO: 129344 - DNA, 604 bp, Homo sapiens
gatttcttatagatctaaagtcacctgggagttctgacacagtatgaagaaaactctgaaagagagacatccaatgttgtgctataggtggtggaggcttgaaaaattaattggaaatagatgtgaacccatttgcatggacttcaataatgaaaatcacgagcatcagatggtagcttctgcctgatgcttcacagactctgtacaagctgcgtaatgggagataaaggtgaagttgtccagggagtaaatattagggtagactcaaacttgtragttatctcaggaagcgagcattctcagcatgtggaatagaaggcctggcacttactacagagtgctcccactaccacttaaagaaggtgaaaacagctccagacaacttctgtctgtacccacatgcatgggaaagaagccaaggaatgtgctttgtagcctgcaaatgcattccactgaaatgccttcctacactttacagccaaccaaccttttcctcatggaataaaacagacccagcatgaagattgcctttcccttttgtctaggacaacatatttgaacagctacccatccccacccaaggccccatgacaggcagctgtgc

SEQ ID NO: 129345 - DNA, 552 bp, Homo sapiens
gaacaatcagatgaaagataagtgagaaaacagaggatgtaaacaacacaataaaccaattagttttaacagacaaatacagaacactacccaaggaaaaaaaaaaaatacacattcttctcaagtgcatataggacatttatatgttaggtcacagataaaatcacagtagatttgaaaagacagacatgatactaagtatcttctctgatgacaatgggatgaagtcagaaattattaatataattaaaactggaaaatgcacaaatttgtggaaattaaacagcacactcttaatcaaccatgaatcaaagcatcaattacaaaggaaattagaagatatttagagacraatgaaaatgaaaacataacatgccaaaaatgcatggaacatagtgaaaaccacgctaagggcaatatttaaagttatacatgcccacactaaaaaataagaatgatctcaaatcaccaaccaaactttatgacttaaaaaatggaaaaaggagaacaaattaaacaaaagctagtagaaggaaagacaaaataaatatt

SEQ ID NO: 129346 - DNA, 267 bp, Homo sapiens
tctgactacccagctgaccatgcagcttargtagtttttttccctcattttctattgtcatttcccattgaaccagataacaagtttggattcttgaattttgaccctgaaagctctcgctcaggtacaaagtatgtatattcaccctctggccttttaaattatatacctctccaacaataaagtggcccatagtattctatctttgtatcacgttttcccacaagaccggtgctggtcttagagaggcctatccatccatctatt

SEQ ID NO: 129347 - DNA, 408 bp, Homo sapiens
gaattcttttgtgaaatatcagtgccacagattgtaacagatagcttcatgcacactctgcattttattggtttgtttggaaaatgttggccattgaattattcatagatttatttcaaatagtttggaaattgttgtacctttgaaaacatgctgttcctgtagttttttgatgagagttatagttgttatatatacataaagataattttcttttcatttttaagagacaattctttttatcctaaatattttattatctttaaatttgttyctgtattattatatgtgctcctgaagcgagcactctttttatctatgatacttccataataatctcttctatttatagctattggtagttccctaccagaaaaaaacataattctggtgattgaaatttttatt

SEQ ID NO: 129348 - DNA, 422 bp, Homo sapiens
cagaattcttttgtgaaatatcagtgccacagattgtaacagatagcttcatgcacactctgcattttattggtttgtttggaaaatgttggccattgaattattcatagatttatttcaaatagtttggaaattgttgtacctttgaaaacatgctgttcctgtagttttttgatgagagttatagttgttatatatacataaagataattttcttttcatttttaagagacaattctttttatcctaaatattttattatctttaaatttgttcctgtattattatatgtgctcctgaagcgagcactctttttatctatgatacttccataataatctcttctatttatagctattggtagttcccyaccagaaaaaaacataattctggtgattgaaatttttatttgctatttaggt

SEQ ID NO: 129349 - DNA, 593 bp, Homo sapiens
acagatctgcatgaacacccactgtaccgggccggacacctcattctgcaggacagggtaggcaagaggaatagaaaagggaagaatgtgtaggcacgggaagggcctagcctggggtctctgtttacccggcccctgtgttctgcctgccaggccagctgtctcccagccatgctgctggacccccgccaggctcccatgtcatsgatgcctgtgccaccccaggcaataaagaccagtcacttggctgctcttctgaagaaccaagggtgagtgccacaggaggaggaggaggacatggggtttgattttgtgcctttcagtgggtaatgaaggctgaaaggatgactttcgcttaactctttcctgctgcaccaaagtagttcacggtatttgccccaagctaagctttccccactgcaggtgtgagatgtggatcccttagcccttggggcagagaccccaggccagttacctctgaccctgggccctttaaatataggctgtttcaatattgtgtgtcctggcttaacctgcatgttctggttgtctgtgtcagctgtgacaggcccttagctgctccatgcatgctc

SEQ ID NO: 129350 - DNA, 593 bp, Homo sapiens
acagatctgcatgaacacccactgtaccgggccggacacctcattctgcaggacagggtaggcaagaggaatagaaaagggaagaatgtgtaggcacgggaagggcctagcctggggtctctgtttacccggcccctgtgttctgcctgccaggccagctgtctcccagccatgctgctggacccccgccaggctcccatgtcatggatgcctgtgccrccccaggcaataaagaccagtcacttggctgctcttctgaagaaccaagggtgagtgccacaggaggaggaggaggacatggggtttgattttgtgcctttcagtgggtaatgaaggctgaaaggatgactttcgcttaactctttcctgctgcaccaaagtagttcacggtatttgccccaagctaagctttccccactgcaggtgtgagatgtggatcccttagcccttggggcagagaccccaggccagttacctctgaccctgggccctttaaatataggctgtttcaatattgtgtgtcctggcttaacctgcatgttctggttgtctgtgtcagctgtgacaggcccttagctgctccatgcatgctc

SEQ ID NO: 129351 - DNA, 593 bp, Homo sapiens
acagatctgcatgaacacccactgtaccgggccggacacctcattctgcaggacagggtaggcaagaggaatagaaaagggaagaatgtgtaggcacgggaagggcctagcctggggtctctgtttacccggcccctgtgttctgcctgccaggccagctgtctcccagccatgctgctggacccccgccaggctcccatgtcatggatgcctgtgccaccccaggcaataaagaccagtcacttggctgctcttctgaagaaccaagggtgagtgccacaggaggaggaggaggacatggggtttgattttgtgcctttcagtgggtaatraaggctgaaaggatgactttcgcttaactctttcctgctgcaccaaagtagttcacggtatttgccccaagctaagctttccccactgcaggtgtgagatgtggatcccttagcccttggggcagagaccccaggccagttacctctgaccctgggccctttaaatataggctgtttcaatattgtgtgtcctggcttaacctgcatgttctggttgtctgtgtcagctgtgacaggcccttagctgctccatgcatgctc

SEQ ID NO: 129352 - DNA, 593 bp, Homo sapiens
acagatctgcatgaacacccactgtaccgggccggacacctcattctgcaggacagggtaggcaagaggaatagaaaagggaagaatgtgtaggcacgggaagggcctagcctggggtctctgtttacccggcccctgtgttctgcctgccaggccagctgtctcccagccatgctgctggacccccgccaggctcccatgtcatggatgcctgtgccaccccaggcaataaagaccagtcacttggctgctcttctgaagaaccaagggtgagtgccacaggaggaggaggaggacatggggtttgattttgtgcctttcagtgggtaatgaaggctgaaaggatgactttcgcttaactctttcctgctgyaccaaagtagttcacggtatttgccccaagctaagctttccccactgcaggtgtgagatgtggatcccttagcccttggggcagagaccccaggccagttacctctgaccctgggccctttaaatataggctgtttcaatattgtgtgtcctggcttaacctgcatgttctggttgtctgtgtcagctgtgacaggcccttagctgctccatgcatgctc

SEQ ID NO: 129353 - DNA, 607 bp, Homo sapiens
caaacagctgtcttggggagctctgtttgccttgtgcaacactatttagtcctcatctgagtttcccaaggtttccccaggccagccatctgcaaatagcattagtgaaaatctgaataatttccttctaaatacatgtattctatgtcaactctattattggagtaaaagaaagcagagaactgtagttaatttaaaactaatctacaacttgcatgcaaatakatttgagtgtttatatttaaacacagtgtcaaatatttaaggaataatcaagccatacaattaagccacttgtaaatgagatcatttaaacatagtgctcaccaattgccaggcacagattaagcactagataaatattggtccctcttccccttcctctcctaactgagttccccatctgcttcccccattccaacatactttcacgtcccagcaatctacaggggtttcaggctgatcataactgaaatggagagtgaaggccaaggaaataaggaaggtcccaaaccaggcagaaagctttgtcaagaaacttcctactctaaatgtaaacactagataaatattagtcattcttcactttcctctcctatctgaactc

SEQ ID NO: 129354 - DNA, 607 bp, Homo sapiens
caaacagctgtcttggggagctctgtttgccttgtgcaacactatttagtcctcatctgagtttcccaaggtttccccaggccagccatctgcaaatagcattagtgaaaatctgaataatttccttctaaatacatgtattctatgtcaactctattattggagtaaaagaaagcagagaactgtagttaatttaaaactaatctacaacttgcatgcaaatatatttgartgtttatatttaaacacagtgtcaaatatttaaggaataatcaagccatacaattaagccacttgtaaatgagatcatttaaacatagtgctcaccaattgccaggcacagattaagcactagataaatattggtccctcttccccttcctctcctaactgagttccccatctgcttcccccattccaacatactttcacgtcccagcaatctacaggggtttcaggctgatcataactgaaatggagagtgaaggccaaggaaataaggaaggtcccaaaccaggcagaaagctttgtcaagaaacttcctactctaaatgtaaacactagataaatattagtcattcttcactttcctctcctatctgaactc

SEQ ID NO: 129355 - DNA, 607 bp, Homo sapiens
caaacagctgtcttggggagctctgtttgccttgtgcaacactatttagtcctcatctgagtttcccaaggtttccccaggccagccatctgcaaatagcattagtgaaaatctgaataatttccttctaaatacatgtattctatgtcaactctattattggagtaaaagaaagcagagaactgtagttaatttaaaactaatctacaacttgcatgcaaatatatttgagtgtttatatttaaacwcagtgtcaaatatttaaggaataatcaagccatacaattaagccacttgtaaatgagatcatttaaacatagtgctcaccaattgccaggcacagattaagcactagataaatattggtccctcttccccttcctctcctaactgagttccccatctgcttcccccattccaacatactttcacgtcccagcaatctacaggggtttcaggctgatcataactgaaatggagagtgaaggccaaggaaataaggaaggtcccaaaccaggcagaaagctttgtcaagaaacttcctactctaaatgtaaacactagataaatattagtcattcttcactttcctctcctatctgaactc

SEQ ID NO: 129356 - DNA, 607 bp, Homo sapiens
caaacagctgtcttggggagctctgtttgccttgtgcaacactatttagtcctcatctgagtttcccaaggtttccccaggccagccatctgcaaatagcattagtgaaaatctgaataatttccttctaaatacatgtattctatgtcaactctattattggagtaaaagaaagcagagaactgtagttaatttaaaactaatctacaacttgcatgcaaatatatttgagtgtttatatttaaacacagtgtcaaatatttaaggaataatcaagccatacaattaagccacttgtaaatgagatcatttaaacatagtgctcaccaattgccaggcacagattaagcactagataaatattggtccctcttccccttcctctcctaactgagttccccatctgcttcccccattccaacatactttcacgtcccagcaatctacaggggtttcaggctgatcataactgaaatggagagtgaaggccaaggaaataaggaaggtcccaaaccwggcagaaagctttgtcaagaaacttcctactctaaatgtaaacactagataaatattagtcattcttcactttcctctcctatctgaactc

SEQ ID NO: 129357 - DNA, 360 bp, Homo sapiens
ttcaaccaaattaaaacaatgagataccattacacayctactggatgcccaaaatccacagtgacaccaccaaatgctgacaaggatgtggagcagcaggaactctcatttattgctggtggtaatgcaaaatggtatggccactttggaagacagtttggcaatttcctaaaaactaagcatactctcaccataccatccaaatatcactttccttggtatttactcaaatgaactgaaacatccatgtaaaaacctgcatacagatgtttacggcagctttattcataattgcccaaacttggagttaaccaacaagttattcaataggcaaataaataaacagtggtacatccatat

SEQ ID NO: 129358 - DNA, 352 bp, Homo sapiens
ttgtttattttatgaccgtgtttataacttccttacacattataaatgttcttttatatgtataaattattaagaaaatgaaaataatgggatattatgacaactgtaaaattaacaggaaaagaaaacatcaaaattataaaaactaatgagagaagacaatgtttgtttttaaaggataaccattcaagaacatcaaccaaccagctttagggtctttgttcyagctgttccaccaacctagagatcagtttctttgatatctacttggctaactccttctccttcttccaatctttgttctactccccttctcaagaagacctgccctgaccacctcatttgatttttc

SEQ ID NO: 129359 - DNA, 403 bp, Homo sapiens
tggctctttaaagaaaaataattgggcataaaattttcaagactaaaacgatacaataacacatttggaagaaagcactgaattagactagaagacgatgaagaagaatccagtcaggaggaaattccccatggaagttcccgctaaggggcatcagtgaggtcaaaagcagaaggcaggaggaggacaagttgtggagaagagggtgacctttaacacacccctacattcccaaacttggtctctttgtgtttgttcacttatttatttgtcttaaattcttcacttcgctatcacatgtaagagtaaggtaccctgtgtgtgaacagggatgaactacaacaaacacaactataggactactgtgaagctscaacagtcccaacttagacatcaacaataa

SEQ ID NO: 129360 - DNA, 541 bp, Homo sapiens
ggggtggagcccttatagagaacctctgttaggcagtgcagaagggaaatgtggggttggagcgcccatacagagtctccactgaggtactgccttgtggagctgtgagaaaagggctactatcctccagaccccagaaaggtagatccaccaacagcttgcaccttgcacctgaaaaagccacaggcattcaatgccatcccatgaaagcagctggaggggctgtaccctgctaagccacaggggtggagctgcccaaggccatgggaacccaccccttgcattagcgtgccctgggtgagacatggagtcaaaggagatcattttggagctttaagatttaatgactgcccggctgggttttagattttcatgtggcctgtgggccctttattttggccaatttctcccatttggatgggaatacttacccaatggctgtaccgctactgtatctttttttttctttttgagatggagtctccctctgtcacccaggctggagtgcactggtgtsatctcggttcactgcaacctctaa

SEQ ID NO: 129361 - DNA, 602 bp, Homo sapiens
gtgcctttatgtgccaggtacttcaaaactttgtttcactaatcctcataatgactccgccaagtaggtattgtgagttctgctttacaggtgaagaaagctcatggagttaagtaacatgaccaaccatagcatggtgcctgacatacagtaagtgtttaatgaatatcttttgaatacatggtaggtacctaactaatggaagcagtattcaaacttcgatacatctcattgcacagctcacactatttccatcatagtatattgccttctgtgtaagactatacagaatcatttttaaatggctaagaaagagcactgccagtgtaaacatggctagtaagcccagcaacctatttctccctttatatgagaacaatttcaatttcaaaatgtatgcattgtgaaggatgagaaaagacagaaaacaggatcttcaagggctttacagttacttaacacagctagtacatgaaaataacataaatatatatgaaaacaycgtatgtgtatggaacattttattagtacagctcatccattttttgttgagttctactgactttttaaaatttattttactttaagttctgggatacatg

SEQ ID NO: 129362 - DNA, 517 bp, Homo sapiens
tttccctaaaataaaagaattgaaattttatattcaaagggcacatcatacatcttggaaacacaaccccaaacacagaacagagagatgtaccctagtaaaactaaacggttttaagaaaagaactgagaatcraggcaaagagctatgctatttaaaaagaaaaggaaatgatatttggatgatatcctgacagtctttttttaatagaaatttcaaaaatacaaaacaatgaaaaaaacatgtttaaggtatttattgaaaaatatgaaacagaatttttattgtcattaaaaatatcctttaattataaaggccccatacaaatacttatgaatatggaaagatcctgtgaagactgatctaatgaacctttcctgaagaatctgttagagaatgagcattagacaaactcatgtgactggagaagcttcaatataaagtctgggagtgatcatttaataaatttaactatggaactcaactaaaacacaggtatctggtaacaaaaataggt

SEQ ID NO: 129363 - DNA, 587 bp, Homo sapiens
tataggctctacctcaagttgtgggcaaacttctttacccacctgtcatgaaactgtgctttttctatgctatctctagggccccaagactgtatggatagctgcagaccaccacattcaggaagaggggccagatccattagggagtatatttggcattgagctgatagagaataaaggagaaaaacttcctgagtagctccagtcttaccaacccagcttctgtttcaaagtgarttcatgatcaacggtggtctcgcctggagtcattagtccagagaacatcccaacaaagaaggtgtaggaagttttcctaaacctaatttttaggtcaaaaaaacaagacagagagagaacaagattaggaaataaatgggaagttggaggagcccggatcaagcagaagtaagcccaagaatgcaagggaaaggtctgaggtataatggtataggtctgagacaggaagagctacggaataagcagagcaagaaagtgcagagggcaataaggaatcctttcagatgcttttcttctactccaaccccaattagatacacatgggcattggtaattttgccttctgaatc

SEQ ID NO: 129364 - DNA, 587 bp, Homo sapiens
tataggctctacctcaagttgtgggcaaacttctttacccacctgtcatgaaactgtgctttttctatgctatctctagggccccaagactgtatggatagctgcagaccaccacattcaggaagaggggccagatccattagggagtatatttggcattgagctgatagagaataaaggagaaaaacttcctgagtagctccagtcttaccaacccagcttctgtttcaaagtgagttcatgatcaacsgtggtctcgcctggagtcattagtccagagaacatcccaacaaagaaggtgtaggaagttttcctaaacctaatttttaggtcaaaaaaacaagacagagagagaacaagattaggaaataaatgggaagttggaggagcccggatcaagcagaagtaagcccaagaatgcaagggaaaggtctgaggtataatggtataggtctgagacaggaagagctacggaataagcagagcaagaaagtgcagagggcaataaggaatcctttcagatgcttttcttctactccaaccccaattagatacacatgggcattggtaattttgccttctgaatc

SEQ ID NO: 129365 - DNA, 587 bp, Homo sapiens
tataggctctacctcaagttgtgggcaaacttctttacccacctgtcatgaaactgtgctttttctatgctatctctagggccccaagactgtatggatagctgcagaccaccacattcaggaagaggggccagatccattagggagtatatttggcattgagctgatagagaataaaggagaaaaacttcctgagtagctccagtcttaccaacccagcttctgtttcaaagtgagttcatgatcaacggtggtctcgcctggagtcattagtccagagaacatcccaacaaagaaggtgtaggaagttttcctaaacctaatttttaggtcaaaaaaacaagacagagagagaacaagattaggaaataaatgggaagttgsaggagcccggatcaagcagaagtaagcccaagaatgcaagggaaaggtctgaggtataatggtataggtctgagacaggaagagctacggaataagcagagcaagaaagtgcagagggcaataaggaatcctttcagatgcttttcttctactccaaccccaattagatacacatgggcattggtaattttgccttctgaatc

SEQ ID NO: 129366 - DNA, 589 bp, Homo sapiens
ttaaatggacagaagattttagtagatatttttatcaaagaagatatacaaataactaataagcacctgaaaaaaagctcaacattattggctattaggaaatgcaaatcaaaaccacatgaaataacacttactcatcactgaaatggctataatcaaaaaaacagacaataaaagtgatgtcaatgatgtggaaaaactraaacgctcattaatacattgctggtgggaatgtaaaatggtgtggccactttggaaagcagtatgccaatttcttaaaaattaaacacaaagttaccatgcaaatcagcaattctactcctagtagtctctccaagagagatgaaaatgaaagatggccacacaaagacttgtatgtgaatgtttattatggataatacccccaaagtggaaacaacgcaaatgtctttcaactggtaaatggataaacaaaatgtgatatagccacaaaatggaataatttacaacaataaaaagtaatacagtactgatataggccacactatgcatgaacttcagaaaattatgctgcacaaaagaaatccaacacaaagtccacatattttat

SEQ ID NO: 129367 - DNA, 511 bp, Homo sapiens
tattttatgatttaatttctacaaaatgtctagaaaagataaatctgcagagacaaaaagctgattagtggttgcckgggactggagtggatataaagaatgactacaaatgggcctgagagatactatttgcgtgagagaaatgttctaaaattggattgtggcgatggttgcacaactctgtaaatttactagaagttaattaagttgtgtacttaaaatgggtgaattttatgatatatatattataataaagctatttagaaaaacatgtagaattgactttacaattctgcaaaaataatgtaaaaatttaagtagatataacatgcaaaaataaagcttattactttggaaaaaattacttcaaaaatatgaaaatagtttaagctgcaggaatttttttaaaaaaacaaactctaaaatgataatattgagcattgactatattccaggcattattctaagtgctttatatcattttgtcctataaatgagcctctaagtttga

SEQ ID NO: 129368 - DNA, 620 bp, Homo sapiens
aattacaactcttccaaccaatccacttttacacagtttttttwatagaataaacatccaaatgcagcatctgtgatatatctgaattaaatagtgggtgcaacaacatggctatttcaagcttaaatgtcagctaatttttttgaaagcaaagtcatgggagtgagtgtctgtttacacctaatgctgagaaatttaatctctgcaggctgtgacacattctgatatcagaggatcaaaatcccactggtggaagttaatttcctttgctctacaatccacacttaccattctgcactcaggtgggaaaataaaacttgtgttcttcatccaaagttactaaaaacacccaagcccaaatttaaacctcaaaactatgagctctgcttccttggaactcaaaagaataattctctttgctactcagagattaatcacactgcctttatcacctactatgcttgtgttattttactcttcttttgttatttaactgagagcatttgtgtctattctacccaaccaaaccatgaatttgcatgtgtcagggaagctctggcaaaatctgatacaacttattcctcatatattaattgcttaatacagtttttgtgattgaa

SEQ ID NO: 129369 - DNA, 568 bp, Homo sapiens
tactccagggagaggctgtggaggaggagctgtgtgctggctgaggctgagggcgggacaaagttcagcctaggagaagcaaagaatcttaaccaaagttggtttagcctgcatttttttctgattgatcagtggggacaaaacagcttagctaatatcatttatgagacaaacaaaaggaatttagagggtctgcgtctggccttgttataagtgttgatggctatttactctgtgttgctacaaaaatatatgtgaaattgggtaatttaaaaagaacagaggttcatttggttcacagttctgcaggctgtacaagaagcatagtgtcagcatttgcttctggtgagggccttgggaagcttacaatcatggcagaaggcaaagtaggaacaggcamgccacatggcaagagagggagcaagagagaaaggaggaggtgccaggctctttgaacaaccagatctcatgagaactaaaatcaagaactcactcattactgcaagaacagcaccaagcccttcatgagggatccacccccatgatcgaaacacctcccaccaggccc

SEQ ID NO: 129370 - DNA, 572 bp, Homo sapiens
ctagtctcccttgcagttaaaggtagcacagtttgggaagcttaattggaagtctctgagatttctaataaagatttttccttttctgatgaaagcggaaagatattgctggcattctgatgtccccctgacttgaattcagacataatgcatggagccgcagcagccattttgtgaccacaggaaaaaaaagccaagggaatcttagcaaattgagttcagcagcaacatatcttcagatttcttattatatgaaaaaaaataaatctttgtttaagccactgytaagctgaatactttcctaattgatataaatactaagtgtaatacgacattgacagtattgaagccaagatcttaaaacatggcccccagagagtcaagcagacattgcattattacacatttggagggtacagaggctggatctgcccatggtttttgtcttgttattatctacattacaaagagattgaatagattcttataaaaactgattcagactagattgtatggttttgagtaaccaagaaagtaaaagtttctccccctcctcaaagaaaagggcctta

SEQ ID NO: 129371 - DNA, 572 bp, Homo sapiens
ctagtctcccttgcagttaaaggtagcacagtttgggaagcttaattggaagtctctgagatttctaataaagatttttccttttctgatgaaagcggaaagatattgctggcattctgatgtccccctgacttgaattcagacataatgcatggagccgcagcagccattttgtgaccacaggaaaaaaaagccaagggaatcttagcaaattgagttcagcagcaacatatcttcagatttcttattatatgaaaaaaaataaatctttgtttaagccactgctaagctgaatactttcctaattgatataaataytaagtgtaatacgacattgacagtattgaagccaagatcttaaaacatggcccccagagagtcaagcagacattgcattattacacatttggagggtacagaggctggatctgcccatggtttttgtcttgttattatctacattacaaagagattgaatagattcttataaaaactgattcagactagattgtatggttttgagtaaccaagaaagtaaaagtttctccccctcctcaaagaaaagggcctta

SEQ ID NO: 129372 - DNA, 525 bp, Homo sapiens
ttattattctaaacgacaaaataaccatgtaagatacaccatgccacctctcaaataaattgtgtgcattgtatttccatgacagtaaataggaagaatctatttactctgcagaagcccagaaatgaacccaagcaagcgaggcttgcatgacccagagagcacattaaaggatccagaaatgcaggcaagggaacaagacagccaatgaaaaccaaggcagatgactggctgtatgaattgagtgcacaccaactcattagccttttacattttgctacccaaccacccaacttagatgcacagaaaacaaagcttgcaagagtagcaattccagactctgtagcaggaatccttctgctgagcctctctcatgccccctcccctactgttctcatctcccaggatgttcaaatccattccctggtccttacatctgcttctgcccatscatgtgttcgctcctcctggtttcttttggctacttgattttgagtctcccggatggattttaaataccaggtc

SEQ ID NO: 129373 - DNA, 462 bp, Homo sapiens
ctgttcctttccctcttttaggcctttttaaattcccacttccttcatggacagtttcttcatccgttcaccatccctggtcccaagacgtcatactgtgaacttcacctccattatcttactctgccttgaccagtcacytctgtgcttggtattatccccctgacttgacccttaaaaatctgatgacttcttattcatttttgcatttttctgaataccaaacaaaggtttttgcataaagcaaacatttaataaatacttttgatgaaatgccatcatcagctataagctgacacttaaattgtggccattgaaaagtatttatttagcaattgtattaaacctaaagaagaggacgttcaaaaaggatttttgtcaaccaaagattttgagtcattttacaaattcaaaatcattcatccattcctgcatcaaagattttctttaaaaatttattat

SEQ ID NO: 129374 - DNA, 540 bp, Homo sapiens
ggattacaagaatgattacaagaatgttgaacaagtaaaatccccattataattaataattttcagtcttcattacagaactctcaatctaatatctctaatacaatgtttttcctaaatatcaagtggtatttttttaatgtgcttaccatatacaggatgtgggaaaattttaaatacattgtttacagataactgatacttagtcataccattcttaacacatttcctcttgctctacatgtaataattttgttaattattattaattaataattattttgttgactagtttgacacctcgatattcaaaactcaatatttctgacttaagtaatggaagactgcatgtgcaattacttccagagacactaatgattatttttaaaccattactcattaaatttcatataaatgcatacaatctgcatgggtacttaaaattttaaactttagtrccatattttgcatatcacatgattcacacatgaatgagtacatgttgcacagttaatctgataacagaatataaaattatgt

SEQ ID NO: 129375 - DNA, 564 bp, Homo sapiens
tgcaataagtataacaacacatatactgaaaaatgttgctttgttaggttgttatccaaaataaaataatattaaaaaggaaaacctatggcaatgcttattctcaaccctactaaaatagtgacttgttttaggatgatgatttttactaatacttatgttsgtcttctccctacatttaacatgtcagtgtttctatttctgatataaccattgcattattatttctcatcacaatattaatactttgccatgaatcaagttttgacacatatatttcatccctatgcttttaatttattcaaaaattctataaatgtttcataaatgttagtcctatatattagtactgtctgtaacaaaatataatgtaacatttgtcgatcaaaatacaaagaacaacagagctgaaaagtataaaacaacaacaaagagttgagtttattgcttgcctggtatattagttttgtagggctcctaaacaaagtaccatagactgggtggctgaaacaccagaattttattttctcacattcaggaggctgggagtccaagattcaggta

SEQ ID NO: 129376 - DNA, 560 bp, Homo sapiens
atgaaataatccatacaaccaattcccatgacgcaagttgacctatgtaacaaatctgcacttgtacccctgaacttaaaacaaaagttaaaaaaaaaaaaaaggaatcacattcagagactttctcttaagtctttagcatgaatgaattctgcttttccttttagtgctctgtttttatttttgttttgttgtttctccataggtgccattatttatttcatggtagagcttactgcagasacggtaattgttcttagccccaacagctgttcactgaggtgctggtttcatgcttccccgagatgtacagctggatggaagcttgatggccatgtttctaatttaatttctgatatccaactgattctcctattttgtgatatttctaaactgagttgaaaagtttttctagactgcaggttacagagttaggctacaggctgtcaaagtttgttatttggctagcacagtatttttgatctgtttcattttattcttaaagatttggtatttttcttttaattagtttaaatgcatgaaaggcaaagatattcaac

SEQ ID NO: 129377 - DNA, 523 bp, Homo sapiens
cacagtaattttgttgccatttttaattaaacttttaattttgagataattgtagattcacatgcagttgtaagaaataatacagacaaatcacaggtactgttaacccagtttccaccaatggcaacatattgcaaaactatagtacaacattacaacccagatgttgacattaatgcagtcaagattcagaacactccatcacagaaaatgttcctcgtgctgtccatttgtagtcacacctacttccctcccacttctccctccttaaaccttggcaaccactactctgttccccatttcaataattttttcatttcaagaatgttayataaatgagtatgcaacttctcgaggttggtcctttttactcagcataactctctagagattcttccaagtaattgtgcttgttgataatttgttgctttttattgctgagttgtgtttcttggtagggaggcaccacagtttggtaaacatttgcctaccaaaggacatctgagttgcttatggtttttgg

SEQ ID NO: 129378 - DNA, 451 bp, Homo sapiens
aatgtggaagtgatggatataagtgaattttaacatatttgcatatacaagcaacaatctgtcaagtgattaaaaaatgaaatacgtgactcttccaatatgaccagyaggtgatgcagtcaattacagttatgtggatgagtgggaaaaaacaggttttatttttattggggtgggaggaaaatcaacttcatctgtaaatacagaaaagaaaattaaaataatgtggtatataaccttatatctattttgtaattctttattctcattgaggcaaagagagaatcagattcatcaaaattacagaacgtaaagctgaaataatggattatatagttctatatatgttttcagttcactgcatctgcttttagtagtttagatacccaaagctctcttatgaactacaaataagagagaaaactctatttccttaagtagacacacgaga

SEQ ID NO: 129379 - DNA, 451 bp, Homo sapiens
aatgtggaagtgatggatataagtgaattttaacatatttgcatatacaagcaacaatctgtcaagtgattaaaaaatgaaatacgtgactcttccaatatgaccagcaggtgatgcagtcaattacagttatgtggatgagtgggaaaaaacaggttttatttttattggggtgggaggaaaatcaacttcatctgtaaatacagaaaagaaaattaaaataatgtggtatataaccttatatctattttgtaattctttattctcattgaggcaaagagagaatcagattcatcaaaattacagaacgtaaagctgaaataatggattatatagttctatatatgttttcarttcactgcatctgcttttagtagtttagatacccaaagctctcttatgaactacaaataagagagaaaactctatttccttaagtagacacacgaga

SEQ ID NO: 129380 - DNA, 613 bp, Homo sapiens
ctagcaaattgaatctagcagcacatcaaaacttaatgcatcacaatcaagtaggctttatttccagaatgcaaggctggttcaacatacacaaatcaataaatgcgattcaccatataaacagaattagaagcaaaaaccattcgatcatctcaatagatttaggaaaacattcaataaaatttcacatcccttcatgattaaaaacccccaacagagtaggcatcacaggagcatacttcaaaataataaaagccatatgacaagcccacagccaacactatactaaatgagctcaaaccattctgcttaaaaactgcaacaagacaacttgcccactcatactatgcctattcaacatagtactggaagtcccagtcagggtaatcagaaagaaaaggtatttaaataggaaaaaaaagaagttaaactatctttgctaacaatatgattctacatctagaaaatcctaaagactctgccaaaaggctgctacaattgttcaacaactttagtaaagtttcaggatacaaaatcaagtacraaaatcagtagcatgtctgtacaccaccaaagtccaggctgaaagtgaaaccaagaacacaatcttgct

SEQ ID NO: 129381 - DNA, 613 bp, Homo sapiens
ctagcaaattgaatctagcagcacatcaaaacttaatgcatcacaatcaagtaggctttatttccagaatgcaaggctggttcaacatacacaaatcaataaatgcgattcaccatataaacagaattagaagcaaaaaccattcgatcatctcaatagatttaggaaaacattcaataaaatttcacatcccttcatgattaaaaacccccaacagagtaggcatcacaggagcatacttcaaaataataaaagccatatgacaagcccacagccaacactatactaaatgagctcaaaccattctgcttaaaaactgcaacaagacaacttgcccactcatactatgcctattcaacatagtactggaagtcccagtcagggtaatcagaaagaaaaggtatttaaataggaaaaaaaagaagttaaactatctttgctaacaatatgattctacatctagaaaatcctaaagactctgccaaaaggctgctacaattgttcaacaactttagtaaagtttcaggatacaaaatcaagtacaaaaatcagtagcatgtctgtacaccamcaaagtccaggctgaaagtgaaaccaagaacacaatcttgct

SEQ ID NO: 129382 - DNA, 448 bp, Homo sapiens
agccggatcttcattgccaaaagaagcacccaaccctctgcagtggctattggccgaccttccgtaccccagtgcactatgcggctttcagttaataactgctctaggccacctggcattttcaaggcatccctgcactcacacagaggtacacaggtatcgaacagttgtgccatccaaccctacacagacgtggctgccgccctggggtttccttacagatgcttcattctccttacccattccttgttctcccagctactggctgggggatcaccaaatgttctaccatgaacaggtctacacaaacctacccctaaattttgaggggaaaagagatcaaagaaagagactgacaaatccagtttctcacagagaaatatttaatggagtcttccaaagagaagtgatgtctgaggtggccacargatggtggattcccacactc

SEQ ID NO: 129383 - DNA, 553 bp, Homo sapiens
cttgaaaatcagttgacagggaatgtaaagatttatttctgagctcttttttttgaatccactgatgtgtrtgtctatcctcataccagtaccacagtatcttttttgctgtagctttttagttaatcttcccactttcttcttcttttttaaaattatcttgactattttggatctcttgcattttagttagcttgtcaattgcatgccaactatttagataatctaaatgaaatggacaaaatcctagaaacaacaaactgtctgaagtgactcaggaagaaatagaaaatcttgacagatctataataagagagattgaattaaaaacctcccaaaaaagaagagtccaggactgcaaggcttacagcaaaagaaaaaaaaagctgctgtgatcttaataaagtttacattaaatctgtaaataaatttggggagtcttgccatcctaataatatcaagcttttcaaaccgtgaagatgtactgtctttccacttacttaattcttttctatattattgtaaatgaatttttcttaatggaatttttagc

SEQ ID NO: 129384 - DNA, 565 bp, Homo sapiens
atgtatagctcaatctcggtatttgatatctttataaaattgaatcttctgatccatgaatttttatatacttccatttacttaagtcctctttaattcgtttctctactattttgtagttttcgatgtagaggtcatttattttgttagatatatttttagttatttgatatttatgctgttgtaaattttatatttttatttttatgtattcattccttctatatagaaatgtaattttgtatattgatcttatattcagtgaacttsttaaacttattgattctaatagtttatctgtaatttcttttggaatatctttacacagaatttatgtcatctgcaaatattgaatcttaccttttctttctaaactttatgtcttttttctttttattgtcttgcactagataggaatatcagtacaatattgaataacagaaattattttcagtatgaaaaacaactaggcatctttgcttttttcccaaatccaggaagaaaacttttagcaattcactgttaagtgtatctgctgcattttataaagcacttattaccagat

SEQ ID NO: 129385 - DNA, 594 bp, Homo sapiens
atttaaattttcaaaaacaaaaataaagacaaagtgggaaaaatatgtatgcttcatgtgtgacaagccactgatacctattaaatatgaagaatattataaatcatattaataaccacaacattcaagctgtcagtttgaatagacaatgtaaatgacaaaactacatactcaacaagataacagcaaaccagcttcgacagcacgttaaaggggtcatacaacataatcgagtagaatttatctctgagatgcaagaatggttcaaaatatggaaatcaataaatgtgatatgccacactamcagaataaaaaataaaaatcatattatcatctcaatagatgcagaaaaagcattaacaaaagtaaacattctttcataataagacatcagataaaacaaattaggaatagaaggaatgtaccgcaacacaataaaggccatatataacaagcccacagctaacatcataatagtaaaatcatcacaatggtaaaaaaaatgaaagcttttcctctaaggtcagaaataatataaaggttcccactcttgctatttctattccatatagtactaaaagtcctagccaggac

SEQ ID NO: 129386 - DNA, 659 bp, Homo sapiens
actacctattacctcttttgtaagactaacagccctcaaaatttttcattcagtgatgtcttcctcattgcattttaagttcaacatgagcaggactttgtcatgttcacctctatcacatcataaatatagcaaagagtaaaactattgcaacatgactaatgtattgaacgatgcttcagctttcttcttacgttcaatcacaggtcatacgactaaagaacttcctttttaatctccttttctattctcaattaatttcctctgcctgcatcacctcaartctctggggtgaaatccactaatgaattccttttgcagcttaagccaattccaatcttgagccaatctcaggtgaagaagcctgtaaattatcactctcagtcctctcttgtactactaggtctcatgaactcttcattaacaactccagcttctctgttagcccaaaagccttttgctgcctagaaaacccatgattcatgcctcaggaaacagccttcaaatcacaacatgttctgtatctggctggccaactccctgcaacttatttctgcctagatgctccctcattcatttcaatacgctgttcggcctgctaccccagtttcccacttagaacaatggcacacaggacaggagcacattggcacatcaga

SEQ ID NO: 129387 - DNA, 582 bp, Homo sapiens
gcacaaattcactgagagtttaaaaaaatrcatgcatattgtggagatagaaatcaaatctatttgtttccatctgctgtattcttcccaaaatattatctcttcttatcccattgtactatattgcatttctttgaccatttattgtgtatctcttaatatttcccacttcatcattactaacctcactcactctgaacttgatgagagcacctgagcattaatttttcttataattatttaatgattaccagaattcgttcagtatggccagctctggtcaaagtgaggcaggcaagatgctttgtcaactgcctggatggaatgtctcaaaaggtttccatttcatggtagcattatgcaaagttcaagacgtttaatcaagacccttcacttacttaactatacctccttgagaatcccatctatgaaaaaattctagtcattataaaaatgattgattaaatgagggaagtagtagagttcttcatttctttagttggtttagtctcctatgagtcaatcctagttttcaaaattcttaataaaccatttattccttcaactttctatgccatttga

SEQ ID NO: 129388 - DNA, 620 bp, Homo sapiens
tagaaagccatgcacaaattcactgagagtttaaaaaaatgcatgcatattgtggagatagaaatcaaatctatttgtttccatctgctgtattcttcccaaaatattatctcttcttatcccattgtactatattgcatttctttgaccatttattgtgtatctcttaatatttcccacttcatcattactaacctcactcactctgaacttgatgagagcacctgagcattaatttttcttataattatttaatgattaccagaattcrttcagtatggccagctctggtcaaagtgaggcaggcaagatgctttgtcaactgcctggatggaatgtctcaaaaggtttccatttcatggtagcattatgcaaagttcaagacgtttaatcaagacccttcacttacttaactatacctccttgagaatcccatctatgaaaaaattctagtcattataaaaatgattgattaaatgagggaagtagtagagttcttcatttctttagttggtttagtctcctatgagtcaatcctagttttcaaaattcttaataaaccatttattccttcaactttctatgccatttgatgttttgtaaaaaaaaaatataatatg

SEQ ID NO: 129389 - DNA, 625 bp, Homo sapiens
ccatgcacaaattcactgagagtttaaaaaaatgcatgcatattgtggagatagaaatcaaatctatttgtttccatctgctgtattcttcccaaaatattatctcttcttatcccattgtactatattgcatttctttgaccatttattgtgtatctcttaatatttcccacttcatcattactaacctcactcactctgaacttgatgagagcacctgagcattaatttttcttataattatttaatgattaccagaattcgttcagtatggccagctctggtcaaagtgaggcaggcaagatgctttgtcaactgcctggatggaatgtctcaaaaggtttccatttcatggtagcattatgcaaagttcaagacgtttaatcaagacccttcacttacttaactatacctccttgagaatcccatctatgaaaaaattctagtcattataaaaatgaytgattaaatgagggaagtagtagagttcttcatttctttagttggtttagtctcctatgagtcaatcctagttttcaaaattcttaataaaccatttattccttcaactttctatgccatttgatgttttgtaaaaaaaaaatataatatgtatacaaaaaga

SEQ ID NO: 129390 - DNA, 545 bp, Homo sapiens
aacttaaggtgcttaggacaaagaaggcgattgacatctttcaggtaaaacctgttaagtttggtggtcaaggaacacaactgagacatcacttggatgtatttctatgactattttaagaaacataaattgtggtgactcactcagctcacttttaactactgcatggtaattaaagatgcaaaataaaataagttacaagaagtgaggttttttattggttaaagcaatttttctatattttctccrcaagttggtcataaaagttctaagcattcctctttttataaaatcgaagcattattacttactctcttgttaacctatctggattttaattttgtaactttattatatttgttttgctgtgattctttaaaaagcacctttagactcagtgagatagcaaaaatatccaaataggccaaaaaattgtggcaatgtcctctcactcaggaaaattctgtgtgttttctctaatggccaagggaaaacttgtgagactataaaagttagtctcagtacacaaagctcagactggctat

SEQ ID NO: 129391 - DNA, 356 bp, Homo sapiens
tcttaccagttttatctcctatgaaagtccttcacactttctctcatttaaactttattgcattttcctcactttttctcacttcacttttgaattccctattcttttatcctctgttaatttttaagtattatatttgtgataytattttttctttttttctattttttatctttcatttcattttggcctatttttttctcttaagaactttaatatcaccaaataacatgcgtgctacaaactgttttgtagttcaaagaaaaaggagataaacatagagttatggcatagacttaatctggcagagagacaagcataaataatggtattttatattaggaataaacctaaca

SEQ ID NO: 129392 - DNA, 356 bp, Homo sapiens
tcttaccagttttatctcctatgaaagtccttcacactttctctcatttaaactttattgcattttcctcactttttctcacttcacttttgaattccctattcttttatcctctgttaatttttaagtattatatttgtgatactattttttctttttttctattttttatctttcatttcattttggcctatttttttctcttaagaactttaatatcaccaaataacatgygtgctacaaactgttttgtagttcaaagaaaaaggagataaacatagagttatggcatagacttaatctggcagagagacaagcataaataatggtattttatattaggaataaacctaaca

SEQ ID NO: 129393 - DNA, 400 bp, Homo sapiens
gaattcatttttctgggtctctctgattctcaggaactccagaccttcctatttatgttgttttttgtattctatggaggaatcgtgtttggaaaccttcttattgtcataacagtggtatctgactcccaccttcactctcccatgtacttcctgctagccaacctctcactcattgatctgtctctgtcttcagtcacagcccccaagatgattactgactttttcagccagcgcaaagtcatctctttcaagggctgccttgttcagatatttctccttcacttctttggtgggagtgagatggtgatcctcatagccatgggctktgacagatatatagcaatatgcaaacccctacactacactacaattatgtgtggcaacgcatgtgtcggca

SEQ ID NO: 129394 - DNA, 485 bp, Homo sapiens
ggccacagatacatcaaaaaatgctcaacatcactatttgtcagggaagtactaattaaaaccaaaatgagatgtcccctcaaacctgttagaatggctmttatcaaaaagatgaaagatagcaactatcagagaggatgatagaaaagggaacccttgtatcatgtacaaattaaaaatagaactatcacatgatccaagaatcctacttctgggtatatagccaaaggaattgaaatcaatatgtcaaagggatatctgcactcctatgttattgcagcatgttcacaatggccaagatatagaatcaacctaactgttcatagacagatgaatggataaatgaaatgtgatatggaaaattattcagccttaaaaacagtaggaaattctgtcatttgagacaacgtggatgaacctagaggacattaagctaagtgaaataagctagacacagaaagacaaatattgcatgatctcactta

SEQ ID NO: 129395 - DNA, 485 bp, Homo sapiens
ggccacagatacatcaaaaaatgctcaacatcactatttgtcagggaagtactaattaaaaccaaaatgagatgtcccctcaaacctgttagaatggctcttatcaaaaagatgaaagatagcaactatcagagaggatgatagaaaagggaacccttgyatcatgtacaaattaaaaatagaactatcacatgatccaagaatcctacttctgggtatatagccaaaggaattgaaatcaatatgtcaaagggatatctgcactcctatgttattgcagcatgttcacaatggccaagatatagaatcaacctaactgttcatagacagatgaatggataaatgaaatgtgatatggaaaattattcagccttaaaaacagtaggaaattctgtcatttgagacaacgtggatgaacctagaggacattaagctaagtgaaataagctagacacagaaagacaaatattgcatgatctcactta

SEQ ID NO: 129396 - DNA, 519 bp, Homo sapiens
attctgacaaatatcttctctttccagggagaatcactgagccagaataaaattgaacactaaatattctaagaaaaaaggaatctagtttgtcaaaatgtgacttgaattaatagataaggagagtcagatgataaragggtcaaaattatgtttatcttaggaaaagtagaatagaaaatttataagcagattaaaaacacataataaaagtagtaaataataatgacagtatctcaaatcagtgcaggggggaaaggcctactaatgtgatggtgggataattggatagcaatatgggaaaagatatatttaatttatttgctacaccaaatgccaggacaatctctaagtgaattcaagacataactcttttttcaaaaaaactatgcaaatattaaaagaaaacaagttaatgtttttataatctatgaatatggtaaagatggataacattgactatcaaattaatttttaatgcgtaataaaactatgagaaaatttaaaagtgggaagaaa

SEQ ID NO: 129397 - DNA, 568 bp, Homo sapiens
tcccaggtagcaagaataatacccaatatgtagtttttcaactctttcccctcttcctccatcctccctctgctactctgtggtgtctgtttytctcatctttatgtccatgtgtactcgatgcttagctcccccttgtaggtgagaacatgtggtatttggttttctgtttcagtgttaattcacttaggataatggcctccaactgcattcatgctgctgcaaaggatgtgactttcttcttattagctgcatatattttgtggtggatttgtaccacatttactttatctagtccaaagttgttgggcacccaggtggattccatgtctttgctattgtgaatagcactgggacaacccatacaagttcatgtgtctttttggtaaaacaatgtattttcctttgggcatatatgcggtgatggaattgctggatcgagtggtagtttaactcttagttctttgagaaatccccagactgttctccacagtggctggactaagttgcattcccaccagcagtgtagaagtgttccccattctctgtagcctcaccagcacatgtt

SEQ ID NO: 129398 - DNA, 488 bp, Homo sapiens
gacaccagaatgttatttttatgttaaaacagggataaatacattggatttacatgcatatataagtatatattttataaatatttaaataagcatacttaaaatggcaaaaacataatccatatataattttcttatggcaggaggaggaaacagggcaaggcacagggataaaagttattctgaatacatcttattttatatttttgactttgaaatcatgtagctgttttatgtaacttaaaaatgtaattaaattaacagaaaaaaattacaactgctaaaaatcaagatctggcattttaattaagttataaaacatcggagaaaagaattgtttcataggacactaacatacagacaaattcayttggaacccaatgaattaatgggcctaagataacaaccaatagaagctaaaatgacgagtaactgtttcagaagaaaacatatatggaatgaatcagctgaaaatacctgaacctact

SEQ ID NO: 129399 - DNA, 526 bp, Homo sapiens
tatatttgaaactattaaaataattttaaaatgactaagtatttgattatatcaaatatagacaataataaccttgaatgtacatggattaaatgtccacttaggggctgggtgtggtggctcatgactataattccagcactttgggaggccaaggcagaaggattgcttgaggtcagaggttcaagtgcagcctggtcaacacagtgagaccctatctgtacaaaaaacaaacaaaaataaaaaattaactaattttaaaaaatatatatttcttctaaattctccacctgaaagatatagactgactgaatgaattttaactatgacctgactatgtgcttccctgaacaaatgcactttacctgtaaaacacatattaactaaaagaaaagagatggaaaaaggtattccatgaacagaaaccaaaatgagtaggagtagctatacttmtgtcagacaaaacagactttaagtcaaaactagctttagaaaaaagacaaaaatgcttattatacaacgataa

SEQ ID NO: 129400 - DNA, 361 bp, Homo sapiens
aaatctcttaccagttttatctcctatgaaagtccttcacactttctctcatttaaactttattgcattttcctcactttttctcacttcacttttgaattccctattcttttatcctctgttaatttttaagtattayatttgtgatactattttttctttttttctattttttatctttcatttcattttggcctatttttttctcttaagaactttaatatcaccaaataacatgcgtgctacaaactgttttgtagttcaaagaaaaaggagataaacatagagttatggcatagacttaatctggcagagagacaagcataaataatggtattttatattaggaataaacctaaca

SEQ ID NO: 129401 - DNA, 586 bp, Homo sapiens
gtgagccgagatcgtgccactgcctccagcctggcaacagagtgagactccagctcaaaaaaaagaaagaaacccgactccgaattttgaattttgatattttcctggactaccaatatgtggcacaatgctctctcacaatgttgtgcaacagcggtgagctgcagcttccagtcagccaaatgataataaaggtagataatccatcttgatatcttcctgaagaacataatgcctgcctaccatcaacaggcatcaatactttctaccagctattctcaaccctcatgatcggaagagacagagactgactgtgtcaaagtattagtcccatcattcagcaattaaccttagctcaatgcttcaaaaattcttcaggccctgtgtaatttcagctacgtacattaatgataagtacccatacaaccattctgtttcttattttcagtaccatatttaataaatatcagttattcaatactttatttagacattttgttagattattttgaccaactgaagyctaatctaaatgttctgagcatgttcaaagtaagctaggccaacctataattttcggtgtgct

SEQ ID NO: 129402 - DNA, 525 bp, Homo sapiens
cacagcaaaagaagctaccaacaaagtaaacagacaacctacagaatgggagaaaatatttgccaactgtaagtctgacaaaaatctaatatctggcagctataaggaacttaaatttacaagacaaaaacaaccccattaaaaagtgggcaaagaacatgaatagacactctcaaaagaagatatacatatggttaacaagcatatgaaaaaaaagctcaatatactgagcattagagaaatgcaaatcaaaaccatattgagatatcatctcataccaggcagaatggctattattaaaaagtcaaaaataacagatatcggtgaggttacagagaaaagggaacacttatacactgttggtgggactgtaaattatttcaaccattgtggaaagcagyatgggatggcgattcctcaaaaagccaaaaacagaactgtcattcaacccagcaattccattactgggtatatacccagaagaatataaatcgttctaccataaagacgcatgcatgagaatgt

SEQ ID NO: 129403 - DNA, 525 bp, Homo sapiens
cacagcaaaagaagctaccaacaaagtaaacagacaacctacagaatgggagaaaatatttgccaactgtaagtctgacaaaaatctaatatctggcagctataaggaacttaaatttacaagacaaaaacaaccccattaaaaagtgggcaaagaacatgaatagacactctcaaaagaagatatacatatggttaacaagcatatgaaaaaaaagctcaatatactgagcattagagaaatgcaaatcaaaaccatattgagatatcatctcataccaggcagaatggctattattaaaaagtcaaaaataacagatatcggtgaggttacagagaaaagggaacacttatacactgttggtgggactgtaaattatttcaaccattgtggaaagcagcatgggatggcgattcctcaaaaagccaaaaacagaactrtcattcaacccagcaattccattactgggtatatacccagaagaatataaatcgttctaccataaagacgcatgcatgagaatgt

SEQ ID NO: 129404 - DNA, 595 bp, Homo sapiens
aatttaaattttcaaaaacaaaaataaagacaaagtgggaaaaatatgtatgcttcatgtgtgacaagccactgatacctattaaatatgaagaatattataaatcatattaataaccacaacattcaagctgtcagtttgaatagacaatgtaaatgacaaaactacatactcaacaagataacagcaaaccagcttcgacagcacgttaaaggggtcatacaacataatcgagtagaatttatctctgagatgcaagaatggttcaaaatatggaaatcaataaatgtgatatgccacactaccagaataaaaaataaaaatcatattatcatctcaatagatgcagaaaaagcattaacaaaagtaaacattctttcataataagacatcagataaaacaaattaggaatagaaggaatgtaccrcaacacaataaaggccatatataacaagcccacagctaacatcataatagtaaaatcatcacaatggtaaaaaaaatgaaagcttttcctctaaggtcagaaataatataaaggttcccactcttgctatttctattccatatagtactaaaagtcctagccaggac

SEQ ID NO: 129405 - DNA, 260 bp, Homo sapiens
acattgactatcaaattaatttttaatgcgtaataaaactatgagaaaatttaaaagtgrgaagaaactacttgtaactcacataatagactagtacttctaacacatagggaacttctaaaacaaaacccaaaatattaataggaaaatgggcaaaacagttaaacttacagttcatacataaggagaatcagtcttttttttttttttacagttgtaggcagaaaacttttatttttcatttatttgtaaaatttacc

SEQ ID NO: 129406 - DNA, 260 bp, Homo sapiens
acattgactatcaaattaatttttaatgcgtaataaaactatgagaaaatttaaaagtgagaagaaactacttgtaactcacataatagactagyacttctaacacatagggaacttctaaaacaaaacccaaaatattaataggaaaatgggcaaaacagttaaacttacagttcatacataaggagaatcagtcttttttttttttttacagttgtaggcagaaaacttttatttttcatttatttgtaaaatttacc

SEQ ID NO: 129407 - DNA, 525 bp, Homo sapiens
atgaccatatttggggttttctttctaatttcattataggttcagagggtacatgtgcaggtttgagacaaaggtatattgcatgatactaaggtytggagtacaaatgatcccacctcccaggtagcaagaataatacccaatatgtagtttttcaactctttcccctcttcctccatcctccctctgctactctgtggtgtctgtttttctcatctttatgtccatgtgtactcgatgtttagctcccccttgtaggtgagaacatgtggtatttggttttctgtttcagtgttaattcacttaggataatggcctccaactgcattcatgctgctgcaaaggatgtgactttcttcttattagctgcatatattttgtggtggatttgtaccacatttactttatctagtccaaagttgttgggcacccaggtggattccatgtctttgctattgtgaatagcactgggacaacccatacaagttcatgtgtctttttggtaaaacaatgtattttcctttg

SEQ ID NO: 129408 - DNA, 525 bp, Homo sapiens
atgaccatatttggggttttctttctaatttcattataggttcagagggtacatgtgcaggtttgagacaaaggtatattgcatgatactaaggtttggagtacaaatgatyccacctcccaggtagcaagaataatacccaatatgtagtttttcaactctttcccctcttcctccatcctccctctgctactctgtggtgtctgtttttctcatctttatgtccatgtgtactcgatgtttagctcccccttgtaggtgagaacatgtggtatttggttttctgtttcagtgttaattcacttaggataatggcctccaactgcattcatgctgctgcaaaggatgtgactttcttcttattagctgcatatattttgtggtggatttgtaccacatttactttatctagtccaaagttgttgggcacccaggtggattccatgtctttgctattgtgaatagcactgggacaacccatacaagttcatgtgtctttttggtaaaacaatgtattttcctttg

SEQ ID NO: 129409 - DNA, 525 bp, Homo sapiens
atgaccatatttggggttttctttctaatttcattataggttcagagggtacatgtgcaggtttgagacaaaggtatattgcatgatactaaggtttggagtacaaatgatcccacctcccaggtagcaagaataatacccaatatgtagtttttcaactctttcccctcttcctccatcctccctctgctactctgtggtgtctgtttytctcatctttatgtccatgtgtactcgatgtttagctcccccttgtaggtgagaacatgtggtatttggttttctgtttcagtgttaattcacttaggataatggcctccaactgcattcatgctgctgcaaaggatgtgactttcttcttattagctgcatatattttgtggtggatttgtaccacatttactttatctagtccaaagttgttgggcacccaggtggattccatgtctttgctattgtgaatagcactgggacaacccatacaagttcatgtgtctttttggtaaaacaatgtattttcctttg

SEQ ID NO: 129410 - DNA, 525 bp, Homo sapiens
atgaccatatttggggttttctttctaatttcattataggttcagagggtacatgtgcaggtttgagacaaaggtatattgcatgatactaaggtttggagtacaaatgatcccacctcccaggtagcaagaataatacccaatatgtagtttttcaactctttcccctcttcctccatcctccctctgctactctgtggtgtctgtttttctcatctttatgtccatgtgtactcgatgyttagctcccccttgtaggtgagaacatgtggtatttggttttctgtttcagtgttaattcacttaggataatggcctccaactgcattcatgctgctgcaaaggatgtgactttcttcttattagctgcatatattttgtggtggatttgtaccacatttactttatctagtccaaagttgttgggcacccaggtggattccatgtctttgctattgtgaatagcactgggacaacccatacaagttcatgtgtctttttggtaaaacaatgtattttcctttg

SEQ ID NO: 129411 - DNA, 349 bp, Homo sapiens
gaatattcaacaggatgaatatcctggattattcagcaaatacacagagctaaaaagcaggagaaaggaattcatatatatttttaaaaactaaaaagatatattagcygatgcaactttgaaacttctttagatcctgattcaaatagagcaaatttaacaaatatatttgaaactattaaaataatttaaaaatgactaagtatttgattatatcaaatatagacaataataaccttgaatgtacatggattaaatgtccacttaggggctgggtgtggtggctcatgactataattccagcactttgggaggccaaggcagaaggattgcttgaggtcagaggttc

SEQ ID NO: 129412 - DNA, 349 bp, Homo sapiens
gaatattcaacaggatgaatatcctggattattcagcaaatacacagagctaaaaagcaggagaaaggaattcatatatatttttaaaaactaaaaagatatattagctratgcaactttgaaacttctttagatcctgattcaaatagagcaaatttaacaaatatatttgaaactattaaaataatttaaaaatgactaagtatttgattatatcaaatatagacaataataaccttgaatgtacatggattaaatgtccacttaggggctgggtgtggtggctcatgactataattccagcactttgggaggccaaggcagaaggattgcttgaggtcagaggttc

SEQ ID NO: 129413 - DNA, 349 bp, Homo sapiens
gaatattcaacaggatgaatatcctggattattcagcaaatacacagagctaaaaagcaggagaaaggaattcatatatatttttaaaaactaaaaagatatattagctgatgcaactttgaaacttctttagatcctgattcaaatagagcaaatttaacaaatatatttgaaactattaaaataatttwaaaatgactaagtatttgattatatcaaatatagacaataataaccttgaatgtacatggattaaatgtccacttaggggctgggtgtggtggctcatgactataattccagcactttgggaggccaaggcagaaggattgcttgaggtcagaggttc

SEQ ID NO: 129414 - DNA, 542 bp, Homo sapiens
ataaaataagaagccaaaaaacagatcaaatcagtaaaccaaaaatcttgttctttaaacaaatcaacaaagttgacaaaaaaattagatcttttaatcatgaataaaaaaaaagagaaagcacaaaaatgaataaggaatggtgagagaaataactattgataatcagcaaataaaaaatcattaaaaacaatgttgttcacatctatgaaaaacattgaaagctagagggaatgggtaattttctagaaaaatacaattcaccacaactgacttcaaaaaaaaaaaaaagaagtacagcacttatgtgagcaatttccatagagaaatacagttgtcatggaattataacacacacacaaacactaggtttagatgttttcacggagaattccaccaaacctttagaaatcagatcrtccaaaggcaaattaacaaccctcagccatttgcggcaaaatattacaattgaggcaagatatactgtactgaaaacttgaggaaaaagcaggagagaaagttcctttgggaaattcgaatac

SEQ ID NO: 129415 - DNA, 508 bp, Homo sapiens
aagactaaatcatagtgtcttggaatgcatgcatgaaggacacagccgtgaaaatgcaaggacgcctctactggaacagtcacgtttatcgtcacttttcaggagaaaggtggctgcaactgaggagagtcacatgcaggacttcagggctggcaaagtcctatatcttgacttatgtgatgattacagggatgtttacaaaaatcaaactataagtttgttttgtgccatgttttgtattgtgtgtgtgtgttttgtttttcaacttaaaaatamataaaatcaaaaccaaggcttcattatcaagtagcacaaagtctccaatctataacctcctttgtctggatatctgcatttaactaccattgccagagctaatcctgacaatgcattcatatttttaacactgaaacacagtaaacagggaaaattttgctcctctaaaacagggcatcttcaggcaatcagaacaactcagaaagtttctgtctgttgcataaaactcccc

SEQ ID NO: 129416 - DNA, 501 bp, Homo sapiens
attcctcagatctattgttgatgaacacttgaaatttttccagtttttaaccattacaaacaatgctgctatgaacattcttttgtaaatcacctggttcatatgtgcaagatatcctctggggtatatatttaaaagtaaaattattgagttattcaacattaccatgaratgctacactattttttttaacaatcctaccaatttacacttctaccacgaacagataagcattaccgttggtcttcatttgtaggaaccatatttgtcttttgctctgggggctttgttttgttttgctttgttttttgcttagaagtgctttggctattagggatctttttttggctccatgtgaactttaggatttttttttaattttgtgagaaataacgttggtaatttgatgggaattgcattaactctatagattgtatgggtgatatggtcactttagctattgatttttctaatccatgagcatgggatgtttttccattt

SEQ ID NO: 129417 - DNA, 494 bp, Homo sapiens
agatctattgttgatgaacacttgaaatttttccagtttttaaccattacaaacaatgctgctatgaacattcttttgtaaatcacctggttcatatgtgcaagatatcctctggggtatatatttaaaagtaaaattattgagttattcaacattaccatgagatgctacactattttttttaacaatcctaccaatttacacttctaccacgaacagataagcattaccrttggtcttcatttgtaggaaccatatttgtcttttgctctgggggctttgttttgttttgctttgttttttgcttagaagtgctttggctattagggatctttttttggctccatgtgaactttaggatttttttttaattttgtgagaaataacgttggtaatttgatgggaattgcattaactctatagattgtatgggtgatatggtcactttagctattgatttttctaatccatgagcatgggatgtttttccattt

SEQ ID NO: 129418 - DNA, 583 bp, Homo sapiens
ttgatagagattgcattcaatatgtacatcactttggatagtatgracatttcaaacatattactttttccaatccatgaacatgagatatctttccatttatttgtggcttcttcaattgttttcatcaatgttttgtagttttcagtgtaaagatcattcacctctttgtttaaatttacatctaagtattttttgttgctattataaataggattgttttcttgatttctttttttgtatagtttgttgttgatgtgtagaaatgctaccgaattttgtatgttcacattgtatcctgcaactttactaaattcatttatgaattctaaattttttggcagagttattggtgttttctatatataagatcatgtcaactgcaaacagaaacaatttaacttcttcctttccaattttcatgccttttatttctttcttttgcctaattgctctggctaggacatccagtactatgttgaatagaagttctgagagtgggcacccttgtatgaagttttccacaacatctcttatctttttattagctatatattaatacggatgtttcttcttcatcagg

SEQ ID NO: 129419 - DNA, 583 bp, Homo sapiens
ttgatagagattgcattcaatatgtacatcactttggatagtatggacatttcaaacatattactttttccaatccatgaacatgagatatctttccatttatttgtggcttcttcaattgttttcatcaatgttttgtagttttcagtgtaaagatcattcacctctttgtttaaatttacatctaagtattttttgttgctattataaataggattgttttcttgatttctttttttgtatagtttgttgttgatgtgtagaaatgctacygaattttgtatgttcacattgtatcctgcaactttactaaattcatttatgaattctaaattttttggcagagttattggtgttttctatatataagatcatgtcaactgcaaacagaaacaatttaacttcttcctttccaattttcatgccttttatttctttcttttgcctaattgctctggctaggacatccagtactatgttgaatagaagttctgagagtgggcacccttgtatgaagttttccacaacatctcttatctttttattagctatatattaatacggatgtttcttcttcatcagg

SEQ ID NO: 129420 - DNA, 583 bp, Homo sapiens
ccccattgagatcttaaaagcacatataatgtgcctgtgcttaacttaaggtgcttaggacaaagaaggcgattgacatctttcaggtaaaacctgktaagtttggtggtcaaggaacacaactgagacatcacttggatgtatttctatgactattttaagaaacataaattgtggtgactcactcagctcacttttaactactgcatggtaattaaagatgcaaaataaaataagttacaagaagtgaggttttttattggttaaagcaatttttctatattttctccgcaagttggtcataaaagttctaagcattcctctttttataaaatcgaagcattattacttactctcttgttaacctatctggattttaattttgtaactttattatatttgttttgctgtgattctttaaaaagcacctttagactcagtgagatagcaaaaatatccaaataggccaaaaaattgtggcaatgtcctctcactcaggaaaattctgtgtgttttctctaatggccaagggaaaacttgtgagactataaaagttagtctcagtacacaaagctcagactgg

SEQ ID NO: 129421 - DNA, 583 bp, Homo sapiens
ccccattgagatcttaaaagcacatataatgtgcctgtgcttaacttaaggtgcttaggacaaagaaggcgattgacatctttcaggtaaaacctggtaagtttggtggtcaaggaacacaactgagacatcacttggatgtatttctatgactattttaagaaacataaattgtggtgactcactcagctcacttttaactactgcatggtaattaaagatgcaaaataaaataagttacaagaagtgaggttttttattggttaaagcaatttttctatattttctccrcaagttggtcataaaagttctaagcattcctctttttataaaatcgaagcattattacttactctcttgttaacctatctggattttaattttgtaactttattatatttgttttgctgtgattctttaaaaagcacctttagactcagtgagatagcaaaaatatccaaataggccaaaaaattgtggcaatgtcctctcactcaggaaaattctgtgtgttttctctaatggccaagggaaaacttgtgagactataaaagttagtctcagtacacaaagctcagactgg

SEQ ID NO: 129422 - DNA, 558 bp, Homo sapiens
ggacattgcttttgaaatgcaaatgatgtgtaacaccactactgggggtagtataatgaagtaatataatctcaaggatcgggatgcttaagtgtagactttggaaatgaccattcagtagaagagtgagcacagcacacctagtagaggaatggtgaaatattctcaaggaagaaaatgatctgtgaaagttagggccccaaagacatgagtagagctcatgttcaaaaggaaaagaaaaacacaaccagggaaagagtcctgttctacaggccagaaagaaagtgrgaaaatgagattcacagaaggtccagcataagccacacttggagtcctaagctctgggagcaagatggctgttatattagcttaatttggatcagactatagaaaaaaaaatgcaaaaggaaaaatttaaatattaaatgcttacaaggagtgacggcaaatgactttcagaaagggctatttggtacatttcaacctgtactgttatctcagctgtagtaatggtagtggagctctttagaatttagtcttgagccataatatttcaaa

SEQ ID NO: 129423 - DNA, 619 bp, Homo sapiens
agattgaatgtcctagaaaggaataaaacaaaacatttaggaactgacaattacaactgaagcttacaatacaatagttaaacttagyggcaaattaaatgtagctaaagaagaaatcattgaactggaatataggtccaaagaaaataattagattgaagcatgaaaaaagaaaggacaaaaaatacaaaaagaaaataaaaagcatatggaagtagtgaaaaggactcccagaaaaagataaagcccagactggatagaaacaacacttatagtggccaataattttcccaaactctttaaagacatcaaaacacaaatacataaagcaccataaaggacaacagcaagcaaacaaacaaatataaagagaattaaaacacatgaaatgataagactaagtaaaagccccataatcttgaatttgaaatgaaaatatttatgctagctcatgatgtattttatgcttcaggagtttttaaggatacataccaaaatgtttataggtaaactgataacatgtctgggatttacttcaaaataatttgaggctgggggtgggttgagatgtatagatgtacaaaattgatattgataactgttggaggttggtggtgag

SEQ ID NO: 129424 - DNA, 619 bp, Homo sapiens
agattgaatgtcctagaaaggaataaaacaaaacatttaggaactgacaattacaactgaagcttacaatacaatagttaaacttagcggcaaattaaatgtagctaaagaagaaatcattgaactggaatataggtccaaagaaaataattagattgaagcatgaaaaaagaaaggacraaaaatacaaaaagaaaataaaaagcatatggaagtagtgaaaaggactcccagaaaaagataaagcccagactggatagaaacaacacttatagtggccaataattttcccaaactctttaaagacatcaaaacacaaatacataaagcaccataaaggacaacagcaagcaaacaaacaaatataaagagaattaaaacacatgaaatgataagactaagtaaaagccccataatcttgaatttgaaatgaaaatatttatgctagctcatgatgtattttatgcttcaggagtttttaaggatacataccaaaatgtttataggtaaactgataacatgtctgggatttacttcaaaataatttgaggctgggggtgggttgagatgtatagatgtacaaaattgatattgataactgttggaggttggtggtgag

SEQ ID NO: 129425 - DNA, 601 bp, Homo sapiens
aatacccaatgtgttcatccatgtgtaacaagaagtgtcagcaactgcgtagattcctccttattcagctaccatgtaatctagaactattctattatctactaaacctttatcagagaatgtaaagaaatctgttgtgtaactatagcctttgcagcaaaattttctgtggagactattatgaaaaacacatttttaatcattgcctcatttatatttactctaagccatgaataaaaggrcctaacaaataatgcccacctagaaagttgaaggcctcctgtcaatggtctcttaaacctttgacaaaagtaaacaggagtggaccaatgttttgtttatgactgattttgaagcaacaaatgtctcactgaaatgcctagcctatatttgcccttcatcttccatccataaagcgtaaggttgaccatgcattaggttagttgtgaaatcctctgcaaataaaagtataccacatgggtgaacacaaagccctttctttaccagttgttcatggatgcataaacaataaaaagataaggaggtaagagttttataatggcagaaaagtctttatccatgattttagggaagctgtcca

SEQ ID NO: 129426 - DNA, 601 bp, Homo sapiens
aatacccaatgtgttcatccatgtgtaacaagaagtgtcagcaactgcgtagattcctccttattcagctaccatgtaatctagaactattctattatctactaaacctttatcagagaatgtaaagaaatctgttgtgtaactatagcctttgcagcaaaattttctgtggagactattatgaaaaacacatttttaatcattgcctcatttatatttactctaagccatgaataaaaggacctaacaaataatgcccacctagaaagttgaaggcctcctgtcaatggtctcttaaacctttgacaaaagtaaacaggagtggaccaatgttttgtttatgactgaytttgaagcaacaaatgtctcactgaaatgcctagcctatatttgcccttcatcttccatccataaagcgtaaggttgaccatgcattaggttagttgtgaaatcctctgcaaataaaagtataccacatgggtgaacacaaagccctttctttaccagttgttcatggatgcataaacaataaaaagataaggaggtaagagttttataatggcagaaaagtctttatccatgattttagggaagctgtcca

SEQ ID NO: 129427 - DNA, 601 bp, Homo sapiens
aatacccaatgtgttcatccatgtgtaacaagaagtgtcagcaactgcgtagattcctccttattcagctaccatgtaatctagaactattctattatctactaaacctttatcagagaatgtaaagaaatctgttgtgtaactatagcctttgcagcaaaattttctgtggagactattatgaaaaacacatttttaatcattgcctcatttatatttactctaagccatgaataaaaggacctaacaaataatgcccacctagaaagttgaaggcctcctgtcaatggtctcttaaacctttgacaaaagtaaacaggagtggaccaatgttttgtttatgactgatwttgaagcaacaaatgtctcactgaaatgcctagcctatatttgcccttcatcttccatccataaagcgtaaggttgaccatgcattaggttagttgtgaaatcctctgcaaataaaagtataccacatgggtgaacacaaagccctttctttaccagttgttcatggatgcataaacaataaaaagataaggaggtaagagttttataatggcagaaaagtctttatccatgattttagggaagctgtcca

SEQ ID NO: 129428 - DNA, 612 bp, Homo sapiens
atctgtaatgctttatttaactattttgaaacttttccagtgaaacaaatacttctattgcaagagattctttcaggaatgccccatgaaggaaacacattttctataaatattttagctactgttacagcattggccctgctacaggggagtgcttctatacaaccataaaatatgcacttaaagtggcaattgaaaaaaatccctctagaaatgttcaaatggcccattaggtagcagaaatatacctaaaatttttattgtcttcctaggattatgggtttgacaaaccaaacaytggtcatataccattttagcaatttagaacagtcattacactaattttaaaaaatatatatttgtatcattttatctcttccatcatgagacatggagtacagagcttttgataatggaagttttaagaactcagaaaggaccatgtggccatccaggatcttcatgaatccaagctgaacgttggatttatttgttcttaaataccaattttgtttctccaattcaggtgcatggcactatttattaaattagtttttataggtcatttaacttggatcatgaagttcattcaagatgcatatcttaacaatt

SEQ ID NO: 129429 - DNA, 408 bp, Homo sapiens
tctaaggggagaagggatataaagtcctgctaaggggacttccttctctaccactcatggagctgttcctgtacttcctggtgacacacctatggcactctccagaaaataaagcctatatcctcttaggggaatctacacaaagagcacaaacagaaaagctccagcaagatgtggggcaaaaggaggttcttgggcacaaccctgtggaagatgaagcttatarcattgttctagttatctatcgttatatgacaaaccccaaagcttaatggcttaaaacaacaactctttttgttattatagctcacaatttcagggatccagaatttgggcagggctctattgggcaatttttctgtttcacatggcaatgactaggttgatttagtggtagtcagcttgcac

SEQ ID NO: 129430 - DNA, 594 bp, Homo sapiens
ttttggctaaccatgccctgttcctagctcactattagacataaaaggctatgtgggagccctgagcaggcctcgccccactcctatggagaaggaacaatagtccttgaggatgaaggtggatgggaagaggatctagagaagaacgggaaagagaattgtaaatgagtaaaacttgtaaggctcttataactgaagcacagacattctgtctgtgtgaggacagatatatcccattaattgagcacctactatgtgccagacaatttgccaacctctttacaaaaaatcatttccattttaaaagtaagattgctaaccttcacagaagtttagcagtcttcaaaggtcataacaataataagtagccaaagcagaattgtaacccctgcctattccacattcagaacatcagattgccttttcctgtagttatgaaaaagtgaacaccagcttaratatacagttaacctatcagatctagcacgttaatttcaatgtgaagtcatctgcagtgactcagtatcagccatatttgaaagctggcagtgactgaaaatgctcttgatagctcagagccatgagtttgacagg

SEQ ID NO: 129431 - DNA, 596 bp, Homo sapiens
ccaccacttcagagagtgcaagctataagttttggtggcttccacatggttttgggtctacaggtacacagtatagaagactgaagaatgcttggcagcttctacctaaatttcagggaatgtatgggaaagcctagttatccaagaaggagcctgctacagagacaggactcacacagggatcctctactagggcagtgttgaggggaaatgtggggttggagcccccgcatagggtgcctatcagggcactgcctagtggagctgtggcaagggggccattgcccttcagacctcagaatgaaaaagccataggcacacaactctaatccatgagtgcagccacatgggctataccctacaaagccacaggagtggaaatgctcaacgacttgagaacccaccccttycaccagtatgccctggatataggacatggagtcaaatgttattttggagctttaaaatttaatgtcttccctgctgggttttggacttcatggataggtgttgctgttctcacagtaatgagtgagttcttactctatgagttcatatgaaatctggttgtttaagagcatggcacttacccccaa

SEQ ID NO: 129432 - DNA, 550 bp, Homo sapiens
gtctctccaatagaaactcttcctatgtctgcccagagtaattccttaactgtgatggacaaagagctgtggcatcattgctttccattttttgaatgaaagttatggtgcagtaatcctttccctgctccagcaggtgagggggtggcagagaggggccaataatttgtcattttgttcctagattgccagaccaagaggagctatgtcttggtctgcaaaaaagaaccagacrttgccacaaatcctgggcttgagctgaatgcagggactggtgggtttctctgttgtgtcccttggagagggagtgaagacttcttatgcagtgcctctcaacatattctaaccttcctgcctgctaggcttgccatgtgttgtgttccagacagtaaaatttaagcagaagttctgactttcttactgctgggctaaggtagttacgtactagtgtactagtgtgtctccccacaatgaacctcccaccttcttcccacaaagcccaagggataaaattcagggcaaattagaatccaaaagaaggagccacaaa

SEQ ID NO: 129433 - DNA, 550 bp, Homo sapiens
gtctctccaatagaaactcttcctatgtctgcccagagtaattccttaactgtgatggacaaagagctgtggcatcattgctttccattttttgaatgaaagttatggtgcagtaatcctttccctgctccagcaggtgagggggtggcagagaggggccaataatttgtcattttgttcctagattgccagaccaagaggagctatgtcttggtctgcaaaaaagaaccagacattgccacaaatcctgggcttgagctgaatgcagggactggtgggtttctctrttgtgtcccttggagagggagtgaagacttcttatgcagtgcctctcaacatattctaaccttcctgcctgctaggcttgccatgtgttgtgttccagacagtaaaatttaagcagaagttctgactttcttactgctgggctaaggtagttacgtactagtgtactagtgtgtctccccacaatgaacctcccaccttcttcccacaaagcccaagggataaaattcagggcaaattagaatccaaaagaaggagccacaaa

SEQ ID NO: 129434 - DNA, 500 bp, Homo sapiens
ttcgttttagtttagaaaatgttccatttcggagtcccattcaaaagctatatatataatttccaagcccagagtcatatttgaatatctgaatgatggcatgtgacaaatctcattttctgttttgaagaaaattaactttagaaargtttctttcctgttttatattgggggtggggatcattggggaaccctcaaaagacttcttacatggctgacaactcttgaaaagatatatattttttattttatcttaatgagcaggacacatatggagcctatttcccatccatttcacatggtttttctaatgaataagtgtttacatgcttggcagagtaccctgggcatttgcttgaccccaaaatatttgaaatatgatttcagttgtttgtccaaccctccctgtcctagtgagtaattgataattgattttttttttcaggggcttgggagggcaagagtaggtgtcataagtagctttgaccttgagaagtctg

SEQ ID NO: 129435 - DNA, 596 bp, Homo sapiens
ggagagtaagcagtgtgggaaaatgcccaaaatagctctacttgtttaagatttccttattgataattgcagcatataaaacgtatatatagaaacttcttgggctgcctgcatttacttgtttcagttagcacacccttttatttaggcccccgctagctccatggctgtgcctcagtttacagtgagagtaaactgcacgatgaaagaaagccaaccatatgctgccactgcagtatgggtgtgtgtgtgtgtgtgtgtgtgggtttgtgtgcatgtggacattcgagtcacagagccagttaggagtgcctggaagcactggcaccctgaggatgttctagctgtctctggcgccatgcttattcggctgctgtccctaccacaaaattggctttcagtaccataccttgaacatcaggagagggtctttatcctaaaatcctggggccaagatattaagaaagtyctttatagtttcataactgtttttagtaggcagtgtggctttattccttctttgattgggaaatggagggggttgttcataggctagaacagaggaaacaacttatccccctgagccctatcaacca

SEQ ID NO: 129436 - DNA, 609 bp, Homo sapiens
accttttaaagcctcttgtgtgctatgtatagctggtatattggaaatgtttatcaaggccccaccccttatctgagattttctgtttcccattggtaatctgttagctcatacaatttcaactggggtcagagatatactgacttcatttaaatattatttcccccaagctgtcatgaatacgaggcaagtgtgtctaatagatttctaccaaaagtatttgagggatatcagaggatttacaggaacaaattctagttgctagtcggaagtttctattcccaatacgatttctccaccatcctctaaascagagaaaatttactagtatgtccctccttatgggacctggcctcctaccactttaccaactcgcttctctttcctctcttctctcctctcagtttcagggctctcactttccattaaacattcaagacttctgtttcactagtaagcagagcaatttgtctttgccttgcctcaaccttctcctcccagactaggccaaagccttgtgtttcatattcaaaagggccatttacaagagagccattttgtggagattaagctctctcagtgcagaattggtgacagtcactaagtata

SEQ ID NO: 129437 - DNA, 609 bp, Homo sapiens
accttttaaagcctcttgtgtgctatgtatagctggtatattggaaatgtttatcaaggccccaccccttatctgagattttctgtttcccattggtaatctgttagctcatacaatttcaactggggtcagagatatactgacttcatttaaatattatttcccccaagctgtcatgaatacgaggcaagtgtgtctaatagatttctaccaaaagtatttgagggatatcagaggatttacaggaacaaattctagttgctagtcggaagtttctattcccaatacgatttctccaccatcctctaaagcagagaaaatttactagtatgtccctccttatgggacctggcctcctaccactttaccaactcgcttctctttcctctcttctctcctctcagtttcwgggctctcactttccattaaacattcaagacttctgtttcactagtaagcagagcaatttgtctttgccttgcctcaaccttctcctcccagactaggccaaagccttgtgtttcatattcaaaagggccatttacaagagagccattttgtggagattaagctctctcagtgcagaattggtgacagtcactaagtata

SEQ ID NO: 129438 - DNA, 614 bp, Homo sapiens
ctttctgctcaatatatacatgattctaaagctgttctataagataaagtctattaaaaatttcaagcatctgcaaattagtaggaaaagcattttgaagaacaagagatatatccaaaggcccgtatatttatatcactggaagctactttgctaaggtcttccaactcagagcccaggcactttggctgtggggttatcactgattattttgctttatctacttattaatgtcagctatgtcacctggagcacatcatttaatcagtttcatgtctccttcatgggattgttgtgatgacaaaagagtgcatattctgacagaagagcttactaaattrtagctattgtgattttttttcattatttaatataccccagaggaatttcatggggagtagagaaatttgaaaacgaaaaagagaacagccaatgtttttctatacctgccacacacacacatatacatacaaatattcctgtcttgtagctggtttatttaaaatccagtgcatttatagaaatgccttcccacagaaaaacattaccacatgtcagatctgatggaatagttacgagttcagaaccatagcatcttagccctgttttccaga

SEQ ID NO: 129439 - DNA, 534 bp, Homo sapiens
attcaaattttatcatcattaaaargtattaaatatttttgatgactttttttatattgtgtcatcattcattaagaaaagcatctttaaattctctggatgattaaaatactggtttaattgcattgtgtcagatgaaacttgtatccttttccactttgaaaaaattattaaaggttttttttgtgacccatggcaagattaatagaattcattttctacttataaaatatttgatataaatacactaaataaagccttacaatttagaatactcttacttagtatttcctatttgaccttccataccctggaaaatgacttttaaatttttccattctaattgctattttatcagtttaatttttgaagacaattgaagattccttgctatgtaaattattagattaaatacctgcttccttaggaaattaatctcagtaagaataagcagtactttaccatgaaagtaaattgtcagatgcctcaaatattgagaacactgctttcatgataattatattctatcctatg

SEQ ID NO: 129440 - DNA, 534 bp, Homo sapiens
attcaaattttatcatcattaaaaggtattaaatatttttgatgactttttttatattgtgtcatcattcattaagaaaagcatctttaaattctctggatgattaaaatactggtttaattgcattgtgtcaratgaaacttgtatccttttccactttgaaaaaattattaaaggttttttttgtgacccatggcaagattaatagaattcattttctacttataaaatatttgatataaatacactaaataaagccttacaatttagaatactcttacttagtatttcctatttgaccttccataccctggaaaatgacttttaaatttttccattctaattgctattttatcagtttaatttttgaagacaattgaagattccttgctatgtaaattattagattaaatacctgcttccttaggaaattaatctcagtaagaataagcagtactttaccatgaaagtaaattgtcagatgcctcaaatattgagaacactgctttcatgataattatattctatcctatg

SEQ ID NO: 129441 - DNA, 623 bp, Homo sapiens
aaaatcttaaaattgatggtcctgagaatttatgcatttgtataaatgatcaatttctcttaacagagattttaagaagagggcagaactataaatggaaatatattgcagttgcaaagcaaacaaaacaattttttgtatggatgacagagaaaggacagacggttcatgtcattcgttctagccacactaccattcacagggcattttctttgaaaatgacagccactaatacaatcaattctacctttgttcattatgtgaattttctttgtcaaaaaactaaacattagtggaagcaacagaaaaagccaattctagattcttttaaaaataattgggaggcggaggtgggtggataaccgggtcaggagattgagaccatcctggctaacacggcaaaaccycccgtctctactaaaaatacaaaaaaattagccaggcatggtggcaggtgcctgtagtcccagctactagggaggctgaggcaggagaacggcgtgaacctgggaggcggagcttgcagtgagccgagacggcactactgcactccagcctgggcaaaagagcgagactctatctcaaaaaaaaaataataataatcattatcatcatcatcaagt

SEQ ID NO: 129442 - DNA, 500 bp, Homo sapiens
gagaggaaataacattgggcatgaagagaccatgatgcatctctgacaaagtcttagccaatctaacggggagctctggagcaaagattgcctattaaaggagaactgtgttgaacagaaatggcaggctgtagtacccctgccatgctcagtcactggctggggctgctggagatttgctggcctcagatcaaaagctgagggagatgggaagaactgcactctttgtagctgaatggcgagttttgtcttgatggataatctgagtggtgcacttccagtggctgcctcacggcatatcaaaaccaaccttctttkataaatgaagacactgaagttcacagggatctttaaggcacacatcaggtagtacaacttcagtctcttgacttcagagctactgtaccatcatactgatactttgaaactttgggatcacaggactttctgagacctcaaaatagtaaaacaatatagcaagcaaaagacagagcttagag

SEQ ID NO: 129443 - DNA, 706 bp, Homo sapiens
agtaatgtgtgtgagagaaagacatacaatcatgtgtgtgtgattgtgcatgtgaatagaatgactcccatagagattgtaaatagactgcattttgagtacaaacttcaatttatactgatagtgaatttcttgagttttatattgagaactctgatactgaattcagggttagtaggaaacagtgctgaatttgattagtcatgtttgcaggaggacagaaggtggggtggcaacatatatgtcacatattagcattgctctgagtattatggtggtggggacagggaggagggtgaacagtatcatcaaaattaacaaagatcatttaagggaaatttgrattatttcagaatacttccgttagttttagcttggtccaagctaggtagagttctgaacaccctacccccaatttaagcagaaaagcctacttttatctattttaagtcattggccctgcaaacagtttcatttgaaaattttaaagggagttttactcctttacaatgaacataatagaaattttgaaaatggctgaattagaagatcctgtatattttctgactcttaacacaccagtacatacggcattctacctatgaacctggggagaaatgccccttctttttgcacctgattcattcaatatgagaaactaattttgtaatttgagggatttgcaggtaggtatgaaggtaaaaga

SEQ ID NO: 129444 - DNA, 409 bp, Homo sapiens
caaaagttttctcctagtttttttctgwaagtgttatagtgtgaggttttatgtttgtgtctatgattcatcttgagttaattttatatatgaatgagttatgaattgtttatttttgtgcttatgaatatcccattatttcaacattacttgttgagaagactgtcccttctccatcacatacatgtgggtctactcttggactctttattctattgatgtgttcgtggaacttgacaccaaaactatactgtcttgattattgtagctgaataaaagtgttagaacttttgacattaggtagtattagtactctatcttttttttcaaagttgttttggctattctagttctttgcatttccatatgaaatttaatattactttgtcaatctctacaaaaaagactc

SEQ ID NO: 129445 - DNA, 434 bp, Homo sapiens
tgcctagcccaagaccacaaaagttttctcctagtttttttctgtaagtgttatagtgtgaggttttatgtttgtgtctatgattcatcttgagttaattttatatatgaatgagttatgaattgtttatttttgtgcttatgaatatcccattatttcaacattacttgttgagaagactgtcccttctccatcacatacatgtgggtctactcttggactctttattctattgatgtgttygtggaacttgacaccaaaactatactgtcttgattattgtagctgaataaaagtgttagaacttttgacattaggtagtattagtactctatcttttttttcaaagttgttttggctattctagttctttgcatttccatatgaaatttaatattactttgtcaatctctacaaaaaagactcctgtgatt

SEQ ID NO: 129446 - DNA, 409 bp, Homo sapiens
caaaagttttctcctagtttttttctgtaagtgttatagtgtgaggttttatgtttgtgtctatgattcatcttgagttaattttatatatgaatgagttatgaattgtttatttttgtgcttatgaatatcccattatttcaacattacttgttgagaagactgtcccttctccatcacatacatgtgggtctactcttggactctttattctattgatgtgttcgtggaacttgacaccaaaactatactgtcttgattattgtagctgaataaaaktgttagaacttttgacattaggtagtattagtactctatcttttttttcaaagttgttttggctattctagttctttgcatttccatatgaaatttaatattactttgtcaatctctacaaaaaagactc

SEQ ID NO: 129447 - DNA, 409 bp, Homo sapiens
caaaagttttctcctagtttttttctgtaagtgttatagtgtgaggttttatgtttgtgtctatgattcatcttgagttaattttatatatgaatgagttatgaattgtttatttttgtgcttatgaatatcccattatttcaacattacttgttgagaagactgtcccttctccatcacatacatgtgggtctactcttggactctttattctattgatgtgttcgtggaacttgacaccaaaactatactgtcttgattattgtagctgaataaaagtrttagaacttttgacattaggtagtattagtactctatcttttttttcaaagttgttttggctattctagttctttgcatttccatatgaaatttaatattactttgtcaatctctacaaaaaagactc

SEQ ID NO: 129448 - DNA, 349 bp, Homo sapiens
tatatgaacaataaaatactaatactcttgatacataagtagcttttacagctcatttagagaacaaggtgaacaatccaaaaaaaaaaaaaaaaacctaaggacataaacaggccaattcccaggagaaaatacaaatgttcacctaygaaactggcaaagatgaaaagacaacgatcatgtcggacaaagatgtaaaggaatggtaactgctgtgaacaacctttcctgaaggaaacttggcagtatgcataaaatgccttaaaaacatatacagtcatgtgccacatcacaatgtttcagcccacaacgtttcacatatatgaaagtggtcccctaacatcagaac

SEQ ID NO: 129449 - DNA, 349 bp, Homo sapiens
tatatgaacaataaaatactaatactcttgatacataagtagcttttacagctcatttagagaacaaggtgaacaatccaaaaaaaaaaaaaaaaacctaaggacataaacaggccaattcccaggagaaaatacaaatgttcacctacgaaactggcaaagatgaaaagacracgatcatgtcggacaaagatgtaaaggaatggtaactgctgtgaacaacctttcctgaaggaaacttggcagtatgcataaaatgccttaaaaacatatacagtcatgtgccacatcacaatgtttcagcccacaacgtttcacatatatgaaagtggtcccctaacatcagaac

SEQ ID NO: 129450 - DNA, 349 bp, Homo sapiens
tatatgaacaataaaatactaatactcttgatacataagtagcttttacagctcatttagagaacaaggtgaacaatccaaaaaaaaaaaaaaaaacctaaggacataaacaggccaattcccaggagaaaatacaaatgttcacctacgaaactggcaaagatgaaaagacaacgatyatgtcggacaaagatgtaaaggaatggtaactgctgtgaacaacctttcctgaaggaaacttggcagtatgcataaaatgccttaaaaacatatacagtcatgtgccacatcacaatgtttcagcccacaacgtttcacatatatgaaagtggtcccctaacatcagaac

SEQ ID NO: 129451 - DNA, 349 bp, Homo sapiens
tatatgaacaataaaatactaatactcttgatacataagtagcttttacagctcatttagagaacaaggtgaacaatccaaaaaaaaaaaaaaaaacctaaggacataaacaggccaattcccaggagaaaatacaaatgttcacctacgaaactggcaaagatgaaaagacaacgatcatgtcggacaaagrtgtaaaggaatggtaactgctgtgaacaacctttcctgaaggaaacttggcagtatgcataaaatgccttaaaaacatatacagtcatgtgccacatcacaatgtttcagcccacaacgtttcacatatatgaaagtggtcccctaacatcagaac

SEQ ID NO: 129452 - DNA, 614 bp, Homo sapiens
acatcatattcaattaggttagaaaagtgcaatatctgtcatcatgtcataaaaatatgtgtttttctctcagatctcttataaagaaaagctccctatattgttaaggatagggctgttttcaatcagttacaaggagcaattcaattactagatggtttagtgcagtaactgactccagactaatttaatttctttaggtctctaaagatcaattgatctgatttgtcccatccccaaaggctgtttatgaaaaattcagacttaaatatctggaaatgaaatccaaaacctcggccaatttcacactacttaggtcatcttgcaaactttcagctagtcatrtaagagtgctgtctttgccctcagaccattgaaagctacttagcttcatgtacatgtgagtgctcccacatcaggatgcttatccaataagtggaaaatgtggccacatgcattatcaaatctgccgttgtaaagagcagtcagactgagtacctcctatcttgtaaaccaatgtgcaactacaaggctatttttactctaggagtagtttattaagactatgaaacatagagttacatgggataaaagttgttagatgaaatgctcat

SEQ ID NO: 129453 - DNA, 561 bp, Homo sapiens
taatactgccatactttgagcaaaggagtaacttaaattcaacatgagttttcaaatgtcttcgaattttctctcattatgagaattatctactgctaatatcattttaatccaactttcataaatcctaggagtatcagtggaaatttctttacattttgatataatttcaaacttcaggaaagttgcaagaatagtacaggtgctcttatacacccrgatttaccaattagccacagcaatgatttagttttagtgcactaattagaaaaagaattcaaaacaattacattctctatttctatttaatctaattctagggaaaataattgcttttgcacgtgagaacaggaaaaaactgaatggatctattatcactaaaattgtatgggagctctgggttgatgctacacattcctgaacagcttttatggggtattaataattagcagcacagagattgtggattaaacttctttgtgagcccaccatgttccttgtagcccactgtcactagactctgaatctactagggtgtccacaataagaaccccacaagta

SEQ ID NO: 129454 - DNA, 561 bp, Homo sapiens
taatactgccatactttgagcaaaggagtaacttaaattcaacatgagttttcaaatgtcttcgaattttctctcattatgagaattatctactgctaatatcattttaatccaactttcataaatcctaggagtatcagtggaaatttctttacattttgatataatttcaaacttcaggaaagttgcaagaatagtacaggtgctcttatacacccagatttaccaattagccacagcaatgatttarttttagtgcactaattagaaaaagaattcaaaacaattacattctctatttctatttaatctaattctagggaaaataattgcttttgcacgtgagaacaggaaaaaactgaatggatctattatcactaaaattgtatgggagctctgggttgatgctacacattcctgaacagcttttatggggtattaataattagcagcacagagattgtggattaaacttctttgtgagcccaccatgttccttgtagcccactgtcactagactctgaatctactagggtgtccacaataagaaccccacaagta

SEQ ID NO: 129455 - DNA, 561 bp, Homo sapiens
taatactgccatactttgagcaaaggagtaacttaaattcaacatgagttttcaaatgtcttcgaattttctctcattatgagaattatctactgctaatatcattttaatccaactttcataaatcctaggagtatcagtggaaatttctttacattttgatataatttcaaacttcaggaaagttgcaagaatagtacaggtgctcttatacacccagatttaccaattagccacagcaatgatttagttttagtgcactaattagaaaaagaattcaaaacaattacwttctctatttctatttaatctaattctagggaaaataattgcttttgcacgtgagaacaggaaaaaactgaatggatctattatcactaaaattgtatgggagctctgggttgatgctacacattcctgaacagcttttatggggtattaataattagcagcacagagattgtggattaaacttctttgtgagcccaccatgttccttgtagcccactgtcactagactctgaatctactagggtgtccacaataagaaccccacaagta

SEQ ID NO: 129456 - DNA, 400 bp, Homo sapiens
actaatataagaaaaaaaaattaacattcatcatatattctactgggaagataggaagaattttcaaatcacacccacccacccatacgtacacataccaaaatggaacaagccctaagctttaaataagctgcttctttccccacttctaccacctgaaggttaatttcctttgggaaaggttactggacagactcagaccccagactgagcctctaagaccccagagctccctgamtctctgctcaagccctcctgtgacttgaagactaaggaacactaatagaaacgtggactctgcttcactcaagaaataattcttgagaatatgaaagtttccttttctgaaactaaaactgcatctataagagaggcttcttcagaacctattcaaagaagc

SEQ ID NO: 129457 - DNA, 533 bp, Homo sapiens
atctttaaatgaatcaaaataatgtttttgaatgataatatgatctgtttgcataatacatttattcaaaggatttcaagcgattgatcctcagccaaatacttgaataaagttgaagcagcaaaaccaaacattttcctcctatcactaatataagaaaaaaaaattaacattcatcatatattctactgggaagataggaagaattttcaaatcacacccacccacccatacgtacacataccaaaatggaacaagccctaagctttaaataagctgcttctttccccacttctaccacctgaaggttaatttcctttgggaaaggttactggacagactcagaccccagactgagcctctaagaccccagagctccctgaatctctgctcaagccctcctgtgacttgaagactaaggaacactaatagaaacgtggactctgcttcactcaagaaataattcttgagaatawgaaagtttccttttctgaaactaaaactgcatctataagagaggcttcttcagaacc

SEQ ID NO: 129458 - DNA, 582 bp, Homo sapiens
agcataaccaaaatggtcacttggatttgactcaggaaaagttaagctcagaaactccaggcaaggctgtagggatgacccatcatcactgtataaaattacctgggattcccacggagtagcatgcccagtgtttcctgaccaagctagtgagttctagaatgactgcttttcaccaccagtactgcagcccactttgggaaataaaaatgtaagagtggaagaagggaagggtgatgatcatgagggatgaaaagcaaatattcctattgtcacccctcccaaattctagacttcgtagctcatggaactgatgccagtcctgcctctttgacaaccaggagaactttttctcaacggagacaaaggragtgaagagatcagcaccttcctcacctggagaggaactttccttccttcctggagccctctctccataagagaaaaggaaaggaggataggagggtaaaagaaaaatggggaatgtggtttacaaaaaatcagttacttcacctctgtgcctgactttcagttttctaggctttatgatgagagttagaacatttttataatattcttccc

SEQ ID NO: 129459 - DNA, 560 bp, Homo sapiens
tttgctctgcccgcggcgctccagcctctcacccaggacagtgctctgggctccagccgctgcagtggggtcgggacacagacgccgagttagaagccccgccgctgcaggtccctgcttggtcggcgcggtgacggtgtcgctggcggcggcgggggccttcctttggctgcccsgccatttaatcagagctattatcagacagggcttgcaggatggcgccggccgagctttacccccattagcacagggcaggctgggggctgggtcctgaggccaccgccggtcccggccagctgcagcttttctggggagctatgagaaaggcaggcctggtggctccggccttctctacccggccactctcaggctgacgagttattagaattttattttctagcttcccatctgaccctgaccaacttctgtgccattggagcaaatcactgaacttgtctgaatctcggtttcctcatctgtaaaattggtccagatagatacataactcgaggttgtagacattaaataagatgaggcatctgaagtgtaatgcagggacc

SEQ ID NO: 129460 - DNA, 560 bp, Homo sapiens
tttgctctgcccgcggcgctccagcctctcacccaggacagtgctctgggctccagccgctgcagtggggtcgggacacagacgccgagttagaagccccgccgctgcaggtccctgcttggtcggcgcggtgacggtgtcgctggcggcggcgggggccttcctttggctgcccggccatttaatcagagctattatcagacagggcttgcaggatggcgccggccgagctttacccccattagcacagggcaggctgggggctgggtcctgaggccaccgccggtcccggccagctgcagcttttctggggagctatgagaaaggcaggcctggtggctccggccttctctacccggccactctcaggctgacgagttattagaattttattttctagcttcccatctgaccctgaccaacttctgtgccattggagsaaatcactgaacttgtctgaatctcggtttcctcatctgtaaaattggtccagatagatacataactcgaggttgtagacattaaataagatgaggcatctgaagtgtaatgcagggacc

SEQ ID NO: 129461 - DNA, 560 bp, Homo sapiens
tttgctctgcccgcggcgctccagcctctcacccaggacagtgctctgggctccagccgctgcagtggggtcgggacacagacgccgagttagaagccccgccgctgcaggtccctgcttggtcggcgcggtgacggtgtcgctggcggcggcgggggccttcctttggctgcccggccatttaatcagagctattatcagacagggcttgcaggatggcgccggccgagctttacccccattagcacagggcaggctgggggctgggtcctgaggccaccgccggtcccggccagctgcagcttttctggggagctatgagaaaggcaggcctggtggctccggccttctctacccggccactctcaggctgacgagttattagaattttattttctagcttcccatctgaccctgaccaacttctgtgccattggagcaaatcactgaacttgtctgaatctcggtttcctcatctgtaaaattggtycagatagatacataactcgaggttgtagacattaaataagatgaggcatctgaagtgtaatgcagggacc

SEQ ID NO: 129462 - DNA, 480 bp, Homo sapiens
aaattaatgcttgacataagcccttctacatgaacactccttgggaaaagcagaaagctctctcgttttctacctctggtttcctaatttgtgcaactatacctctcctgtgtggtggctcacacatattgggctttttagtgatgatcgtgaagatggaaaaactgctctgagaactgaaacygaatttcgcaccatggttttatttggccttgagcagggaaaaaaatttggagtcttgtccttgcttgccttcaaggattcaacttctggtggagcttcttctcatctgggttgcaccacagtcatctttgtattttaagtttgacagaactccacctggaattcactcttttggaggggagaaaatggggcaacacttacatatgatcagataaaatgtaagtatttgaaacaaaacttttaaggaagaggagttagttgagataatgtgtacatcaattaggattctatactgtg

SEQ ID NO: 129463 - DNA, 480 bp, Homo sapiens
aaattaatgcttgacataagcccttctacatgaacactccttgggaaaagcagaaagctctctcgttttctacctctggtttcctaatttgtgcaactatacctctcctgtgtggtggctcacacatattgggctttttagtgatgatcgtgaagatggaaaaactgctctgagaactgaaactgaatttcgcaccatggttttatttggccttgagcagggaaaaaaatttggagtcttgtccttgcttgccttcaaggattcaacttctggtggagcttcttctcatctgggttgcaccacagtcatctttgtattttaartttgacagaactccacctggaattcactcttttggaggggagaaaatggggcaacacttacatatgatcagataaaatgtaagtatttgaaacaaaacttttaaggaagaggagttagttgagataatgtgtacatcaattaggattctatactgtg

SEQ ID NO: 129464 - DNA, 469 bp, Homo sapiens
gagaatgcctccaacaagaagaaaatagcaactccttccattttgttctcttgtattgtgggtaggaacctayctcctcaacttgtaacatttccagacttatcctttcaatatataacatgtaaacatacagttcatttcttctgtcacccagggtggagtgcaatggggtaatcatggctcactgtaaccttccagggctcaagcgatcctcccacctcagcctcctgagtagttgggatcacaggctcatgccaccatgcccaactagtttttctattttttgtagagacggggttttgccatgttgcccaggctggtctcaaactcctgggctgaagctctctgtccacgttggcctcccaaagtgctgtgattataggcgtgagccagtgtgtgtggcccagggtttattttttaatagaagaacatcacagaccagagaaaaagaatattgtctgtctcatat

SEQ ID NO: 129465 - DNA, 469 bp, Homo sapiens
gagaatgcctccaacaagaagaaaatagcaactccttccattttgttctcttgtattgtgggtaggaacctatctcctcaacttgtaacatttccagacttatcctttcaatatataacatgtaaasatacagttcatttcttctgtcacccagggtggagtgcaatggggtaatcatggctcactgtaaccttccagggctcaagcgatcctcccacctcagcctcctgagtagttgggatcacaggctcatgccaccatgcccaactagtttttctattttttgtagagacggggttttgccatgttgcccaggctggtctcaaactcctgggctgaagctctctgtccacgttggcctcccaaagtgctgtgattataggcgtgagccagtgtgtgtggcccagggtttattttttaatagaagaacatcacagaccagagaaaaagaatattgtctgtctcatat

SEQ ID NO: 129466 - DNA, 469 bp, Homo sapiens
gagaatgcctccaacaagaagaaaatagcaactccttccattttgttctcttgtattgtgggtaggaacctatctcctcaacttgtaacatttccagacttatcctttcaatatataacatgtaaacatacagttcatttcttctgtcacccagggtggagtgcaatggggtaatcatggctcactgtaaccttccagggctcaagcgatcctcccacctcagcctcctgrgtagttgggatcacaggctcatgccaccatgcccaactagtttttctattttttgtagagacggggttttgccatgttgcccaggctggtctcaaactcctgggctgaagctctctgtccacgttggcctcccaaagtgctgtgattataggcgtgagccagtgtgtgtggcccagggtttattttttaatagaagaacatcacagaccagagaaaaagaatattgtctgtctcatat

SEQ ID NO: 129467 - DNA, 469 bp, Homo sapiens
gagaatgcctccaacaagaagaaaatagcaactccttccattttgttctcttgtattgtgggtaggaacctatctcctcaacttgtaacatttccagacttatcctttcaatatataacatgtaaacatacagttcatttcttctgtcacccagggtggagtgcaatggggtaatcatggctcactgtaaccttccagggctcaagcgatcctcccacctcagcctcctgagtagttgggatcacaggctcatgccaccatgcccaactagtttttctattttttgtagagayggggttttgccatgttgcccaggctggtctcaaactcctgggctgaagctctctgtccacgttggcctcccaaagtgctgtgattataggcgtgagccagtgtgtgtggcccagggtttattttttaatagaagaacatcacagaccagagaaaaagaatattgtctgtctcatat

SEQ ID NO: 129468 - DNA, 569 bp, Homo sapiens
ataattactgaggctggtcccggtggttcatgcctgtaatcccagcagtttgggtggccagggcaggcagattgcttgagcccaggagttcgagaccagcctgagcaacatagtaaaaccccatgtctacaaaaaattaagaaaaattagccaggtatggtggttgcgcatctcaggaggctgaggtgggcagatcccttgattccaggagtcagaggttgcagtgagctgagatttcaccactgcactccagcctgggcgacagagtgagatcctgtctcaaaataaataaataaatacatacataaataaataaaaaaagaaagaaaaagaaataatgactggacttccyatatatggcaaaagatataaacctaaatattcaaggagctgagcaaatctcaaacagaaaaaatctaaacaaatccacactaaaacacaacatactttagaaaacatttgaactttgaacattatactttgatacacttttgaagactaaatttaaaaaaatactgaaaccaacaagagagaaacaaaaccttacctaaaggagaaaaagaattcaa

SEQ ID NO: 129469 - DNA, 569 bp, Homo sapiens
ataattactgaggctggtcccggtggttcatgcctgtaatcccagcagtttgggtggccagggcaggcagattgcttgagcccaggagttcgagaccagcctgagcaacatagtaaaaccccatgtctacaaaaaattaagaaaaattagccaggtatggtggttgcgcatctcaggaggctgaggtgggcagatcccttgattccaggagtcagaggttgcagtgagctgagatttcaccactgcactccagcctgggcgacagagtgagatcctgtctcaaaataaataaataaatacatacataaataaataaaaaaagaaagaaaaagaaataatgactggacttcctatatatggcaaaagatataaacctaaatattcaaggagctgagcaaatctcaaacagaaraaatctaaacaaatccacactaaaacacaacatactttagaaaacatttgaactttgaacattatactttgatacacttttgaagactaaatttaaaaaaatactgaaaccaacaagagagaaacaaaaccttacctaaaggagaaaaagaattcaa

SEQ ID NO: 129470 - DNA, 569 bp, Homo sapiens
ataattactgaggctggtcccggtggttcatgcctgtaatcccagcagtttgggtggccagggcaggcagattgcttgagcccaggagttcgagaccagcctgagcaacatagtaaaaccccatgtctacaaaaaattaagaaaaattagccaggtatggtggttgcgcatctcaggaggctgaggtgggcagatcccttgattccaggagtcagaggttgcagtgagctgagatttcaccactgcactccagcctgggcgacagagtgagatcctgtctcaaaataaataaataaatacatacataaataaataaaaaaagaaagaaaaagaaataatgactggacttcctatatatggcaaaagatataaacctaaatattcaaggagctgagcaaatctcaaacagaaaaaatctaaacaaatccacactaaaayacaacatactttagaaaacatttgaactttgaacattatactttgatacacttttgaagactaaatttaaaaaaatactgaaaccaacaagagagaaacaaaaccttacctaaaggagaaaaagaattcaa

SEQ ID NO: 129471 - DNA, 569 bp, Homo sapiens
ataattactgaggctggtcccggtggttcatgcctgtaatcccagcagtttgggtggccagggcaggcagattgcttgagcccaggagttcgagaccagcctgagcaacatagtaaaaccccatgtctacaaaaaattaagaaaaattagccaggtatggtggttgcgcatctcaggaggctgaggtgggcagatcccttgattccaggagtcagaggttgcagtgagctgagatttcaccactgcactccagcctgggcgacagagtgagatcctgtctcaaaataaataaataaatacatacataaataaataaaaaaagaaagaaaaagaaataatgactggacttcctatatatggcaaaagatataaacctaaatattcaaggagctgagcaaatctcaaacagaaaaaatctaaacaaatccacactaaaacacaacatactttagaaaacatttgaactttgaacattatactttgatacacttttgaagactaaatttwaaaaaatactgaaaccaacaagagagaaacaaaaccttacctaaaggagaaaaagaattcaa

SEQ ID NO: 129472 - DNA, 482 bp, Homo sapiens
gccctgcttagtgcttttgtaaaggctctttgaaaacctgagagtgctggagggcttcccctgctggctcggggtcttccctttgcttcctagtcaggatcactggagactgtattgccagaatttaattttggaaagaatgttgctttaatgcttcttctgtcctctcattctttgaaaacaaaacaacaaaacaaaacaaaatagtacaacaacaacaaccaccacaaaaatcacagctgcaartgaggtctgattagaaaccagtacagtgtatttaggctcatcatggtaaaaaaaaatctgacaaatgataaaaagcgttgcttaatttgctttaaataagaatgtggaggaactgttttttctagttcattgtgcaatgagaaaaaagggagggagcagagatccaaaaaacaaggacaattaatattgagtagcaactacgttctttcatttaatcttcatgtcagtcctggaag

SEQ ID NO: 129473 - DNA, 487 bp, Homo sapiens
aacaggagagaaccaggagaagtgtatgggagagaaggagagccccagccctcctagagtaaataacagaggaacctgtccacacaggctgcggggctcggggctggccaggcggcagaccctggggtaacttgcctatcatcacagagctagtcagtgatgaagagctgggactcaagcgagtgctgttttaagtatgtcaagggcttgctctgggcagcccaaggagagaccagcatcaggaagtccaaggggcagcccagggctgagccygtgtgaggcagctccaggcagccaggggacgtggggctggctgcccttggagcttcacctaccgcaggaactggggctcctgaaggggatgattcaggttctggtaaccagcccccatccacccagagacaaaccaaaaacaggagtctaggggcaggagtggggctgcatcgtgcccttcagtgaggattgaactgcatggcaaggagaattc

SEQ ID NO: 129474 - DNA, 550 bp, Homo sapiens
tttcctgcctccttgtgaagaaggtgcttgctttcccttcgccttccgccatgattgtaagtttcctgagggcctccccaaccaggcagagctgtgactcaattaaaactgtcttctttgtaaattacccagtctcaggtgtgtctttatagcagyatgagaacagactaatacaccttctctcactttttcttcaaaatgataggcagtgttattgacgctgtttcacaaacgaggacctccgatggaaggagctaggctacctgggagaaatgatattctgctggcatcccactacactttctacctgaggcatcgtccctaaaacactaggacatcaggaaaacctaatgatgactactgtttcatttagggccctctcagctgcaagtacaaagacatagaaaccaagtattgggtttttagctgagaagcccagcatcaggctggaccaccatctgcgcatcctgtctggggttcatacacaacaaagacctgatttctctcctgttctccgctcagctttcatggtctcctggagctgagatct

SEQ ID NO: 129475 - DNA, 550 bp, Homo sapiens
tttcctgcctccttgtgaagaaggtgcttgctttcccttcgccttccgccatgattgtaagtttcctgagggcctccccaaccaggcagagctgtgactcaattaaaactgtcttctttgtaaattacccagtctcaggtgtgtctttatagcagcrtgagaacagactaatacaccttctctcactttttcttcaaaatgataggcagtgttattgacgctgtttcacaaacgaggacctccgatggaaggagctaggctacctgggagaaatgatattctgctggcatcccactacactttctacctgaggcatcgtccctaaaacactaggacatcaggaaaacctaatgatgactactgtttcatttagggccctctcagctgcaagtacaaagacatagaaaccaagtattgggtttttagctgagaagcccagcatcaggctggaccaccatctgcgcatcctgtctggggttcatacacaacaaagacctgatttctctcctgttctccgctcagctttcatggtctcctggagctgagatct

SEQ ID NO: 129476 - DNA, 569 bp, Homo sapiens
acatcagaagtataattttgaacattaaacatgtaatggttatgataaatttaagtaggaatattaagtaaacaagtgaatatctaagaataatgctccarttagtgcataactgaggaagccaagaacaccgagacagtattgtcctaaacattttaatttatttattcaatatgtatttactgagtgacagaaatgtgctgaatactggaaataaagaggtaataaacaaaaggttctggctttatgaacttcacgttctaatgactttatgcataccctttaaccatcggaagcatcccatgaggatggcggtattaacattcccagtttatcaatagggaaaccaaggcatgaggaggtatgacacagctaatgagaagtgggagctgggatttgaaggtcctcagcatgactctagagcacaggctttcaaaccctgagctatgctgccgccactgatgcctgagaaggacagttattcttttctgttctcaacatatgagataacagcactttggaaaaggagggtaaaaaatataggttgagtattactgttaagtcagatg

SEQ ID NO: 129477 - DNA, 507 bp, Homo sapiens
agcatttcatgtgtttctaacttcattgcttaccatagttgttattattctatgctcttccctcttcttgaattcttaattttaattcaattctcaattagctgaagtatgccaggaagactataaaatattatattttcttccttcttatatatctgagaaaactgttctgtgccttggcacagaaatcatatttacaaagttcttgaatcacaattttttttcaaaactctgaacatgttgttatagtgttttctggcattactttttgtgggaaagaggtatgataatttaagatgcatttcttttaggtaacttttaawtttttttaccctgccttaaatgcctgaagatggttaatctctgaaattaaatactcttttgattgtatctcaaagtcagcatctttttatcaacattgactgctcttctggacactcttatttatggctcttcctcctgctccagattctgaactgtgcctgtcacctccctcaagacagccac

SEQ ID NO: 129478 - DNA, 399 bp, Homo sapiens
agatctatgtcaaacccaaaactcaaaaatgaggaaaatattacttatcaaactaacggatttctaaatgagacttaagcaaatctattattcaaattcaggaaagccttatgttaaggactcagaaattaaggtgctatctttyagctatcaatgactaagagcttaaattaccactgagcccacgtcttctttcttaaaagggagaataaccaatattaagaagagctaggtgacatattggcacttaaccagaatatttcaccattacctaaaaaatgaaatctatatcccaaaaactaaaaagtagacagctgttctaaagatttataaaaagggcatatccataattttcctcttccctaaaattttatgtaaatcatccattttaagttctct

SEQ ID NO: 129479 - DNA, 455 bp, Homo sapiens
acttacaatcgtggtggaaggggaagcaaacacatccttcttcatatagtggcagggagaagaatgagtgaccagcctaggggaaagccccttgtaaaaccgtcagatctgctgagaactcaactcactatcacragaataacttgagaataaccgcccccatgattcaattatctctacctggtccctcccatgacacatggggattgtgggaactataattcaagatgatatttgggtggggacacagccaaaccacatcattctgcccctggcacctcccaaatctcatgtcctcacattcattaattcacactcattaattcaatacaaatggactaagtgtaggtatgaatataacagcatagaatggagacctgctgtgaatgatgttaacaacacacttacacttcacagtctctcaggctggaagaacttggcatctgcagagcaga

SEQ ID NO: 129480 - DNA, 567 bp, Homo sapiens
tttgaagctagcagagtttggttcatgaagttttaggaagaagtcatctctgtaaaataaaagtgcaaggtgaagtgctgatggagaggctgcagcaagttatccagaagatctagctaagataattgatgaaagtggcaacattaatcaactgattttcaatgtagacaaaacagtcttatatgggaagcagatgccatctagaacttacatagctatggaggaaaagtcaatacctgacttcaagacttcaaaggacaggctgattcttgttaatgcagctggccactttaagttcaagccaatgcttacttacattccaaaaattcttggccccttaagaattatgttaaagttactctgcttgtgcttttaaagtggaaaaacaaagcctagatgacggcatatctgtttataatatggtttayggaatattttaagcccagtgttgaaatctactcctcagaaaaaaaaaaaaattcttttcaaagtattactgctcattttcaatgcaccttattacccaagagccttgatggagatgtacaaggagatgaatgttgtttt

SEQ ID NO: 129481 - DNA, 535 bp, Homo sapiens
gatgtggaaggaagaagtttctttttggggaatgggatcgcgaatmcccgggttagggaggcggtggcggcgcggcgctgcctgaagcttttcgggcttggttttgatttcctgtggtttttaatgacccaacttggcgggggactaagaagccctccagcccagggccctgcacccccagagagtctctgggagctcgcggagccgcggcgggcaggtggagttggggagcattggggccgggagagcaaacttggaagagaaaagtttttcccgagtagcttctgggcactctccgcccggcggaccgctgaccatggctggcctgccccgcgcccagcgcgcgcccggtgcccagtccgccgccgcacttctcctcggaaagcgcctgagtttcagccgggcggagcgggtggctggagccgggggtggcccgggagcccgggtcgttgctcaggccaggatgacccggggcggagggccgacgtgcgcggtgggcagcgcaggctctggagcaaacccttgaagcccgcgg

SEQ ID NO: 129482 - DNA, 535 bp, Homo sapiens
gatgtggaaggaagaagtttctttttggggaatgggatcgcgaatccccgggttagggaggcggtggcggcgcggcgctgcctgaagcttttcgggcttggttttgatttcctgtggtttttaatgacccaacttggcgggggactaagaagccctccagcccagggccctgcacccccagagagtctctgggagctcgcggagccgcggcgggcaggtggagttggggagcattggggccgggagagcaaacttggaagagaaaagtttttcccgagtagcttctgggcactctccgcccggcggaccgctgaccatggctggcctgccccgcgcccagcgcgcgcccggtgcccagtccgccgccgcacttctcctcggaaagcgcctgagtttcagccgggcggagcgggtggctggagccgggggtggcccgggagcccgggtcgttgctcaggccaggatgmcccggggcggagggccgacgtgcgcggtgggcagcgcaggctctggagcaaacccttgaagcccgcgg

SEQ ID NO: 129483 - DNA, 606 bp, Homo sapiens
aagttaacaggttctgctctcagatttggagagtagtttacatttgactctgacagtagtgttaaaagggttttttccccctaaagtgttttgaggaatcatatactttggattattaattctctttatttgacattaaaataacaaatttttcttaggaatttggatatctttaagttaataaaaggtattaacatgcagtttctaggataaggatacccagaaactacttttaaacatactrcacattcaattctgttttctagtagccagagaagtccatcacctggtcccaatcatacttctaatagtagtaatgcatcaaatgcaacagttgtaccacagaattcttctgcccgatccacgtgttcattaacgcctgcactagcagcacacttcagtgaaaatctcataaaacacgttcaaggatggcctgcagatcatgcagagaagcaggtatgttatgtacagcctagattttacctttggatgattagcaaaacagaatttaatcaacttctagagaatctaatgtgaccactgaattcaagcaatatttaaaataatgaatctctaactttgtagtcatttaaaaaatatttgata

SEQ ID NO: 129484 - DNA, 589 bp, Homo sapiens
cgcctgcattcacgtggacatgtttagtcgtcagcctgagccatgcaggcggagcgttggcttttgagaaggtcagttgccttcctcacttcctagcctgtccccagggaggaaaacagggagtctgtgtgttcttggagctctggtgtcaccgcggagtttgctgtgctcactttagactctggttctgtaacttttaattccttcagtggttcctgtctgaattggtttttgctctcgtttggtttgaattggggtatttttttttttttttttgctgtggtgtaaagatttttctaaaggtcctttaatgttatacaagtcaattatgcatcaatattatggattaaaccattttcctcagcagtggttgaaagaaactagcttttcagcagacatcttattctggtggatctttcagtgcttttaaagtaaataacaataaagaaattttcatttctatttcaaagttttactgtaggcattgcatrcagactgattataaatgagcgagcctgcccttcccactgggatgtgaagttcgctgaattatgtcagcagcccaggaatgactgctgtgcctaagcac

SEQ ID NO: 129485 - DNA, 321 bp, Homo sapiens
attatcaacttctgcatcttttctgttttcctccccgactattttcaaaggcccggtatcagcccagattcccattgtctgtgtccagacaacgaccgacctctgtgtgactggatcacgtgagccaaactcccctggccccgggtcagcgccgtctccctcgaggctgtttcctggtctccttgggacatttatgaggagagctgattaaggtggtgccactcctggacccagagaaagagttctycatgcctgggctcagtggggctcatggaagtctcttctgggggatttgaggttctggtctgggattgggaattc

SEQ ID NO: 129486 - DNA, 501 bp, Homo sapiens
ggacgcaggcctcagaatcacccgcacaccccacagctcagggacgcaggcctcagaatcacgcggacaccccacagctcagggacgcaggcctcagaatcacccggacagcccaaagctcagggacgcaggcctcagaatcacctcaacagcccacagctcagggacgcaggcctcagaatcacccggacaccccacagctcagggacgcaggcctcagaatcacccggacaccccacagctcagagacgcaggcctcagaatcacccggacaccccacagctcagagacgcaggcctcagaatcacctcaacagcccacagctcagggacgcaggcctcagaatcacccgsacaccccacagctcagggacgcaggcctcagaatcacctcaacagcccacagctcagggacacaggcctcagaatcgcctcaacagcccacagctcagagatgcaggcctcagaatcacccggacaccccacagctcagggacgcagg

SEQ ID NO: 129487 - DNA, 567 bp, Homo sapiens
ataaatttccctcttaacactgccttagctgtttcccagaggttctggtacattgtatcttttttctcattagtttcaaagaacttcttgatttctacctgaatttcattatttactaaaagtcattcaagaacaggttatttaatttctaagtaattatatggttttagtgaatttcttattcttgattttgaatttgattgcactgtagtctgagagactatttgttatgatttcagttcttttgcatttgctgaggagtgttttacttctgattgygtgattgattttagagtaagtgccatgtagcaatgagaaaaatgtatattctgttgttctggggtctggagttctgtaaatatctatcaggtccatttgctccagggctgaattcaggtcctgaatatctttgttaattttctgtcttgatgatctgtctaatattgtcagtggggtattaaagtccaccacttctactgtgtgaggttctaaatctctttgacggtctctaagaacctgccttataaatctgggtgttcctctattggatgcatatatatttaggat

SEQ ID NO: 129488 - DNA, 567 bp, Homo sapiens
ataaatttccctcttaacactgccttagctgtttcccagaggttctggtacattgtatcttttttctcattagtttcaaagaacttcttgatttctacctgaatttcattatttactaaaagtcattcaagaacaggttatttaatttctaagtaattatatggttttagtgaatttcttattcttgattttgaatttgattgcactgtagtctgagagactatttgttatgatttcagttcttttgcatttgctgaggagtgttttacttctgattgcgtgattgattttagagtaagygccatgtagcaatgagaaaaatgtatattctgttgttctggggtctggagttctgtaaatatctatcaggtccatttgctccagggctgaattcaggtcctgaatatctttgttaattttctgtcttgatgatctgtctaatattgtcagtggggtattaaagtccaccacttctactgtgtgaggttctaaatctctttgacggtctctaagaacctgccttataaatctgggtgttcctctattggatgcatatatatttaggat

SEQ ID NO: 129489 - DNA, 567 bp, Homo sapiens
ataaatttccctcttaacactgccttagctgtttcccagaggttctggtacattgtatcttttttctcattagtttcaaagaacttcttgatttctacctgaatttcattatttactaaaagtcattcaagaacaggttatttaatttctaagtaattatatggttttagtgaatttcttattcttgattttgaatttgattgcactgtagtctgagagactatttgttatgatttcagttcttttgcatttgctgaggagtgttttacttctgattgcgtgattgattttagagtaagtgccatgtrgcaatgagaaaaatgtatattctgttgttctggggtctggagttctgtaaatatctatcaggtccatttgctccagggctgaattcaggtcctgaatatctttgttaattttctgtcttgatgatctgtctaatattgtcagtggggtattaaagtccaccacttctactgtgtgaggttctaaatctctttgacggtctctaagaacctgccttataaatctgggtgttcctctattggatgcatatatatttaggat

SEQ ID NO: 129490 - DNA, 567 bp, Homo sapiens
ataaatttccctcttaacactgccttagctgtttcccagaggttctggtacattgtatcttttttctcattagtttcaaagaacttcttgatttctacctgaatttcattatttactaaaagtcattcaagaacaggttatttaatttctaagtaattatatggttttagtgaatttcttattcttgattttgaatttgattgcactgtagtctgagagactatttgttatgatttcagttcttttgcatttgctgaggagtgttttacttctgattgcgtgattgattttagagtaagtgccatgtagcaatgagaaaaatgtatattctgttgttctggggtcyggagttctgtaaatatctatcaggtccatttgctccagggctgaattcaggtcctgaatatctttgttaattttctgtcttgatgatctgtctaatattgtcagtggggtattaaagtccaccacttctactgtgtgaggttctaaatctctttgacggtctctaagaacctgccttataaatctgggtgttcctctattggatgcatatatatttaggat

SEQ ID NO: 129491 - DNA, 465 bp, Homo sapiens
tctcagtttcagttatttaaaacaccagagacttggatgcatgcatgtcacaaaaaggtgaaagaatgctctgtcactttcccttctctcgctcactgcgccctgaacaagaacctgctctaccttgaccttttgaatggggaggagggtcgcactcctgactaagcttcatgcttccagagataaacctgctaccccaaaagcatagtttattataaagaccaaaccctacaccaagagctctcccttcacctaccagggcagaaactgaatcccatggaaaggcccagagaaattgtggctcaaaatgtccagtgtcatgtcccttctgccaaaatgaagccaacatrttcatcacaatatggggtattgataaggatatcaaaatgattaccacaaaaatttcacaaatatattctttttattacatcaacttttttgtcctacaaatataaagaaaataag

SEQ ID NO: 129492 - DNA, 465 bp, Homo sapiens
tctcagtttcagttatttaaaacaccagagacttggatgcatgcatgtcacaaaaaggtgaaagaatgctctgtcactttcccttctctcgctcactgcgccctgaacaagaacctgctctaccttgaccttttgaatggggaggagggtcgcactcctgactaagcttcatgcttccagagataaacctgctaccccaaaagcatagtttattataaagaccaaaccctacaccaagagctctcccttcacctaccagggcagaaactgaatcccatggaaaggcccagagaaattgtggctcaaaatgtccagtgtcatgtcccttctgccaaaatgaagccaacatgttcatcacaatatggggtattgayaaggatatcaaaatgattaccacaaaaatttcacaaatatattctttttattacatcaacttttttgtcctacaaatataaagaaaataag

SEQ ID NO: 129493 - DNA, 465 bp, Homo sapiens
tctcagtttcagttatttaaaacaccagagacttggatgcatgcatgtcacaaaaaggtgaaagaatgctctgtcactttcccttctctcgctcactgcgccctgaacaagaacctgctctaccttgaccttttgaatggggaggagggtcgcactcctgactaagcttcatgcttccagagataaacctgctaccccaaaagcatagtttattataaagaccaaaccctacaccaagagctctcccttcacctaccagggcagaaactgaatcccatggaaaggcccagagaaattgtggctcaaaatgtccagtgtcatgtcccttctgccaaaatgaagccaacatgttcatcacaatatggggtattgataaggrtatcaaaatgattaccacaaaaatttcacaaatatattctttttattacatcaacttttttgtcctacaaatataaagaaaataag

SEQ ID NO: 129494 - DNA, 582 bp, Homo sapiens
cattttatcctcactgggcagaataagcattaatgtcataattaagaaccagggctcagcagccagactgcctgggtttgagtcctggctctgccattttctagctgraaaaccttgggtatgttacttagcctctctctgcctcagtttcctcatatgaaaatagaaatatgttaagtgggctaaatatgaaaagctgttagaacaaggcctggcacatagcagttgttaactgtcatcctttaataaatgctaactatcgtcatatctgtttcccaaattaagaaacaggtttttaaggggttcttatgctaggcagtgatacaactgctatgaacatttacatctcttttcatttattaactctaatcttaactcacttgaatattaggcaatagccttattttatagagtatgttaggagagtaactgaagttaaattacttgcccaaggccacattatttgtaaatgcttaataggttttccacttatatttgactaacttcgaggtccttcctgtttgatcaaccaggatccactgtgctagagactgtggagtatgaaaggacatgcaaagtctt

SEQ ID NO: 129495 - DNA, 366 bp, Homo sapiens
gagaaaagtgagcaaggcatgaggaacaaagttatttatttattcttcattcatctatttattctttcattaccgtttgtgttaaaacattccaaacccaaacaattatttgtatggtcccctgtgtattacttgtggtttcccaagaagtagttgctaagcttttccttgtatggtttctgtgaggtaaggaaggaatgatgtgattttctccagtatgtagaatgcasttccaagaggttaagtaatttacttacagttatttagccaaacaaggttactgcaaggtatatgaagtcaggtctcttgacccagttcatgagagagttaaaggaactatcattctttttagctttcatggaaaaa

SEQ ID NO: 129496 - DNA, 549 bp, Homo sapiens
tatggtaacacaccattacacagaataatttataatacagagggtttttttttgtttgtttgtttttgaggaataaacaaacagtctttattaggctcagaccagaagtccatggatcttgaggagacctgtgtgtatttgtcagttttctttttcatgttcttttccacctatttctgtagcctcataagctgtttcttcttctggtagtggatcttggccttctccttcctcttcttcagggtggctgtcactgcctggtacttccagctaacttcatragctcggtgtccaggcggacaaattttcttgtaggcttcagacacacaagcttgagggcagcaggaaccaccaaagctttttcttgtcatggggcggtggaatgccgtcagacaccttgaggtggttgagggcggcctggccttggtgagtcttgtggggcagtgggccttgcaccatccaccagaagatgcggctagggctgagaaatggcagggcctccagaaggtgttcatccgcttgcggagaaagcccaggtacttcaacttg

SEQ ID NO: 129497 - DNA, 595 bp, Homo sapiens
actgattcctactggggcataaacttgtagccacttctgccttgaacctattaactgcttaaaatttacacacacacacacacatacacacaatttattttgaatatgtaaagcacacacagctgtaacatttaaaagacaggcaaaaatataaagtgaaaagcagatttctcttccatgtctgctcttcttcaagttactgctgtcgatgatgtcatagggctcactagctccagaaacagcttcttctgcaggaacctgggaggcttccaagacacaaagggattttacttcctgctgaacgacgttggtgatggctttcttgactcctctagaccttgcgaccgccggatcccagttggcgtaatctgccacagtctttggaaggagcaggcatcatgggcccagagcttgagccgatttcttctcctcgacacggygctcttgtctaggggaggctggcacagaggtctgcaaccatgggccagctccgccctgctctgctgttagcccacgctggaggccaatgctttcgtgaggacgcaggccctaggatttctttctgtaaatatagtctatcctccattcccacagg

SEQ ID NO: 129498 - DNA, 595 bp, Homo sapiens
actgattcctactggggcataaacttgtagccacttctgccttgaacctattaactgcttaaaatttacacacacacacacacatacacacaatttattttgaatatgtaaagcacacacagctgtaacatttaaaagacaggcaaaaatataaagtgaaaagcagatttctcttccatgtctgctcttcttcaagttactgctgtcgatgatgtcatagggctcactagctccagaaacagcttcttctgcaggaacctgggaggcttccaagacacaaagggattttacttcctgctgaacgacgttggtgatggctttcttgactcctctagaccttgcgaccgccggatcccagttggcgtaatctgccacagtctttggaaggagcaggcatcatgggcccagagcttgagccgatttcttctcctcgacacggtgctcttgtctaggggaggctggcacagaggtctgcaaccatgggccagctccgccctgctctgctgttagcccacrctggaggccaatgctttcgtgaggacgcaggccctaggatttctttctgtaaatatagtctatcctccattcccacagg

SEQ ID NO: 129499 - DNA, 620 bp, Homo sapiens
aggtgggcatctgtgtggagggtgagagatccctggttgagcccaaactgaaccccaggtagaagcaagcctcaggacagggaagtagctagcaagggatgatgaggsagctatctcttgaccctggcttcccacccattgaccttagctacttgtgcctattaagcagattacggttcccccatcgtgaaatgtgggtaccacagttccctgatgggcatttctccaccagcccatgatggcctgagtttccttactgcagtctcctccctgagccttggcttctctatgtgtgtcctaactccaggacccacaggcctgtcaacccccagccctgggctgcttccctggcctcttctctgttccctctctgagggcctaactcccttgggtagtgctgcagaatatagagccacaggccctggctgatgatctggtggactgggcaaattggtcgtgacaggtcaggttctggttcaaagccaattcctccgatgccaaggaatgtcgaagaaggtcctttgccatgatgccccatagctgccccacctcagcaatcgtgccgtaacctgggccctcacagtcagacaaccagctgaagaagctcaggcagtgacctg

SEQ ID NO: 129500 - DNA, 616 bp, Homo sapiens
aggtgggcatctgtgtggagggtgagagatccctggttgagcccaaactgaaccccaggtagaagcaagcctcaggacagggaagtagctagcaagggatgatgaggcagctatctcttgaccctggcttcccacccattgaccttagctacttrtgcctattaagcagattacggttcccccatcgtgaaatgtgggtaccacagttccctgatgggcatttctccaccagcccatgatggcctgagtttccttactgcagtctcctccctgagccttggcttctctatgtgtgtcctaactccaggacccacaggcctgtcaacccccagccctgggctgcttccctggcctcttctctgttccctctctgagggcctaactcccttgggtagtgctgcagaatatagagccacaggccctggctgatgatctggtggactgggcaaattggtcgtgacaggtcaggttctggttcaaagccaattcctccgatgccaaggaatgtcgaagaaggtcctttgccatgatgccccatagctgccccacctcagcaatcgtgccgtaacctgggccctcacagtcagacaaccagctgaagaagctcaggcagtga

SEQ ID NO: 129501 - DNA, 590 bp, Homo sapiens
gtaacacccacatttcaggatcggggcaccttaagccactatgatgcatatgtggctaaagtcagtgggtgacaagcagggcttaagggatagctgtctcatcattactcgccagctccctgccctgcggtaagacctgctaccacctggggctcattttgagatcaaccagggccccctttttctccacgaggatgtccacctgaggcccacctaggtstatgtcctttcacagtgtttctcccaggccagtcatgttttgtttccatgaccccggctgccttgacatgtgtaatcctctctgccatcctcactcccgctgccctgccttcccatataagttagtccacctcacacggaatctggaggaccacactgggctccagtgtgaggcaatgttttattttcttcaggtacatgtattttagggctacctccagggctgggaatgtgaagagattgccaaatggctggggaccttcagtgtgtgtccagggagggaacccggctgggaattaaggcccacctgagtaatggtatggacatccagtgtcagttatcttgataaaggcctgctttcttacatcacc

SEQ ID NO: 129502 - DNA, 590 bp, Homo sapiens
gtaacacccacatttcaggatcggggcaccttaagccactatgatgcatatgtggctaaagtcagtgggtgacaagcagggcttaagggatagctgtctcatcattactcgccagctccctgccctgcggtaagacctgctaccacctggggctcattttgagatcaaccagggccccctttttctccacgaggatgtccacctgaggcccacctaggtgtrtgtcctttcacagtgtttctcccaggccagtcatgttttgtttccatgaccccggctgccttgacatgtgtaatcctctctgccatcctcactcccgctgccctgccttcccatataagttagtccacctcacacggaatctggaggaccacactgggctccagtgtgaggcaatgttttattttcttcaggtacatgtattttagggctacctccagggctgggaatgtgaagagattgccaaatggctggggaccttcagtgtgtgtccagggagggaacccggctgggaattaaggcccacctgagtaatggtatggacatccagtgtcagttatcttgataaaggcctgctttcttacatcacc

SEQ ID NO: 129503 - DNA, 586 bp, Homo sapiens
gtaacacccacatttcaggatcggggcaccttaagccactatgatgcatatgtggctaaagtcagtgggtgacaagcagggcttaagggatagctgtctcatcattactcgccagctccctgccctgcggtaagacctgctaccacctggggctcattttgagatcaaccagggccccctttttctccaygaggatgtccacctgaggcccacctaggtctgtgtcctttcacagtgtttctcccaggccagtcatgttttgtttccatgaccccggctgccttgacatgtgtaatcctctctgccatcctcactcccgctgccctgccttcccatataagttagtccacctcacacggaatctggaggaccacactgggctccagtgtgaggcaatgttttattttcttcaggtacatgtattttagggctacctccagggctgggaatgtgaagagattgccaaatggctggggaccttcagtgtgtgtccagggagggaacccggctgggaattaaggcccacctgagtaatggtatggacatccagtgtcagttatcttgataaaggcctgctttcttacat

SEQ ID NO: 129504 - DNA, 582 bp, Homo sapiens
gtaacacccacatttcaggatcggggcaccttaagccactatgatgcatatgtggctaaagtcagtgggtgacaagcagggcttaagggatagctgtctcatcattactcgccagctccctgccctgcggtaagacctgctaccacctggggctcattttgagatcaaccagggccccctttttctccacgaggatgtccacctgaggcccacctaggtctgtgtcctttcacagtgtttctcccaggccagtcatgttttgtttccatgaccccggctgccttgacatgtgtaatcctctctgccatcctcactcccgctgccctgccttcccatataagttagtccacctcacacggaatctggaggaccacactgggctccagtgtgaggcaatgttttattttcttcaggtacatgtattttagggctacctccagggctgggaatgtgaagagattgccaaatggctggggaccttcagtgtgtgtccagggagggaaccyggctgggaattaaggcccacctgagtaatggtatggacatccagtgtcagttatcttgataaaggcctgctttctt

SEQ ID NO: 129505 - DNA, 599 bp, Homo sapiens
gtctctactcttgtgcttttgggtcattattaagtaaaataaggcattcttgrgcacaggcaactgctatactacagtagtcaacctggtaactgagatggctagctactaaggaactaatgggcaggtattgtctgcagtgtggatatgctagtcaaagggatgattcacatcctgggcaggccagagagaaaaggtacaagatttcatcacactactcagaatgtcaagcaatttaaaacttaggaattgtttatctctggatttttttttgagacggagtctcgctctatgtcccaggctggagtgcagtggcgcagtcttggctcatggcaacgtccacctccagggttcaagtgattctcctgcctcagcctcctgagttgctgggattacagatgtgtgccactatgcccagctattttctttttgtatttttagtagagacagggtttcaccatgttgaccaggctgatctcgaactcctgacctcagatgatctgcctacctcagcctcccaaaatgctgggattacaggtgtgagccactgtgcctgtcctccggaatttttcatttaatatttttgaaccatggttgac

SEQ ID NO: 129506 - DNA, 599 bp, Homo sapiens
gtctctactcttgtgcttttgggtcattattaagtaaaataaggcattcttgagcacaggcaactgctatactacagtagtcaacctggtaactgagatggctagctactaaggaactaatgggcaggtattgtctgcagtgtggatatgctagtcaaagggatgattcacatcctgggcaggccagagagaaaaggtacaagatttcatcacactactcagaatgtcaagcaatttaaaacttaggaattgtttatctctggakttttttttgagacggagtctcgctctatgtcccaggctggagtgcagtggcgcagtcttggctcatggcaacgtccacctccagggttcaagtgattctcctgcctcagcctcctgagttgctgggattacagatgtgtgccactatgcccagctattttctttttgtatttttagtagagacagggtttcaccatgttgaccaggctgatctcgaactcctgacctcagatgatctgcctacctcagcctcccaaaatgctgggattacaggtgtgagccactgtgcctgtcctccggaatttttcatttaatatttttgaaccatggttgac

SEQ ID NO: 129507 - DNA, 599 bp, Homo sapiens
gtctctactcttgtgcttttgggtcattattaagtaaaataaggcattcttgagcacaggcaactgctatactacagtagtcaacctggtaactgagatggctagctactaaggaactaatgggcaggtattgtctgcagtgtggatatgctagtcaaagggatgattcacatcctgggcaggccagagagaaaaggtacaagatttcatcacactactcagaatgtcaagcaatttaaaacttaggaattgtttatctctggatttttttttgagacggagtctcgctctatgtcccaggctggagtgcagtggcgcagtcttggctcatggcaacgtccacctccagggttcaagtgattctcctgyctcagcctcctgagttgctgggattacagatgtgtgccactatgcccagctattttctttttgtatttttagtagagacagggtttcaccatgttgaccaggctgatctcgaactcctgacctcagatgatctgcctacctcagcctcccaaaatgctgggattacaggtgtgagccactgtgcctgtcctccggaatttttcatttaatatttttgaaccatggttgac

SEQ ID NO: 129508 - DNA, 401 bp, Homo sapiens
gtgctaggattacaggtgtgagccactgcacccagcctctaacttactttaattccaaacatccttccaaggtaggcattatgagctttataaatgatgaaaatayggctcagagaggttaagtaatttgcctaaagtcacacagctagtaaagggtttcctgggacattacatgaaagttaatcacctacgaatgaaagttgtggggaatctgtgcacagtgaatgagaggcactaactggaaaagacactgtagatggtgctaaggaaattggggagtaaataaatccaatcaaagggaggcaaggggaagtatgcatggataaagactagacctaaggaagcaaaaatcaaatccatggtactaggcgccaactgaagaaagaatgtggatgcagaag

SEQ ID NO: 129509 - DNA, 401 bp, Homo sapiens
gtgctaggattacaggtgtgagccactgcacccagcctctaacttactttaattccaaacatccttccaaggtaggcattatgagctttataaatgatgaaaatacggctcagagaggttaagtaatttgcctaaagtcacacagctagtaaagggtttcctgggacattacatgaaagttaatcacctacgaatgaaagttgtggggartctgtgcacagtgaatgagaggcactaactggaaaagacactgtagatggtgctaaggaaattggggagtaaataaatccaatcaaagggaggcaaggggaagtatgcatggataaagactagacctaaggaagcaaaaatcaaatccatggtactaggcgccaactgaagaaagaatgtggatgcagaag

SEQ ID NO: 129510 - DNA, 401 bp, Homo sapiens
gtgctaggattacaggtgtgagccactgcacccagcctctaacttactttaattccaaacatccttccaaggtaggcattatgagctttataaatgatgaaaatacggctcagagaggttaagtaatttgcctaaagtcacacagctagtaaagggtttcctgggacattacatgaaagttaatcacctacgaatgaaagttgtggggaatctgtgcacagtgaatgagaggcactaactggaaaagacactgtagatggtgctaaggaaattggggagtaaataaatccaatcaaagggagscaaggggaagtatgcatggataaagactagacctaaggaagcaaaaatcaaatccatggtactaggcgccaactgaagaaagaatgtggatgcagaag

SEQ ID NO: 129511 - DNA, 511 bp, Homo sapiens
aagagatgaatacacggaacccacagaaaatactatccaagagtcaaggacaattctatgtgacttatgaatcatttgactgtttactatggaagaaatactaggttctttcatttgtaggatttttctgtaaagcagattgctggactacaattaatactaggtacctttcaaaaaatgaaaaatgtcaaacacagattgggtacaaattacttcattcctttcttaggaatgaatactctgataaagcagtaggagcaccaacatctgcctcaatctcagaaaagtacactctccttatacctatctctctccatcaccataggcatctcctaggtaggattctgtgtgtcactgtagccaaaaaccatcatagaattgtaatgactattattyaggtttcaatttacacagtttatttggctccttgtttaaaaggtcctgtcctattccattatttgattttgtgtacctacactatgctaagtcagggaattgccatacattcaga

SEQ ID NO: 129512 - DNA, 399 bp, Homo sapiens
agaatcccactggagtctttgacctcaaaaaaaggttcacaactataattttaatattcccctttcatcacctctttcatatttaatggcccacaaccattattatttcacagatctggaatttctagcagagtcaagaaaaactacctacttccttgtagcaagagacatacaatttccttccctttatatgtcctaaccctctcartaagtcatatttaacactttctggcttttcatttctctctgaaaacctttcacttcttccaaaaaacccaacaaacaataccaaacaaaagatgacacaacccaaaagtttcaaatgatacttcttccccatttctgatggctattccacctaatggcaccacacaactagtggtcagcacacatatttta

SEQ ID NO: 129513 - DNA, 461 bp, Homo sapiens
aggtcctaagaggaaagtggggktttttttgccctaagaaatgactaggagaacaatccctagtgagtaattttaggcacttgtggtcagaggcaatctggcctgaagaaatcctcagcctgagccaccattaccagtctgctctaccagctgtgcggaaccctggcttcccataaaatcaacttcagtgacctggtggcagttcatggttttgaaaattccactttaaatggaaattttcaaaaatggttctgttgctctggtttgctgacaaccaacctttacaaatttggcaagaaccctctgttgcccagctgcctctgatttactgtccctgggcacagtctccagcgtggctgttgggctctatacagctaacactgccattgcctctggcaatgtggtgtggtggaaagcacagtggacagctaaggagacctgggatcagtcctgcttctgtc

SEQ ID NO: 129514 - DNA, 370 bp, Homo sapiens
gggtattttttcaagttaatagtccagttaactgtcagcaacaaagcaagaaaataataatatatagtgatagcagctgacatttattgagcatttagtatgtgccatgcactgttctaagtaaacatgtatccatatgtattaactcaatccatacaataaccttacaaaatgaggctattgtcaccrcactttacagatgagaaaactgagatataggcagtaacatgtccaaggacatacaactaataggtgagagacaggattcaaacccagataggtcacagaaagggatttataattcaaaaccagacacttttgagagaataagagtgcactgaaatccgttaatatttatagagtgttcatt

SEQ ID NO: 129515 - DNA, 370 bp, Homo sapiens
gggtattttttcaagttaatagtccagttaactgtcagcaacaaagcaagaaaataataatatatagtgatagcagctgacatttattgagcatttagtatgtgccatgcactgttctaagtaaacatgtatccatatgtattaactcaatccatacaataaccttacaaaatgaggctattgtcaccacactttacagatgagaaaactgagatataggcagtaacatgtccaaggacatacaactaataggtgagagacaggattcaaacccagataggtcacagaaagggatttataattcaaaaccagacacttttgagagaataagagtgyactgaaatccgttaatatttatagagtgttcatt

SEQ ID NO: 129516 - DNA, 438 bp, Homo sapiens
ataattccaattatatgaaatatccagaaaagataaatccatagagagagaactcagactggtagttgccagggtctagggaaatgggttaatgaaagaaactgcttattgggtaaggmgttttactttggagtgatggaaatggtttagaactagataggtgtagagatcatacaacattgtgaatgcattaaatgtcaatgaattcttcgctttaaaatgatcaattttatgtcatgtgaatttcatctcaaattatttttttaaatgctacatcaccaaaacttctgatgatatagaggacagtaatgtttggaaaaatacagacattgacaattctatgtttaaaagtgatcccaaatagactctgaatgtgaaaaaaaaattaagaataccttgaacaaattattttgcttgtatttttctttatatgtctat

SEQ ID NO: 129517 - DNA, 535 bp, Homo sapiens
aacaccttcactgatttttaaaactattctactgtggtgagcacagtttgagctccctgtttcggtaactcataaactcccactgatgacttcttttctcaggcattcactttattgccttaaacttgtctcaagtaaagtaattttttaaaagttataattcatggtcacacagaaggggtctggtgtcatatgtaacccattttggcgtgattacaaatccatgcttgctaagactacaagagaatgccaagatgaacttcttacaggtacaatagaagatcaacaagttattttcrtcttttttattacaaaaactgcacgcttatgtgtaatagggattccaaagtaaagcaaaatgtcaagtctctttgtagcaattatttcacactgatcaaacaattttacatgcagttctatgcagtattaataaaagcatgtacaattgatatattgtccttgagagacaatttttaaagcatggagtccatagggaagaaaaatataggggtttcccggtgggagtgaagggcat

SEQ ID NO: 129518 - DNA, 376 bp, Homo sapiens
ccgcccgcctcggcctcccaacagattcatatattttttaaaacactgattagtcaggcaacaatactggggaggggtctcctcattcccagtgatgcaaaccccactgcacggctccrgggttgcaagggctacaaagcctaaaggctctaacttatgatttcattactttatttgtattgtgagacagggtcctgctctgtcgcccaggctggagagcagttgtgcacttatagctcactgaagcctcgaccttctgaatttaagccatcttcctgcctcagctccccactggctggtaccacagttgagtgccaccatacctggctattttttaattttttgtagagtgaggggtcttgctatgttgcccaaa

SEQ ID NO: 129519 - DNA, 375 bp, Homo sapiens
attcatatattttttaaaacactgattagtcaggcaacaatactggggaggggtctcctcattcccagtgatgcaaaccccactgcacggctccggggttgcaagggctacaragcctaaaggctctaacttatgatttcattactttatttgtattgtgagacagggtcctgctctgtcgcccaggctggagagcagttgtgcacttatagctcactgaagcctcgaccttctgaatttaagccatcttcctgcctcagctccccactggctggtaccacagttgagtgccaccatacctggctattttttaattttttgtagagtgaggggtcttgctatgttgcccaaactggcctcaaacacctgacctca

SEQ ID NO: 129520 - DNA, 375 bp, Homo sapiens
attcatatattttttaaaacactgattagtcaggcaacaatactggggaggggtctcctcattcccagtgatgcaaaccccactgcacggctccggggttgcaagggctacaaagccwaaaggctctaacttatgatttcattactttatttgtattgtgagacagggtcctgctctgtcgcccaggctggagagcagttgtgcacttatagctcactgaagcctcgaccttctgaatttaagccatcttcctgcctcagctccccactggctggtaccacagttgagtgccaccatacctggctattttttaattttttgtagagtgaggggtcttgctatgttgcccaaactggcctcaaacacctgacctca

SEQ ID NO: 129521 - DNA, 352 bp, Homo sapiens
attcatatattttttaaaacactgattagtcaggcaacaatactggggaggggtctcctcattcccagtgatgcaaaccccactgcacggctccggggttgcaagggctacaaagcctaaaggctctaacttatgatttcattactttatttgtattgtgagacagggtcctgctctgtcgcccaggctggagagcagttgtgcacttatagctcactgaagcctcgaccttctgaatttaagccatcttcctgcctcagctccccactggctggtaccacagttgagtgycaccatacctggctattttttaattttttgtagagtgaggggtcttgctatgttgcccaaa

SEQ ID NO: 129522 - DNA, 458 bp, Homo sapiens
gtgagcaagcctaatagtcagaaagacaattggaggccctcacaataaaccagtgtaaaagagaaaagggctgggcatggtggctcctgcctgtaatctcaaaactttagaagtccaaggtgggtggatggcttsagcccaggagtttgagaccagccagaacaatgtgatgaaacgatgaaaccacatctctacaaaacacaaaaattagctgggcatggtggctcgtacctgtggtcccagctaccccagaggctgaggcggaaggatagcttgagcctgagaggttgagactgcagtgagccaagatcaaaccactgtgctccagcctgggcaacacagggagactgcctcaaaaaaaaaaaaaaaaaagaaagaaaaaaagaaaaagaaaaagatcccattcttcacttattagtgccctaacattctcatgagaaccttggtgacagtgaatt

SEQ ID NO: 129523 - DNA, 334 bp, Homo sapiens
atgtttgcattatactcaccagatgagcatttcttatctgaaaatctgaaatgctccaatgattcttccctttgaggatcatgttgacgctcaaaaagtttcagatttcagattttagrttagggacattcagcctgtagatgttattttacagagcaggaagttgggtgtagtggttcacacttgtgatcccagctctttgggaggccaaggcaggaggattgcttaagcccaggagttggagaccagcctgggcaacgtagcaaggccctgtctctataaaaaataggagaaaactgaggctcagaaaggtcacctagctgatacaaccagg

SEQ ID NO: 129524 - DNA, 483 bp, Homo sapiens
aacagcagttctgataggagcccctgactataccctgcctcagcaaaatgtagacaaataaagaaaaaataattcaagagaaataaaatttaaaaataaagcaattggaaaatagtaagggcaaataaaataaactgaaacaaaatagagaaaagtaaagaaaaatataactaagattagtgaaaataaaatcaagatgaagataaacagtaaatacaataaaattgagaaataagaaaattttaagaataagaagagacaagtgaaagtaaaaaagaaatgcagagaaaaataaaataacaaagagatatgcatggaaataaataaaagaaacaagaaattgaataaaattacaaacracaaaaatctagaaaatttgaaattgagactataatgaaaaaacaaaaaataaaaaatgaagtaaaattaaattaatagaaaaaatgaaagtaaataaaaataaagagaaacaagataaaaaca

SEQ ID NO: 129525 - DNA, 437 bp, Homo sapiens
gtcagcaatttaatatgcagaggcatctggaaatcatttcaaataaagaatacctggattaactgctaaacttagagaagaataaagcaggcagacacatgagragaactgcttttaaatattttagttatatgggggaaagcagctcaggtgttatagaggtaatactctttttaatcctattcttatttaagagtaattaacagcaaaacatttctgtttcttttatgaaattttttatggttggtacatccagatgcagattctcatcagatacatgctattctaaagccaaattaatactacctttcttagataaagccacattaggactacctttcttagattaaataatctatcgacaagtaactgaacacttgtcataatttggagaagccattgcttaagcatacaaaaacctgagagagaaaaaggca

SEQ ID NO: 129526 - DNA, 597 bp, Homo sapiens
attctgcacagtaagagaaaccatatgaattttagaagaaaattcctttaccatttgcaaattaatgtaattaaaatacagtgaatttaaaaatgcctttttaatggcaatgtgtgaacttaatttgttttaataagccaaaattgttgtttttgtgttatggctattttacattgaatgtgtattttgccactgatgttaacttttcccatcttactcaaggttgtaggtaacagatggtamcaatatactatctggtgacagtgaaataacatctctagtggttactttgttagtggtctttaactgaaaataattttgagaatatggtttctagcacttacatttttgtttttcttgtaactacagattattatgatggttgcaatgaagactttgagtataatggaactacatgtttcagaattctgaacaactatttaaaacattttatccaacttttttttaaaaatatgacttctctggtctgctaaacatatacagactttcagttttggtttacatggttttaaatatacagatatatcactgtaaaataaactttaggtgtaacagatttatagagaataatcgtat

SEQ ID NO: 129527 - DNA, 579 bp, Homo sapiens
ttaagtgatggagtatgtcaaaacctactttaaatatcagtgtaagcaggatcagagaaattagatgcaagaagctcacgggatttatatacctactaaaccacatcagaaatctacccattcccgaaccagaatatatccagaagtcagcaatttatatgaggaggcatctggaaatcatttcaaataaagggtagctagatgaactgttaaacttaccgaagaatgaagtaggcagacacataaggagagctgctttcattcactttaggaactggttataaggaggaaagcagctctggtgctttggaggtaatactctcgtttactcctattcttatttaagcgcaattaacagcaaagcatttctgtctctgttctacaaattttctgttgctggtaaagccagaggcagaatctacgcagatgcatgctaattcaaaagccacatgaatactacctttctttgatgatatggtctatcattaagtggacctgccatkgcttaagcaaataaaaacctcagggcaaaaaaggcactgttgctcccatgggagtttataatcgggttaacaagaa

SEQ ID NO: 129528 - DNA, 399 bp, Homo sapiens
agcagagcctgagctggggtttcaggagcaagtttgtttgtttattaagggagtgctctcggaaggaacctgtaagagggtgagagaaaggaagaagaagytgagcaaagatgtggttgcagatgagatccactctcagcctgtgacagcagaggagattggtgctgtaaattgccccagaatttgccctaccttgaggcaagacagctggattttgtgccctcacacaagacaggctttagttataggatgtcccaggacaagggagatgcacctccagctgagatggctttgatcacccaagaacgatcctgctaaaaaggttgcaggtgtgagccatcggtagcagcttctgcagcagctgggtgcaccagagcccattaaaatgaatcgaggaca

SEQ ID NO: 129529 - DNA, 520 bp, Homo sapiens
ggattttgtgccctcacacaagacaggctttagttataggatgtcccaggacaagggagatgcacctccagctgagatggctttgatcacccaagaacgatcctgctaaaaaggttgcaggtgtgagccatcggtagcagcttctgcagcagctgggtgcaccagagcccattaaaatgaatcgaggacatattctatagtctgaattctctatgctcttcttttgccagctgattcatgtatccagcagatttgagtcttgtctgtttaatgttgctgtaacaatatacctgaggctgggtagtttataaagagaagaggtttaattgattcatgattctggrggctggaaagctcaagatggagcagctgcatctgatgaaggcctcatgcctcttccactcatggaaagcagaaagggagcagacatgtgcaaagagatcacctggcaagagagagaaactgaggaagacaggcactttttaacaacctgctctcaagggaactaatccattcctgt

SEQ ID NO: 129530 - DNA, 482 bp, Homo sapiens
gaattcattataaaagtgcagcctggatatgtggcgtgtgggaagaggactctagggggactctccagtttctggcatgaaaggaaggatgacagtgtcattaaattagaaaaacactggacggagaagtagagctgggatgaaacctcagttccatctggggcacattttctttcattcctttgggacatcaaatagaaatggcacggacgtggatttagaagtctgatgtggagaagcagaggttaggaaaatgattctctttgtccattttatttcccatgccttaagtcaaccaaatcaagactctgaacactttctacctatgtaacagccggtgcggggaagaaagcaaatgtcgtttaattctaataagggayacttctttaccaatagagttgtgtgaaaatgcatttggggggctgaacattaaatggtggaaaaattactgtacctatttatgcatcctagacaggcttgtc

SEQ ID NO: 129531 - DNA, 470 bp, Homo sapiens
ttacaaataaacaaaacaaaaatgtgtgttcactcaaaactcattcattctcaactggagtgagtaacaccctgagtaagtgaagatcggttcttgttgggagacaaaaaaattgcagctgttacagtggattttggccacccaaagggccacggcacatgaacaaatacacagtatatctgtgctattaaaatgtcgtgggggtaggacagttgggggagaatgtataaaaaagactcagggaggggagtataatgaaaasaaggcttagaagctgctggaacttgcttaagggagaattgcctccctgtgtatttgtggtcatctattgaattattcccttgtcccttgactctcacagccaagcgtcaacttgcaggtttcttgactctactgcggggcactgacctctgctggtggagatatcaaagtggcaggtgtgtgggcacagtctggtacttgtcgatcat

SEQ ID NO: 129532 - DNA, 610 bp, Homo sapiens
ggtttcatctcacggggatagaatggaagacttcccttggccctccttcctgttgccctagcctggagccatctttatctcatcaggcatctgcagtgactgggccaacaactccagtggtactagaggaattaaagacacacacacagaaatatagaggtgtgaagtgggaaatcaggggtctcacagccttcagagctgagagccccaacagagatttacccacatatttattaacagcaaaccaataattagcattgtttctatagttattaaattaactaaaagcatcccttaagggaaacaaagggatgggccgaattaaaggaataggttgggctagttamctgcagcaggagcatgtccttaaagcacagatcgctcatgctattgtttgtggcttaagaatgcctttaagcggttttccgccctgggcaggccaggtgttccttgccctcatttccgtaaacccacaaccttccagcttgtgcgttagggccattatgaacatgtcacagtgctgcagagattttgtttatggccagttttggggccagtttatggccagattttggggggcttgctcccaacagaggccccatggcagtgg

SEQ ID NO: 129533 - DNA, 562 bp, Homo sapiens
cgtgtgtgtgagtgtgtgagagagtatgtgtgtgtgaagaacttaaatgacacataattaataaataatatatacttaatagtatgtacttaataaaaattatatcgtagccttattgggaaaaaaaaaaaagacctttcaaagtaatttatccggaaagaaaaacaagtaaaattgatgtcaagtaaaatttgctcccagccaaattaaacactggcttcacaaaatgaaggggaaagccatatgttattttcaaaatggcttcccaagagggcaagcaataatgcaaagaggtattgaagctgcagaatgggggatattgtcaaagagaatttattaccccatgtataacaagaataatctccagtcccttgccaccaagttatggttcagaaagcctaatgaaaattctgggagggaattaaatttaatttgttgttctgggtttagaattgacccatagttattccaaggatataytgaaccttctgagttttcaaaaaataatttctagatggctagttaatctcaaagtcagaagagaaaaaaatgcacagttaaa

SEQ ID NO: 129534 - DNA, 505 bp, Homo sapiens
tagtaagtcttcacctaatgtcatcaataggctcttgaaaactgcaactttaagcgaaacatacagcaggtcctcaagcagcattgttttctttaacaacttttctttataacattgatgagaaaaaaaatggttttactatamatcatttcacttaaagtcacagtttccaagaatccattgacaatgttaagtgaagacttactgtataagaaaaataaatgatataatttcatataccttctctaccagcaacaatatgctatactactgtaatctagcatttagagtcaagtgttcttaccttgaaatgtttattgtatcaaaattcaagggacggaaatgtgagcagcagaatatgaagtagtctgcacacaggtgagtcatgatcaccatctacacacaggtggacatacccagctccttaagcatttggccaaggctttgcacatcttcccttctccaagcatggagactaatgccttgtgcatggtagatgttcaac

SEQ ID NO: 129535 - DNA, 409 bp, Homo sapiens
ttctggggacagtagtctaaatgcaaagctgatctctcccaatgccaagtcttaaattgacagtgatgaatgaaaaatctttatttgcatgcttgtggttttcttaaacagactacacgagtaaaatttagctgtttattggtcatattttttacccatttgaacataaattttgttactgggctaaaatggagaaatgctctccaggatattgagaaatgtatatactctgccattagccaaaaaagcaccacattctctttttaatgtamatgtgtgagctctctatctcttctacagaatgtgatgcatgggctttgtggcagctgtctgagttccagaggactttccttcccactattgccagactctggctgtgttctggataaatgaggttgtcagaaaagaa

SEQ ID NO: 129536 - DNA, 444 bp, Homo sapiens
tcacacatttcagagattgaaccatttcatgacggaaaaatgcatttacagyttatacaacagcagacagaaaggaggtaaactgttagatgaccccctttaaaagtcattttgttctactgccactgaaatagtactgtgaaagaaaatggggtgtttagaatttttttaaaaaattctgtagtgtcaaactttcacaactataaaagagcaatctccatgcaaaattttcaagaagtctgtgtttaggcagagaaattgttcttctggttgactttgtgaagaaaaaacaaataaacgcaaactaaacacatatgcacaaggaaataacattttgatattttgattttttaatgaaataatcataaaaggacttgacctcccaaatgtcaaccttcctctcctcgataactcagatgatcaaacttatattgcctaatatga

SEQ ID NO: 129537 - DNA, 397 bp, Homo sapiens
gtgtgcatcagttgtatgcaaataccatgccatttcataccacggtcttgactatctgtagattttggtattcacaagaggtcctgaatcrattccccagggatactgagggacaagtgtattgtgactggagttgcagcagccatcctgcaaccaaaaggcaaatgcgtgagaataaaggtcaacacaccaaatccaagagaatcgagataaagaacctgcaattttgatgggatctttgtggagcaaataaaaccgatacaagcaattattcatctctacttttcattaaatgagaacttgtgtccctacttgttcatatgactatgaaaaggatttctattaggagcagtcattttctgttacaattgttaattcacaaaagggacattctgta

SEQ ID NO: 129538 - DNA, 618 bp, Homo sapiens
tatactctgactcagccatatcaattttggcagttcagcctaaagaaatacaggcaccagtaggtcaggatakacacaaaaatttatagcagtattatttatagggaaaaaaaacagaacatgaacacaacctaaatactccctcaagagggaatgggggaatgagtaaataaattatagtccagcttcaccacaaaattctacacaggtgctaaaaggaatgagttgggtctacatatattgaccagaaaagatacccacaaaacacagtaaagtagaattttttaaaaagttgcatatatatatatatatgtatatatgtatatatatgtgcatgtgtgtgtgtgtatatatatacatatatataattgaaattcatgagaaaaattaaacatgtgtttacacatatgtatacacttgcaaaagcctggggaaagtatgtggaaaaataaccactagatagaaggaaaccatgggtttccttcatgggtagaattgggaattggaaaaggcacaaaattactaacttctttacatacttctaaactgactgatttgctaccctaagcagacattattttgtaattttttacaatcaagaaagtagtagacatgaca

SEQ ID NO: 129539 - DNA, 618 bp, Homo sapiens
tatactctgactcagccatatcaattttggcagttcagcctaaagaaatacaggcaccagtaggtcaggatagacacaaaaatttatagcagtattatttatagggaaaaaaaacagaacatgaacacaacctaaatactccctcaagagggaatgggggaatgagtaaataaattatagtccagcttcaccacaaaattctacacaggtgctaaaaggaatgagttgggtctacatatattgaccagaaaagatacccacaaaacacagtaaagtagaattttttaaaaagttgcatatatatatatatatgtatatatgtatatatatgtgcatgtgtgtgtgtgtrtatatatacatatatataattgaaattcatgagaaaaattaaacatgtgtttacacatatgtatacacttgcaaaagcctggggaaagtatgtggaaaaataaccactagatagaaggaaaccatgggtttccttcatgggtagaattgggaattggaaaaggcacaaaattactaacttctttacatacttctaaactgactgatttgctaccctaagcagacattattttgtaattttttacaatcaagaaagtagtagacatgaca

SEQ ID NO: 129540 - DNA, 464 bp, Homo sapiens
gtcaacacgaaacagccattaggccatggttaagcaagggrcacagagtttgttcccaggctaggattttgcaaatcgcttgaaagagatttgctgacaaacttggagaaagactcaatgatgtaagatagcattttattcctgagggagactaaggccccggattaatgacaactcctagttttctttatgaacaatagggcccgatgttttgtgcttactcaactacaattgatgaaaacaacaacaaaatctagaatgggtttagtgagaaacctgtgcctctgtaataatagctgttgcttttttctaagcaaccgctctgaaaatctccaacctcctccctccttctccccattttttttttgtctaaacttggaatgaatgtgtacacaatccaccctaatcaccggctttcaaggtctctagtttggataaatgctatgtgcttcagctgaaaagct

SEQ ID NO: 129541 - DNA, 595 bp, Homo sapiens
taagtgtaatttctatggcttaaagactcacctggggtcttttccatgcacatatttgtttgctggatttgctacgcttcctcttgccctcatcaagttgatcaagaatcaycttgtttaatcttctgatttcattgctatatacttaaaacagtcattgatcagaggttctcaaagcatcaatttattgaaattaattttagtaaaggcacatttagcagaagaatcaaatagaggcacttgtgtgctatgatgctgcaatgaagatgaaaaatctgtaccaataacaataactctataaactttcaaaagtttatgttgacataagaagaagaaatggcttgatatttgtcatatcaagtcaataatataaaatttctaggaggatttgttagtgaaagagcaatttcagcatttaaccataacgcacaaactttatatatctgaggaaagacatgttgaagtatcacagcaacaacaacaacaacaacaaaaaaccacacacacacacacacacacacacacacacaccacacagacacacacacatacacacacacacacacacacacacagaaaagtggatccttgtttt

SEQ ID NO: 129542 - DNA, 595 bp, Homo sapiens
taagtgtaatttctatggcttaaagactcacctggggtcttttccatgcacatatttgtttgctggatttgctacgcttcctcttgccctcatcaagttgatcaagaatcaccttgtttaatcttctgrtttcattgctatatacttaaaacagtcattgatcagaggttctcaaagcatcaatttattgaaattaattttagtaaaggcacatttagcagaagaatcaaatagaggcacttgtgtgctatgatgctgcaatgaagatgaaaaatctgtaccaataacaataactctataaactttcaaaagtttatgttgacataagaagaagaaatggcttgatatttgtcatatcaagtcaataatataaaatttctaggaggatttgttagtgaaagagcaatttcagcatttaaccataacgcacaaactttatatatctgaggaaagacatgttgaagtatcacagcaacaacaacaacaacaacaaaaaaccacacacacacacacacacacacacacacacaccacacagacacacacacatacacacacacacacacacacacacagaaaagtggatccttgtttt

SEQ ID NO: 129543 - DNA, 595 bp, Homo sapiens
taagtgtaatttctatggcttaaagactcacctggggtcttttccatgcacatatttgtttgctggatttgctacgcttcctcttgccctcatcaagttgatcaagaatcaccttgtttaatcttctgatttcattgctrtatacttaaaacagtcattgatcagaggttctcaaagcatcaatttattgaaattaattttagtaaaggcacatttagcagaagaatcaaatagaggcacttgtgtgctatgatgctgcaatgaagatgaaaaatctgtaccaataacaataactctataaactttcaaaagtttatgttgacataagaagaagaaatggcttgatatttgtcatatcaagtcaataatataaaatttctaggaggatttgttagtgaaagagcaatttcagcatttaaccataacgcacaaactttatatatctgaggaaagacatgttgaagtatcacagcaacaacaacaacaacaacaaaaaaccacacacacacacacacacacacacacacacaccacacagacacacacacatacacacacacacacacacacacacagaaaagtggatccttgtttt

SEQ ID NO: 129544 - DNA, 378 bp, Homo sapiens
gcattgtgagttgaggtatattatttaatgcttctrtgcctcagttttgtcatttgcaaaatgggactcataagagcgcctacatcatagggttgttgtgaggatccaagcggtggtagaagtaagacgcagagccaagtggcttgcaaagataagggtttaccagaaggtgggttggtgtaaaagcaattgtagttttgccattaaaagtaaacgtaatagctgttaggttggtgcaaaaggaattgtggtttttccattaaactgtaattacttttgcgccaacctattagtgattgttattatggtttgaacatggttagaatcacactaccacggtttctgggcattggtagggacattagaaatacaatcatt

SEQ ID NO: 129545 - DNA, 513 bp, Homo sapiens
ggaaaacacctatatgcagagacagtgcctgtctgtaggtgttcctatctgtctgtctgtctctctctctcaggcagtgctgggaaaactgccaaatacctgctctttggcttccctttgtccagccaccatgcagctcatcttcctcaagaacatttgcttccttcagctgtgcagatgctgctgatggagctacaagccctttgtgtgcagggagatggcagggckgtgtgtgtctcccattcccccagggcattttccttacgagattttagggggaaattactaaacaagccttcaagcaaaggtaaatggattgggattttgtaccagagtcccccaaacttcaagtgctctcaacagctaaaggtatttccagggaggcaggaaaaaagatgacatttgcaacctctcagaaggcacttattccaagtataatccaatttagaaagtgcatttgctttaaacttcctctaaaaacctaaatagaaaaaatatttctaaatcttggtc

SEQ ID NO: 129546 - DNA, 548 bp, Homo sapiens
aacctgaactcagattactgaaccacagaaactgagagataatgtttactgtgttaagccattaattttgagttaatttcttatgcaacaatatgtaactggtacaacagtgttttctggtatttcactggttaccagacaaagataattgttttaaaagtgtaattttccccctctcaaacttagccatacattaatgcctctaaacaagttacctacatatgaaaataacttctgctctttactsaattaaggataatgaactgtttaccctccattaaaaatcaattaaggaacggcactttctctctttgatttcaatctattgactagttatccagaacctcagggacacaaattgacaaaggaaattattagtgctatgtcatcccctgagaaaattcagacaaatcttctcttgaaattctctgccctcctttaacttaaaactattcacagccgtaatggacaacagcactgatggagaacactaagtagcaggttcatatattctatgccaatacttaccacgtatctttatggtaaac

SEQ ID NO: 129547 - DNA, 548 bp, Homo sapiens
aacctgaactcagattactgaaccacagaaactgagagataatgtttactgtgttaagccattaattttgagttaatttcttatgcaacaatatgtaactggtacaacagtgttttctggtatttcactggttaccagacaaagataattgttttaaaagtgtaattttccccctctcaaacttagccatacattaatgcctctaaacaagttacctacatatgaaaataacttctgctctttactgaattaaggataatgaactgtttaccctccattaaaaatcaattaaggaayggcactttctctctttgatttcaatctattgactagttatccagaacctcagggacacaaattgacaaaggaaattattagtgctatgtcatcccctgagaaaattcagacaaatcttctcttgaaattctctgccctcctttaacttaaaactattcacagccgtaatggacaacagcactgatggagaacactaagtagcaggttcatatattctatgccaatacttaccacgtatctttatggtaaac

SEQ ID NO: 129548 - DNA, 548 bp, Homo sapiens
aacctgaactcagattactgaaccacagaaactgagagataatgtttactgtgttaagccattaattttgagttaatttcttatgcaacaatatgtaactggtacaacagtgttttctggtatttcactggttaccagacaaagataattgttttaaaagtgtaattttccccctctcaaacttagccatacattaatgcctctaaacaagttacctacatatgaaaataacttctgctctttactgaattaaggataatgaactgtttaccctccattaaaaatcaattaaggaacggcactttctctctttgatttcaatctattgactagttatccagaacctcagggacacaaattgacaaaggaaattattagtgctatgtcatccccygagaaaattcagacaaatcttctcttgaaattctctgccctcctttaacttaaaactattcacagccgtaatggacaacagcactgatggagaacactaagtagcaggttcatatattctatgccaatacttaccacgtatctttatggtaaac

SEQ ID NO: 129549 - DNA, 595 bp, Homo sapiens
taagtgtaatttctatggcttaaagactcacctggggtcttttccatgcacatatttgtttgctggatttgctacgcttcctcttgccctcatcaagttgatcaagaatcaccttgtttaatcttctgatttcattgctatatacttaaaacagtcattgatcagaggttctcaaagcatcaatttattgaaattaattttagtaaaggcacatttagcagaagaatcaaatagaggcacttgtgtgctatgatgctgcaatgaagatgaaaaatctgtaccaataacaataactctataaactttcaaaagtttatgttgacataagaagaagaaatggcttgatatttgtcatatcaagtcaataatataaaatttctaggaggatttgttagtgaaagagcaatttcagcatttaaccataacgcacaaactttatatatctgaggaaagacatgttgaagtatcacagcaacaacaacaacaacaacaaaaaaccacacasacacacacacacacacacacacacaccacacagacacacacacatacacacacacacacacacacacacagaaaagtggatccttgtttt

SEQ ID NO: 129550 - DNA, 530 bp, Homo sapiens
gataggtttatggatacattgtggtgttgggttcataagataaacgtatacttagctccaaatttatcaagttgtatattaattatttacagctttttgtatgccaaaaattaattttaaaaatttatgatgttatgataagcaagtcaaaaataataggtagagaaatagagaaataatgtaataatatatcggttcaacacataataataaatattaacactgaaaattaaaaaacattaacattgttttaaaaagaggagattagatcatacagagagataycagagatgcatacacacagaggaaagtctgtgtgaggtcagaatgagaaggtggctatccattaagccaaggagagaggcctcgggagaaaccaaatttgctgacaccttgatcttgggcttccaaactgtgagaaaatatttctgttgttttagccacacagcctgtggcattttgctaagactttcccagcagtttaatatcctacctatatcagctgttgattggtcttatccattaattaa

SEQ ID NO: 129551 - DNA, 572 bp, Homo sapiens
tacttcctggtcctgttttctcatctgtcaactttaaaatgttatattagccatgtcaaaaacagtatcagttgtactttgcatgcacaggcaagtgcaacacagacaatgcaccttaaaatagcaaaaagaaatagcattataaaaaggcaacaaaagaagaatctaatagaggagcttggaaaagctactgctcgcaaaccaaaggtgcacagagatscataaagaaaatgtgttattcatttttaaagaagtgaatagtgttgtagaaaactagggcactgccctggacaaattaaacaaaggttggctttctgcattgggtgttttatgtgtgatcccaaaatagagcctctaaatcaagccccattatgcagacggggtaatcgccatgccctgtataattttacagttggcgctgcttcctacccctattcagacattaatctctgacagtttagcaagtggcaatttacatattttaccaattcaaattggttgtatctcacctttgtattgattttgtatccaaaatataaaacatctttggaaggcaaagcctgcttaatgtt

SEQ ID NO: 129552 - DNA, 581 bp, Homo sapiens
ttgtttactcagtgtttgctcaggtttcttggtatttaaacatagccagaaacagggaacagagcttgattcagactgtggtgtaagaatctgtagtggacttgctgtgtgtgcaatttggtaggcctgagggataaagacaaaactttactttcccttagtccatctcaattcaattcaataagtagtttatggacattccaygggtagatgatagaggtacctacggagctcacggtcaggtaatgtagaaagagaaagaagcattatacaaccaacataaatacaatgcagaattacatgaaatggttgtaaatgtaaagtgaacaattaattctgactgctgggattgggctgggataggcattatggaagagaggactacagatctgggcttggaagtaaagcaatgtttcccaagtattttttacattatcaccccccaatgggcctttttagactgtccccattacctcccccaacccataaaatgtcagtaccacagatatactgtgtacctatttatgctgtatggtacagagattttttttgcccctccccaaccccagaaccaagcttcc

SEQ ID NO: 129553 - DNA, 443 bp, Homo sapiens
acatagactacgcaacactaagattcgcagttactagaaaaggtttttttacagtccaaatgatctgtgatggacttcaccatccccacggctgctgcctcccataatctgcctcaagtacaacacaggctccctgcacttattccaaaaagtaacatctatcaaagctacaaatttgaaacaggtgcatatttagcatgtaaatgtagaacaactttatatttccttagctgcattcaacacgctcatgaaatttagatttctacagtttagtccaaagttcctacaaccttcaaaaattaaaaaaaaaaaaacaaaacaaaacaaaaaaagattagcaaattgaattataaacaagaaggatatggaaacttgacttcccaccmgtgaatggtctcggtaaacaaaccctaagtccacatgcaagcctccattaattggtt

SEQ ID NO: 129554 - DNA, 443 bp, Homo sapiens
acatagactacgcaacactaagattcgcagttactagaaaaggtttttttacagtccaaatgatctgtgatggacttcaccatccccacggctgctgcctcccataatctgcctcaagtacaacacaggctccctgcacttattccaaaaagtaacatctatcaaagctacaaatttgaaacaggtgcatatttagcatgtaaatgtagaacaactttatatttccttagctgcattcaacacgctcatgaaatttagatttctacagtttagtccaaagttcctacaaccttcaaaaattaaaaaaaaaaaaacaaaacaaaacaaaaaaagattagcaaattgaattataaacaagaaggatatggaaacttgacttcccacccgtgaatggtctyggtaaacaaaccctaagtccacatgcaagcctccattaattggtt

SEQ ID NO: 129555 - DNA, 619 bp, Homo sapiens
attaactgggtaaaataagtagaacaggtagcccaggtcccaacatcaggcaagagcttcaaagttagccataattgttacgtgaattattcctacataattaattgttattgttattttcttttttcgttgtcttttgcttttctcattctctcaattcttcatcacatctcttttctccccctccttatttgcactgatttcaacatgtctrcctttcatcactctcatctcaccaagtgacttattttcatgagtgacttatttattcatgggtgaattctacagattgttgttttagacttctgataaggaaaggattcatatgaaaaaatgttgatcagacagactaggggaacaactatccagttgaacccctggcatctttcatcatcatcatcatcatcatcatcattgtcagtcattctcttggctagcatctattgagctgcgcctccagagctatgtcaggtataatgactcaggaaatgctcacgacaatgctctgaggtaggaactacggttaaacccatttacagtggtcaaaactgaggaacaaagaggctcaataactgagcccacaggtgtgcagctcaaaatcaaaatgccccaaactggg

SEQ ID NO: 129556 - DNA, 619 bp, Homo sapiens
attaactgggtaaaataagtagaacaggtagcccaggtcccaacatcaggcaagagcttcaaagttagccataattgttacgtgaattattcctacataattaattgttattgttattttcttttttcgttgtcttttgcttttctcattctctcaattcttcatcacatctcttttctccccctccttatttgcactgatttcaacatgtctgcctttcatcactctcatctcaccaagtgacttattttcatgagtgacttatttattcatgggtgaattctacagattgttgttttagacttctgataaggaaaggattcatatgaaaaaatgttgatcagacagactaggggaacaactatccagttgaacccctggcatctttcatcatcatcatcatcatcatcatcattgtcagtcattctcttggctagcatctattgagctgcgcctccagagctatgtcaggtataatgactcaggaaatgctcacgacaatgytctgaggtaggaactacggttaaacccatttacagtggtcaaaactgaggaacaaagaggctcaataactgagcccacaggtgtgcagctcaaaatcaaaatgccccaaactggg

SEQ ID NO: 129557 - DNA, 550 bp, Homo sapiens
tcacaattgcagagatgagtagttgccacagagaccatctggccttcaaaactgaacgtatttactatctactacctgactctacagaaaaaaagttttctaaccctgtcttataacaaccaccsaagttaagtaaggcacagattgccttatttgggtaattgtgtgtgtgttgggggatgggtggtgaatgtttctgtgtgttcatgaatgtatgtatgtgtcctacaaatttcatcctatatggtagtctcattcctgaaatatcacgtgtcaattgaataataatttcaatgacctcagtttgctaattaaagaactattacaccaagtgatttgttctaatgaagagttcttctaaaaagtgaaaaggcaacacctaataccatactgttttattcagtattttggcttgctgtaatgtgcccctgttcatctaaaacccatatatgccagcacacatacttacacactcgtaaatacattcatatgtacattcacattcatattcactcattcacacacacacacacacacatacatgcacaca

SEQ ID NO: 129558 - DNA, 598 bp, Homo sapiens
aaatgccttggcctttatatggaaatgtggaactgagtggatatgctgtttttgtctgttaaacagagaagctggctgttatccactgagaagcgaacgaaacagtcgggaaaatctcccattatcgtagagatccgcattattaatctcaggagcctgtgtagcgtttataggaagtagtgttctgtcatgatgcctgcaagcggtaacgaaaacgatttgaatatgccttcaggaacaatagaaatcttcgtgcggtgttacgttgaagtggagcggattatgtcagcaatggacagaacaacctaatgaacacagaaccatgatgtggtctgtccttttacagccagtagtgctcgccgcagtygagcgacagggcgaagccctcgagtgagcgaggaagcaccagggaacagcacttatatattctgcttacacacgatgcctgaaaaaacttcccttggggttatccacttatccacggggatatttttataattattttttttatagtttttagatcttcttttttagagcgccttgtaggcctttatccatgctggttctagagaaggtgttgtgacaaattgccctttca

SEQ ID NO: 129559 - DNA, 472 bp, Homo sapiens
tcacttcatccttacaacttttctatgagacagatattattattattgtmcccagtttacagatgaggaaagtaaggtacagtgaggtttaagtaacttgtctgaggtcacatatcgcttggttcaaaccaagacagcttggctccaaaaactgtgctccagaccactgtactaatctactatgaataactttaaaaggtaaactttatttcaatttctcatgcagaaaatttaactcagccaatgctatttacattcatacttctaaccaggcagaacctaatcctaaaactatcagcttgtttgctagagtataaatgggaggatgaatcatgaatttgctcattgctcttccctgttgcagaaaccagttgtgtgattatgggcaagtcaatagtttctctggatcagcctgtcaatttatgtttattgagaacttactgtgtgccaggaaatggactaggtacaaggg

SEQ ID NO: 129560 - DNA, 472 bp, Homo sapiens
tcacttcatccttacaacttttctatgagacagatattattattattgtacccagtttacagatgaggaaagtaaggtacagtgaggtttaagtaacttgtctgaggtcacatatcgcttgrttcaaaccaagacagcttggctccaaaaactgtgctccagaccactgtactaatctactatgaataactttaaaaggtaaactttatttcaatttctcatgcagaaaatttaactcagccaatgctatttacattcatacttctaaccaggcagaacctaatcctaaaactatcagcttgtttgctagagtataaatgggaggatgaatcatgaatttgctcattgctcttccctgttgcagaaaccagttgtgtgattatgggcaagtcaatagtttctctggatcagcctgtcaatttatgtttattgagaacttactgtgtgccaggaaatggactaggtacaaggg

SEQ ID NO: 129561 - DNA, 655 bp, Homo sapiens
tttggctctgtgtccccacccaaatctcatctcgaattgtaatccccatgtgttggrggagaagcccctcactccccacccctgtcgtgctccaacatgtaaagatgtgcttgctttctcttcgccctccgccatgattggaattttcctgaggcctgcctccccagccatgtagaactgagtcaattaaaccccttttctttataaatttcccagtctcaggtagttctttatagcagtgtgataatggactaatacagagccttttgaaacccagccagcagaccagcacttagcttctgcatgtacactttgacaggtggggaactcactactctgtcagagagattgttcctttactggacagcccaataggtcagaaagcacaaacttgtgctaaagtgaaaagctgaaatcaagttaatctgcagctttcatccttcagccctagctgtatcctctgcaacaatcagactcagtctacttacctgccatcaaatataagaacacagagaccttatatacaaacatgcacacacatatttctcttaatctgggctaaataacctggtttgttttcagctgtctcttatgtggaatgatttctagacctcttgccacccctctattcacctacttctgggtgctttctcta

SEQ ID NO: 129562 - DNA, 178 bp, Homo sapiens
tattaatatcagtgtaagaattttagaaaccatctggatgaccccctataactgggcactgctttgtgattttagtgcccattctggcttttgtgtttrcggcaacactgctgccaattagaaatattttaaatatctcaggctaatgagaaaataacagaaatcagcataggatgtg

SEQ ID NO: 129563 - DNA, 634 bp, Homo sapiens
tggctctgctcccctttacagcagatcttctccagagagttgtctataamtgctctctcaattcttactcctccaattctccattgaactcactgcagtgagttcagttgaatgccttaggtgaaggcttaagtgaaagtagtcaggctttcatccccaaaactacacttgtcaaggctaccagtcactccattggtgtcaaatccaatggatgttgctcagtcctcatcaagcagcagcatttagcacattagtttcttcatttttcttcaaatatgttcttcagttgtctctcagtacaccacactctgggttttgctttacctcattggccactaatgtatcagtcttcttttctggtttctcctcatcctcctgatttctaaatatcagagtacccttgggctaagtcctcggctttctcatcttttctatttatgttcacctgctaggtgatctaatgtggccccatggctttaaatactttggatattgtagccttgtagtatagtttgaagtcaggtagcatgatgcctccagctttgttcttttggcttaggattgacttggcaatgcgggctcttttttggttccatatgaactttaaagtagttttttccaattctgtgaagaa

SEQ ID NO: 129564 - DNA, 634 bp, Homo sapiens
tggctctgctcccctttacagcagatcttctccagagagttgtctataaatgctctctcaattcttactcctccaattctccattgaactcactgcagtgagttcagttgaatgccttaggtgaaggcttaagtgaaagtagtcaggctttcatccccaaaactacacttgtcaaggctaccagtcactccattggtgtcaaatccaatggatgttgctcagtcctcatcaagcagcagcatttagcacattagtttcttcatttttcttcaaatatgttcttcagttgtctctcagtacaccacactctgggttttgctttacctcattggccactaatgtatcagtcttcttttctggtttctcctcatmctcctgatttctaaatatcagagtacccttgggctaagtcctcggctttctcatcttttctatttatgttcacctgctaggtgatctaatgtggccccatggctttaaatactttggatattgtagccttgtagtatagtttgaagtcaggtagcatgatgcctccagctttgttcttttggcttaggattgacttggcaatgcgggctcttttttggttccatatgaactttaaagtagttttttccaattctgtgaagaa

SEQ ID NO: 129565 - DNA, 545 bp, Homo sapiens
tctccagacatggttcactgagacagtaaactaaaaatttactttaagcattctcaagaatgttttactttatttactttcaaaatatattaacttttttccatcaatatttgatatttaacttggaaaaaggatttttaaaggatgaaactgaaagtaagacattaacatttaggtggctgtaggttttttgttcatatgttaaatacttctgtgtttctgtagcactgagttcattagattcataaatatttacatttctgtcttccccagactgaacgcctcccaggctagagactgggacttaattatccctgtatccccattgcttaatatagtgcttggcatttaataggcactaatrtccattgcatgtgcagacattgtagacaaacttaatgctgtaagacagatttattcttcaggtgaattcttcagtggtccaagggtttgtcttctagacgatcatgagaactgcttcttcccctcctacacagatgtgctcacataactcgttgtattttcagtatccactgaaaaagaaa

SEQ ID NO: 129566 - DNA, 662 bp, Homo sapiens
tgatatgcaatttctaaaccactagtcttttccaaatatgagttgaactcctcttccagcattttatatttcctgtagtatttaagtttctttagattcatgcagtcaaaccttgacaattatctccttccttctgaaatcacacaaaaatcttgtttgcatttgtacagtattgtagggtctgtagctggcctatggcagatataagaagcaaacagtagttgctccctaaaagttttttttggagaaagtggagtgtggactgtattartccattttcacactgctatgaagaactgcccgagactgggtaatttataaaggaaagaggtttaattgactcacagttcagcatggctggggaggcctcaggaaacttacgattgtggtggaaggtgaaggggaagcaaggcaccttcttcacaaggtggcaggaaggagaatgaacatgggaggaactaccaaacatttgtaaaaccatcagatcttgtgagaactcactatcaggagaatagcatgggggattataattacatagggattataattcaagatgagatttggtggggacacaaagcctagtcatatcgtggaccatgataatctcagaggctttgggaagtgtgctaatatctacatttcctgtaataacttttatatct

SEQ ID NO: 129567 - DNA, 662 bp, Homo sapiens
tgatatgcaatttctaaaccactagtcttttccaaatatgagttgaactcctcttccagcattttatatttcctgtagtatttaagtttctttagattcatgcagtcaaaccttgacaattatctccttccttctgaaatcacacaaaaatcttgtttgcatttgtacagtattgtagggtctgtagctggcctatggcagatataagaagcaaacagtagttgctccctaaaagttttttttggagaaagtggagtgtggactgtattagtccattttcacactgctatgaagaactgcccgagactgggtaatttataaaggaaagaggtttaattgactcacagttcagcatggctggggaggcctcaggaaacttacgattgtggtggaaggtgaaggggaagcaaggcaccttcttcacaaggtggcaggaaggagaatgaacatgggaggaactaccaaacatttgtaaaaccatcagatcttgtgagaactcactatcaggagaayagcatgggggattataattacatagggattataattcaagatgagatttggtggggacacaaagcctagtcatatcgtggaccatgataatctcagaggctttgggaagtgtgctaatatctacatttcctgtaataacttttatatct

SEQ ID NO: 129568 - DNA, 565 bp, Homo sapiens
ctgcagcctctaaatcagaatttggtgcttcatctcgcacttttatgttatggggacagcttctttccttaaacttcgtgaaccagcctttgctagcttctaactttccttctgcagcttcctcacactttatagaaatgaagggagttagtgccttgctctggattaggctttggcttgtagaaatgttgcagctggtttgatcttctatctagaccactaaaactttctccatgtaagcaataaggctgtttgacctacttaattkttgtgtgtttcctggagtagctcttttaatgtcctccaaaaacttttcctttttgttctaaacttggctgattagtacaagaggcctacctttctgcctatctcagttttcaacatgccttctttactaagcttaatcatttttagcttttttatttaaagtgaaaagtttgtgacccttttcacttgaatactttgaggccattgtagggttattagttagtctaatttcaatattgtgtctcaggaaataggaaagcccaaggagaggaagagagactgtacaaaaacttgtcaa

SEQ ID NO: 129569 - DNA, 565 bp, Homo sapiens
ctgcagcctctaaatcagaatttggtgcttcatctcgcacttttatgttatggggacagcttctttccttaaacttcgtgaaccagcctttgctagcttctaactttccttctgcagcttcctcacactttatagaaatgaagggagttagtgccttgctctggattaggctttggcttgtagaaatgttgcagctggtttgatcttctatctagaccactaaaactttctccatgtaagcaataaggctgtttgacctacttaatttttgtgtgtttcctggagtagctcttttaatgtcctccaaaaacttttcctttttgttctaaacttggctgatwagtacaagaggcctacctttctgcctatctcagttttcaacatgccttctttactaagcttaatcatttttagcttttttatttaaagtgaaaagtttgtgacccttttcacttgaatactttgaggccattgtagggttattagttagtctaatttcaatattgtgtctcaggaaataggaaagcccaaggagaggaagagagactgtacaaaaacttgtcaa

SEQ ID NO: 129570 - DNA, 376 bp, Homo sapiens
agggctcgcatctgacatggtcacgagagctggagttagaagtgcctgcctctgtagayaacaccatgtggcccctactttctcacagttctttttctgctgtggctttaaaccactcactccttttatttatgagatctgcttcgcccatacagccctagggttaggcgctattaagtatctgaatagtactttgtaaaatgtgaagtgtttgatattcgttgatggtgttattacgttcaagattatatacttatttatcaacagagttggatctagagctcaggtctcctgacactcagttactatttctattgtaccacgctatacatacaaacaggaaaacaagacaggaatggttatagaacgggaattc

SEQ ID NO: 129571 - DNA, 376 bp, Homo sapiens
agggctcgcatctgacatggtcacgagagctggagttagaagtgcctgcctctgtagacaacaccatgtggcccctactttctcacagttctttttctgctgtggctttaaaccactcactccttttatttatgagatctgcttcgcccatacagccctagggttaggcgctattaagtatctgaatagtactttgtaaartgtgaagtgtttgatattcgttgatggtgttattacgttcaagattatatacttatttatcaacagagttggatctagagctcaggtctcctgacactcagttactatttctattgtaccacgctatacatacaaacaggaaaacaagacaggaatggttatagaacgggaattc

SEQ ID NO: 129572 - DNA, 490 bp, Homo sapiens
tttaggagagagattaggaccagactgagagtctttaagggattatatcaggtgctgcagtgctacagtgaaattgaaatgaaaactcaacttctgtgagtttcaatactattctgccagctgcccagaaacatcctgggataaagcttaggggaatcccaagagaagtttggtcttgggagaagaattttttagtaccaaatgtgtccattcctctccacctggacttgggaggtgtaggcacatctctggcagagggtgcctcaaaccctaacaaagtcagctttccttcttcctgccaagagagggcattaattaaatacagccctatcattttggacagtgtaaattcactcgtatgtgggtccactgtatgtttttccacagccctagcattttatcctgattgttactaaatgtataaataatgtaaaatatatacayacctgcttcacaaaattaaaactacaatacttggttaacttaggaa

SEQ ID NO: 129573 - DNA, 575 bp, Homo sapiens
tgctataacctaaaacagtaagtagaagtctggaggccgtgattttcacatccaggaactcaagggaagaatggagtgtataggcagagcatggccgtgtccacctgtgccaggtttttgtttttcactgtgcttcatctttaacacatttgttgaagactttttsacattgatagactatgtctagcaataagacattagtattcgttgtggattagaaggtaatccccacattattcccctcaccttctgcagtttagctttgatttcactacctaagaggtctttttctggaaagtacacttttttaatgtatggcagcttcaaaagcaggagctgaagaatgcatccagttttcctagtctgctaaaggcagggactgtggaaatagaatcagaatgtcgttattctacaacttttctaaatcaaatttatttcccaagcatgaagtgttaacagcaccctacccactggaatattttgagggacaaaagaaattctgacttgattaccaggactctcgtctccctcttaatatgtctctaagaggttttttgccctggaatccggtgccc

SEQ ID NO: 129574 - DNA, 349 bp, Homo sapiens
tcactattatttagtgaaatgagatattatgatattttctgaattgtgattaaaaaggcaactttatgcccatgcaacagaaactataaaaaatacagagaatgaaaagaaacagatagattttttagttctttargcccgtagtctgcaaatccttttatgattttctatcaaacaaaagaggaaaatagaccagttgcaatccaaacgagagtctaatagaatgaggtcgaaaagtaaatcgcgcgggtttgttactgataaagcaggcaagacctaaaatgtgtaaagggcaaagtgtatactttggcgtcaccccttacatattttaggtctttttttattgtgc

SEQ ID NO: 129575 - DNA, 568 bp, Homo sapiens
taacccatcacatatacctgccgttcactattatttagtgaaatgagatattatgatattttctgaattgtgattaaaaaggcaactttatgcccatgcaacagaaactataaaaaatacagagaatgaaaagaaacagatagattttttagttctttaggcccgtagtctgcaaatccttttatgattttctatcaaacaaaagaggaaaatagaccagttgcaatccaaacgagagtctaatagaatgaggtcgaaaagtaaatcgcgcgggtttgttactgataaagcaggcaagacctaaaatgtgtaaagggcaaagtgtatactttggcgtcaccccttacatattttaggtctttttttattgtgcgtaactaacttgccatcttcaaacaggagggctggaagaagcagaccgctaacacagtacataaaaaaggagacatgaacgatgaacatcaaaaagtttgcaaaayaagcaacagtattaacctttactaccgcactgctggcaggaggcgcaactcaagcgtttgcgaaagaaacgaaccaaaagccatataag

SEQ ID NO: 129576 - DNA, 452 bp, Homo sapiens
agtccatcatcagcaaacaccctctgtcctcagtcttttctgagcatcccccctttaccctcgtgctctgataaccctctcctgctgcttctgcagctctctcaaacactgtttttgttttgttttgttttgttttgtttgtttgtttgagacagggtctcgctctgtggcccagactggagtgcagtggcatgatctcagctcactgcaacctccgcctcccrggttcaagcgattttcctgcctcagccccccgagtagctgggattccaggtgcatgccaccacgtccaatttttgtatttttagtagatggggtttcgtcatgttggccaggctggtcttgaactcctgacctcaagtcatccacccaccttggcctccccaagtgctgggattacagacatgagccaccatgcccggccctttttttttttgtacttccacagcttc

SEQ ID NO: 129577 - DNA, 436 bp, Homo sapiens
ccatcatcagcaaacaccctctgtcctcagtcttttctgagcatcccccctttaccctcgtgctctgataaccctctcctgctgcttctgcagctctctcaaacactgtttttgttttgttttgttttgttttgtttgtttgtttgagacagggtctcgctctgtggcccagactggagtgcagtggcatgatctcagctcactgcaacctccgcctcccgggttcaagcgattttcctgcctcagccccccgagtagctgggattccaggtgcatgccaccacgtccaatttttgtatttttagtagatggggtttcgtcatgttggccaggctggtcttgaactcctgacctcaagtcatccacccaccttggcctccccaagtgctgggattacagacatgakccaccatgcccggccctttttttttttgta

SEQ ID NO: 129578 - DNA, 575 bp, Homo sapiens
ttccttgattgaatttgtggagtaggaagtgctatgaaccttggcttccctatatacatgccctagggaaggcctagaatcttcgtcagttaaatatcactatttgggatttctctccaaatgaagtaactatgcagaaaaacatttggttgtttttgatttgatctaaccctatgctatccaatacagaagacactagccatatgtggatgtttaagttaattaaaatgaaataacatgtrgtttattagctgctctagccacatttcaagtgctcattagtcacaagtggctaatggttactgtattgaacaatcaaacattctgttgtacagcaatggtctaatccatttttaaaacaaaaagtttctgtgagatacataatcttaaattgtgcaatgttatatataccaccattaattcattctaaaaatataacctatcttattcatgatccattgaaaaatggaaaaaatagatctaatagtttttttttaatttcggatttaatatcatttgatttaaaaagatattgtcaaatttaaataacttggaagtttcatgcatgctagaac

SEQ ID NO: 129579 - DNA, 575 bp, Homo sapiens
ttccttgattgaatttgtggagtaggaagtgctatgaaccttggcttccctatatacatgccctagggaaggcctagaatcttcgtcagttaaatatcactatttgggatttctctccaaatgaagtaactatgcagaaaaacatttggttgtttttgatttgatctaaccctatgctatccaatacagaagacactagccatatgtggatgtttaagttaattaaaatgaaataacatgtagtttattagctgctctagccacatttcaagtgctcattagtcacaagtggctaatggttactgtattgaacaatcaaacattctgttgtacagcaatggtctaatccatttttaaaacaaaaagtttctgtgagatacataatcttaaattgtgcaatgttatatataccaccattaattcattctaaaaatataacctatcttattcatgatccattgaaaaatggaaaaaatagatctaatagttttttttwaatttcggatttaatatcatttgatttaaaaagatattgtcaaatttaaataacttggaagtttcatgcatgctagaac

SEQ ID NO: 129580 - DNA, 546 bp, Homo sapiens
tagaatcctcttaatgggagtgatataggcccaatttgccctactttaaatttacttcatactatttcaatgagtgctgtggggttttttgttttgttttgtttgctgttttttgtttttgagacagggtctcactttgtcacccaggatggagtgcagtgagtggcatgatctcagcttactgcagcctcgacctcccagattcaagagatcctcctgcctcagcccaccaagtagctgggactataggcatgccactacaagtggttaattttagtattttttatagagatgggattcctccatgttgcccgggctggtctcgaactcctgagctcaagagatccacccgcctcggccacccagagtactagggttacaggtgtgagccactgcaccccgctgaatactattttaagacactgtaaagtcaaggtgtccttttgataaaatgaataatycctaattttccttctgaaggaaaaaaaggcaaaattcctttattttcacgttaggcttcctaaaagcagggtaaaataaattgac

SEQ ID NO: 129581 - DNA, 478 bp, Homo sapiens
ctcatgcctgtaatcacagcactttgggaggctgagatgggagaatacttgaggccaggagttcaagaccagcctgggcaacatagcaaggccctgtctacaaaaaaaaaaaaaaaaaaaaaaattagctgaacatgttggcacatgactgtagtctcarctactcgtgaggctgaagtgagagaattgctagagcccaggaggtgaagactacaagtgagctgtgatcaccccactgcaatccagactggacaacagaacgaaaccctgtctctaaaaaaaaaaaaaaaaaaaacctcaaaattaaaaaaataaaaagaaccaacaagtggttcactgttatcacattgggaattaagtaaaagaaaaacaaaagagctcctatgactggctatctgtgagcatttactatgtgccaggcgttattcttggtgttttgcatgcagtatctcagatcatcttcataagaccttatcaa

SEQ ID NO: 129582 - DNA, 478 bp, Homo sapiens
ctcatgcctgtaatcacagcactttgggaggctgagatgggagaatacttgaggccaggagttcaagaccagcctgggcaacatagcaaggccctgtctacaaaaaaaaaaaaaaaaaaaaaaattagctgaacatgttggcacatgactgtagtctcaactactcgtgaggctgaagtgagagaattgctagagcccaggaggtgaagactayaagtgagctgtgatcaccccactgcaatccagactggacaacagaacgaaaccctgtctctaaaaaaaaaaaaaaaaaaaacctcaaaattaaaaaaataaaaagaaccaacaagtggttcactgttatcacattgggaattaagtaaaagaaaaacaaaagagctcctatgactggctatctgtgagcatttactatgtgccaggcgttattcttggtgttttgcatgcagtatctcagatcatcttcataagaccttatcaa

SEQ ID NO: 129583 - DNA, 579 bp, Homo sapiens
aggggactgtcagcaggccttaccactgcttctaaatccttcatttttgttgaaagcaaagatatgaaaaccacctgacttgcaaaaggatttgttattctgcctttagggtccaggaaaaccagtatttggactgtcccttttcttttagtattgggagggttttacatcccaggaaagtgactgtagagagttaggcagaaagcatggctttcctgtgtaaagtgggagtggaggggagccattgggaaggcagagaggagggaaaaaagaacacctcagkcagtttggctcattaaacaggaggatggcaaagtggcttcatgcgcatgcgccctttagcaagtctttggtgttcacgggcatgtggctgcccagatctagggcattagattataactgggcagcttaacttcaaaatacattttaaaacattttttctttttcttttgggtttcaagatatacccttgaagcaaactgcaggagccttttccctaagccttaaaacagactccatgtccctccctttctcaccgtatatactcccttcacgtttatccagccttctgctagtgtc

SEQ ID NO: 129584 - DNA, 579 bp, Homo sapiens
aggggactgtcagcaggccttaccactgcttctaaatccttcatttttgttgaaagcaaagatatgaaaaccacctgacttgcaaaaggatttgttattctgcctttagggtccaggaaaaccagtatttggactgtcccttttcttttagtattgggagggttttacatcccaggaaagtgactgtagagagttaggcagaaagcatggctttcctgtgtaaagtgggagtggaggggagccattgggaaggcagagaggagggaaaaaagaacacctcaggcagtttggctcattaaacaggaggatggcaaagtggcttcatgcgcatgcgccctttagcaagtctttggtgttcacgggcatgtggctgcccagatctagggcattagattataactgggcagcttaacttcaaaatacattttaaaacattttttctttttcttttggrtttcaagatatacccttgaagcaaactgcaggagccttttccctaagccttaaaacagactccatgtccctccctttctcaccgtatatactcccttcacgtttatccagccttctgctagtgtc

SEQ ID NO: 129585 - DNA, 585 bp, Homo sapiens
ttttctatataaaactttcaacacttagataataaagtttctgaaaaatctcagtattttgtttaatgacaaacttttggtttacttgctgattttgtttaatgtttagcaatctggaaacctgaccatcaatcatgtgctaaaaaactatctcccttctcaactgcagttttcacttaatgaaaaactacatacaatgaggacaccagtatgatagggggtaggataatgctgtggaaacactaraagtcagaagacctggttttacattggggccccaccatttgctgactgtgtgctcttaggtttgtcgttgtacctttctcaggtttaggttcttcactggcaaaagggagattaaaatctctgccctatttaccccacagagttgtgaagacaaaatgaaagcatggaggggctgtgaatgtgcttatttcccatatgactgtagaaagtacttaagttttaacagaagatcactgggttttaatttcagaatttaaggtaattggtttgccctccaactttttactcaaggttatgtttttcctgccttactagttaatataccactccaactctccc

SEQ ID NO: 129586 - DNA, 580 bp, Homo sapiens
aactttcaacacttagataataaagtttctgaaaaatctcagtattttgtttaatgacaaacttttggtttacttgctgattttgtttaatgtttagcaatctggaaacctgaccatcaatcatgtgctaaaaaactatctcccttctcaactgcagttttcacttaatgaaaaactacatacaatgaggacaccagtatgatagggggtaggataatgctgtggaaacactagaagtcagaagacctggttttacattggggccccaccatttgctgactgtgtgctcttaggtttgtcgttgtrcctttctcaggtttaggttcttcactggcaaaagggagattaaaatctctgccctatttaccccacagagttgtgaagacaaaatgaaagcatggaggggctgtgaatgtgcttatttcccatatgactgtagaaagtacttaagttttaacagaagatcactgggttttaatttcagaatttaaggtaattggtttgccctccaactttttactcaaggttatgtttttcctgccttactagttaatataccactccaactctcccttcattc

SEQ ID NO: 129587 - DNA, 555 bp, Homo sapiens
taagcttcagttacctgagattcatacatgtgggctatcctacttcttgaatatgttattgcagtggtttttttttttttttaatgcctacactgtttgagaaaggtgtgatatttcaaggaatataccttgtatttaaaagagttttaaaattcctgatatactattataaggaacggctacttacatttattgagctattgagtttatatatttaagatatataatttcttttaatttaataacctttggtgtttatagctttacttcacagattagggawctttttttgtgtatctatttaatttttttttaatctgggaatttttgaatctaatgtaagcaatagaacattcatatacgtttgaatgacaaaatcacattcttttgttgtgacctactgctcatggtaactgaagctgtactgactcacaaatgttctaactgaccagaatggaatgtgggcatgtccacgaatgaatataattaggctagtgttgtatctgggaagtgagagatatagcaattgaaaaattacaaatttattaatttaga

SEQ ID NO: 129588 - DNA, 535 bp, Homo sapiens
tgtaagcaatcatttccaaagaagtgatatttgagctgggtattgaataatgggagcacattttccaggtggtcaagaaggtaaaggatatttcaaggcagagggaatagtgtgggcaccagggaaggctgtgtgtctgagaagttgtggtggtttagtggtgttgggttgaaacatggatctcatcttgggagagtaggtagtgagagctgaggccagggaggtcagggctggatcacaaagtgtattgcatgcaaggtgagcyggcagcttggattctattctctgggccactgggtaccactgatgtgtatgaggaaagggagtaacaaagtcagatgtaccctttatttatttgagacagggtcttactccatcccccaggctggagtgcagtggtgtgatcatagctcactgcagccttaaactcctgggtttaagagatcctcctgattcagcttcccccttggtttggaagggatcaaatagacagaaaaaggaattggtgggttgggggattcttataatcacctgg

SEQ ID NO: 129589 - DNA, 535 bp, Homo sapiens
tgtaagcaatcatttccaaagaagtgatatttgagctgggtattgaataatgggagcacattttccaggtggtcaagaaggtaaaggatatttcaaggcagagggaatagtgtgggcaccagggaaggctgtgtgtctgagaagttgtggtggtttagtggtgttgggttgaaacatggatctcatcttgggagagtaggtagtgagagctgaggccagggaggtcagggctggatcacaaagtgtattgcatgcaaggtgagccggcagcttggattctattctctgggccactgggtaccactgatgtgtatgaggaaagggagtaacaaagtcagatgtaccctttatttatttgagacagggtcttactccatcccccaggctggagtgcagtggtgtgatcatagctcactgcagccttaaactcctgggtttaagagatcctcctgmttcagcttcccccttggtttggaagggatcaaatagacagaaaaaggaattggtgggttgggggattcttataatcacctgg

SEQ ID NO: 129590 - DNA, 609 bp, Homo sapiens
attattctaaaacaagaatagcatataaaccaatcaataaaagtatttgacaagacatgaagttgccacaggcgctgcctgttgtttcaagtcaggatctccatcccaatatctcacattcataccattactgaggtagttaaaatacggaaaattggactccaggttgctgagttctgaatgtgaatgtgaaagatatattctcttttgagcctactttcccccaaacaattcaagttttcttgaggtaagaactaccaaaatccaattagcaggcttctttaaaaaggaaaagtgatggtactttcaaaaaacaattttcatgcttaaaaactgccatgagtgggtgttcttacctgagtgctttttcattttatctaccagactaataaatccacattatgccctatgtactctaaaagttattttctttttaaggaaagcatatttttctaagcatwcatgctggcagaagctacccacccacattcatccccggaagccatctggatcactccatcactgtgttgagccccttcccttcctaacaaaggccactggcttgattactgagactcctgctgcatacccacatctttatagtaagct

SEQ ID NO: 129591 - DNA, 592 bp, Homo sapiens
tgctgtatgactccattcatattatgttcataacaaggaaatctattgagaaagtaaattagtggttacttagagctgggaaggatgtgggaatagaaaggtgatagtgaaagggcatggggttttataggtgatgaaatagttctaaaattgtggctatggtcgcacagatctgtgaacatactaaacaccattgaaatgtacaatttcaatggatgaattgtatggtatgtgaattatatataaataaagctattaaaaaatgattcccaagtcaaagacccaattcagccagttacaaagttaaggcagagagacaactattttagttcacaccctaaaaaataaatgggagggaacaccactcctgaggaagagtcaactgcaaagtaaacagggctcccagggctattccagccctgtgtaagccaacggggtattaggcagcaagaccacccataaagccaactcagggtcacccaactccatttatcagtgacctgggacacaagcccattactgcctcacttgctctccatctctgacrtgttctggctctgccacagtgcatggctctgactcttactgcatt

SEQ ID NO: 129592 - DNA, 558 bp, Homo sapiens
taaatcaatgtagagacctggaatatgtggacttcttcggaagttaagagcacaaccattcctggcatgcttctccttcaaatgggaaggaagccagatggagacagagagcctggagttgctgtcagaaaagaggaatttaaatccccagctctgtcacttagtggtggccacttcggcaaaccattttgtcccttttgctcgacatacattctttctgtaaaacaggaatgatttccccccttgctgggcttttcctgagatgtcagagttcctggcacctaatctagtggttttcaaacttggtctctggactagcagcattggcatcaatgtggaactggttagaaatgcagattctcagacyctttcccaattctattgaatcagaaactctggagatggggcccaagaatctgtgtttcaacaagctctccaggggattctggtgtatgctaatatttgagaacctgacttaatataatatcagtaaacatttattttattttattatagattcagggggtacatgtgcaggtttcttccatgggaatatta

SEQ ID NO: 129593 - DNA, 506 bp, Homo sapiens
ttcaggctttctcctcaaaaggtaatgaactaaaacataacagagagactatatttaaaatgacatggaagcaactccccctctctccttcactttctcattcaggaagttttacagtttgcttcattaatgctgccccaaacaacatttatccctctaaacacatgatgttccccaacaaactgttgctgataacaaagaatcaggggaattggcacaatgctgagttatcagagaagtgcttggatgagagaaaatgacatttggagttatgttgacattagcaaataccttctgtatcagtaacctagagcagaggccagcaaactgcagcgtggcctgcagrccaaatccagtccaccggcctgcttttgtaaataaagttttattggaacatagtcactcccatttagttacatattgtctatggctgctttcccattacaacagtggagttcagtcattgcaacagattacgtggccagcaaagtggaaaatatttacta

SEQ ID NO: 129594 - DNA, 506 bp, Homo sapiens
ttcaggctttctcctcaaaaggtaatgaactaaaacataacagagagactatatttaaaatgacatggaagcaactccccctctctccttcactttctcattcaggaagttttacagtttgcttcattaatgctgccccaaacaacatttatccctctaaacacatgatgttccccaacaaactgttgctgataacaaagaatcaggggaattggcacaatgctgagttatcagagaagtgcttggatgagagaaaatgacatttggagttatgttgacattagcaaataccttctgtatcagtaacctagagcagaggccagcaaactgcagcgtggcctgcagaccaaatccagtccaccggcctgcttttgtaaataaagttttattggaacatagtcactcccatttagttacatattgtctrtggctgctttcccattacaacagtggagttcagtcattgcaacagattacgtggccagcaaagtggaaaatatttacta

SEQ ID NO: 129595 - DNA, 506 bp, Homo sapiens
ttcaggctttctcctcaaaaggtaatgaactaaaacataacagagagactatatttaaaatgacatggaagcaactccccctctctccttcactttctcattcaggaagttttacagtttgcttcattaatgctgccccaaacaacatttatccctctaaacacatgatgttccccaacaaactgttgctgataacaaagaatcaggggaattggcacaatgctgagttatcagagaagtgcttggatgagagaaaatgacatttggagttatgttgacattagcaaataccttctgtatcagtaacctagagcagaggccagcaaactgcagcgtggcctgcagaccaaatccagtccaccggcctgcttttgtaaataaagttttattggaacatagtcactcccatttagttacatattgtctatggctgctttcccattacaacagtggagttcagtcattgcaacagattacgtggccagyaaagtggaaaatatttacta

SEQ ID NO: 129596 - DNA, 521 bp, Homo sapiens
tctataactgtcattctagccaccccagagaaatcaaattttaatatacagtaacacattttaggtgttgttttatttctaataaaagtttttccaagagtcttctttttttkggggggatagggtcttgctctgttgcccaggctgatgtgcagtggtgcgatcttggctcactgcaacctccgcctcccgggttcaagtgattctcatgcctcagcctcctgagtagctgggattacaggtgggtgccatcacacccagctaattttgtatttttagtagagatggggtttcactgttgaccaggctggtctcgacctcctgacttcaaggtccatctgcctcggcctcctaaagtgctaggattacaggtgtgagccaccatggctggccccaagagtcttcttaactgaaattgaagtgacagttattcaaagatgtaatagagctgaagaaaatttggcaaaggagaccaagaggtaagttaacagatcatttgcagacatagtaattaatagaat

SEQ ID NO: 129597 - DNA, 516 bp, Homo sapiens
gcagttctgataggagcccctgactataccctgcctcagcaaaatgtagacaaataaagaaaaaataattcaagagaaataaaatttaaaaataaagcaattggaaaatagtaagggcaaataaaataaactgaaacaaaatagagaaaagtaaagaaaaatataactaagattagtgaaaataaaatcaagatgaagataaacagtaaatacaataaaattgagaaataagaaaattttaagaataagaagagacaagtgaaagtaaaaaagaaatgcagagaaaaataaaataacaaagagatatgcatggaaataaataaaagaaacaagaaattgaataaaattacaaacracaaaaatctagaaaatttgaaattgagactataatgaaaaaacaaaaaataaaaaatgaagtaaaattaaattaatagaaaaaatgaaagtaaataaaaataaagagaaacaagataaaaacaaagacaaatgtacagaaaaataaaagattaaaaagaa

SEQ ID NO: 129598 - DNA, 571 bp, Homo sapiens
gatttgggttctaacaggttatccttgacaccagtatagaatacccagaattaatttaaggtatattatcaaaccactaaaattaggatgtccatgaattctgaaggagaaaatatcatttagattgtgtgtgtgtgtgtgtgtgtgtgcgcgtgtgtgtgtgtcctctaagttttaaacatgaggtggttatataaaggggacttctaaattgggagaggatgaaaatgggctaaatatttcacacaaacttcagtgtgaaatcagtagtatattcagtagaggtgacagggaaaaaagctgtggaggagaaaagagaacaagaaaatcaggaagcagtaaaaatratgactgaggtcaggtggtaatggtaacatcaagaaacttgaatctgatggaaaaaaaccacgggtagctataaaaggggcattcgaaataggaaatgatgtgagaggagaagataattttagtatagttaaaggaggtagcagctataggtgtgaagagaacggattaattttaaatgtgtcccagaagtaagagaaatatttttttgaggagtgggggagga

SEQ ID NO: 129599 - DNA, 481 bp, Homo sapiens
aaaaaattagctgggtgtggtggtgttagcatgtattatacaccatacctgggtaacagagagactctttcasggaagaaaagaaaaaagagaagagagaaggaggaaggaaggagagaaaggaaggaaagaaggaaggaaggaaggagggaacaaaggaaggaagggagggatggagggaggaaggaagagaagggaagaaggaaggaaagaaggaaggaaggaaggaaggaaggaaggaaggaaggaaggaaggaaggaaggaaggaaggaaggaaggaaggcaggcatgtattttaaactgaggcatagcccaaagctcgtaaactcagggttctgtcagtccatgtagtaaaatcatgaagccctacatattttttcttcttttggtataagtttcggtttcagaggtatgttttttgacacaagtaaaacttccagcatggaaataaactgcagtcaatggctgccctggaagttg

SEQ ID NO: 129600 - DNA, 419 bp, Homo sapiens
tcagaacaaaaccagacaattatactgtaagagttatgttttcatatttattcacattttaaaatccaatatcaaatcaaggaatttayactgcaatgggacttcttgggtattatacatattaccagcacatcaactacttccacacgcccacctatctaacagaacatatgtgacgccaggagtgacagtactgttattacagaaatttgcactaatgataaaaaaaagaaacaaccctgtctatttcagtgtttgaataattactactgacttcaccactgttggaaacttctgccacatataatgttatggagagaatgcttatttaaatggtatttttcactgcttaagatcaaaactgttgtaaaagaaaagggacatacaattcgtactaattcttcttttgagtagaattc

SEQ ID NO: 129601 - DNA, 567 bp, Homo sapiens
gtcataattttatttcactctatctccctaagaaaattcatgaaagtcagtttggatgtttcattcagttatttgacagtaaagatgaaaactacatccagaaatgaagaatgggacaccaaatctcagaaatctgttctacaggaaagttattcccaagtatattcctgtcaaaattcgacttcattacttctcaataagacagaggtcttccttctacactaattctaagtgtttccttaaattttaggtacacttcactagtttaaaatgaccaactattccggaaatttgyataaacaagttaaaggcctcaataatacctgaaagcaaataattttactccttcttacattacctgataattatatacaggcaactgatatccagtggtgacctgaaatggtgaacttggataagcaggaaatgcctgaaaagaaaggttggcagaaaaaaatgaatatggtaaaccactttttaaaattacaaagaaatataattcccaatataacaacaatattacagaagggaaaatatcgtttttctacatacaacaatgcagaattc

SEQ ID NO: 129602 - DNA, 385 bp, Homo sapiens
tttgtaggcatatatgacatggaaaaaaatcaagaatgaacaggaagtctatgtttggctaattcccttaaygtcaaggacaacataatccctttgctacccaacaggcccctaaggtggaatcttaaaaaatcaattaataaataaaaggaaaccaaaactattgaagtattactacacattttcaaaaacacatgagaaacacaatattaaagtacttatcctgctgtctccttttttattgtaataaaagtaacagaaaggaaaactcaaatactttatgtttctagtccatgacattcttgttacttttacattggaaacttcagctctctccacattttcgggatttcgcaatgtggaaacctcaaagatactagctctt

SEQ ID NO: 129603 - DNA, 385 bp, Homo sapiens
tttgtaggcatatatgacatggaaaaaaatcaagaatgaacaggaagtctatgtttggctaattcccttaatgtcaaggacaacataatccctttgctacccaacaggcccctaaggtggaatcttaaaaaatcaatyaataaataaaaggaaaccaaaactattgaagtattactacacattttcaaaaacacatgagaaacacaatattaaagtacttatcctgctgtctccttttttattgtaataaaagtaacagaaaggaaaactcaaatactttatgtttctagtccatgacattcttgttacttttacattggaaacttcagctctctccacattttcgggatttcgcaatgtggaaacctcaaagatactagctctt

SEQ ID NO: 129604 - DNA, 385 bp, Homo sapiens
tttgtaggcatatatgacatggaaaaaaatcaagaatgaacaggaagtctatgtttggctaattcccttaatgtcaaggacaacataatccctttgctacccaacaggcccctaaggtggaatcttaaaaaatcaattaataaataaaaggaaaccaaaactattgaagtattrctacacattttcaaaaacacatgagaaacacaatattaaagtacttatcctgctgtctccttttttattgtaataaaagtaacagaaaggaaaactcaaatactttatgtttctagtccatgacattcttgttacttttacattggaaacttcagctctctccacattttcgggatttcgcaatgtggaaacctcaaagatactagctctt

SEQ ID NO: 129605 - DNA, 434 bp, Homo sapiens
agcaatttaatatgcagaggcatctggaaatcatttcaaataaagaatacctggattaactgctaaacttagagaagaataaagcaggcagacacatgaggagaactgcttttaaatattttagttatatgggggaaagcagctcaggtgttatagaggtaatactctttttaatcctattcttatttaagagtaattaacagcaaaacatttctgtttcttttatgaaattttttatggttggtacatccagatgcagattctcatcagatacatgctattctaaagccaaattaatactacctttcttagataaagccacattaggactacctttcttagattaaataatctatcracaagtaactgaacacttgtcataatttggagaagccattgcttaagcatacaaaaacctgagagagaaaaaggca

SEQ ID NO: 129606 - DNA, 509 bp, Homo sapiens
tattatagggtaatactgtagttcttcggcagatgttacggctttctctgtacttcttttccacaaattaagggcagtaartaagccacagctggaaaagagacagtataatgtcttctacttttcaataaatacttactgattaaaaacatacaggtagcatcattcatcaatacacccacattcagtaatggctcacagtaaatgctacaaacaagtagggcttttcttctagccattgctcagagaaggaaaaagaagaagaggtgtaccccacacgtttcaagtacatggaaaatgtcaacaaatgagagacactgaagaactaattcactactatttggttactttattttccatcgaagaaaacctctttttaaaaactaacacataaataaaatgaacgaagaacaaactaaacgttatttatcaccagtaagtgacaagagtatgtcaaatcctactttaaatatcaaagcaaccagcatcagagaaattacgtgccagaa

SEQ ID NO: 129607 - DNA, 518 bp, Homo sapiens
tatctgatgatattatagggtaatactgtagttcttcggcagatgttacggctttctctgtacttcttttccacaaattaagggcagtaaataagccacagctggaaaagagacagtataatgtcttctacttttcaataaatacttactgattaaaaacatacaggtagcatcattcatcaatacacccacattcagtaatggctcacagtaaatgctacaaacaagtagggcttttcttctagccattgctcagagaaggaaaaagaagaagaggtgtaccccacacgtttcaagtacayggaaaatgtcaacaaatgagagacactgaagaactaattcactactatttggttactttattttccatcgaagaaaacctctttttaaaaactaacacataaataaaatgaacgaagaacaaactaaacgttatttatcaccagtaagtgacaagagtatgtcaaatcctactttaaatatcaaagcaaccagcatcagagaaattacgtgccaga

SEQ ID NO: 129608 - DNA, 496 bp, Homo sapiens
tactgtagttcttcggcagatgttacggctttctctgtacttcttttccacaaattaagggcagtaaataagccacagctggaaaagagacagtataatgtcttctacttttcaataaatacttactgattaaaaacatacaggtagcatcattcatcaatacacccacattcagtaatggctcacagtaaatgctacaaacaagtagggcttttcttctagccattgctcagagaaggaaaaagaagaagaggtgtaccccacacgtttcaagtacatggaaaatgtcaacaaatgagagacaytgaagaactaattcactactatttggttactttattttccatcgaagaaaacctctttttaaaaactaacacataaataaaatgaacgaagaacaaactaaacgttatttatcaccagtaagtgacaagagtatgtcaaatcctactttaaatatcaaagcaaccagcatcagagaaattacgtgccagaa

SEQ ID NO: 129609 - DNA, 579 bp, Homo sapiens
ttaagtgatggagtatgtcaaaacctactttaaatatcagtgtaagcaggatcagagaaattagatgcaagaagctcacgggatttatatacctactaaaccacatcagaaatctacccattcccgaaccagaatatatccagaagtcagcaatttatatgaggaggcatctggaaatcatttcaaataaagggtagctagatgaactgttaaacttaccgaagaatgaagtaggcagacacataaggagagctgctttcattcactttaggaactggttataaggaggaaagcagctctggtgctttggaggtaatactctcgtttactcctattcttatttargcgcaattaacagcaaagcatttctgtctctgttctacaaattttctgttgctggtaaagccagaggcagaatctacgcagatgcatgctaattcaaaagccacatgaatactacctttctttgatgatatggtctatcattaagtggacctgccattgcttaagcaaatataaacctcagggcaaaaaaggcactgttgctcccatggagtttataatcggggttaacaagaa

SEQ ID NO: 129610 - DNA, 615 bp, Homo sapiens
gtcgtatatgcctattactatttttaagtgrtttttatatcaatgttttagtttatttttttactttcttgttaacccgattataaactcccatgggagcaacagtgccttttttgccctgaggtttttatttgcttaagcaatggcaggtccacttaatgatagaccatatcatcaaagaaaggtagtattcatgtggcttttgaattagcatgcatctgcgtagattctgcctctggctttaccagcaacagaaaatttgtagaacagagacagaaatgctttgctgttaattgcgcttaaataagaataggagtaaacgagagtattacctccaaagcaccagagctgctttcctccttataaccagttcctaaagtgaatgaaagcagctctccttatgtgtctgcctacttcattcttcggtaagtttaacagttcatctagctaccctttatttgaaatgatttccagatgcctcctcatataaattgctgacttctggatatattctggttcgggaatgggtagatttctgatgtggtttagtaggtatataaatcccgtgagcttcttgcatctaatttctctgatcctgcttacactgatatttaa

SEQ ID NO: 129611 - DNA, 615 bp, Homo sapiens
gtcgtatatgcctattactatttttaagtggtttttatatcaatgttttagtttatttttttactttcttgttaacccgattrtaaactcccatgggagcaacagtgccttttttgccctgaggtttttatttgcttaagcaatggcaggtccacttaatgatagaccatatcatcaaagaaaggtagtattcatgtggcttttgaattagcatgcatctgcgtagattctgcctctggctttaccagcaacagaaaatttgtagaacagagacagaaatgctttgctgttaattgcgcttaaataagaataggagtaaacgagagtattacctccaaagcaccagagctgctttcctccttataaccagttcctaaagtgaatgaaagcagctctccttatgtgtctgcctacttcattcttcggtaagtttaacagttcatctagctaccctttatttgaaatgatttccagatgcctcctcatataaattgctgacttctggatatattctggttcgggaatgggtagatttctgatgtggtttagtaggtatataaatcccgtgagcttcttgcatctaatttctctgatcctgcttacactgatatttaa

SEQ ID NO: 129612 - DNA, 615 bp, Homo sapiens
gtcgtatatgcctattactatttttaagtggtttttatatcaatgttttagtttatttttttactttcttgttaacccgattataaactcccatgggagcaacagtgccttttttgccctgaggtttttayttgcttaagcaatggcaggtccacttaatgatagaccatatcatcaaagaaaggtagtattcatgtggcttttgaattagcatgcatctgcgtagattctgcctctggctttaccagcaacagaaaatttgtagaacagagacagaaatgctttgctgttaattgcgcttaaataagaataggagtaaacgagagtattacctccaaagcaccagagctgctttcctccttataaccagttcctaaagtgaatgaaagcagctctccttatgtgtctgcctacttcattcttcggtaagtttaacagttcatctagctaccctttatttgaaatgatttccagatgcctcctcatataaattgctgacttctggatatattctggttcgggaatgggtagatttctgatgtggtttagtaggtatataaatcccgtgagcttcttgcatctaatttctctgatcctgcttacactgatatttaa

SEQ ID NO: 129613 - DNA, 413 bp, Homo sapiens
ctgtttctatgccattttgttattattttttgagacagagtcttgctctgttgcccagtggagtgcagtggcatgatcatggctcactgcaacctytgtctcctgggctcaagtgatcctcctgtctcagcctcctgagtagctgactataggcatgcatcaccacgcctgcctaatttttgtattttttgtagacatgaggtttcaccatgttactcaggctggtctcgaactcctggactcaagcaatttgcctgccttggcctcccaaaatgttgggattacagctgtaaaccacggcgccaggccattctctgccctttaaatctggccctggctgtgtgacttgctttggtcaatgcgacatcagccgatgggatgcaaagagaggcttgagaagagcttgatcatct

SEQ ID NO: 129614 - DNA, 413 bp, Homo sapiens
ctgtttctatgccattttgttattattttttgagacagagtcttgctctgttgcccagtggagtgcagtggcatgatcatggctcactgcaacctctgtctcctgggctcaagygatcctcctgtctcagcctcctgagtagctgactataggcatgcatcaccacgcctgcctaatttttgtattttttgtagacatgaggtttcaccatgttactcaggctggtctcgaactcctggactcaagcaatttgcctgccttggcctcccaaaatgttgggattacagctgtaaaccacggcgccaggccattctctgccctttaaatctggccctggctgtgtgacttgctttggtcaatgcgacatcagccgatgggatgcaaagagaggcttgagaagagcttgatcatct

SEQ ID NO: 129615 - DNA, 413 bp, Homo sapiens
ctgtttctatgccattttgttattattttttgagacagagtcttgctctgttgcccagtggagtgcagtggcatgatcatggctcactgcaacctctgtctcctgggctcaagtgatcctcctgtctcagcctcctgagtagctgactataggcatgcatcaccacgcctgcctaatttttgtattttttgtagacatgaggtttcaccatgttactcaggctggtctcgaactcctggactcaagcaatttgcctgccttggcctcccaaaatgttgggattacagctgtaaaccacggcgccaggccattctctgccctttaaatctggccctggctgtgtgacttgctttggtcaatgsgacatcagccgatgggatgcaaagagaggcttgagaagagcttgatcatct

SEQ ID NO: 129616 - DNA, 611 bp, Homo sapiens
gaggtttcacctcacacagtccctctgcaacgcctgcaaatggatgattggcattaggtcagtttctaagcatttgtgctgtacacttccgtactttgtttctggtattgaaagaaaaaaggggaaaaaagtgrataaatataaaacaagatcttttaaagaaaaacaagaaaaaattgtatttatgataaacaggttaatgaactataaaaaaatcaacatataaagaaatagtagtagtttaaggaaattattatttttagagacggtttcactctgctgcccaggctggagtgcagtgggatgatcgaagttcccggcagcctcaaatttctgggcttaagcggtcctcccacctcagcctccaggagtgccccatcacacctggctaacttttaaattttttttagagatgggatctcactatgttgcccaggctggcctctaactcctggcctcaagtgatcctcccatcttagcctcccaaagtgttgggattacagatgtgaggcactgcacccatccagaaattatctttataacagaaatttgatttgctatacagttgaaacgtggcaataattgtataggaagactatacccctgaaccc

SEQ ID NO: 129617 - DNA, 611 bp, Homo sapiens
gaggtttcacctcacacagtccctctgcaacgcctgcaaatggatgattggcattaggtcagtttctaagcatttgtgctgtacacttccgtactttgtttctggtattgaaagaaaaaaggggaaaaaagtggataaatataaaacaagatcttttaaagaaaaacaagaaaaaattgtatttatgataaacaggttaatgaactataaaaaaatcaacatataaagaaatagtagtagtttaaggaaattattatttttagagacggtttcactctgctgcccaggctggagtgcagtgggatgatcgaagttcccggcagcctcaaatttctgggcttaagcggtcctcccacctcagcctccaggagtgccccatcacacctggctaacttttaaattttttttagagatgggatctcactatgttgcccaggctggcctctaactcctggcctcaagtgatcctcccatcttagcctcccaaagtgttgggattacagrtgtgaggcactgcacccatccagaaattatctttataacagaaatttgatttgctatacagttgaaacgtggcaataattgtataggaagactatacccctgaaccc

SEQ ID NO: 129618 - DNA, 465 bp, Homo sapiens
gaattctcacatttcaaacatacactaaatatcaaataaaaatttatttttacaagaatttaggggaactaccacatagctataaatgtaatatatatgttaactaagtatcatagataaaaaccatgctcccttcagcagcacgtgtaataatagatacaaagattgaaaggtaaaagatttaggatgaaaagaatcctctcttaaaaaggaaaacaaaattatatgtatgtgtatacaacagttataayacccatcacacagctttatagaaacagcatctattcaaaaataccagtatttccaaaatatttaaaataatatttaaagtaataataatatttaaataaataaatatatttaataaatatttcagtaaataaaataatatttaaataattctatacccatgtttttcaaaataaaccaataaaatagatagtatatattagacgtgttagtata

SEQ ID NO: 129619 - DNA, 465 bp, Homo sapiens
gaattctcacatttcaaacatacactaaatatcaaataaaaatttatttttacaagaatttaggggaactaccacatagctataaatgtaatatatatgttaactaagtatcatagataaaaaccatgctcccttcagcagcacgtgtaataatagatacaaagattgaaaggtaaaagatttaggatgaaaagaatcctctcttaaaaaggaaaacaaaattatatgtatgtgtatacaacagttataatacccatcacacagctttrtagaaacagcatctattcaaaaataccagtatttccaaaatatttaaaataatatttaaagtaataataatatttaaataaataaatatatttaataaatatttcagtaaataaaataatatttaaataattctatacccatgtttttcaaaataaaccaataaaatagatagtatatattagacgtgttagtata

SEQ ID NO: 129620 - DNA, 465 bp, Homo sapiens
gaattctcacatttcaaacatacactaaatatcaaataaaaatttatttttacaagaatttaggggaactaccacatagctataaatgtaatatatatgttaactaagtatcatagataaaaaccatgctcccttcagcagcacgtgtaataatagatacaaagattgaaaggtaaaagatttaggatgaaaagaatcctctcttaaaaaggaaaacaaaattatatgtatgtgtatacaacagttataatacccatcacacagctttatagaaacagcatctattcaaaaataccagtatttccaaaatatttaaaataatatttaaagtaataataatatttaaataaataaatatatttaataaatatttcartaaataaaataatatttaaataattctatacccatgtttttcaaaataaaccaataaaatagatagtatatattagacgtgttagtata

SEQ ID NO: 129621 - DNA, 326 bp, Homo sapiens
ggctcgtccccccgcggatgagccgccgcggacggggcgcgggcggacgatggaactccacatcctggagcaccggctgcaagttgccagcgtcgccaaggagagtatcccgctgttcacctacggcctgatcaaacttgccttcctgtyctccaagaccaggtaagcgcgcggggacgcggcgccggccggggacagacaaagggggcgcaccccgggccgctgtcctcgccgccgcgcctcggaaaacaacttcgggccccgggagcgcccccgccccgcccccgccgccgcttcgctcgcgtctgacaaagccggagccgcag

SEQ ID NO: 129622 - DNA, 326 bp, Homo sapiens
ggctcgtccccccgcggatgagccgccgcggacggggcgcgggcggacgatggaactccacatcctggagcaccggctgcaagttgccagcgtcgccaaggagagtatcccgctgttcacctacggcctgatcaaacttgccttcctgtcctccaagaccaggtaagcgcgcggggacgcggcgcckgccggggacagacaaagggggcgcaccccgggccgctgtcctcgccgccgcgcctcggaaaacaacttcgggccccgggagcgcccccgccccgcccccgccgccgcttcgctcgcgtctgacaaagccggagccgcag

SEQ ID NO: 129623 - DNA, 326 bp, Homo sapiens
ggctcgtccccccgcggatgagccgccgcggacggggcgcgggcggacgatggaactccacatcctggagcaccggctgcaagttgccagcgtcgccaaggagagtatcccgctgttcacctacggcctgatcaaacttgccttcctgtcctccaagaccaggtaagcgcgcggggacgcggcgccggccggggacagacaaagggggcgcaccccgggccgctgtcctcgccgccgcgcctcggaaracaacttcgggccccgggagcgcccccgccccgcccccgccgccgcttcgctcgcgtctgacaaagccggagccgcag

SEQ ID NO: 129624 - DNA, 436 bp, Homo sapiens
gtgtattaggtattaaacctgctttgcaaaccaggaagctggggttcaaagattaagtgacttgctcaaggtcaggcaagaagtgatagatccgggatttaaatgtgccaatctgcacctttctggcacaagctctgagattttgctattgyaggttgcaagagatgcccccattgaatggttatgtccagcccttctgtctacagcacagtgttctgaaaggcttaggagcacagaactgaaatgctggcctttctgtattcctgcctatttggctttggtgggccttttctttttttttttttttttttggagatagggtcttcttctgtcacccaggccggagtgcagtggcgtgatcacggctcactgcagcctacacctcccgggcttgagtgatctgctaccagagctgttttcttctcccagggatact

SEQ ID NO: 129625 - DNA, 429 bp, Homo sapiens
taaacctgctttgcaaaccaggaagctggggttcaaagattaagtgacttgctcaaggtcaggcaagaagtgatagatccgggatttaaatgtgccaatctgcacctttctggcacaagctctgagattttgctattgcaggttgcaagagatgcccccattgaatggttatgtccagcccttctgtctacagcacagtgttytgaaaggcttaggagcacagaactgaaatgctggcctttctgtattcctgcctatttggctttggtgggccttttctttttttttttttttttttggagatagggtcttcttctgtcacccaggccggagtgcagtggcgtgatcacggctcactgcagcctacacctcccgggcttgagtgatctgctaccagagctgttttcttctcccagggatacttggtcc

SEQ ID NO: 129626 - DNA, 525 bp, Homo sapiens
atgagatggaaattctccaagttgcttttgagtctcactctatatcartgtagacctgcctaaaatatgtaagagctgagaatccttttgaaatgattccaaactcttgagtctgaaaaccgagctgggaattcctttgtaacagttttgtgggttattttggcactttggtttataatcctagctggaccccatctgaagttctaaagcccataaaataagaatgaatggacaatgtaaataagccaaatttgagaaacttcagaccctgcttggctgaatgtttctgttaatctaccttgtctgtgctggtagaactgccattttgctataactcctttgtaaataagaaacttttcttctcatcaggcaggggatctttctcttcaaaggctgtgatgtattatactatattgaaattaaattgtttggatatgttttgctgaatactgataaaactatgatataaagcgtattatccttaatcaaaggttacttttatttgcagattttaaaggcaacaaa

SEQ ID NO: 129627 - DNA, 525 bp, Homo sapiens
atgagatggaaattctccaagttgcttttgagtctcactctatatcagtgtagacctgcctaaaatatgtaagagctgagaatccttttgaaatgattccaaactcttgagtctgaaaacygagctgggaattcctttgtaacagttttgtgggttattttggcactttggtttataatcctagctggaccccatctgaagttctaaagcccataaaataagaatgaatggacaatgtaaataagccaaatttgagaaacttcagaccctgcttggctgaatgtttctgttaatctaccttgtctgtgctggtagaactgccattttgctataactcctttgtaaataagaaacttttcttctcatcaggcaggggatctttctcttcaaaggctgtgatgtattatactatattgaaattaaattgtttggatatgttttgctgaatactgataaaactatgatataaagcgtattatccttaatcaaaggttacttttatttgcagattttaaaggcaacaaa

SEQ ID NO: 129628 - DNA, 525 bp, Homo sapiens
atgagatggaaattctccaagttgcttttgagtctcactctatatcagtgtagacctgcctaaaatatgtaagagctgagaatccttttgaaatgattccaaactcttgagtctgaaaaccgagctgggaattcctttgtaacagttttgtgggttatttyggcactttggtttataatcctagctggaccccatctgaagttctaaagcccataaaataagaatgaatggacaatgtaaataagccaaatttgagaaacttcagaccctgcttggctgaatgtttctgttaatctaccttgtctgtgctggtagaactgccattttgctataactcctttgtaaataagaaacttttcttctcatcaggcaggggatctttctcttcaaaggctgtgatgtattatactatattgaaattaaattgtttggatatgttttgctgaatactgataaaactatgatataaagcgtattatccttaatcaaaggttacttttatttgcagattttaaaggcaacaaa

SEQ ID NO: 129629 - DNA, 525 bp, Homo sapiens
atgagatggaaattctccaagttgcttttgagtctcactctatatcagtgtagacctgcctaaaatatgtaagagctgagaatccttttgaaatgattccaaactcttgagtctgaaaaccgagctgggaattcctttgtaacagttttgtgggttattttggcactttggtttataatmctagctggaccccatctgaagttctaaagcccataaaataagaatgaatggacaatgtaaataagccaaatttgagaaacttcagaccctgcttggctgaatgtttctgttaatctaccttgtctgtgctggtagaactgccattttgctataactcctttgtaaataagaaacttttcttctcatcaggcaggggatctttctcttcaaaggctgtgatgtattatactatattgaaattaaattgtttggatatgttttgctgaatactgataaaactatgatataaagcgtattatccttaatcaaaggttacttttatttgcagattttaaaggcaacaaa

SEQ ID NO: 129630 - DNA, 558 bp, Homo sapiens
tgtcaacaactgttctacattaaacaatatatcagccctggcagatgtaactggttaccttgagtatctcatagcatgtatgcagtktaattttcaagttcccaaacaaaactttccaaaagccatttcttaagaccacacactgtagagtcagatccaccaagttttgaattatctgaacagagctttgcaaatgtcaaaccagtatagtagatgatgacgattttgctgaaagatcactccactttcatcaggggaaacaagctattgggaatatattttaggacctcaattttccacacattgctctaattactagagtgctatagatgcatatctctgatttacagtccgccaagtcaagatttctgaatttcttggcataagtttggtagtacagtattactttgattatggcttcttatatctggcataaaaatattccctttgtgcatattctttttagatacagtacaaaaaaaagtatgactcttccttttttctctccctttactttaggaaaagcagctgtgaagtcataattatgttcacttccca

SEQ ID NO: 129631 - DNA, 507 bp, Homo sapiens
gtctctcttgagcaggttttataagagcactaatctcattcctgagggctctgaccccatgacctaattatctcccaaagtaaccaccttttaataccatccccttgagggttaggattttaacatatgaatttggtgaggacacaaacattcagaccatagcaattgcctttttctcataacatataaactctcaaactatattatatggtaattagactttagaaattagttttaaaaatctaactacaatgttcaaacaackaattcactaggaaacttttagaaaataactgatttctaagttggagacatactatgtaactgtattaagtcacaaagctcaaattcagtttttctatttgacttcagtgtcaagattcttcacattttgctaggctacttactctccatgttcaagttatctctaatgactatatcgaaatagaacacagatgaaagcaaaaatagaaacacagatgaaagcaaaaatagaaattgaaccac

SEQ ID NO: 129632 - DNA, 507 bp, Homo sapiens
gtctctcttgagcaggttttataagagcactaatctcattcctgagggctctgaccccatgacctaattatctcccaaagtaaccaccttttaataccatccccttgagggttaggattttaacatatgaatttggtgaggacacaaacattcagaccatagcaattgcctttttctcataacatataaactctcaaactatattatatggtaattagactttagaaattagttttaaaaatctaactacaatgttcaaacaacgaattcactaggaaacttttagaaaataactgatttctaagttggagacrtactatgtaactgtattaagtcacaaagctcaaattcagtttttctatttgacttcagtgtcaagattcttcacattttgctaggctacttactctccatgttcaagttatctctaatgactatatcgaaatagaacacagatgaaagcaaaaatagaaacacagatgaaagcaaaaatagaaattgaaccac

SEQ ID NO: 129633 - DNA, 507 bp, Homo sapiens
gtctctcttgagcaggttttataagagcactaatctcattcctgagggctctgaccccatgacctaattatctcccaaagtaaccaccttttaataccatccccttgagggttaggattttaacatatgaatttggtgaggacacaaacattcagaccatagcaattgcctttttctcataacatataaactctcaaactatattatatggtaattagactttagaaattagttttaaaaatctaactacaatgttcaaacaacgaattcactaggaaacttttagaaaataactgatttctaagttggagacatactatgtaactgtattaagtcacaaagctcaaattcagtttttctatttgacttcagtgtcaagattcttcacattttgctaggctacttactctccatgttcaagttatctctaatgactatatcraaatagaacacagatgaaagcaaaaatagaaacacagatgaaagcaaaaatagaaattgaaccac

SEQ ID NO: 129634 - DNA, 453 bp, Homo sapiens
ttaatgaatacttttatttaataaccagaatagcccttargtattgtctaattcacagccctttatatagcaatggagaaattaaaattaaatggcttttttttccaaggtcacaagctagtcttagcttgagccagtatgaaatgccacgtctctgaactcctagcctggtgctcattttactggagccaagaagataccttcattgctgggcaaaggaatgaacaatgattgagtacctaacacgtttctaggcactttgttaactggttgtggtagacaatgtgtgttgctgacccaagcaccatttcttcttcctttcttccttacagaatcccaaatttttaaagtaagcatcccatcagtagctctagagtcagattctgtctagtctaagtcatttcatgcttagcaggtcccattacaacagccactggtccaggggtggccacg

SEQ ID NO: 129635 - DNA, 494 bp, Homo sapiens
ccttaggtattgtctaattcacagccctttatatagcaatggagaaattaaaattaaatggcttttttttccaaggtcacaagctagtcttagcttkagccagtatgaaatgccacgtctctgaactcctagcctggtgctcattttactggagccaagaagataccttcattgctgggcaaaggaatgaacaatgattgagtacctaacacgtttctaggcactttgttaactggttgtggtagacaatgtgtgttgctgacccaagcaccatttcttcttcctttcttccttacagaatcccaaatttttaaagtaagcatcccatcagtagctctagagtcagattctgtctagtctaagtcatttcatgcttagcaggtcccattacaacagccactggtccaggggtggccacgtaatttaatttggttcaatcgaattgaaggaaaagaaatgagccatgcctggaggacatgattctcttcccacct

SEQ ID NO: 129636 - DNA, 494 bp, Homo sapiens
ccttaggtattgtctaattcacagccctttatatagcaatggagaaattaaaattaaatggcttttttttccaaggtcacaagctagtcttagcttgagccagtatgaaatgccacgtctctgaactcctagcctggtgctcattttactggagccaagaagataccttcattgctgggcaaaggaatgaacaatgattgagtacctaacacgtttctaggcactttgttaactgsttgtggtagacaatgtgtgttgctgacccaagcaccatttcttcttcctttcttccttacagaatcccaaatttttaaagtaagcatcccatcagtagctctagagtcagattctgtctagtctaagtcatttcatgcttagcaggtcccattacaacagccactggtccaggggtggccacgtaatttaatttggttcaatcgaattgaaggaaaagaaatgagccatgcctggaggacatgattctcttcccacct

SEQ ID NO: 129637 - DNA, 453 bp, Homo sapiens
ttaatgaatacttttatttaataaccagaatagcccttaggtattgtctaattcacagccctttatatagcaatggagaaattaaaattaaatggcttttttttccaaggtcacaagctagtcttagcttgagccagtatgaaatgccacgtctctgaactcctagcctggtgctcattttactggagccaagaagataccttcattgctgggcaaaggaatgaacaatgattgagtacctaacacgtttctaggcactttgttaactggttgtggtagacaatgtgtgttgctgacccaagcaccatttcttcttcctttcttccttacagaatcccaaatttttaaagtaagcatcccatcagtagctcyagagtcagattctgtctagtctaagtcatttcatgcttagcaggtcccattacaacagccactggtccaggggtggccacg

SEQ ID NO: 129638 - DNA, 494 bp, Homo sapiens
ccttaggtattgtctaattcacagccctttatatagcaatggagaaattaaaattaaatggcttttttttccaaggtcacaagctagtcttagcttgagccagtatgaaatgccacgtctctgaactcctagcctggtgctcattttactggagccaagaagataccttcattgctgggcaaaggaatgaacaatgattgagtacctaacacgtttctaggcactttgttaactggttgtggtagacaatgtgtgttgctgacccaagcaccatttcttcttcctttcttccttacagaatcccaaatttttaaagtaagcatcccatcagtagctctagagtcagattctgtctagtctaagtcatttcatgcttagcaggtcccattacaacagccactggtccaggggtggccacgtaatttaattyggttcaatcgaattgaaggaaaagaaatgagccatgcctggaggacatgattctcttcccacct

SEQ ID NO: 129639 - DNA, 555 bp, Homo sapiens
aattttgaacaagctttaaaggactattttctcatccccagtcccatcagctgagccagaataatgacttcatagtaatttttccctgtacctttgagggaaagtaatgcattcattattggaataaaagtggttcatgtgtataaatcttgcccttggcaaaataaattatcaaagctcatgccaatgggagagatggcaggtccatgatgctaagagccaagttccataaagtgatagggaagcagctttcttttatccaaaagaatttatgttttrtggctcagtgttggtgaggtattgatcttccaaatgagacactgtggccactgtaaataaattcaatagatgtgtagttggcctaagaatataacctcagttatttaaaacatgtggcacttgatgcagatcaccttccagtgtcctgtgtggaagaatggagcttccacccagtacaaagagtactctgggactccatgcctaagctccttaattagcatagtacatgtttgggggtaaataactccacctctctcaatcttaatttccacagcc

SEQ ID NO: 129640 - DNA, 408 bp, Homo sapiens
agtcttccatatgtttagtgttaaactaagtttggaacatctacaagtctttgcccaaataytctcagtgaagcttgcctggccatcttatttaaaattgcggcactcctcaccacacacacaaacttctcacccctcttcctctgctgtgcaatttcaccgcattgccatcttctaagatgttacatgatttgatatgtgatgcttattgctcatcatctgcttttctccactggaatggaaacttcacaagcccagtagtttttgcttcctttggtgaccaatgtgtcttggtgcctgtacatgtgggtgctcagtagttacaggttgaaaatattagtacgtgcattacggtaattcatgtaaaaacaaaaccacaagctactttggaaacaagtatatgcaaat

SEQ ID NO: 129641 - DNA, 418 bp, Homo sapiens
agtcttccatatgtttagtgttaaactaagtttggaacatctacaagtctttgcccaaatactctcagtgaagcttgcctggccatcttatttaaaattgcggcactcctcacyacacacacaaacttctcacccctcttcctctgctgtgcaatttcaccgcattgccatcttctaagatgttacatgatttgatatgtgatgcttattgctcatcatctgcttttctccactggaatggaaacttcacaagcccagtagtttttgcttcctttggtgaccaatgtgtcttggtgcctgtacatgtgggtgctcagtagttacaggttgaaaatattagtacgtgcattacggtaattcatgtaaaaacaaaaccacaagctactttggaaacaagtatatgcaaatgtatagaaaa

SEQ ID NO: 129642 - DNA, 418 bp, Homo sapiens
agtcttccatatgtttagtgttaaactaagtttggaacatctacaagtctttgcccaaatactctcagtgaagcttgcctggccatcttatttaaaattgcggcactcctcaccacacacacaaacttctcacccctcttcctctgctgtgcaatttcaccgcattgccatcttctaagatgttacatgatttgatatgtgatgcwtattgctcatcatctgcttttctccactggaatggaaacttcacaagcccagtagtttttgcttcctttggtgaccaatgtgtcttggtgcctgtacatgtgggtgctcagtagttacaggttgaaaatattagtacgtgcattacggtaattcatgtaaaaacaaaaccacaagctactttggaaacaagtatatgcaaatgtatagaaaa

SEQ ID NO: 129643 - DNA, 405 bp, Homo sapiens
agtcttccatatgtttagtgttaaactaagtttggaacatctacaagtctttgcccaaatactctcagtgaagcttgcctggccatcttatttaaaattgcggcactcctcaccacacacacaaacttctcacccctcttcctctgctgtgcaatttcaccgcattgccatcttctaagatgttacatgatttgatatgtgatgcttattgctcatcatctgcttttctccactrgaatggaaacttcacaagcccagtagtttttgcttcctttggtgaccaatgtgtcttggtgcctgtacatgtgggtgctcagtagttacaggttgaaaatattagtacgtgcattacggtaattcatgtaaaaacaaaaccacaagctactttggaaacaagtatatgca

SEQ ID NO: 129644 - DNA, 418 bp, Homo sapiens
agtcttccatatgtttagtgttaaactaagtttggaacatctacaagtctttgcccaaatactctcagtgaagcttgcctggccatcttatttaaaattgcggcactcctcaccacacacacaaacttctcacccctcttcctctgctgtgcaatttcaccgcattgccatcttctaagatgttacatgatttgatatgtgatgcttattgctcatcatctgcttttctccactggaatggaaacttcacaagcccagtagtttttgcttcctttggtgaccaatgtrtcttggtgcctgtacatgtgggtgctcagtagttacaggttgaaaatattagtacgtgcattacggtaattcatgtaaaaacaaaaccacaagctactttggaaacaagtatatgcaaatgtatagaaaa

SEQ ID NO: 129645 - DNA, 418 bp, Homo sapiens
agtcttccatatgtttagtgttaaactaagtttggaacatctacaagtctttgcccaaatactctcagtgaagcttgcctggccatcttatttaaaattgcggcactcctcaccacacacacaaacttctcacccctcttcctctgctgtgcaatttcaccgcattgccatcttctaagatgttacatgatttgatatgtgatgcttattgctcatcatctgcttttctccactggaatggaaacttcacaagcccagtagtttttgcttcctttggtgaccaatgtgtcttggtgcctgtacatgtgggtgctcagtagttacaggttgaaaatattagtaygtgcattacggtaattcatgtaaaaacaaaaccacaagctactttggaaacaagtatatgcaaatgtatagaaaa

SEQ ID NO: 129646 - DNA, 594 bp, Homo sapiens
aattataaatcgaggaaatgtaaaatatgtattattgtsacaatggatgaaaatatcccaaaagagatcatttggttgtgagttaggttttaaagtatacgcaatattagaaatgaataattgaagatagtttcaataattttaaaaactactgcccaatggtaaaagatataaaagattatgtaatttacaaggcagatgtcctatatctcttgaattattttagactgggacacaaaaagcccaggcagtcaagatgatattaaatgattcaaaaatagcattatttcaattaaacaaataaatgcccacaagacctatacaacaagctgaaaaagttaggtgcttatcacatcaggattctgtactaccttcctttaggaaaaaaatattattgaaatactaaattgtattgaaacattgtttttaaaagaattaggcaatgcatggaacatacttttgagtctttttccctgagtttcaaaacacaattcagttgtttcctttccaagaagtcaaacaaatattgttatttacaaactaggcaaatagcatcaagagaagaaaatatatttctttttactttttctgcca

SEQ ID NO: 129647 - DNA, 594 bp, Homo sapiens
aattataaatcgaggaaatgtaaaatatgtattattgtcacaatggatgaaaatatcccaaaagagatcatttggttgtgagttaggttttaaagtatacgcaatattagaaatgaataattgaagatagtttcaataattttaaaaactactgcccaatggtaaaagatataaaagattatgtaatttacaaggcagatgtcctatatctcttgaattattttagactgggacacaaaaagcccaggcagtcaagatgatattaaatgattcaaaaatagcattatttcaattaaacaaataaatgcccacaagacctatacaacaagctgaaaaagttaggtgcttatcacatcaggattctrtactaccttcctttaggaaaaaaatattattgaaatactaaattgtattgaaacattgtttttaaaagaattaggcaatgcatggaacatacttttgagtctttttccctgagtttcaaaacacaattcagttgtttcctttccaagaagtcaaacaaatattgttatttacaaactaggcaaatagcatcaagagaagaaaatatatttctttttactttttctgcca

SEQ ID NO: 129648 - DNA, 466 bp, Homo sapiens
agatatacctagaaacacaaagaaataattatagccatttcatcccattggggttgttarctctgtccttactctacttaagctaatatcctaaatccttgtgcactaatatcctctttatatcccacttcctctccaaaatatatcctctttccctgctcctgttcttgtaggagtaattccagaaggccctgaccatcgctccccttttagggaggaattgctccctaaaagtccaaggtggttttctggctacaaatgtattctctaatgggatagtctacatgaaacaacagaaaacaaaattaaatgtgtcaattgatgtaacttgataaaccttaatatcaacatatttgctaccaaaggatgtggaaaaaggagcaggtggagattaaccagtgattaggaaacaaaattctgagtcagaacctggtcttctgtttcaaactttatcccttcatcataa

SEQ ID NO: 129649 - DNA, 462 bp, Homo sapiens
acaaatgatttctccagatatacctagaaacacaaagaaataattatagccatttcatcccattggggttgttaactctgtccttactctacttaagctaatatcctaaatccttgtgcactaatatcctctttatatcccacttcctctccaaaatatatcctctttccctgctcctrttcttgtaggagtaattccagaaggccctgaccatcgctccccttttagggaggaattgctccctaaaagtccaaggtggttttctggctacaaatgtattctctaatgggatagtctacatgaaacaacagaaaacaaaattaaatgtgtcaattgatgtaacttgataaaccttaatatcaacatatttgctaccaaaggatgtggaaaaaggagcaggtggagattaaccagtgattaggaaacaaaattctgagtcagaacctggtcttctgtttcaaa

SEQ ID NO: 129650 - DNA, 466 bp, Homo sapiens
agatatacctagaaacacaaagaaataattatagccatttcatcccattggggttgttaactctgtccttactctacttaagctaatatcctaaatccttgtgcactaatatcctctttatatcccacttcctctccaaaatatatcctctttccctgctcctgttcttgtaggagtaattccagaaggccctgaccatcgctccccttttagggaggaattgctccctaaaagtccaaggtggttttctggctacaaatgtattctctaatgggatagtctacatgaaacaacagaaaacaaaattaaatgtgtcaattgatgtaacttgataaaccttaatatcaacatatttgctaccaaaggatgtggaaaaaggrgcaggtggagattaaccagtgattaggaaacaaaattctgagtcagaacctggtcttctgtttcaaactttatcccttcatcataa

SEQ ID NO: 129651 - DNA, 407 bp, Homo sapiens
aaaaatgcaaactgttagatctcagttaaataactgagtttattgcaatttaagctaatagttattcagtattcagtcaactatttggtgcaaacaaataaatattcttccacttgttagtccctaggggctttcttaatcctatctgaatttactttctgtgaatttctgagtaatcagaagttataggttggatacatcttgtgctagggacacccatggtgtaactgcttcattttttcttttcatttcaaaggaaatggtccatccaaagtgaaaattgttgtgttttttttttttttttggtggtagagtatattttcctctttgttggtgttrttattgttgctgttgttttaatcagatagttatttcaaacagaagcaatcaagttccttttttcactg

SEQ ID NO: 129652 - DNA, 622 bp, Homo sapiens
tggtaagtaagcctaccaaaacaggtttcacatcatatgtcacaaggaaaatgcaaataaaacaataattagatatyactgtatacctattaaaatagccaaaatccagaacactgacaccacaaaacgctgggaaggatatggaacaacaggaacttttatccattgatgaaaggaatgtaaaatggcacagccactttggaagacatttcagcagtttcttataaaactatacatactcttaccatgcaatccaacaatcactttctgtggtatttatctaaaggagttgaaaacttatgtccacacaaaaacctgcacacaagtgtttgtagcagctttacttgtaattgccaaaacttggaagtaaccaagatgcttttcagtagatggatggattaataattcagccaatggaatattcagtgctaaaaagaaatgagctgccaaatcatggaaagacatgaagaaagcttaaatgcatattactaaatgagagaagccaaactgaaaaggctgcatatccaatgatatgacattctgaaaaaggcaaacctatggagacaataaaaaataaaatcagtggttgcctggggaggggggcaggaatggagcatagaag

SEQ ID NO: 129653 - DNA, 622 bp, Homo sapiens
tggtaagtaagcctaccaaaacaggtttcacatcatatgtcacaaggaaaatgcaaataaaacaataattagatattactgtatacctattaaaatagccaaaatccagaacactgacaccacaaaacgctgggaaggatatggaacaacaggaacttttatccattgatgaaaggaatgyaaaatggcacagccactttggaagacatttcagcagtttcttataaaactatacatactcttaccatgcaatccaacaatcactttctgtggtatttatctaaaggagttgaaaacttatgtccacacaaaaacctgcacacaagtgtttgtagcagctttacttgtaattgccaaaacttggaagtaaccaagatgcttttcagtagatggatggattaataattcagccaatggaatattcagtgctaaaaagaaatgagctgccaaatcatggaaagacatgaagaaagcttaaatgcatattactaaatgagagaagccaaactgaaaaggctgcatatccaatgatatgacattctgaaaaaggcaaacctatggagacaataaaaaataaaatcagtggttgcctggggaggggggcaggaatggagcatagaag

SEQ ID NO: 129654 - DNA, 622 bp, Homo sapiens
tggtaagtaagcctaccaaaacaggtttcacatcatatgtcacaaggaaaatgcaaataaaacaataattagatattactgtatacctattaaaatagccaaaatccagaacactgacaccacaaaacgctgggaaggatatggaacaacaggaacttttatccattgatgaaaggaatgtaaaatggcacagccactttggaagacatttcagcagtttcttataaaactatacatactcttaccatgcaatccarcaatcactttctgtggtatttatctaaaggagttgaaaacttatgtccacacaaaaacctgcacacaagtgtttgtagcagctttacttgtaattgccaaaacttggaagtaaccaagatgcttttcagtagatggatggattaataattcagccaatggaatattcagtgctaaaaagaaatgagctgccaaatcatggaaagacatgaagaaagcttaaatgcatattactaaatgagagaagccaaactgaaaaggctgcatatccaatgatatgacattctgaaaaaggcaaacctatggagacaataaaaaataaaatcagtggttgcctggggaggggggcaggaatggagcatagaag

SEQ ID NO: 129655 - DNA, 622 bp, Homo sapiens
tggtaagtaagcctaccaaaacaggtttcacatcatatgtcacaaggaaaatgcaaataaaacaataattagatattactgtatacctattaaaatagccaaaatccagaacactgacaccacaaaacgctgggaaggatatggaacaacaggaacttttatccattgatgaaaggaatgtaaaatggcacagccactttggaagacatttcagcagtttcttataaaactatacatactcttaccatgcaatccaacaatcactttctgtggtatttatctaaaggagttgaaaacttatgtccacacaaaaacctgcacacaagtgtttgtagcagctttacttgtaattgccaaaacttggaagtaaccaagaygcttttcagtagatggatggattaataattcagccaatggaatattcagtgctaaaaagaaatgagctgccaaatcatggaaagacatgaagaaagcttaaatgcatattactaaatgagagaagccaaactgaaaaggctgcatatccaatgatatgacattctgaaaaaggcaaacctatggagacaataaaaaataaaatcagtggttgcctggggaggggggcaggaatggagcatagaag

SEQ ID NO: 129656 - DNA, 660 bp, Homo sapiens
cagagtaataccctaattatcatcctcttagtaagggctgcttttgacaggtgtcaaytagatttaaatggttggctgtgctgttgggttcctttactttccctttttttctacactgtcattccttgaggtagggttaaatgctgacatccctttgtgcttaaccagagataactatcaaagcaatgtataaattacagctccagttacactgatgcttaggaggctcatccacctctaatgacaagatatccaatcaacctgggctatagttttgtgaacagagttgtgaagtttggttaatgaaatctcacatttcacatggttcctgactgtatttttagatactcttacaagtaggatatcctagttagttattctatctttttatctcttgcatgaataaattacagagttctgcttcttatcaaagaaagcattcactcatcatctgggaaacacaaaacactttttagaccataaattattcctaaagaaaatcttagatgagttgggtactccttgttgtgtatgtatatgtgtttgtgagagagaaagaatgtctgcttgatggcattcattctaaatgatcatagacagactacccgattgtcatcttacctgtcagtccttaaagcaaactaccctagaatgcaaaca

SEQ ID NO: 129657 - DNA, 660 bp, Homo sapiens
cagagtaataccctaattatcatcctcttagtaagggctgcttttgacaggtgtcaattagatttaaatggttggctgtgctgttgggttcctttactttccctttttttctacactgtcattccttgaggtagggttaaatgctgacatccctttgtgcttaaccagagataactatcaaagcaatgtataaattacagctccagttacactgatgcttaggaggctcatccacctctaatgacaagatatccaatcaacctgggctatagttttgtgaacagagttgtgaagtttggttaatgaaatctcacatttcacatggttcctgactgtatttttagatactcttacaagtaggatatcctagttagttattctatctttttatctcttgyatgaataaattacagagttctgcttcttatcaaagaaagcattcactcatcatctgggaaacacaaaacactttttagaccataaattattcctaaagaaaatcttagatgagttgggtactccttgttgtgtatgtatatgtgtttgtgagagagaaagaatgtctgcttgatggcattcattctaaatgatcatagacagactacccgattgtcatcttacctgtcagtccttaaagcaaactaccctagaatgcaaaca

SEQ ID NO: 129658 - DNA, 660 bp, Homo sapiens
cagagtaataccctaattatcatcctcttagtaagggctgcttttgacaggtgtcaattagatttaaatggttggctgtgctgttgggttcctttactttccctttttttctacactgtcattccttgaggtagggttaaatgctgacatccctttgtgcttaaccagagataactatcaaagcaatgtataaattacagctccagttacactgatgcttaggaggctcatccacctctaatgacaagatatccaatcaacctgggctatagttttgtgaacagagttgtgaagtttggttaatgaaatctcacatttcacatggttcctgactgtatttttagatactcttacaagtaggatatcctagttagttattctatctttttatctcttgcatgaataaattacagagttctgcttcttatcaaagaaagcattcactcatcatctgggaaacacaaaacactttttagaccataaattattcctaaagaaaatcttagatgagttgggtactccttgtygtgtatgtatatgtgtttgtgagagagaaagaatgtctgcttgatggcattcattctaaatgatcatagacagactacccgattgtcatcttacctgtcagtccttaaagcaaactaccctagaatgcaaaca

SEQ ID NO: 129659 - DNA, 660 bp, Homo sapiens
cagagtaataccctaattatcatcctcttagtaagggctgcttttgacaggtgtcaattagatttaaatggttggctgtgctgttgggttcctttactttccctttttttctacactgtcattccttgaggtagggttaaatgctgacatccctttgtgcttaaccagagataactatcaaagcaatgtataaattacagctccagttacactgatgcttaggaggctcatccacctctaatgacaagatatccaatcaacctgggctatagttttgtgaacagagttgtgaagtttggttaatgaaatctcacatttcacatggttcctgactgtatttttagatactcttacaagtaggatatcctagttagttattctatctttttatctcttgcatgaataaattacagagttctgcttcttatcaaagaaagcattcactcatcatctgggaaacacaaaacactttttagaccataaattattcctaaagaaaatcttagatgagttgggtactccttgttgtgtatgtatatgtgtttgtgagaragaaagaatgtctgcttgatggcattcattctaaatgatcatagacagactacccgattgtcatcttacctgtcagtccttaaagcaaactaccctagaatgcaaaca

SEQ ID NO: 129660 - DNA, 598 bp, Homo sapiens
tttttgcctaaattaccacattttcyggactagctcacttgcttctggtttcactcccctcgagtccactctcctaattgcccccagagtgatggttgtgaagtgggtatcctggccatttcatacccttacaaaaaacaattctagtggcttccaatccatacagataaaagaaaaaatttcatagtataacttggaaggcctttcataatccgacagccgcgggaaatcttgccactccctccccttggagctaataaacatttgctgttctctctcgtgccttcaaataagtgctcccttgtctttatgtgtggtagaggagaagaaattaaaattacaaataaattaaatatattgggagagacagaaatggggagttgctgctcaacaggtataaagtttcattcattcaagatgaaaatgttctagaaatctgtacaacattgaacttagcgttaacaatactgtactgcacacttaaaaaatttaagagggtgtatctcatgttatatatttgttacaatagaatagatgaatttataaatatttatatagatttggatatagctttactgacctctcttcacttgataag

SEQ ID NO: 129661 - DNA, 598 bp, Homo sapiens
tgtgagaactgagtaaatagacagcccgcagtgctgtcatctaagttacctcttctggaacccccactcactgctcccgccacagcttttcttcagctcttcatgatttttgcctaaattaccacattttctggactagctcacttgcttctggtttcactcccctcgagtccactctcctaattgcccccagagtgatggttgtgaagtgggtatcctggccatttcatacccttacaaaaaacaattctagtggcttccaatccatacagataaaagaaaaaatttcatagtataacttggaaggcctttcataatccgacagccgcgggaaatcttgccactccctycccttggagctaataaacatttgctgttctctctcgtgccttcaaataagtgctcccttgtctttatgtgtggtagaggagaagaaattaaaattacaaataaattaaatatattgggagagacagaaatggggagttgctgctcaacaggtataaagtttcattcattcaagatgaaaatgttctagaaatctgtacaacattgaacttagcgttaacaatactgtactgcacacttaaaaaattta

SEQ ID NO: 129662 - DNA, 598 bp, Homo sapiens
tttttgcctaaattaccacattttctggactagctcacttgcttctggtttcactcccctcgagtccactctcctaattgcccccagagtgatggttgtgaagtgggtatcctggccatttcatacccttacaaaaaacaattctagtggcttccaatccatacagataaaagaaaaaatttcatagtataacttggaaggcctttcataatccgacagccgcgggaaatcttgccactccctccccttggagctaataaacatttgctgttctctctcgtgccttcaaataagtgctcccttgtctttatgtgtggtagaggagaagaaattaaaattacaaataaattaaatatattgggagagacagaaatggggagttgctgctcaacaggtataaagtttcattcattcaagatgaaaatgttctagaaatctgtacaacattgaayttagcgttaacaatactgtactgcacacttaaaaaatttaagagggtgtatctcatgttatatatttgttacaatagaatagatgaatttataaatatttatatagatttggatatagctttactgacctctcttcacttgataag

SEQ ID NO: 129663 - DNA, 494 bp, Homo sapiens
tgccacttttaaaacatttatatactcttatgcatatcatataactgaacatgaatgttagcatctaagtatatgtatctgatgaaaatgccagagttataaaatcttttttatgtttttttaatcacaaaaatatcaaaatgcaccttggttttagggaataattttctatcactggtcctgagaacctctaaaaytatggaacaatcgttccagactctcaataccattaagttcaatgaactataaactccagggcaaagaacacagcttttttgatcaacaatgtatatttaacgtccaagcttaatgactgaagaaagtaaactccctaaaaacataagtttttttttaatgaatcaaaagaaaaggaaaaagaaaaagatatttagaaaggacccatagtttgtcatctgaatgcagcagacatttaaaatggactctatcttttcaagaatatgaaatctactgacccctttcaaggggttccccca

SEQ ID NO: 129664 - DNA, 494 bp, Homo sapiens
tgccacttttaaaacatttatatactcttatgcatatcatataactgaacatgaatgttagcatctaagtatatgtatctgatgaaaatgccagagttataaaatcttttttatgtttttttaatcacaaaaatatcaaaatgcaccttggttttagggaataattttctatcactggtcctgagaacctctaaaactatggaacaatcgttccagactctcaataccattaagttcaatgaactataaactccagggcaaagaacacagcttttttgatcaacaatgtatayttaacgtccaagcttaatgactgaagaaagtaaactccctaaaaacataagtttttttttaatgaatcaaaagaaaaggaaaaagaaaaagatatttagaaaggacccatagtttgtcatctgaatgcagcagacatttaaaatggactctatcttttcaagaatatgaaatctactgacccctttcaaggggttccccca

SEQ ID NO: 129665 - DNA, 518 bp, Homo sapiens
gataccatttagggaatcactgtgatgcttagtttacagtccacaaggcagctactrggagaatctggatcaatgtgttttatgcctctgaaatttgggcagcaaagaaagagtgcttcagttataaacatgcaatgtccatagttctcatcatccttctgaacaagcagaagctccccttttctgaacccaaatggagcaatccaattacaaagtcattaaatcccgttataaggtggttcataggagttcctgtttccagcaaaagccttttctgtgttcatccaacatatattctggcctcttgcactcagtttacaaggtttctaattaagctccagagaggatgatatagttcactgaactgagtcactatgctacaactgggaaagaagaggcattcctattttatcagaaaaataaacactttagtttcatttcctctgccacacatgttatctctttgtgctgtcacaacattttttataggtttttatttcaaaggattaccttgagat

SEQ ID NO: 129666 - DNA, 552 bp, Homo sapiens
attgtaagaaataatatagagagacccatttcttccatatggcaacgtctggcaaaactattctataacatcgcaaccaggatattgatgttgatacagtcaagattcaaagtaccaccatcaccacaaagaccccttatggtgtccttcttccctcctgccagacccacttccctcctgcccccacctcctccttaaccctggcaaccaccaacatgttctctatttctatgtttttattttttcaaagattttatataaatgaaatcatayaatgtgcaacttttggtgactgcctattttcagtcacctgaattttctggagcttcatccaggctgctgtgtatatgaataatttgttcctttttattactgagtagtattccatggtatgaaaataccgcccaactatttttattgccaaactctgtagttcacattcatatcacaacatgacctccaccccagcaccttcatgacatgatgccaagtaagtcaacttagtgggcaaaaggaatgttccttacaggtattcaaattcagtttagcaat

SEQ ID NO: 129667 - DNA, 552 bp, Homo sapiens
attgtaagaaataatatagagagacccatttcttccatatggcaacgtctggcaaaactattctataacatcgcaaccaggatattgatgttgatacagtcaagattcaaagtaccaccatcaccacaaagaccccttatggtgtccttcttccctcctgccagacccacttccctcctgcccccacctcctccttaaccctggcaaccaccaacatgttctctatttctatgtttttattttttcaaagattttatataaatgaaatcatacaatgtgcaacttttggtgactgcctattttcagtcacctgaattttctggagcttcatccaggctgctgtgtatakgaataatttgttcctttttattactgagtagtattccatggtatgaaaataccgcccaactatttttattgccaaactctgtagttcacattcatatcacaacatgacctccaccccagcaccttcatgacatgatgccaagtaagtcaacttagtgggcaaaaggaatgttccttacaggtattcaaattcagtttagcaat

SEQ ID NO: 129668 - DNA, 511 bp, Homo sapiens
cacattcatttatttatttttgatctgtatgtcatttatttatttctcttgttataatktacttggtataacctccagtgcaatgttggaaagaagtagtgagagtaaacacccttaccttatgcctgaccttgggaggaaggtattcattctgtcttttactattaaatctaatattagctgtggactttttgtagatatcctacatcagattgagggagtttcctactattcctagtttgctgagagttttatagttgaaaactattttcaatagttgcataattcattgttaactagaatatggtctatgttggtgagtgtttcatgtgtacataagaattatgtgtttcctgcaactgttaggtggagtgctttctaaatgttaagtagattcatattatcaagtaggttagtgttattagaatctgttatccaggtcctctatattcttactaaaattttgtctactgattccatcagtcaattagatagcaaagttaaaatatcc

SEQ ID NO: 129669 - DNA, 456 bp, Homo sapiens
aatttacttggtataacctccagtgcaatgttggaaagaagtagtgagagtaaacacccttaccttatgcctgaccttgggaggaaggtattcattctgtcttttactrttaaatctaatattagctgtggactttttgtagatatcctacatcagattgagggagtttcctactattcctagtttgctgagagttttatagttgaaaactattttcaatagttgcataattcattgttaactagaatatggtctatgttggtgagtgtttcatgtgtacataagaattatgtgtttcctgcaactgttaggtggagtgctttctaaatgttaagtagattcatattatcaagtaggttagtgttattagaatctgttatccaggtcctctatattcttactaaaattttgtctactgattccatcagtcaattagatagcaaagttaaaatatcc

SEQ ID NO: 129670 - DNA, 419 bp, Homo sapiens
acagaattctttgtgaaatatsagtgccacagactgtaacagatagcttcatgcacactatgcattttattggtttgtttggaaaatgttggccattgaattattaataggtttatttcaaatagtttggaaattgttgtacttttgaaaacatgctgttcctgtagagttttttgatgagagttatagttgttatatatacataaagataattttcttttcatttttaagagacaattctttttatcctaaatcttttatctttaaatttttttctgtattattatatgtgctcctgaagcgagcactctttttatctatgatacttccataataatctcttctatttatagctattggtagttccccaccagaaaaaaacataattctggtgatagaaatttttatttgctgtttag

SEQ ID NO: 129671 - DNA, 403 bp, Homo sapiens
agaattctttgtgaaatatgagtgccacagactgtaacagatagcttcatgcacactmtgcattttattggtttgtttggaaaatgttggccattgaattattaataggtttatttcaaatagtttggaaattgttgtacttttgaaaacatgctgttcctgtagagttttttgatgagagttatagttgttatatatacataaagataattttcttttcatttttaagagacaattctttttatcctaaatcttttatctttaaatttttttctgtattattatatgtgctcctgaagcgagcactctttttatctatgatacttccataataatctcttctatttatagctattggtagttccccaccagaaaaaaacataattctggtgatagaaatttt

SEQ ID NO: 129672 - DNA, 406 bp, Homo sapiens
acagaattctttgtgaaatatgagtgccacagactgtaacagatagcttcatgcacactatgcattttattggtttgtttggaaaatgttggccattgaattattmataggtttatttcaaatagtttggaaattgttgtacttttgaaaacatgctgttcctgtagagttttttgatgagagttatagttgttatatatacataaagataattttcttttcatttttaagagacaattctttttatcctaaatcttttatctttaaatttttttctgtattattatatgtgctcctgaagcgagcactctttttatctatgatacttccataataatctcttctatttatagctattggtagttccccaccagaaaaaaacataattctggtgatagaaattttt

SEQ ID NO: 129673 - DNA, 418 bp, Homo sapiens
cagaattctttgtgaaatatgagtgccacagactgtaacagatagcttcatgcacactatgcattttattggtttgtttggaaaatgttggccattgaattattaatagrtttatttcaaatagtttggaaattgttgtacttttgaaaacatgctgttcctgtagagttttttgatgagagttatagttgttatatatacataaagataattttcttttcatttttaagagacaattctttttatcctaaatcttttatctttaaatttttttctgtattattatatgtgctcctgaagcgagcactctttttatctatgatacttccataataatctcttctatttatagctattggtagttccccaccagaaaaaaacataattctggtgatagaaatttttatttgctgtttag

SEQ ID NO: 129674 - DNA, 420 bp, Homo sapiens
cacagaattctttgtgaaatatgagtgccacagactgtaacagatagcttcatgcacactatgcattttattggtttgtttggaaaatgttggccattgaattattaataggtttatttcaaatagtttggaaattgttgtacytttgaaaacatgctgttcctgtagagttttttgatgagagttatagttgttatatatacataaagataattttcttttcatttttaagagacaattctttttatcctaaatcttttatctttaaatttttttctgtattattatatgtgctcctgaagcgagcactctttttatctatgatacttccataataatctcttctatttatagctattggtagttccccaccagaaaaaaacataattctggtgatagaaatttttatttgctgtttag

SEQ ID NO: 129675 - DNA, 403 bp, Homo sapiens
agaattctttgtgaaatatgagtgccacagactgtaacagatagcttcatgcacactatgcattttattggtttgtttggaaaatgttggccattgaattattaataggtttatttcaaatagtttggaaattgttgtacttttgaaaacatgctgttcctgtagagttttttgatgagagttatagttgttatatatacataaagataattttcttttcatttttaagagacaattctttttatcctaaatcttttatctttaaatttktttctgtattattatatgtgctcctgaagcgagcactctttttatctatgatacttccataataatctcttctatttatagctattggtagttccccaccagaaaaaaacataattctggtgatagaaatttt

SEQ ID NO: 129676 - DNA, 420 bp, Homo sapiens
cacagaattctttgtgaaatatgagtgccacagactgtaacagatagcttcatgcacactatgcattttattggtttgtttggaaaatgttggccattgaattattaataggtttatttcaaatagtttggaaattgttgtacttttgaaaacatgctgttcctgtagagttttttgatgagagttatagttgttatatatacataaagataattttcttttcatttttaagagacaattctttttatcctaaatcttttatctttaaattttttyctgtattattatatgtgctcctgaagcgagcactctttttatctatgatacttccataataatctcttctatttatagctattggtagttccccaccagaaaaaaacataattctggtgatagaaatttttatttgctgtttag

SEQ ID NO: 129677 - DNA, 495 bp, Homo sapiens
tctgttcctcacagcacagtccctcactgcttcccttggctaggggatggagttccccaaccccttgcacttcccgggtgaggcaacaccccaccctgcttctgctctccctccatgggctgtacctgctgtctaacsagtcccagtgggatgaaccaggtacctcagttggaaatgcagaaatcacctgccttctgcattgatcttgctgggagctgcagaccagagctactcctatttggccatcttgcccgggaatccccaggtttcatttttaagcagttcaaaattattcttatgtttgcctgtcttgaaggtgataattaagataacccttttatttacacatttatttatctcatgttacaggtgagggctcctataattcattagttctaaaaaaaaaagtttattcattttggtagtaatggttagagggcaaaatgaaacattggacaaaataaatattaaggcaataggctgccagcagtatcc

SEQ ID NO: 129678 - DNA, 456 bp, Homo sapiens
gaaggaggaattctgcatcaagactgcaaaattgcaatcctacctgagtttctagattgctggtcagctctgcaaattttggactcacaactgcaatataattctcccctgggtctccaggctgctgctctgccctacaaattctggactgactagcccctatgattgtgtgcacctcaaaatatctatgtatcagctgaaataaaggttatatatatatgaaaaaaaaaaaaawatatatatatatatatatatatccctgggttctcctgcagggttaggagagccctacaggggctctaaacctttattaaaaaaaaaaggatttatatatatatatattagattttgtgtgggtgtgtctgtgtgtgtgtatcctattggttctatgtttctagagaaacctgtctaatacacccattaaataagcccattgattgtaaggcaggcccaaat

SEQ ID NO: 129679 - DNA, 414 bp, Homo sapiens
gggttaaactgcaattaaaaaattaactatagaaaagaaagccctctaattaatttcttaacatcttactctattttgtgaaatgtttagcaagtttattttcctctctcttcattaagaaatatgcacgactattttagtgctattttaaactattctgcctgtgagatattaatgacgtagagttttgatactgtataagaatcttacaatgccttaatgagagtgaaattgaaatgtggctttcctttttgtcacaaagtagatattcccatacttgactgattgcttatatgtgtgttagcccttggtcatacattgtgcacattagaatttaaagagtcacttgcmtgttgccttctgaaaggattgtcttggtcaccttttctggaagcccttaatgaaactaaatag

SEQ ID NO: 129680 - DNA, 624 bp, Homo sapiens
tcaactcttctagtttatgtagtaaaaatgaaaaccaataagccaatattattttttcagaacttttatgaagtgacttttgaggcccagcatgcagtcatttctcgtatggttttgtgtcagtttgccaaggaaacctttcattgaattttattcagggaagctacatgcccattttaataactttgaatttgtttttccaaagaaacatagatatcaaggtgagaggaagagactattccttagcttcattttgtattatttttccagtatgtttaaattaatcctgaaccaactttggtttttctctctataattcatttttcttgatgaattattttctaarcaataaataatgtcatttaaaattattctgtccaattttctcctaatataaccgatgaattttcaacttactgagttagtgatataactaatttattactcaaatatacaataccaagataaaaataattgtcttttagagtgatgcataaagttctgaaatagatttttcaaatcatagatgatcaacagaatgtgaaaatagtctcaattctgtaaatattttttatttgcttacatttatttatatttaaaatatattaatcagcaagtatgtaa

SEQ ID NO: 129681 - DNA, 348 bp, Homo sapiens
tatatattttaatgtttttttctcattataaaagttatattacttattatgatgctttggtaaaagtatatggaagtatagaaaataacaaataatattgytttaaataatattactttcctgtccttacccccattcatcctcacaatgccttatggaattatgttgaaattgtctcaggtcctaaattctcagaagaaaggaattctaaatcttatattagtggaaacatggagatcttgcatcaatgaaatatagcaatttaagaaacaaattttaggcaaaatgacatccaaacatgtcctttactttatttccttttcccaaagacatggtgtttctagtgtt

SEQ ID NO: 129682 - DNA, 669 bp, Homo sapiens
agagtgaagtatttgatagccattacaagttaaggttaagttatgattatagagactagattacttggttcatataggacaatgtttattttaaaaaagttaaatgttcattatgatcataggcacataaattaaaaaatacatctgagggtggaagaaaggcaccacaaatttaatgctgattgtactgtgatgaatgcttttgttttcttcattattttccactgggggggggcggttartcatagcattatcttactttttaatgaaaaatacatctacagtaaacacacaccacaaaccattttgaagctcttagaagaaacagctctgtaaacatagtttatggctacaataaaacaggcttttcagaaatttcactgtgttttggttaatcaaaagatctcactgactgagagatattaatgatacaaattacaaattatcaaagacttataactcaatatagtctacaggactgagggaatctaggagaaatgaaagctattaccaagtataattcctccttttctcttgtttcaatccctccagtgtcagtggagtcttctaaatccaacaggttgtgttaaaggagtcttaaagaataaaggggtgggcctagtatctatgggacaaaaatgaacatgtatctgcattagtcaatttagc

SEQ ID NO: 129683 - DNA, 669 bp, Homo sapiens
agagtgaagtatttgatagccattacaagttaaggttaagttatgattatagagactagattacttggttcatataggacaatgtttattttaaaaaagttaaatgttcattatgatcataggcacataaattaaaaaatacatctgagggtggaagaaaggcaccacaaatttaatgctgattgtactgtgatgaatgcttttgttttcttcattattttccactgggggggggcggttagtcatagcattatcttactttttaatgaaaaawacatctacagtaaacacacaccacaaaccattttgaagctcttagaagaaacagctctgtaaacatagtttatggctacaataaaacaggcttttcagaaatttcactgtgttttggttaatcaaaagatctcactgactgagagatattaatgatacaaattacaaattatcaaagacttataactcaatatagtctacaggactgagggaatctaggagaaatgaaagctattaccaagtataattcctccttttctcttgtttcaatccctccagtgtcagtggagtcttctaaatccaacaggttgtgttaaaggagtcttaaagaataaaggggtgggcctagtatctatgggacaaaaatgaacatgtatctgcattagtcaatttagc

SEQ ID NO: 129684 - DNA, 669 bp, Homo sapiens
agagtgaagtatttgatagccattacaagttaaggttaagttatgattatagagactagattacttggttcatataggacaatgtttattttaaaaaagttaaatgttcattatgatcataggcacataaattaaaaaatacatctgagggtggaagaaaggcaccacaaatttaatgctgattgtactgtgatgaatgcttttgttttcttcattattttccactgggggggggcggttagtcatagcattatcttactttttaatgaaaaatacatctacagtaaacacacaccacaaaccattttgaagctcttagaagaaacagctctgtaaacatagtttatggctacaataaaacaggcttttcagaaatttcactgtgttttggttaatcaaaagatctcactgactgagagatattaatgatacaaattacaaattatcaaagacttataactcaatatagtctacaggackgagggaatctaggagaaatgaaagctattaccaagtataattcctccttttctcttgtttcaatccctccagtgtcagtggagtcttctaaatccaacaggttgtgttaaaggagtcttaaagaataaaggggtgggcctagtatctatgggacaaaaatgaacatgtatctgcattagtcaatttagc

SEQ ID NO: 129685 - DNA, 551 bp, Homo sapiens
tctatgaacacacaagagacaagggttcacttctttccacatcttcaccaacgcttgttatcatctgtttggggggtttgtttgtttctataacagccctcccaataagtgtgcggtgacctcctgttgtggttttgattgcattcccatgatggtatgtatctaagggaactgaagtcagaatctccatgagatatatgcatttccatgttcattgcaccgctattcacaatagccaatatatggaaacaacataaatgtccatcaacaatgaatggataaagaaaatggcatacatgcagtgatattactcagtcttaaaaaggaagtaaatcctttttggatttacttggacagacccagaggtcataatgctgaatgaaataagccagacacagaaggacaaatactacatgatcccattattaggaggaatctgaaatcatcaaaactcacagaaccacaaagtacaaccgtggttgccatgggttggagaagggggaagtrcagaagtgtcagtcaaagggtacaaagctccagtaatgcaataa

SEQ ID NO: 129686 - DNA, 578 bp, Homo sapiens
aaatagatgtacatatgtacggggtacatgtgatgttttgatacaggcaggcaatgtgtaaggatcaaattaaggtaactggggtatccatcacctcaagcgtttaccatttctttgtgttaggaacattctaattccactcttttagttattttagaaaatacactaaaatatagttaactatactcaccctattatgacaccaaacattagacctcattcattctatcaactgtatttttacacccattaaccatccccaatctctccccactccgggctacccttctcagcctctggcaaccatcattccactctatctctgtaagtccaataatgaatactggccaggatgtggagaaaggggaatccttatacgctgttgttgagaatgcaaattagtatagccactctggggaacagtatggaggttcctyggaaaactaaaaataaaactaccatatgatccagcaatccttctgctggctctctcccaaagaaaagaaaacccttataaagaagaggtctgcacctctatgttcattgcagcactgctcacaatagccaaggaatggaag

SEQ ID NO: 129687 - DNA, 623 bp, Homo sapiens
ggaacacatatgttgtgttatcgcaaaactgatggtatacactcttgctaacaagaaggcaactggaatcacccacaccatttgatttcatttctctctttctctctctctctctctcactcayatcaggtgaccctactacatcgcagatgcttaaaactgctctctttcggggcatacaatgaaaagcgttgaacaaaaggcttgaggaaagggatgcagagagaccgtccaccctcttgtcattagggagaatcccggctgttcttgaggccgcagctctgatattaatagttgtattcatctttccagaagtcttaggtagccttatgctctctcactgtctttcagaacaaggtgttccctgagataacagaaacaatttggctccctttccaatggggtccttgcagaagcttactgccagcaccctctagacatctccatttgtatcttccaaatggtgccatctctaggcctggctatctccatcaacccctgctcattgtccaagttcaaaaaccttggatagctggctgtcggtgaacatccagctgtagtttctggctgtgctcatgagtgttcgcacagtccaggacataacttatgtgtttttcttctag

SEQ ID NO: 129688 - DNA, 385 bp, Homo sapiens
agatctctgtaggcatttgagtttcagactcacctaaaaccccaactaattcactcttgattgattcctttaaatatatccttcaagtcaactctaccactatatagttgctgagcaaatattgccatgtatgggaaaaatgtaatccttgttcttacagatgttgcattctagtgcagggagatagagaaggaatagaaataaataatattatttaggattatcaagttcttccaagtctagtcttccttgtataaagacctactggctaggmtgaatgaatctgctacccaggtgagcctgtgcagtatcctgttttagagcaatgttggatcattctccagtccagtgggtaaacaaaagaacacacagtaaccttctgctc

SEQ ID NO: 129689 - DNA, 377 bp, Homo sapiens
ggtatatcacatttagtttatcaattcatccatcaatgtatgttcggcttacttccagtcttgtctattatgaacaatgctactgtgaacattcatgtataagcttttttttgtgtggatatatatcttcattgttctttggtaaatgcttagcagtagaattgctgggtcatgtggcatctctgtgtttcacattttgaggaatcaccaaactgttttccaaagcagttgtaccattttatagtactatcagtgacgtctgaggatcttatcatktttttaacatctccaaaattgagatgtctctttgatgtactttgcaattacaaatggctatgtttcttttacttttttatgacatataaaaatggtggatt

SEQ ID NO: 129690 - DNA, 511 bp, Homo sapiens
gcagatgggttagaaagctgttgcagtagtataaatcagagatgatggattggagtgatggggaaggagtaatgagaaatagatgggtcttgaatgtattttaaaggtcatgaaggccagacgcggtgcctcatgcctgtaatcccagcactttgggaggccaaggtgggtggaccacttgggatcaggagtttgagaccagcctgaacatggtgaaaccccgtctctactaaaaatacaaaaaattagccaggcgtggtggtgcatgcctgtaatccyggctactcgggagactgagacaggcgaattgcttgaacctgggatgtggaggttgcagtgagccaagattgggccattgcactccagcctgggtgacagagtgagatttcatctcaataaataaataaataaataaataaataaataaataaataaatgtatgtcttgaagacctgtgattggatatgaaggggaatagaggagggaagaatcactaacagccgtttggcct

SEQ ID NO: 129691 - DNA, 541 bp, Homo sapiens
gttccgaggttatgcagtgactgggagaaacgcacttacaagaaactgctggcaaggattcattgtaaactgtcaccaatatcataacccattacagtctactctggatataccagctgcatggtatttgtgctgaaaacttggcaatagctatctttggtgtatagctcagaggtatccaccttcaggaagtcttccctgaaggcmcaggaatgtaaatatgacgccatggtttcctctaccataacatcctggattttttttttttttttttgtatagaatttgtcacagtggaacgtaattgtcactgggaggtgagtttattcagggcagggatcttgttttattctccttgtacccccagtctgtggcacaggtcttggtacatgtggttcatgacattgcaccaactgtggataacacaaggctcctgtctccttgattagtttgtgatccacagatctgaggatcggtcagagcccaagacaggaagaagtttgagaagccccaggcaaaggggtgaggaatagattctgaaac

SEQ ID NO: 129692 - DNA, 541 bp, Homo sapiens
gttccgaggttatgcagtgactgggagaaacgcacttacaagaaactgctggcaaggattcattgtaaactgtcaccaatatcataacccattacagtctactctggatataccagctgcatggtatttgtgctgaaaacttggcaatagctatctttggtgtatagctcagaggtatccaccttcaggaagtcttccctgaaggcacaggaatgtaaatatgacgccatggtttcctctaccataacatcctggattttttttttttttttttgtatagaatttgtcacagtggaacgtaattgtcactgggaggtgastttattcagggcagggatcttgttttattctccttgtacccccagtctgtggcacaggtcttggtacatgtggttcatgacattgcaccaactgtggataacacaaggctcctgtctccttgattagtttgtgatccacagatctgaggatcggtcagagcccaagacaggaagaagtttgagaagccccaggcaaaggggtgaggaatagattctgaaac

SEQ ID NO: 129693 - DNA, 541 bp, Homo sapiens
gttccgaggttatgcagtgactgggagaaacgcacttacaagaaactgctggcaaggattcattgtaaactgtcaccaatatcataacccattacagtctactctggatataccagctgcatggtatttgtgctgaaaacttggcaatagctatctttggtgtatagctcagaggtatccaccttcaggaagtcttccctgaaggcacaggaatgtaaatatgacgccatggtttcctctaccataacatcctggattttttttttttttttttgtatagaatttgtcacagtggaacgtaattgtcactgggaggtgagtttattcagggcagggatcttgttttattctccttgtacccccartctgtggcacaggtcttggtacatgtggttcatgacattgcaccaactgtggataacacaaggctcctgtctccttgattagtttgtgatccacagatctgaggatcggtcagagcccaagacaggaagaagtttgagaagccccaggcaaaggggtgaggaatagattctgaaac

SEQ ID NO: 129694 - DNA, 579 bp, Homo sapiens
gaatttaaaaaggaaacaagcatttattgaatactccttattgtctagcactgtgaaggcattttggcatggattatctcatttattcctcaaaataagtcttagaagtgattatcctcatttccactgtgtggataaaaaaaaaattgagtccaaactcagccatctgccttcatctccatacttctaacagtggcagtattgggcctttctatacacagtcaactgggagagagggtctctgtcttcaaggggcttatgctccttctgtgggatttgtkgcaggaaaaccatccatacttgagatgaagcctcgcaccttcacctctgagctgtgaccttggacaagttgctttatttctctgaaccccatttcctatctgtaaattcaggataatacaatgtgacctgcaggaatgttgtgagaattgttaactaagtatgtgtgtgaaacagaggatactagaggctggaaaggctgggtggaagggagggaagggtgagaagagatttgcaaaaggatacaaaattgcagctagataggaagaataagttctagtgttctgtagcactgtagga

SEQ ID NO: 129695 - DNA, 596 bp, Homo sapiens
cagattgaaaatattttggggagaaaatggtgtctgcactaaacatatacagacttttttttcttgtcattgtttcctaaaccatacggtgtaacaactatttagatcgcatttatattscattaggtattataagtaaactagagatgatttaaagtataagatgtgcatagattatattcaaatgctacaccattttatatcaggaacttgagcatccacagattttggtgtctgtaggagaccctcaaaccaatcctccacaatactgagggacaactgtatatataatatattgcctttccaaattaaagtgtttaaaaaatatagactgagagggatttggggccactgtttatccatgccataaattttgcacgagcctatgtgacatcaatgtttgacttaccaacaagccattcattatatcttatttccactttgatggttctcttgacatttgactttctctggtttgagcaattcactgcttgtcaggcatgggcctggcatgctgaccttgtactaatcctggtgttggattgataacagacactaagattctgaatctcaacaggcccattagggaattcact

SEQ ID NO: 129696 - DNA, 554 bp, Homo sapiens
taaacatatacagacttttttttcttgtcattgtttcctaaaccatacggtgtaacaactatttagatcgcatttatattgcattaggtattataagtaaactagagatgatttaaagtataagatgtgcatagattatattcaaatgctacaccattttatatcaggaacttgagcatccacagattttggtgtctgtaggagaccctcaaaccaatcctccacaatactgagggacaactgtatatataatatattgcctttccaaatkaaagtgtttaaaaaatatagactgagagggatttggggccactgtttatccatgccataaattttgcacgagcctatgtgacatcaatgtttgacttaccaacaagccattcattatatcttatttccactttgatggttctcttgacatttgactttctctggtttgagcaattcactgcttgtcaggcatgggcctggcatgctgaccttgtactaatcctggtgttggattgataacagacactaagattctgaatctcaacaggcccattagggaattc

SEQ ID NO: 129697 - DNA, 596 bp, Homo sapiens
cagattgaaaatattttggggagaaaatggtgtctgcactaaacatatacagacttttttttcttgtcattgtttcctaaaccatacggtgtaacaactatttagatcgcatttatattgcattaggtattataagtaaactagagatgatttaaagtataagatgtgcatagattatattcaaatgctacaccattttatatcaggaacttgagcatccacagattttggtgtctgtaggagaccctcaaaccaatcctccacaatactgagggacaactgtatatataatatattgcctttccaaattaaagtgtttaaaaaatatagactgagagggatttggggccactgtttatccatgccataaattttgcacragcctatgtgacatcaatgtttgacttaccaacaagccattcattatatcttatttccactttgatggttctcttgacatttgactttctctggtttgagcaattcactgcttgtcaggcatgggcctggcatgctgaccttgtactaatcctggtgttggattgataacagacactaagattctgaatctcaacaggcccattagggaattcact

SEQ ID NO: 129698 - DNA, 596 bp, Homo sapiens
cagattgaaaatattttggggagaaaatggtgtctgcactaaacatatacagacttttttttcttgtcattgtttcctaaaccatacggtgtaacaactatttagatcgcatttatattgcattaggtattataagtaaactagagatgatttaaagtataagatgtgcatagattatattcaaatgctacaccattttatatcaggaacttgagcatccacagattttggtgtctgtaggagaccctcaaaccaatcctccacaatactgagggacaactgtatatataatatattgcctttccaaattaaagtgtttaaaaaatatagactgagagggatttggggccactgtttatccatgccataaattttgcacgagcctatgtgacatcaatgtttgacttaccaacaagccattcattatrtcttatttccactttgatggttctcttgacatttgactttctctggtttgagcaattcactgcttgtcaggcatgggcctggcatgctgaccttgtactaatcctggtgttggattgataacagacactaagattctgaatctcaacaggcccattagggaattcact

SEQ ID NO: 129699 - DNA, 470 bp, Homo sapiens
ccaatagagggaggcagagagcatggtgaatgcaacattgcataatggtgttgggaaaagtgtcccgatttcaaggaagctgacagccagtctctgtcatttcctagctaggtaactttgagtaaattactcaacctctttagattttattttcctacartgcaaaatcagggtaacaatagttgctgtcttttaaaatggttgcataactgaatgaaacaatgcatacaaattgcaaagctcagtgcctgagccacattataaaagatcaataaatgttagcggctgctgtcaccactactacaaaccctggatgctagatgctagggcagtggttctcaaccttggctgagtgaatgtcaaagttacctggggaacgcagtacactgttggtaggaatgtaaattagtgcaactgctatggaaaatagtgtggaggttcctcaaaaaactagaaatagatatatgatt

SEQ ID NO: 129700 - DNA, 579 bp, Homo sapiens
ctggggttgaggtcccaacagtatttgggggctctcccagacccctggaatcaggatgagaaaagtattctaaaattaggtttggtgatgtttacaaaattctgtaaatatactgaatgtcattgaataaatagtgaattgtatggyatgtaagttgtatcttaataaagctattgaaagattagtggtcccttgtcccttctagtgaatgacaaccactggaccccaagcagtcggaccccagtccccactttcttatccactacagagcacagccacactttagcacgaacataaacctcaaacttcctactttacttttttctcaaaggccccaggaaccctccttgggaaaagccaggaatgaccagtccccagctttggtgctagtagaggcagctcctacaattgctctcagagcagctccagccaccatccatcccagaggcatgggcggggggactcacatccaacaacatctcaaatgtgattaagtcagcagtatgtccaatgtgttcactagatttgcatcatggctccagagcctggccaggcattcatctggaacaaaccttgcag

SEQ ID NO: 129701 - DNA, 579 bp, Homo sapiens
ctggggttgaggtcccaacagtatttgggggctctcccagacccctggaatcaggatgagaaaagtattctaaaattaggtttggtgatgtttacaaaattctgtaaatatactgaatgtcattgaataaatagtgaattgtatggcatgtaagttgtatcttaataaagctattgaaagattagtggtcccttgtcccwtctagtgaatgacaaccactggaccccaagcagtcggaccccagtccccactttcttatccactacagagcacagccacactttagcacgaacataaacctcaaacttcctactttacttttttctcaaaggccccaggaaccctccttgggaaaagccaggaatgaccagtccccagctttggtgctagtagaggcagctcctacaattgctctcagagcagctccagccaccatccatcccagaggcatgggcggggggactcacatccaacaacatctcaaatgtgattaagtcagcagtatgtccaatgtgttcactagatttgcatcatggctccagagcctggccaggcattcatctggaacaaaccttgcag

SEQ ID NO: 129702 - DNA, 579 bp, Homo sapiens
ctggggttgaggtcccaacagtatttgggggctctcccagacccctggaatcaggatgagaaaagtattctaaaattaggtttggtgatgtttacaaaattctgtaaatatactgaatgtcattgaataaatagtgaattgtatggcatgtaagttgtatcttaataaagctattgaaagattagtggtcccttgtcccttctagtgaatgacaaccactggaccccaagcagtcggaccccagwccccactttcttatccactacagagcacagccacactttagcacgaacataaacctcaaacttcctactttacttttttctcaaaggccccaggaaccctccttgggaaaagccaggaatgaccagtccccagctttggtgctagtagaggcagctcctacaattgctctcagagcagctccagccaccatccatcccagaggcatgggcggggggactcacatccaacaacatctcaaatgtgattaagtcagcagtatgtccaatgtgttcactagatttgcatcatggctccagagcctggccaggcattcatctggaacaaaccttgcag

SEQ ID NO: 129703 - DNA, 601 bp, Homo sapiens
gaccagcattaatgttgaaatagagattataagactgacagaatagactcttygtggtaataagataccagattataaacaagacctaagaccatgagaagcaagggttaagtcctgccctacaaaccataaaatcttgttaaatgttttgtttttttcttaaatctagtataatgtggcttactttttaacctgactctgttttaccatcacatgatagacagcaggcctccttatcttaatttaagcattcctttgcactgactttcagtctttagacaaagctgaactctttcaaccaattgcaaattaaagaatctctgaatccacctataacctgtaagcctctgcttcaagatatcctgcctttcagtccaaaccaacttatactttctctatattgatttatgtctttgcctgcaactcctgcctccttaaaaatgtataaaactaaaccgtaacctcaccatcctgggcacagtttttcaaggcttcttaggtttgtgttttctctgggttacagtcactcatattgactcaaaataaacctctttaaaatattttagagtttggcttttctgttaacaaaatgaagcacctg

SEQ ID NO: 129704 - DNA, 601 bp, Homo sapiens
gaccagcattaatgttgaaatagagattataagactgacagaatagactcttcgtggtaataagataccagattataaacaagacctaagaccatgagaagcaagggttaagtcctgccctayaaaccataaaatcttgttaaatgttttgtttttttcttaaatctagtataatgtggcttactttttaacctgactctgttttaccatcacatgatagacagcaggcctccttatcttaatttaagcattcctttgcactgactttcagtctttagacaaagctgaactctttcaaccaattgcaaattaaagaatctctgaatccacctataacctgtaagcctctgcttcaagatatcctgcctttcagtccaaaccaacttatactttctctatattgatttatgtctttgcctgcaactcctgcctccttaaaaatgtataaaactaaaccgtaacctcaccatcctgggcacagtttttcaaggcttcttaggtttgtgttttctctgggttacagtcactcatattgactcaaaataaacctctttaaaatattttagagtttggcttttctgttaacaaaatgaagcacctg

SEQ ID NO: 129705 - DNA, 529 bp, Homo sapiens
ggtggtttgctttacttcccctttgccagtcaatgggacatctatctttacttatgccagtgacggtgggagccctktttgtgttcaccatggtacctccagtgccctggagcattgtgtaacaaatgattgttaactgacctagttggttgagaaccactggcctaagccagtcatggaaattccatttctttatttaaagtgattgatgtaataacttaagcatgtgacataaatctggccaatgggccctggagctaagtcagctgggagtggactctgagaaagcttttcttccactgagaaaaagaacataagacatttgtaatctcttctattctctgaccctgagtgtcattgcctctgtgtgatgcctggaactttagcagccatcttgaggccatgaggtaagaaggaaccctgtctgaggatggcagatcagaaatagagaaagataacgcccttaccattgtgctttttaagttttcaatcctgacctggaaccatcctatctgtcaacatcatatta

SEQ ID NO: 129706 - DNA, 522 bp, Homo sapiens
gacggtgggagccctgtttgtgttcaccatggtacctccagtgccctggagcattgtgtaacaaatgattgttaactgacctagttggttgagaaccactggcctaagccagtcatggaaattccatttctttatttaaagtgattgatgtaataacttaagcatgtgacataaatctggccaatgggccctggagctaagtcagctgggagtggactctgagaaagcttttcttccactgagaaaaagaacataagacatttgtaatctcttctattctctgaccctgagtgtcattgcctctgtgtgatgcctggaactttagcagccatcttgaggccatgaggtaagaaggaaccctgtctgaggatggcagatcagaaatagagaaagataacgcccttaycattgtgctttttaagttttcaatcctgacctggaaccatcctatctgtcaacatcatattatgtgagataacaaatgctcttgctttttaaaaattcacttttttctattaccta

SEQ ID NO: 129707 - DNA, 522 bp, Homo sapiens
gacggtgggagccctgtttgtgttcaccatggtacctccagtgccctggagcattgtgtaacaaatgattgttaactgacctagttggttgagaaccactggcctaagccagtcatggaaattccatttctttatttaaagtgattgatgtaataacttaagcatgtgacataaatctggccaatgggccctggagctaagtcagctgggagtggactctgagaaagcttttcttccactgagaaaaagaacataagacatttgtaatctcttctattctctgaccctgagtgtcattgcctctgtgtgatgcctggaactttagcagccatcttgaggccatgaggtaagaaggaaccctgtctgaggatggcagatcagaaatagagaaagataacgcccttaccattgtgytttttaagttttcaatcctgacctggaaccatcctatctgtcaacatcatattatgtgagataacaaatgctcttgctttttaaaaattcacttttttctattaccta

SEQ ID NO: 129708 - DNA, 402 bp, Homo sapiens
gcactgtgtgactttctgtgcctgacttatttcacttaacacaatgatctccagttcattctgtgttgttgcaaatgactgtatctcgttcctttatatggctgaatagtactccattgtgtgcataccacacttgctgtgtgcattcatctgttgatgggcacttaggttatttccagatctttttatggcagcagtgtttaccgtagttctacaaactcactttcgaagcgtgtttgtcttccatgttacctcgttasacatcaagttcctagtaaacatttaggatgagggtaagggtaccacaaggttgtgggcacagtttttgagtttgttttgtgttaaaagggcctgtggaggattgtgtttgtgttctgggactgccataacaaagtagcacag

SEQ ID NO: 129709 - DNA, 421 bp, Homo sapiens
agatctttttatggcagcagtgtttaccgtagttctacaaactcactttcgaagcgtgtttgtcttccatgttacctcgttagacatcaagttcctagtaaacatttaggatgagggtaagggtaccacaaggttgtgggcacagtttttgagtttgttttgtgttaaaagggcctgtggaggattgtgtttgtgttctgggactgccataacaaagtagcacagacttctctcacatttctagaggcttaaagtctgaaatcaagatgtctgctgggccatgctccctgtgagggctctaagaaggaaacctacctggcttgtccacagcctccgttggttgtcagcatccttggcattccttggtgtgtattgkcattgccccaccttcttcctccatcacctggctccttctctgtgt

SEQ ID NO: 129710 - DNA, 604 bp, Homo sapiens
tccaacttaaatctgcttttaaacgttattattagccgcctcccaaaagaatttgactatatttttccattagtctctttgtacccattgcctttctttttaaattattttatttattattcaatatgttaaaaccttttaaaacattcaaaaatataaaaagggatatagggaaaaagtaagtctcctatctacctatgatctctgactccacatttccctttccagaagtaaagacgcgttaccagtttgttttgtattttttgtattgtctgtatattttcagaaatgtgatatcttaggtatatactaagaggggtgtgtatgtgtgtgtatgtgtgtgtatcctctccttccttcctcccccaacaaagtgatttctgtacaggctacttcgtccttccccccrtcacttaatgtatttttggggcttgggggtgtctatgttgccagcctgtgaaacacgtggataaatattcaagttgaatgtataatttttatggatttttggttatgtttctgtctgttcactgcctcattcaggccacttgaaacacatttttgttttattatttaggaccctctaaattgtaattgcatgcac

SEQ ID NO: 129711 - DNA, 502 bp, Homo sapiens
tgcatgcccttcaactctcagagacaattagacttccacttcccaaacttaggatgcctcactcattagagaattgacaagctgcctaactgtttgyacagtctccaacacattataaatatttggataagtccaccatcaatgcacagtcattgcagagccaataaaacatgaccttgactttctcctgtttgtttacatgcaccctacagcatcatctccaaaggcaacaggagcaaatggtgaacagctgggcaaaggaggtgtccttcacacgtcctatatttggaactggtggaaatagccagtatgattctgtgtcagtttaacaggatagatacgattttaaaatgacatcttcattgtgaaccagctgtgggcaggggctcatcttgatatcacttgtgctaggctttgagtagggcagagtttctcaaccactccagtattgatatttgggaccagatacttcttggttcaggggagctgtcctgtacactct

SEQ ID NO: 129712 - DNA, 522 bp, Homo sapiens
cggctccagaaaaaccccaatcacctcccttcctggtgtctgttccaaccatgcatcgcacaggccattgtcccccaccttgcaggtgagcctcttgaaatgtactagcaaactggcccaagctcagctatttctactggaactgcatgagtgacagtcargtcacttgtgcttaccatgcccagtagtaggatccaggttgtttccctgcttcccttattcccactctgcccccggtttttcccaaattctatttttctccagcgctcagggacatctctgagacagccatcaagtttgctgtgtctgtagacttctaactggggaaagacatttcaacctccccttgttgcaggagcctctggtatttgcaggtacttcacttagcatggactcatggctttgtgggtgagctgaggagcaggtaccagagctctcagacataggatcagttttcttaagacatcttactcgttgctagattgttcctaagacctatggatgtcctgattatgattacat

SEQ ID NO: 129713 - DNA, 522 bp, Homo sapiens
cggctccagaaaaaccccaatcacctcccttcctggtgtctgttccaaccatgcatcgcacaggccattgtcccccaccttgcaggtgagcctcttgaaatgtactagcaaactggcccaagctcagctatttctactggaactgcatgagtgacagtcaastcacttgtgcttaccatgcccagtagtaggatccaggttgtttccctgcttcccttattcccactctgcccccggtttttcccaaattctatttttctccagcgctcagggacatctctgagacagccatcaagtttgctgtgtctgtagacttctaactggggaaagacatttcaacctccccttgttgcaggagcctctggtatttgcaggtacttcacttagcatggactcatggctttgtgggtgagctgaggagcaggtaccagagctctcagacataggatcagttttcttaagacatcttactcgttgctagattgttcctaagacctatggatgtcctgattatgattacat

SEQ ID NO: 129714 - DNA, 659 bp, Homo sapiens
ggcaatacctccccttcttgagctcaccctggctgggagagctaagatgtcaaagaaagttcctttaggaaactctttatcttccagagtgggaaggcaaagtacccaatgtatggtcttacaaaggctgcataaaatgggggagctgtaacttctcttgggtactcttaggaaaaggaagcaccaaccagtgagsaagtgatctccattcccttttcatagagaaggtcgatttctatcctcttgcctggagggtttcagagctgccctaggctgtactccactccagggtggccctcagagaccattactgtttcctcatttcttgaatgtatggaggaccctccagttactttctgctttaaggcgatgtttattaaacattgtttctattagggctgtgctccttcctctgtaccctttaaatattcatctccctcatgctgccatccccttcatggagatcattcctgcagagcggtagtccagtttgctctacttcctggtgatcgtctcttctcgagatttcttcctgcacatgcacactctggactgtgcacttttctgctctggattcctctcctggacagttgcactggactccattcccatttgtctgagcttagggtttatgtctttttagggcatttaccgtcccc

SEQ ID NO: 129715 - DNA, 659 bp, Homo sapiens
ggcaatacctccccttcttgagctcaccctggctgggagagctaagatgtcaaagaaagttcctttaggaaactctttatcttccagagtgggaaggcaaagtacccaatgtatggtcttacaaaggctgcataaaatgggggagctgtaacttctcttgggtactcttaggaaaaggaagcaccaaccagtgagcaagtgatctccattcccttttcatagagaaggtcgatttctatcctcttgcctggagggtttcagagctgccctaggctgtactccactccagggtggccctcagagaccattactgtttcctcatttcttgaatgtatggaggaccctccagttactttctgctttaaggcgatgtttattaaacattgtttctattagggctgtgctccttcctctgtaccctttaaatrttcatctccctcatgctgccatccccttcatggagatcattcctgcagagcggtagtccagtttgctctacttcctggtgatcgtctcttctcgagatttcttcctgcacatgcacactctggactgtgcacttttctgctctggattcctctcctggacagttgcactggactccattcccatttgtctgagcttagggtttatgtctttttagggcatttaccgtcccc

SEQ ID NO: 129716 - DNA, 340 bp, Homo sapiens
agcttttagtgagcacagggatctttccaggaatcttcctacaatgcatattctgtttcgtaggtctgggtggagcctgagattcggcacttctaataagcttycaggtgttgttcctgatgccggttcgtgcaccagaatatgaacagcaatattttatagggtgttaagcaacagaaatgtatttgtacgtggatgtctctgcaatagaattgcatccagaggagaaatgaaatagcttacaattatggatgaattgtgtaggtattcatatagaatagctaacataaatggagccatgcgtgtattatttaacactcacaacagtatagatagacac

SEQ ID NO: 129717 - DNA, 487 bp, Homo sapiens
gaattctcactaacttttgacgactgaatgtgtttgcctttttccagctgttggttgttttttttcatggcttcttccagggcctctgtcttgtttgytaatatgcggttctttgtcctgtatccattcagtagccaatgtaaaatggtgccaaacttactattttagattgaagggattagctcctctttccagtgattttaccattgtctgttcttagctggtgccaggttggaaagggaagagttgttggctggtttgttggtgtttttacctccaggtactgtgtcattccaatgttatttttactgtctcatgtggagtgtcctatatgatttgaataaaagtcccactccattgctgtctctgcaaggctgactcctttgaccctggcagaaagaacagttgatgatatttggtgaaaaaaaaaaagaaaatttgcccatggtatgactgttcttctccttggcgggaaacttctacttga

SEQ ID NO: 129718 - DNA, 487 bp, Homo sapiens
gaattctcactaacttttgacgactgaatgtgtttgcctttttccagctgttggttgttttttttcatggcttcttccagggcctctgtcttgtttgctaatatgcggttctttgtcctgtatccattcagtagccaatgtaaaatggtgccaaacttactattttagattgaagggattagctcctctttccagtgattttaccattgtctgttcttagctggtgccaggttggaaagggaagagttgttggctggttkgttggtgtttttacctccaggtactgtgtcattccaatgttatttttactgtctcatgtggagtgtcctatatgatttgaataaaagtcccactccattgctgtctctgcaaggctgactcctttgaccctggcagaaagaacagttgatgatatttggtgaaaaaaaaaaagaaaatttgcccatggtatgactgttcttctccttggcgggaaacttctacttga

SEQ ID NO: 129719 - DNA, 536 bp, Homo sapiens
ttctactttgcattctccaggcctaaaagagttctggaatgcaatgggcattcatgtaagtaatgttaaaagaatgactccatcaattatatttctgtgacattctcaggtaggaagatatctttatgcttataattggaaaaaaaaaaaaaaaacctctagtggcagagaatttgtatttctgttagctctcagtattgggattgtatttctgacaggctggcccaccagctatgcttcatgaaagaccatgagccacagggaagaggtttattcatctcagcattggggtattttgcttttcttcaaggcaaagggatctggagwctcctttgcaggctggccatgtcttgtgcaatcccagctgtgtctggagattctagcagggatgcagagtgtggttgggacttcacaggaagtcgacttgcatcagaagcacatagggaaagggaagggaaatagaatgaaggaagaaagctttcagcagccaaggcaacaacttcccccgtctctgtctggctctggggccaaacaga

SEQ ID NO: 129720 - DNA, 562 bp, Homo sapiens
caatgccttgaagaaggtctctgcttttgtcctaaatttcctgaggctttctggaccctttctttttcaaggcttcggttttccagcttttctttccatttgatgtcagatacgcatcattacattttttagcacatattagccatcgctggtttcaggggcttccaatcaggccatgtaaacagacacagaaatacatctagccaggtgtgaggactcagtcacatggccatggggagagacagaatggattagacactataaggagtgagtttgggatcagaaatgccaggtaggtggcgactgaagacatacacatgagcaactaggtggcccgaactgtgacaatgacctttgggatacagagaagggctcatggcccmacccaaagagtaggtgcatgtatcactcattcaatcacaagcatttcttaagcacctaaagtgtggccaatatttgcccatctttgtggccacctgcctgtttctttgtcatctgccacttgtctcctggatcagctacctattgctgcataatacgttaccccaaaacttactggcat

SEQ ID NO: 129721 - DNA, 562 bp, Homo sapiens
caatgccttgaagaaggtctctgcttttgtcctaaatttcctgaggctttctggaccctttctttttcaaggcttcggttttccagcttttctttccatttgatgtcagatacgcatcattacattttttagcacatattagccatcgctggtttcaggggcttccaatcaggccatgtaaacagacacagaaatacatctagccaggtgtgaggactcagtcacatggccatggggagagacagaatggattagacactataaggagtgagtttgggatcagaaatgccaggtaggtggcgactgaagacatacacatgagcaactaggtggcccgaactgtgacaatgacctttgggatacagagaagggctcatggcccamcccaaagagtaggtgcatgtatcactcattcaatcacaagcatttcttaagcacctaaagtgtggccaatatttgcccatctttgtggccacctgcctgtttctttgtcatctgccacttgtctcctggatcagctacctattgctgcataatacgttaccccaaaacttactggcat

SEQ ID NO: 129722 - DNA, 406 bp, Homo sapiens
tagggagctgggccaggaagtgatcggtcctggttaagcacctatcgtgttttggatatcttcactagtatcgagtggcctagtctgcacarcccctcctgagggggtgcatggatgaggaagtgaaaggcctagcgccatgctgcttggtggtggtgagcgagcttcgaatccacacagtgtccacaccagggctttgcctccccctggcgctgctcatttggggagcggagctgtgatttgaggccgttcattgagatccagggtccccgatggtgtcttgagttcccagggaaaggcctcccccagcactggcctttggtcagagaatgggggtcagtgggtcactctcaaaaacagacaaaacagcagctctgtatctatctgctcagcaaacagttactaa

SEQ ID NO: 129723 - DNA, 406 bp, Homo sapiens
tagggagctgggccaggaagtgatcggtcctggttaagcacctatcgtgttttggatatcttcactagtatcgagtggcctagtctgcacaacccctcctgagggggtgcayggatgaggaagtgaaaggcctagcgccatgctgcttggtggtggtgagcgagcttcgaatccacacagtgtccacaccagggctttgcctccccctggcgctgctcatttggggagcggagctgtgatttgaggccgttcattgagatccagggtccccgatggtgtcttgagttcccagggaaaggcctcccccagcactggcctttggtcagagaatgggggtcagtgggtcactctcaaaaacagacaaaacagcagctctgtatctatctgctcagcaaacagttactaa

SEQ ID NO: 129724 - DNA, 567 bp, Homo sapiens
aagagagtgggctcagcctgtttgaatctgctctgtgttctgacgaatcataagaaaaaatccttctgaccggaaaactggtccagtcagttttcctagggtgtcaaagaacgagcctaaatttggagttagaaaaacctggatcaaatcccaactcttgctctcartagctgcatgactttgctcaagtcacttaatccgtgaaatgggattcatgatcccagctcctgtgtggccataaacatgaaaacgatgaactagggaagtgcacgcgtgttgcatgtgctcggatgatgttgggagctcacactccttccctctggaatgcgcactgtctctccccatcaggaggagaatctcttatttagggaacaagccaatgaaaagagccttaaggtgagggtatttaattttggcagtaagacacataggagaaacgtttctctaatttctgcagttgtgctgttgatcacagctctctctaggcaaaaaacatggagataaaagtgtcgtagtggctggcactttatggcttgccctctgtcattccagatgtcggtgcagatc

SEQ ID NO: 129725 - DNA, 567 bp, Homo sapiens
aagagagtgggctcagcctgtttgaatctgctctgtgttctgacgaatcataagaaaaaatccttctgaccggaaaactggtccagtcagttttcctagggtgtcaaagaacgagcctaaatttggagttagaaaaacctggatcaaatcccaactcttgctctcaatagctgcatgactttgctcaagtcacttaatccgtgaaatgggattcatgatcccagctcctgtgtggccataaacatgaaaacgatgaactagggaagtgcacgcgkgttgcatgtgctcggatgatgttgggagctcacactccttccctctggaatgcgcactgtctctccccatcaggaggagaatctcttatttagggaacaagccaatgaaaagagccttaaggtgagggtatttaattttggcagtaagacacataggagaaacgtttctctaatttctgcagttgtgctgttgatcacagctctctctaggcaaaaaacatggagataaaagtgtcgtagtggctggcactttatggcttgccctctgtcattccagatgtcggtgcagatc

SEQ ID NO: 129726 - DNA, 567 bp, Homo sapiens
aagagagtgggctcagcctgtttgaatctgctctgtgttctgacgaatcataagaaaaaatccttctgaccggaaaactggtccagtcagttttcctagggtgtcaaagaacgagcctaaatttggagttagaaaaacctggatcaaatcccaactcttgctctcaatagctgcatgactttgctcaagtcacttaatccgtgaaatgggattcatgatcccagctcctgtgtggccataaacatgaaaacgatgaactagggaagtgcacgcgtgttgcatgygctcggatgatgttgggagctcacactccttccctctggaatgcgcactgtctctccccatcaggaggagaatctcttatttagggaacaagccaatgaaaagagccttaaggtgagggtatttaattttggcagtaagacacataggagaaacgtttctctaatttctgcagttgtgctgttgatcacagctctctctaggcaaaaaacatggagataaaagtgtcgtagtggctggcactttatggcttgccctctgtcattccagatgtcggtgcagatc

SEQ ID NO: 129727 - DNA, 376 bp, Homo sapiens
gctcaagtcacttaatccgtgaaatgggattcatgatcccagctcctgtgtggccataaacatgaaaacgatgaactagggaagtgcacgcgtgttgcatgtgctcggatgatgttgggagctcacactccttccctctggaatgcgcactgtctstccccatcaggaggagaatctcttatttagggaacaagccaatgaaaagagccttaaggtgagggtatttaattttggcagtaagacacataggagaaacgtttctctaatttctgcagttgtgctgttgatcacagctctctctaggcaaaaaacatggagataaaagtgtcgtagtggctggcactttatggcttgccctctgtcattccagatgtcg

SEQ ID NO: 129728 - DNA, 579 bp, Homo sapiens
ctaagttgatccatcattgtacaggaagtttgacactcaatcagagccagccttgccaattacaagaactcttctttggaattttggtttctaagggtcacactttttggaatataatattttgtctcttaaatagtctgtatctactactaataaatagtagctgggtatccatatcatgtaacagaagggaaatgaaattgtacaatttttttaggtaattctaggtaatttttacataattttagataaatctccaggtaattctgaaatacttttggttgaaaatgggctgtattggatggtttgattgctttcttttttataaaaattaaactcccagctatcttccaagctgctgcaagatgaaatgctcctttctttatctaccttgttctccccttctctgaagaaggaaattctaccatagggcccaggaacttgagcaactgtgttacttattttagatcctttgtcattctagatttcctcaggttcaccaagagaatatctatgcccaccagatyacataaaaagtatgagatgaggttcgggaaataagataaagatttataaact

SEQ ID NO: 129729 - DNA, 597 bp, Homo sapiens
aggaagcaaaaactcaaccttattttatggttacaccatatcatgtgcattcagatctttcatgattccataatgggtaaaaaaccttcctgtgttcagaagttaaattggctgttttttattttactgaggcagttagccttaataattggctcctatttgtctgaatatgaactgtagggatcaaagactttgctgaattcattctctttcttgtccactctttaagaaattagaaattaaacaaggcatgaaagctagtgtgtttcactcttcccccttactcctattccaaagttcasaaaaagtctatgtttagttaagagttaacagaggtgcttgattttgagtttgtggaatagaagttatgttaaagccacatgttcacccggaagaaaaaaaataattttggtaaaaaattagatttttatattctctctctctctctctctctcacacacacacacaattgccccttccttcctcatcattcttttgcttattaagcaaaaaaagtttactcaattttttctataaaacacatttagatctttccacattttaacaggattcacatgtcccccaccagccttgaat

SEQ ID NO: 129730 - DNA, 604 bp, Homo sapiens
aacagatgatttctccttgagcctactgttgtcctacagatattctcttctgagcttactattgtccaataaagtttcagtaattaaaataaaatagaacagccacaggaggagacagacaacttataagaacaggataaaaaatgtagaaaccaatggagcattaacaggaatatatcacaagattatcaacatgatgaaaaagtcagtatatcaaacctgaaagaaagaataggctttaaataaatggtgttatgaccatttaatatttaatttaagcattacaaatggtttaatattatcattataaaatataaacatatacaagtaaagtttaatcagtaagaaaattaaattccaaatgtattagagatttaaaaggaaaaagaaaaaagttaaatctgtaagcagatagaattaagtatttctttggtaatgaggtaggaataatattgrccttctaaactcaatgatagagacagaaatcataatgtcaaagaccaaataaatctaatcacatctgaaaataccataaatagagggcaagcaaaaaactgatgaaaatgttacaaacacacacatacgcatacacatgcatgcacat

SEQ ID NO: 129731 - DNA, 559 bp, Homo sapiens
catttgactgggggcatgtagacaacaggagcagctgaattttaaaactgactttcatgcaatcgtcacttgtcattggtaaggatcccctaaaaggaaatcctatcaaagtaatctcctttcattaaggtcactaagaaaataagcagagagagataaacttattytgttccataacaaagaatgtatttcatgtcataggaagagtaggaaagaaaaggatgtggtgattatctgacctttcagattactgcatatttgagttgctgaacaaaggacaagagggctgtgaaatacattttgaaaagaaagggttactcacttcatttggaaaaagtaagatcctgtgtcattcaactcaactggccaaaactccaaaacacaatcatgcaaagcaattctcgaggaactccttgggttcagctccacatgttcctgtgatccactgcttttgtaccagcttttggtggttgtttcaatctcatgtgcaagtgaacacgagcaatgtttcagatagaaaggttccccttcaaccacagtaatgtggggacgtgaagta

SEQ ID NO: 129732 - DNA, 559 bp, Homo sapiens
catttgactgggggcatgtagacaacaggagcagctgaattttaaaactgactttcatgcaatcgtcacttgtcattggtaaggatcccctaaaaggaaatcctatcaaagtaatctcctttcattaaggtcactaagaaaataagcagagagagataaacttattctgttccataacaaagaatgtatttcatgtcataggaagagtaggaaagaaaaggatgtgstgattatctgacctttcagattactgcatatttgagttgctgaacaaaggacaagagggctgtgaaatacattttgaaaagaaagggttactcacttcatttggaaaaagtaagatcctgtgtcattcaactcaactggccaaaactccaaaacacaatcatgcaaagcaattctcgaggaactccttgggttcagctccacatgttcctgtgatccactgcttttgtaccagcttttggtggttgtttcaatctcatgtgcaagtgaacacgagcaatgtttcagatagaaaggttccccttcaaccacagtaatgtggggacgtgaagta

SEQ ID NO: 129733 - DNA, 519 bp, Homo sapiens
tacaatactctgtggtacttatcattaacatcastcaaattttatagttacaaataaaaacccaaggataagactgtttaagtaatttgacaaagttcacccagttgtggctggggttgaaaccagacttgctgaacttcaaagtcaagcttttctccccccaatgtcaactaaaaaaagagaacattctctataccagagattaggctggtaaagcttttctttttataatttggactgggttattaaaataagctagtctataatttcttctttgaaaagaactaaattattttggcttctcactattcaggcaccattcaacataacagagagtagtttatagcaacttaagacaaactgcaaaaaggcaagggcttctaatacatgaataaagcaaggcattttaagcacccataaatttctgccaacttaatcagaaatcttccagtgtccgcttgtttctctggcaaacacccacttttttaagacttctcataactactctcccttttcaga

SEQ ID NO: 129734 - DNA, 519 bp, Homo sapiens
tacaatactctgtggtacttatcattaacatcactcaaattttatagttacaaataaaaacccaaggataagactgtttaagtaatttgacaaagttcacccagttgtggctggggttgaaaccagacttgctgaacttcaaagtcaagcttttctccccccaatgtcaactaaaaaaagagaacattctctataccagagattaggstggtaaagcttttctttttataatttggactgggttattaaaataagctagtctataatttcttctttgaaaagaactaaattattttggcttctcactattcaggcaccattcaacataacagagagtagtttatagcaacttaagacaaactgcaaaaaggcaagggcttctaatacatgaataaagcaaggcattttaagcacccataaatttctgccaacttaatcagaaatcttccagtgtccgcttgtttctctggcaaacacccacttttttaagacttctcataactactctcccttttcaga

SEQ ID NO: 129735 - DNA, 583 bp, Homo sapiens
cctccctccctccagcctcccctcctggcctcagccctaccctccccttgccccagcctggactgggctccatctctcctgctcactgtctccccaggcctagctcgcacatccctgcctcaaaacaaatatgagaccaaaaccccaaaacccttcccctgatcccacggcgcccacccccatcaatctctcactttcttttctcttagagacttcccagaagtccrtctacattcaccgtcctcagcccactccttcccaccccagggagtccacactgtcagggtctcctcttctgccccccaggggctggctaaaacacagagcccgcctctgcctcccagggttcatgtggaagccctgatccccagtgtgatgatgtttggagatggggcctttggggggtgattaggtttaggggcagtcatgagggtggggcccccacgaggggactagtgtccttctaagaagaggaagagagactcaggctgtccctctctgtcatgtgaggacacagtgagaaggtggccgtctgcaggccgggaaatgggccctcatcagaaacagaagccaccggcatctc

SEQ ID NO: 129736 - DNA, 414 bp, Homo sapiens
gagtttctgcttaaagacccccgtctcttcccccaaagcccccacccattggtcattcctgagcctactataaagaaggccctcagtacctccatgcayacatttgtgccacaatttgttgttgttgttgttgcttttaagataaggtcttgctctgttgcccaggctggagtgcagtggcgcaatcatgactcactgcagcctcgacttcctgggctcaggtgatcctcccgcttcagtctcccgagtacaggcatgcaccaccgtgtctggctaatttttgtatttttttgtagagatggggtttcaccgtgttgcccaggatggttttgtactcctgggctcaaatgatccgcccacctcagcctcccaaagtgctaggattacaggcaccccagcaccccagcactgcac

SEQ ID NO: 129737 - DNA, 414 bp, Homo sapiens
gagtttctgcttaaagacccccgtctcttcccccaaagcccccacccattggtcattcctgagcctactataaagaaggccctcagtacctccatgcatacatttgtgccacaatttgttgttgttgttgttgcttttaagataaggtcttgctctgttgcccaggctggagtgcagtggcgcaatcatgactcactgcagcctcgacttcytgggctcaggtgatcctcccgcttcagtctcccgagtacaggcatgcaccaccgtgtctggctaatttttgtatttttttgtagagatggggtttcaccgtgttgcccaggatggttttgtactcctgggctcaaatgatccgcccacctcagcctcccaaagtgctaggattacaggcaccccagcaccccagcactgcac

SEQ ID NO: 129738 - DNA, 639 bp, Homo sapiens
taaacttaaaggcataagaggaagtaggtaggctcattttctctttctttctgctagaacatggatgtggtggctagaactccagcaggattcttggactttaaagcaaccttggaaataaacccttgagtggcagagcagcaggagagaagattgggtccagattatgtgagactgccctggactgctctgagtaaagggttaacaaaaccctttctcttccctggtaaaatgactttgcctttcatcatcatttctctggaagcctactaggcaaggtaataatggaatgtcaactgtgatactaggcaatactggatcatcttcatgattaaagatgatcccttattggtaaactgtatctggaccaagaagactatgacacgtactrtaagtgcccattgaaaaacatgagttttgagattccttaagcgtagtgttcctcattgcaaagattcctggaaattacagtcatgggctatctcaacaggtattagttctcatggagcatgaagcttccaagccaggtggcttctgcacccaccggatgatcttgtttccttatacctgagctgacacttggcaggctggagtaaagccttctgctgaaataagcctcatgctgccatgttgttgtgc

SEQ ID NO: 129739 - DNA, 557 bp, Homo sapiens
ttaccatgttcttcctctttagtgggttgtggtcctgaatgttctggtcacacccacctctccagcttcagctccctctcctcactcagatcacatgcgcctgctctttgcctctcaagaaacctcaatttcttcacacctccaagttgttcacacgctacttcctccatctgaaatgctcacccactctgcatctcagctaatctctcctcagttttcatgtctctccttcaatgtcctccccgtacacaagggttatttgtaagatgttgttattaagttcaaagttgctgaatataaatgagaaagggcatgcaaaataatcwtttttttttgttaatttcagcagttagtagaggtttgcttattagtaaaatgttgaccattttgttaaaatcacacttgaggagccagttggcagaacttattttcttttcctgaattttttattttcacccatatgctcaaccaacaacgtaaaaacccacctccatagctccctagtggtgatgactcctcagataaaggcattcttccatgattcaatttcatctgta

SEQ ID NO: 129740 - DNA, 557 bp, Homo sapiens
ttaccatgttcttcctctttagtgggttgtggtcctgaatgttctggtcacacccacctctccagcttcagctccctctcctcactcagatcacatgcgcctgctctttgcctctcaagaaacctcaatttcttcacacctccaagttgttcacacgctacttcctccatctgaaatgctcacccactctgcatctcagctaatctctcctcagttttcatgtctctccttcaatgtcctccccgtacacaagggttatttgtaagatgttgttattaagttcaaagttgctgaatataaatgagaaagggcatgcaaaataatctwttttttttgttaatttcagcagttagtagaggtttgcttattagtaaaatgttgaccattttgttaaaatcacacttgaggagccagttggcagaacttattttcttttcctgaattttttattttcacccatatgctcaaccaacaacgtaaaaacccacctccatagctccctagtggtgatgactcctcagataaaggcattcttccatgattcaatttcatctgta

SEQ ID NO: 129741 - DNA, 562 bp, Homo sapiens
agcggaaacctggaagtgagccgcggcgcaggcgaatcctgccgttgctggtggcagcgcccaagagaccccgcacagaaagtgggctgggagtctcgcttgctgtacccgcacctaagtgctcagaagcggcctttcgctctgcagagggggggtcttagaagcttggggaagaagcacattgtttcggagttccttgttgcgttctttctccttgggaggagggaattgcacaaggaaaagaagagaagcctttactttgtaactgaaattctccagagttgagttgcgtcgtacagactcggtgcatattttaatacaaaactaagggaagaggccatttgatacttggcttcatctcaaccgtcagccgggggtgacttcaaacagacgcaagattgggctctggggagtaaaaggaagaattaggatggcggttttcaagggaagttaagtctagacatgcttctttgaaagtcacaaggcagaagtggtcaaaagyagaatttaaaagaaccaaaacaaatatcataagcttgtccttctctcctactgggatata

SEQ ID NO: 129742 - DNA, 585 bp, Homo sapiens
aagcttaagccctggctatgycattcatataaatgaatggcatataaagaaatactcatttatttatgtattcatcaaatacgtattgagtttattaattctttcaattattcaatgtgcctattaggtcctacgcaatgaattatactgtaggtgcagaaagaaaataggatcttaagtttgccctgcaatatagtgtagtaagaacaataatagtttagagactggtgttggatcattcaggagcctttcaagatattttggttaattaattacatctcagatagtgttatttacctggaggcattaaagatgtttcacatcctgagcaactcaccctctttgcttctgggccaacacgtatctgagccaacaggtaggagaccatcagagcgtgatgctctgcctcttaactcatcaagtttttagagttcaaaagcagtcacagagtctgaagcagcactaaatggggtgggacattctccctggagatcctagaggcatgtcaaactaggatttttctcttctgcaagccctattccttaccctctcatcttctcaacctctttgagttctcaaggcata

SEQ ID NO: 129743 - DNA, 614 bp, Homo sapiens
ctcaaatcctggctgtgagactttgatcaagttattaagtcccttaagttttggtttcctcacgaataaactctgggtatacttaatcatccaatggccacctaacactcagcacatcaaaactaaatgctctatttttcctcaccctcaaacctgttcctcttcctctgctccaaatttcattaaatgccaatttcttctccccaggmacccaagccaaatatctttttccctccatcttcctcaccccacatttgattaatatcaagtcctagcaagtctacatcctaaaagtcacttgaatcaaatcatttgttatccatttccatggtgtctcctctagtgtaagattatccttttgtttttgttttctgccaaatgactctaagtttactaacttacttttttgccaccaatcttgccccctcccagcctttatgtgcatggtagcagtgtgtaatctttctaagctctatatctgaccatgacactatgatctctgatcccaagtttcagctcctcacatgtgactttcatgagcagccccaactttcctcccaagcttgtgtctcattattctcatgtttgcactctctgttcctaccacattgaaa

SEQ ID NO: 129744 - DNA, 534 bp, Homo sapiens
ctcctggggtccccaattccagaatttggctcttggatggcatttctggacctgctctgggccagaggggagcccactgccctgaagggtgagtcccaggccaggcagcattcaccacaagctgaatgaagagcccttggaccttaaaggaacatcagtggtagtctggctctactccccatgggcctgtggtggcagtggccatgggctaagtctcctctgtctttggaaaggggaggraggagtgagcaggactgcatcttgtggtttgggtgccagctcagccacactacaataaaacaccaggtagacttctatggtttttgactctagtctctgattcccagattgcacctcaggacctgcccaggggcctaggggaactcgccacgctaaagggaagggcacaggcctggctttgccaactgctgactgtagagccccagggccttgagcaaacttaggcaatagtcagaaagtagttacagcaggccttgggtgagacccagtgctgtgctggcttcaagtctgacc

SEQ ID NO: 129745 - DNA, 446 bp, Homo sapiens
ggataggtacaaacaaactcacaaggcaaagactgtaacagatacctaaatcttcaatgcgtagacacagatgaacatctataagcatcaagacagcccaggaaaacatgacctcaccaaatgaactaaataaggcatcagggaccaatcatggagaaacagagatatgtgacctttcagagagagrgtattcaaaatagctgtgttgaggaaactcaaagaaatttaagataacacagagaaagaattcagaattctattagatgaatttaacaaagacaaataaaagaatcaagcagaaattctgcagctgaaaatgcaattggcatgttgaagaatgcatcagattcttttaatagcaggaatgatcaaacgaaagaattaatgagcttgaagacaggctatttgaaaatacacatcagaggagacaaaagaagataagaaaa

SEQ ID NO: 129746 - DNA, 446 bp, Homo sapiens
ggataggtacaaacaaactcacaaggcaaagactgtaacagatacctaaatcttcaatgcgtagacacagatgaacatctataagcatcaagacagcccaggaaaacatgacctcaccaaatgaactaaataaggcatcagggaccaatcatggagaaacagagatatgtgacctttcagagagagagtattcaaaatagctgtgttgaggaaactcaaagaaatttaagataacacagagaaagaattcagaattctattagatgaatttaacaaagacaaataaaagaatcaagcagaaattctgcagctgaaaatgcaattggcatrttgaagaatgcatcagattcttttaatagcaggaatgatcaaacgaaagaattaatgagcttgaagacaggctatttgaaaatacacatcagaggagacaaaagaagataagaaaa

SEQ ID NO: 129747 - DNA, 578 bp, Homo sapiens
gctacctggctttcacccccagagattctgatttaattgatctggggtaccaagtagacttctggatttttaaagccccctgagcaattctaatgtggaataaaattagggaaccactgcattattggccagataattcctaggtcccatgccccacccrccctcaaatagagcttgccacaggctccactttaagagggcaagggcaaacccatcacccttttgtaacagtagaaatttgggggcaaattcagacccatccaacatttattgagcacctactacttgccatgccctggattcgtgcctccctatgtattatctggcttagccagcagggagcttctaagagggtacccttctaaaggcaaagcgctgtcttgaggtgtaaatacaaactgtctggtctttatgttctgtggctttctaattcatagatgttcctcggacaaaggatgtttcacaggtgccaagagaggatggttttaaaaggccagaggtcatgaggcaagtgttggaagaggcaaagatctgaggggctctgatttggcttcaggacctttcattagagcatcagt

SEQ ID NO: 129748 - DNA, 631 bp, Homo sapiens
ttgtttgaaacttgcctaattttttccctaagggaaacattttctcctagttcaaatacaaaacaaaactgggaaaaaatattttgtttttctgtggcaaagtttttctttttttctcataccatttataaatgtaatataattaaagaagttttaaaagataaaaaaaggtagacattggtctgtttccttacaatgattttctatgcactgggattttttaaatatrcctgtaagcatagtatagttatcattttgtattctacatttttttatgaagcatattaaagccatattattgtacactcttcacaagcatcatttttattgttgcatgagtgtcatatgtacgtagctatttcctgatgttagagcgtgcacaatatattccatttttcacattagaaatcatgttgctataaaccatctccttaggatagattcttagaaattgagttactgaatcttaaaggatattaatattttgaaactctttatccacatggccaaattacttcctaagatgattttaacagagtacactgtctggcaatttcctgcctgtgtttgatatgcgtgtttgtgtgtagcgggtggggtagggcatgttgtttaacttgtgcaatgtggg

SEQ ID NO: 129749 - DNA, 632 bp, Homo sapiens
ttctagttttgtttgaaacttgcctaattttttccctaagggaaacattttctcctagttcaaatacaaaacaaaactgggaaaaaatattttgtttttctgtggcaaagtttttctttttttctcataccatttataaatgtaatataattaaagaagttttaaaagataaaaaaaggtagacattggtctgtttccttacaatgattttctatgcactgggattttttaaatatacctgtaagcatagtatagttatcattttgtattctacatwtttttatgaagcatattaaagccatattattgtacactcttcacaagcatcatttttattgttgcatgagtgtcatatgtacgtagctatttcctgatgttagagcgtgcacaatatattccatttttcacattagaaatcatgttgctataaaccatctccttaggatagattcttagaaattgagttactgaatcttaaaggatattaatattttgaaactctttatccacatggccaaattacttcctaagatgattttaacagagtacactgtctggcaatttcctgcctgtgtttgatatgcgtgtttgtgtgtagcgggtggggtagggcatgttgtttaacttgtgca

SEQ ID NO: 129750 - DNA, 632 bp, Homo sapiens
ttctagttttgtttgaaacttgcctaattttttccctaagggaaacattttctcctagttcaaatacaaaacaaaactgggaaaaaatattttgtttttctgtggcaaagtttttctttttttctcataccatttataaatgtaatataattaaagaagttttaaaagataaaaaaaggtagacattggtctgtttccttacaatgattttctatgcactgggattttttaaatatacctgtaagcatagtatagttatcattttgtattctacatttttttatgaagcatattaaagccatattattgtacactcttcacaagcatcatttttattgttgcatgagtgtcatatgtacgtagctatttcctgatgttagagcrtgcacaatatattccatttttcacattagaaatcatgttgctataaaccatctccttaggatagattcttagaaattgagttactgaatcttaaaggatattaatattttgaaactctttatccacatggccaaattacttcctaagatgattttaacagagtacactgtctggcaatttcctgcctgtgtttgatatgcgtgtttgtgtgtagcgggtggggtagggcatgttgtttaacttgtgca

SEQ ID NO: 129751 - DNA, 636 bp, Homo sapiens
ttactccaacttctgaccacagaacctggtaaaggagtagctggaggctatgtttggtacattctgtagtgctgctttgcaaattgccataatttggacaagaaagtagtggacaagaaaatgcaatttgacaaatgtctggcctttcgcagggatttcccaggctcccctgagtgagcggagyttgagaaagacacccaacatcaatattgcagtttgatgccataagctagaaattgagtgtcttgacttttgtaggaaaacccacatgtcagtcatttggggcacttacttctttggccagaagtggggagttgcgtcatatatcagcaaggaaaatacagagaaaagcaaatgaatatggaatatgagaagaaagtcatctagggcaagaaggaagatagtagctgggaacttcgtaatagctgcttctcccttaggttttacactatttacttggatcttagttttacaaaagttttaaggagtttgatttaacaaatgttccattctctcaagaataaccctaccatactttctaaagtttagcatttgagaaattggactaagacttttaaagttcgtatttaaggaaatggattactctgatggtaaaacatgttgttgttaatattg

SEQ ID NO: 129752 - DNA, 547 bp, Homo sapiens
aatataacaaacagggcaattcttaggaaaggcaaggatgattcatttggcagtatgcragagggttcaaagtacataggatcaagcaggctgggttgataaaagataaccacccctttgattatcattcggcaattggagcttatttcacttagcatttctagttttttctcttcccaaaaggaatagagaaccagctccacaatgccatagcaaaaaaccagagtggacatcaccgcacctccttatccaccagtcccctcaaaatccccatagaagcttttcaaaacaaaatacacacacacacacacacacacacacgcacacacacacattagacacagaaataggtagtaggcatacccttagtataccaccaaccaacattaaaagtattttagtgtgacccacagagcgtgaaaacaaaggaaagtgtagatttcccacaccatccagggctgtacgaatggctgcagcattttgctgcgtgttcctggatctgggcaggatttaacattttgtggctttggggaaataacgggacacc

SEQ ID NO: 129753 - DNA, 547 bp, Homo sapiens
aatataacaaacagggcaattcttaggaaaggcaaggatgattcatttggcagtatgcaagagggttcaaagtacataggatcaagcaggctgggytgataaaagataaccacccctttgattatcattcggcaattggagcttatttcacttagcatttctagttttttctcttcccaaaaggaatagagaaccagctccacaatgccatagcaaaaaaccagagtggacatcaccgcacctccttatccaccagtcccctcaaaatccccatagaagcttttcaaaacaaaatacacacacacacacacacacacacacgcacacacacacattagacacagaaataggtagtaggcatacccttagtataccaccaaccaacattaaaagtattttagtgtgacccacagagcgtgaaaacaaaggaaagtgtagatttcccacaccatccagggctgtacgaatggctgcagcattttgctgcgtgttcctggatctgggcaggatttaacattttgtggctttggggaaataacgggacacc

SEQ ID NO: 129754 - DNA, 547 bp, Homo sapiens
aatataacaaacagggcaattcttaggaaaggcaaggatgattcatttggcagtatgcaagagggttcaaagtacataggatcaagcaggctgggttgataaaagataaccacccctttgattatcattcggcaattggagcttatttcacttagcatttctagttttttctcttcccaaaaggaatagagaaccagctccacaatgccatagcaaaaaaccagagtggacatcaccgcacctccttatccaccagtcccctcaaaatccccatagaagcttttcaaaacaaaatacacacacacacacacacacacacacgcacacacacacattagacacagaaataggtagtaggcatacccttagtataccaccaaccaacattaaaagtattttagtgtgacccacagagcgtgaaaacaaaggaaagtgtagatttcccacaccatccagggctgtacgaatggctgcagcattttgctgcgtgttyctggatctgggcaggatttaacattttgtggctttggggaaataacgggacacc

SEQ ID NO: 129755 - DNA, 639 bp, Homo sapiens
ctccctggttcgaagggctgccctcacacacaacgacaaccacttcaattatgagaagacacacaactttaaggtaagcaagcctctgcattccttcttctgttacaaaagggcaggtggaaaggtacagtgtatagtttccrtctggtttctgactgtaaagtcaagagacaatgaattcctttgctttccacatttagctataagcttaacacctgcgctttctgtcagttcaaactggagacctcagaaagcagtctgctcagtgcttatgcctggaaacaccttatctggatgttgacttagttttggagaattgggcccattgccacttcacgttcccatgtccagtgaaataaacacagagcatgcccagtctctctcagtcagagatgttctgctgagagctgagcagtacttttccactcagtaaagaatattgctgtctccgagcaagggaaaacagttgcctgtttctcgttttgtgttttgtcttttgttttcagtgatgctaactcctttcctttatgcgtagacacctgtgaaatcaaataatgacaggagatgccatccagaagcttttatttgtgctccgggtacggctagcagggggggcacccttggtcacagcctttatcc

SEQ ID NO: 129756 - DNA, 639 bp, Homo sapiens
ctccctggttcgaagggctgccctcacacacaacgacaaccacttcaattatgagaagacacacaactttaaggtaagcaagcctctgcattccttcttctgttacaaaagggcaggtggaaaggtacagtgtatagtttccgtctggtttctgactgtaaagtcaagagacaatgaattcctttgctttccacatttagctataagcttaacacctgcgctttctgtcagttcaaactggagacctcagaaagcagtctgctcagtgcttatgcctggaaacaccttatctggatgttgacttagttttggagaattgggcccattgccacttcacgttcccatgtccagtgaaataaacacagagcatgcccagtctctctcagtcagagatgttctgctgagagctgagcagtacttttccactcagtaaagaatattgctgtctccgagcaagggaaaacagttgcctgtttctcgttttgtgttttgtcttttgttttcagtgatgctaactcctttcctttatgcgtagacacctgtgaaatcaaataatgacaggagatgccatccagaagcttttatttgtgctccgggtacggctagcagsgggggcacccttggtcacagcctttatcc

SEQ ID NO: 129757 - DNA, 514 bp, Homo sapiens
ctagaaaaatgttgagaaatttttggcatcattttcaaagcaggaactatataataggcagtttgcatatgataaactgaaataccagaaagactactataacttcgctttattacagagttataagttgctcttttttatttattaactagcttatcatctttctctgcttttactcattggtttccttagaagagatccagatccattttgtttgcctctttatgtacacccaattactaacatgtatgaataaagaactcaaactgaggctctttttttyttaagcagaactcggatgaacacctttccaaattgtgaccacactcatcatcctgcttttttgttaaataaaagcagtttgtaaaaaaaaaaaaaaaaaaaaaaaaaaaaaaattgtctacatttcttttgttaatagaggtttatgactttgaaaggccttctataatgctttataacattttaactttgtaaaaattcgggacatttttgtgcacatttgtatggcccc

SEQ ID NO: 129758 - DNA, 527 bp, Homo sapiens
tgcggtcattttacctgaaattatttgagaacactggatgtatctggtctgtgtaaaaagttagcacttaccctcttttcttcctggccaagccctctgaattcatctgttaatatcaaattgtatttttgccacatttctgtattggtgaaaagcgaatctgcagaataactgycaacgtttttcattcttgttttacaaacctattttttaaagtgagaataaggttggtttttaccaaatatttgttcctccttgacaaaagtagctctgtgtggataatatgattttattactacagttccagtcacttggttatatttatcttagcatgagcctttcacaccaagatttctatattttgtaacataggtgaaatatttaaaacatcaaaaactgtaaatctagatttttaaaaaatccaactgcaatgtcttttcctttgattgagatgatttgtgtaaactcaccagtcttgctttggagtgagcagaagagaatgactattttacgtggagcatcattgt

SEQ ID NO: 129759 - DNA, 527 bp, Homo sapiens
tgcggtcattttacctgaaattatttgagaacactggatgtatctggtctgtgtaaaaagttagcacttaccctcttttcttcctggccaagccctctgaattcatctgttaatatcaaattgtatttttgccacatttctgtattggtgaaaagcgaatctgcagaataactgtcaacgtttttcattcttgttttacaaacctattttttaaagtgagaataaggttggtttttaccaaatatttgttcctccttgacaaaagtagctctgtgtggataatatgattttattactacagttccagtcactyggttatatttatcttagcatgagcctttcacaccaagatttctatattttgtaacataggtgaaatatttaaaacatcaaaaactgtaaatctagatttttaaaaaatccaactgcaatgtcttttcctttgattgagatgatttgtgtaaactcaccagtcttgctttggagtgagcagaagagaatgactattttacgtggagcatcattgt

SEQ ID NO: 129760 - DNA, 574 bp, Homo sapiens
gatacattctttttggatggcaatttggccatatatattaaaggccttaaaaatgttcattccaaaacaagaactaaccccaaagctaggagaagaaaagaaataactaaaatcagaacagaactgaatggaatcaaaattcaaaaacccatacaaagaatcaatgaaacaaaaagttggatctttgaaaggaaatgcaagaccgatagagtgctagctacattagcaaagaaaaaaacgacgatccaaataagcacatttagaaaggacaaaggtgacattacaactaatcccacagaaatataaaagaacctcagagatcattatgaacatctgtatgcatacaaacaagaaaatctagaggaaayggataaattcctggaaacacaacctccaaagattgaatcaagaagcaattgaaaccccaaatagacaatattgagttttgaaattgattcagtaataaaataatctaacactaaaaaaaaaaaaaaatcctgggaccagaaagattcacagccaaattctaccaaaagtacagagaagaactggtaccaattctactgaaactatt

SEQ ID NO: 129761 - DNA, 430 bp, Homo sapiens
tagcaaaatagcctctgactattaagggttgttaggtatgtccaggagactgaccttagaarggctcctctagtttgaaaatatttgagaagggagcagttgaagaaaaggatgtcaagttcagctcacacgtttgtctgctgacactagtggtttcacttaaattagaaaatgtttgtgcttcccctgtgacagtaaaagctaggtaaaagttcaatctggaacttcaagaaacatattcaagagaacaaaaacattcccatgcttctcaatttaagcccaagccaggaaaaatatacaaattgtcagcccacatcacaagaggctgaagaaatgaaagacagaagggaagtgaggtggggcctaagagaatgtagtttggacaactcctagtccccagagaatacaaagcttttaaatgaacacaaag

SEQ ID NO: 129762 - DNA, 430 bp, Homo sapiens
tagcaaaatagcctctgactattaagggttgttaggtatgtccaggagactgaccttagaaaggctcctctagtttgaaaatatttgagaagggagcagttgaagaaaaggatgtcaagttcagctcacacgtttgtctgctgacactagtggtttcacttaaattagaaaatgtttgtgcttcccctgtkacagtaaaagctaggtaaaagttcaatctggaacttcaagaaacatattcaagagaacaaaaacattcccatgcttctcaatttaagcccaagccaggaaaaatatacaaattgtcagcccacatcacaagaggctgaagaaatgaaagacagaagggaagtgaggtggggcctaagagaatgtagtttggacaactcctagtccccagagaatacaaagcttttaaatgaacacaaag

SEQ ID NO: 129763 - DNA, 615 bp, Homo sapiens
tgtgttattgaagactgtaagctcagaacatgtgtacttgcaagcagaagtaccaataaaatttgtgttcatttcaatatgtggtatcatcgaaccacaaatcttcagtctcccaaagacctcaaagaagtggtcttcaaaatgtggcccccagaccagcaccatttgcatcacctaggaacttctcagaaatgccaattctaagataccaatctaggcctaccatatgagaaactctggtcacagagcccagaaatgctaggttttaacaagcctagagactactacggtgcatgctaaagtttcagaaccactaccttagcatgataggatgaaaaagtaaggcctgaagaaagcttgagccccagagaaaacctggcctgttagcatatgatatggtttggatctgtgtccctgtccaaatctcatgtcaaattgtaatctccaatgttggaggtggagcctggagggagggaggtaattggatcacgagggtggtccttcatgaatggcttagcaccatccccttggtactgttcttatgatagtgagtgatttatcaygacatcttgttgtttaaaagtgtgtagcacctcccccctccctctcttgctc

SEQ ID NO: 129764 - DNA, 468 bp, Homo sapiens
ttttttaaatgatgaggtagatttatatatattgccatagaaagacaggcatagtatattgtaaggggaaaagcttataatggacagtataacccattttgtttaaagtatgtatgtgtatataaataaatatataaaattctgaattagcaatcacaattagtcataaaayttaacaacatccacagtcgtaattgttttgtattcatttaactgtattctctaatttttttttctttttttttttttttgagatggagtatcactctgtcacccaggctggagtaaaatggtacaatctcggctcactgcagcctctgcctcctgggttcaagcaattctcctgcctcagcctcctgagtagctgggattgcaggtatgtgccatcacacccagctaattttgtatttttagtagagatggggtttctccatgttggtcaggatggtcttgaactcccaacctcag

SEQ ID NO: 129765 - DNA, 468 bp, Homo sapiens
ttttttaaatgatgaggtagatttatatatattgccatagaaagacaggcatagtatattgtaaggggaaaagcttataatggacagtataacccattttgtttaaagtatgtatgtgtatataaataaatatataaaattctgaattagcaatcacaattagtcataaaatttaacaacatccacagtcgtaattgttttgtattcatttaactgtattctctaatttttttttctttttttttttttttgagatggagtatcactctgtcrcccaggctggagtaaaatggtacaatctcggctcactgcagcctctgcctcctgggttcaagcaattctcctgcctcagcctcctgagtagctgggattgcaggtatgtgccatcacacccagctaattttgtatttttagtagagatggggtttctccatgttggtcaggatggtcttgaactcccaacctcag

SEQ ID NO: 129766 - DNA, 424 bp, Homo sapiens
aggcacagtggcacatgcctgtagtcctagctactcaggaggctgaggaaggaggatcacatgacctcaggagttcatggccaacctgggcaacatagtgagaccccatctcaaaaaaaaagggtgacagaaaaacagaattcccacawgctaaagaaggaaattgggttcatcttacactatacacaaaaatcaatccaaaatggataaaagaatagatatcggcacagatgtggtgaaaagggaacacttgtactctgctggtgggaatataaattagtacgacttctatggaaaacaatatgaagatctctcaaagaactaaaagcagatataccataagacccagcaatcccactatcctgggtatctacccgaaggaaaataagtcattacataaaaaacacacctgcatgcatatgtt

SEQ ID NO: 129767 - DNA, 652 bp, Homo sapiens
tatctatcccccagggtgtcctctttccctgcctatccttatctgctggtatgagagagatagagacacccctctctgcctccaaagaacttattaccatagttggccctatctatgcccaagtgcccaatttctaggcttccttcatctcagatcccacagggaacagcctcttttagttcagagacaaagacgtgtcttcagggtgaaaatacaaaamataaaagatacacagaagcctctgggggttacatgtacctcttagacgtaaacagttattatgtaatgtgaaaaaattccctttgctggaaactgcttttattccaccaaagactgaacacacaagtgacagagtatgtgtgtgcctttgttcttggttggttctgatctagaggctaaggtttatttattttgtatttttattattattattattattttgagatggagtctcgctctgtcgctcaggctggattgtcccaaagcaaaattcacgaagaggcttctctgctttttgcctatcaaaaagtaattccagcagaaatggcttgctttccccatagggcagtttggattgtatgtatgcctatgactagtatcaggtgcagaaatatttatttgggagagttaagttttcttatattgtttcagg

SEQ ID NO: 129768 - DNA, 420 bp, Homo sapiens
gggcaacctctggctcatagtgagcactcaataaatgcaagttgatgttaaaagtggcacagtggtcagaggctaaattatgcagggctgtgcctgggtaagaatctggattttatttcacatatatggcaagaactgtgggactaagcccagggcgaaaggcccacatgagaaagaaagcaaatgtgaagactgttaactcattctcgccttgaatttaggactcaggaaatagggagtaacttggatgctttgataggtaagggttttgaatggctttcactgatgcagtctattcccaccaaactccttgctaaagtcaggaaatatagtttgggtcctacctgggatgcygccaactaaatatctggcttctcagtaagctccttcattctcatcctcttttgtcagatttgacca

SEQ ID NO: 129769 - DNA, 427 bp, Homo sapiens
tgaaattctgattaaaatctcagtatcatttccttcagatgaattgcttagctttatactcctcattccctctttcattcatttctttgttccatccattagtggaaagagtacatcttttaagtcagttagagtttccagtcctgcattcatttctgactgtgccctttaatagtgtgtgacaatagacaagtgcttgacatttccaagcctcagtttccttccttgcagtatgtggatagcaatacytaacctgtagtagatttcaaaaatctaaatatgatattatgtacaaagtacctagcatagtgaagtgattatgttatcaattgattgtttaaacagatattatgaatactgcccttttgcatagcattgtacgatggactgtgaagaaacaaaatgatgaataagttaagaacctgca

SEQ ID NO: 129770 - DNA, 601 bp, Homo sapiens
tcagccagtcacaccaaagagcagtattaaacctgtttattactgaagtatgaattcagctttatcaaccagccttgactcacacttagaggtcaggatatagttttatggcygatcaactgtctttccctcttctcacccttttcaaatgaatagaggagagagctccctctgtatttatatcttcctactttcggtcgctaagaatccctgtaagtccatgtgacagagactgtaagctgttaatcaaagtctgtcctttcttggtcctcagatagactacttttcccagcttctctttaagttaggtgtggccataaactgggtttcagccaatggaagtgtatgattcttccaggcctggctcataaaattctcctgtatgtggtcttccatatttttccccctcaggaaagaggaaggaggaatcctgattatggtggaaatgaccatggtgacgttaacatctaatggtttggctaccgaaaactcctcaatggcaaattgtatcagaggtgcctctgacctagaacccctgcctagggctggtacataagaaacaaaggaagctcctgttctaaaagctgatgaatgtatggaa

SEQ ID NO: 129771 - DNA, 601 bp, Homo sapiens
tcagccagtcacaccaaagagcagtattaaacctgtttattactgaagtatgaattcagctttatcaaccagccttgactcacacttagaggtcaggatatagttttatggccgatcaactgtctttccctcttctcacccttttcaaatkaatagaggagagagctccctctgtatttatatcttcctactttcggtcgctaagaatccctgtaagtccatgtgacagagactgtaagctgttaatcaaagtctgtcctttcttggtcctcagatagactacttttcccagcttctctttaagttaggtgtggccataaactgggtttcagccaatggaagtgtatgattcttccaggcctggctcataaaattctcctgtatgtggtcttccatatttttccccctcaggaaagaggaaggaggaatcctgattatggtggaaatgaccatggtgacgttaacatctaatggtttggctaccgaaaactcctcaatggcaaattgtatcagaggtgcctctgacctagaacccctgcctagggctggtacataagaaacaaaggaagctcctgttctaaaagctgatgaatgtatggaa

SEQ ID NO: 129772 - DNA, 592 bp, Homo sapiens
gtagtcccagctactcgggaagctgaggcaggaggaatgcttgagcccaggaggttgaggctacaagtaagccatgatggcactgttaccaaaacattaggggttcggtctaagtcctgctgcttgctgcacagaaagccaattactgagacaatgagtattgccaaggaaraaagctttaaatcaggtgctgcagtgaaggagatggaagataagtctcaaatccatctccctaaccaactgaaatcagtggtttatataacagggaagaaatgtaactatttgtgaaaaaatcaggaacttgggaggggtaaggaagcaatcatgatgagtaagaggcctggtatctcattgtctggatgccattacccagtgagttttagttctttgatactttttgagaatcctgagggtcctttcctgaggaaggaactcagataaaacatatgtaagtttcaagctttaagcccagaagagagtcaatttctatgtttatccgaaaaaacactgtctatgggactgttgggttggtttcagcaccactgcactccagcctggcgaacagaatgaggctgtctacaaaagcaagcaa

SEQ ID NO: 129773 - DNA, 592 bp, Homo sapiens
gtagtcccagctactcgggaagctgaggcaggaggaatgcttgagcccaggaggttgaggctacaagtaagccatgatggcactgttaccaaaacattaggggttcggtctaagtcctgctgcttgctgcacagaaagccaattactgagacaatgagtattgccaaggaagaaagctttaaatcaggtgctgcagygaaggagatggaagataagtctcaaatccatctccctaaccaactgaaatcagtggtttatataacagggaagaaatgtaactatttgtgaaaaaatcaggaacttgggaggggtaaggaagcaatcatgatgagtaagaggcctggtatctcattgtctggatgccattacccagtgagttttagttctttgatactttttgagaatcctgagggtcctttcctgaggaaggaactcagataaaacatatgtaagtttcaagctttaagcccagaagagagtcaatttctatgtttatccgaaaaaacactgtctatgggactgttgggttggtttcagcaccactgcactccagcctggcgaacagaatgaggctgtctacaaaagcaagcaa

SEQ ID NO: 129774 - DNA, 592 bp, Homo sapiens
gtagtcccagctactcgggaagctgaggcaggaggaatgcttgagcccaggaggttgaggctacaagtaagccatgatggcactgttaccaaaacattaggggttcggtctaagtcctgctgcttgctgcacagaaagccaattactgagacaatgagtattgccaaggaagaaagctttaaatcaggtgctgcagtgaaggagatggaagataagtctcaaatccatctccctaaccaactraaatcagtggtttatataacagggaagaaatgtaactatttgtgaaaaaatcaggaacttgggaggggtaaggaagcaatcatgatgagtaagaggcctggtatctcattgtctggatgccattacccagtgagttttagttctttgatactttttgagaatcctgagggtcctttcctgaggaaggaactcagataaaacatatgtaagtttcaagctttaagcccagaagagagtcaatttctatgtttatccgaaaaaacactgtctatgggactgttgggttggtttcagcaccactgcactccagcctggcgaacagaatgaggctgtctacaaaagcaagcaa

SEQ ID NO: 129775 - DNA, 597 bp, Homo sapiens
ggcatctgccagaaagtggcactgaggaagacatttaatgcaatgcacagtgtttctgtgcagtaggagattctctaagttagtacttctgttttataatgaaatcatcagcaacaagaaagagttgtctagaactttgaaacaaaatgccttaggattccaaataaatgttattttgactaatgcattcattactttatgtacctactatgttcctggcatcaggccaagttgcgggaggttcaaaagttaattggccaaaataccttgaaaagctcaaaatggatctcataggtgaggcagatgaattgtgacaagtgagacaagtgcaatgatagaagtgtctacaggtgcaacagtggtgccattttctctttctccctcaaaaatcttaaagttagcaataggtagaactttaacctggagaagatatgataggaaaagctgtggatatcaattgctgtcatcagatagtcaaagaggtaccacagagaaggtaaaatagtatttctcygcattgctcaagaaagcttatctggttaaatatccacaagaggtattttaatttgaaagcggtaggaactttctcctaagtag

SEQ ID NO: 129776 - DNA, 695 bp, Homo sapiens
gaattctatagctggaggctagagcagaaactgcaatgatttaaaagagaattggctacagtaagaacgataatgccctatatcgttaaaatgcaactggcatctcagtctccctacagctctttgaaaatgtgcttactcttcaactatttacaaggaaaaatgcggagacaattgaaatcataggaaataaaaattattttaaacggctgagaagtatttgccaaatgatttatcagtagtgcttataaaataatggcatgttctcaactgttaaatgagtaagaaatccatgcagaaattctgctcattatgaaactcacccaccaaacacaaaccattttcatgatgccctaaattaattaatgccgactgyaaacacaaaaacagttggctgaaaattaagatgtgaacacaaacggacaccgttctgatatgattggtgtatcttagcatttgacagaaacaaagagacctttggttacttttctgggtgattatggagaatgaatatgtggtctggcaagctaaggaaaatcacagagtccatggaccaaattaaaaggtatctcttcagcgtttgtacaaaaaccaacaggaacatctgtccagtagtttagattataataagccacaaagacacacgtataaattcagtattcaacacattatacaaaatccattattattttttc

SEQ ID NO: 129777 - DNA, 268 bp, Homo sapiens
tttttaagagcaagagtatcagctgatgaatttcatgcattgcacmccgtgactcccaagatggtctgtcagatctccaggttctggaggttggaggttccgctcagtgacagcctggcggtacagcatacccaggttcaaatcccagatctaccacttaataactaggtaatcttggatggattacttaaccttcttaagcctcatttacctcgtgataatttattttatagagttgctgaaagaatcaatgtgaaaatgtacataa

SEQ ID NO: 129778 - DNA, 599 bp, Homo sapiens
acactgaatctgaatggccccaagtgctgggttatagctaccttgcacctcagtccttggtcattcatttattcatccatttagtgaatattgttggacatctatgtgctatgtatagggttccaataatgactaaaacaagcccttatggagcttacagtttcttggtggctaaagcattggccctgcaggtcaaatcagcatttcactttcaatgctaaggatggaaatgactttggtcaaatcaacctaaaactgaaaagccaagaaggaaaaaacgatgtttatatasttgatgtgaatcagttcaatcaattcctacaggtcatagacttctccttgtctcagagcccagtaaatattactggagagagagagagagagagagagagagagagagaatgaagaaactgccaaaaaatgaacaaaagagggaatgaaaggaatgtccatctatgcaagcaactcttggttgcaatattacctttttccatatcacagaggatgtttgaagaaaaatattacttctaagtgcataagcactgacctgctttaataattcagatcagagtacaggttctaagatcttccagaatgtt

SEQ ID NO: 129779 - DNA, 594 bp, Homo sapiens
catgattagagtaggaagagcatttgcccacacaaacatgagcttgtgtgaatgcacacacaaacacacacacacacaaagactcttcaccacccatgagtcaggtttacatcagatgttytaacatcaaatctagctaaatggattgtagaatatccaaatttagggaccttggaatacatttagttcaagccacatatttcaaattaatgtgctgattggctttggacttttacatgagaaaagcacaggaaaggaagcgttgatgggcagacagaatgtacaatgtactggtcaaagtgtggcagcagagggtgggacctggaaatgggaagaagtgatgaaggaaggtttaggggatgatatcaaaattttgcaagtcaagggaaagtggaggaaataagaaatagaagttaaataatgttatttagagttagagaggcaactaatagaatgtaattatataaagttcaaacaggaggaggaaatcaaggggacaggtcagcatgaacacgctgaatcctcatcttccatattaaggagttaatagatattgactgagtgataaatcaagcaatggagttgtgaaagtag

SEQ ID NO: 129780 - DNA, 419 bp, Homo sapiens
gtatctgaaataaaaatcaattgcccactatgcagattgcagaagaagctgcaaataaaattactgtaaatttaattaaaacattccagccaagtccatacatttggtattgattacctggcctgcaatttcagggagttaattaacacagcctccgcctggacaacaagggaaagccagtgcgggtgctsgttgtcctagcaacaggtaggcggaagcagctcacagattaaattgaaaggagatacagaatcttattgaattagacttaaatgcaatgatttaaaaatatgaagaggcaacttaaagttcaaaacacacttcatgagcatgagtcattgtgtgtttctaattgggccagaatggagtgtttctactgaagaatgggaagatggagtggggagggtgaaggtggggtt

SEQ ID NO: 129781 - DNA, 579 bp, Homo sapiens
gtaatcaggttcttcatccagaatccaaataatttctccaacatcaattccatctggcaacaaatggttagaatttgggggtggaggaagacaaacaggacaagataaaatcattttagtactagtaatccttctaaatttgtattgtagtagaagccttacacagagataaattattcttgttttaacaatgtgtttttttgttcgtttctttctttggtctttttttttttttargacagaatcttgctctgttgttctgtcgcccaggctggagtgcagtggtgcaatcttggctcactgcagcctctgcctcctgggttcaagtgattcccatatctctgcctcgctagtagcagggactacatgcgcatgccaccatgcccagctaagttttgtattttcagtagagatggagttttgccacactggccaagctgctcttgaactcctgacctcagatcatccacctgcctcagcctcccaaagtgttgggattacaggcatgagccaccacgcctggcctaactaactatgtgtctttaaaagcaagaacctacccgtgggattggcatatta

SEQ ID NO: 129782 - DNA, 500 bp, Homo sapiens
gggaggagcctacaaaagattccttcaggagcatcaggcacagctctgcacagatggggggcaggtggccatctttgactctgctgcaattcagtgtgacaatccccctcagtagagccttttatttccctgtagttcacagaggaatttattttgcagaggaataaagaactcgtgtacatgatttgkctttcatcttcaaaccaagactaaaactttgagctgtcatagttgtgccatctcagcagcccaaattcagtgttttacaaaagagagagaagaaagaaaactttatccattccctgagctgtcacctctacccagatcaaggcaatgttttcctattttagaacaaatgaaaatgctccatgagtaatctcattttgactgaggaattactatcaagagcaaacgtcttgtcaaatgcctcttatacggctatttgcaatctcacttgttcttttgtgcccaccctctacatttggatcagcccaaaccca

SEQ ID NO: 129783 - DNA, 540 bp, Homo sapiens
aactttggctttatgggtgcaagtttcagtacagaaaagcctgatttgctttagagcaaagaaaaccataccttttttcttcctgycttttcatgtggtttcttagagaaataatttcatcaacgagccaaaacactcaaagtttacaaaatgcacctgttttgttttgtttttaaatatggcctctcctttagaaaagaaaaaaagaaaataaaatcttatctactacattaggcgagagtttcccttctgagcgccttttctataagatctttaactgagctctgctatcagtctcttcagcctccattcttcttgtgatccaaaatccagcctggaaaaaagctctcattggcaggataattaaagtagatgaacaagtccttcagtcccagttaatcccagtaagcctaattcagcttctatagatggaaggataaaagtgttctcccatcagggtcattcatagttggactgcagcctacaccaagaaatcactccccagataatcacaaggtcatggcgaccaagtttatacat

SEQ ID NO: 129784 - DNA, 441 bp, Homo sapiens
gagtcacacccaggaagcatcgagacactggcttgctctataaaggcagccccacatatgagtactttctatagagraaggaccacagcctcatgagctaccaaaaagtctgcctggccagagatcgtgcaagtttacatcctccttggaattagctgaatgaccatgtaacaggacacacaccttcgagcctgggttctgacatgacttctgggtaactgttctcagaggtttatatggcactggaggattccaaagaaacaaggcactaccactcccctcaaggagcctatagagagcatgcctgcgtggcaagacagcagagttacacagaagcctgcagataggtgaatacatcacaactactttaatttctgtagctgacctcatcttcttgatagcacctcatccctagtcaaaaaaggaagggaagtggagaga

SEQ ID NO: 129785 - DNA, 441 bp, Homo sapiens
gagtcacacccaggaagcatcgagacactggcttgctctataaaggcagccccacatatgagtactttctatagaggaaggaccacagcctcatgagctaccaaaaagtctgcctggccagagatcgtgcaagtttacatcctccttggaattagctgaatgaccatgtaacaggacacacaccttcgagcctgggttctgacatgacttctgggtaactgttctcagaggtttatatggcactggaggattccaaagaaacaaggcactaccactcccctcaaggagcctatagagagcatgcctgcgtggcaagacagcagagttacacagaagcctgcagataggtgaatamatcacaactactttaatttctgtagctgacctcatcttcttgatagcacctcatccctagtcaaaaaaggaagggaagtggagaga

SEQ ID NO: 129786 - DNA, 516 bp, Homo sapiens
cagcatggactacaatgttgactgctgcattgtttataccacaagattggaaataatccattcaatggaacatcaaataagttcaaattcagctacacaatggaacattatacagtaatttaaaacaatatacttaaaagtataatatggtgagcaagttaagcatgtrttgacataaaataaatggcatgaagttttcaaaatatattttcagtggaaacgcaagttgtaaacttggatatgtagcatgatctcttttctttatagattgtgtaacagtacatttatcaaagactcccttcatccaggtatagttctatcactcatccttacaacccctgtgatgttactatttttaacctcattttaaagctgaaaccattgggacacagagaggttactaatgtttctgaagtcatacagccagtaagtgtcaggacaggcctttcaaatccacacagtctggtccagagctcatgctcttaactgtgacactatactgctgatattgcgttt

SEQ ID NO: 129787 - DNA, 527 bp, Homo sapiens
agatacagcatggactacaatgttgactgctgcattgtttataccacaagattggaaataatccattcaatggaacatcaaataagttcaaattcagctacacaatggaacattatacagtaatttaaaacaatatacttaaaagtataatatggtgagcaagttaagcatgtattgacataaaataaatggcatgaagttttcaaaatatattttcagtggaaacgcaagttgtaaacttggatatgtagcatgatctcttttctttatagattgtgtaacagtacatytatcaaagactcccttcatccaggtatagttctatcactcatccttacaacccctgtgatgttactatttttaacctcattttaaagctgaaaccattgggacacagagaggttactaatgtttctgaagtcatacagccagtaagtgtcaggacaggcctttcaaatccacacagtctggtccagagctcatgctcttaactgtgacactatactgctgatattgcgtttatgtgc

SEQ ID NO: 129788 - DNA, 527 bp, Homo sapiens
agatacagcatggactacaatgttgactgctgcattgtttataccacaagattggaaataatccattcaatggaacatcaaataagttcaaattcagctacacaatggaacattatacagtaatttaaaacaatatacttaaaagtataatatggtgagcaagttaagcatgtattgacataaaataaatggcatgaagttttcaaaatatattttcagtggaaacgcaagttgtaaacttggatatgtagcatgatctcttttctttatagattgtgtaacagtacatttatcaaagactcccttcatccaggtatagttctatcactcatccttacaacccctgtgatgttactatttttaacctcattttaaagctgaaaccattgggacacagagaggttactaatgtttctgaagtcatacagccagtaagtgkcaggacaggcctttcaaatccacacagtctggtccagagctcatgctcttaactgtgacactatactgctgatattgcgtttatgtgc

SEQ ID NO: 129789 - DNA, 721 bp, Homo sapiens
ttttgagggcctctaaaagtattaaggcagcggcagctgctgcacacagacatgagggctagactaaaacagtaaggtcaagttgtttggacagaaaggctatagggcgcagtcccggctcttgtgtaggaattctgaccgcactaaccatgcctaggaaggaaaggagttgttgttttgtagaagggattggggtttggatgattagccagacatgatcagcttacaggggrcagagaatgcccttaatagagagcagctaagcatcttcccagtaggaaaagttgaggagatgactcgagatttctgaaactgccacaggtcttagactggtgggtattttccctgcctgttgtaatacaaaacagaagatgcaaatgtacagaatgagaaagacaacaacagtgagaaggtgaacttctgcaaggtaagacttctctcaggtcaggaagaaattctgagcagagctgcttgggacaatggggccagtgacgagctatggaaaataaagaaaccaggtaagtgggaaggttaggtaatcttcgaaggaaagaaggagagacaagacaccacttatgtaataccttaaggagagggtctatgaaggtgcttccttttggccctaccccgtcctctgtaaattttgatgagcatcttgggctgggcagaggccaaaggtgaaaagtctggagcagtcaacttattgacgaaggaatggagt

SEQ ID NO: 129790 - DNA, 721 bp, Homo sapiens
ttttgagggcctctaaaagtattaaggcagcggcagctgctgcacacagacatgagggctagactaaaacagtaaggtcaagttgtttggacagaaaggctatagggcgcagtcccggctcttgtgtaggaattctgaccgcactaaccatgcctaggaaggaaaggagttgttgttttgtagaagggattggggtttggatgattagccagacatgatcagcttacagggggcagagaatgcccttaatagagagcagctaagcatcttcccagtaggaaaagttgaggagatgactcgagatttctgaaactgccacaggtcttagactggtgggtattttccctgcctgttgtaatacamaacagaagatgcaaatgtacagaatgagaaagacaacaacagtgagaaggtgaacttctgcaaggtaagacttctctcaggtcaggaagaaattctgagcagagctgcttgggacaatggggccagtgacgagctatggaaaataaagaaaccaggtaagtgggaaggttaggtaatcttcgaaggaaagaaggagagacaagacaccacttatgtaataccttaaggagagggtctatgaaggtgcttccttttggccctaccccgtcctctgtaaattttgatgagcatcttgggctgggcagaggccaaaggtgaaaagtctggagcagtcaacttattgacgaaggaatggagt

SEQ ID NO: 129791 - DNA, 721 bp, Homo sapiens
ttttgagggcctctaaaagtattaaggcagcggcagctgctgcacacagacatgagggctagactaaaacagtaaggtcaagttgtttggacagaaaggctatagggcgcagtcccggctcttgtgtaggaattctgaccgcactaaccatgcctaggaaggaaaggagttgttgttttgtagaagggattggggtttggatgattagccagacatgatcagcttacagggggcagagaatgcccttaatagagagcagctaagcatcttcccagtaggaaaagttgaggagatgactcgagatttctgaaactgccacaggtcttagactggtgggtattttccctgcctgttgtaatacaaaacagaagatgcaaatgtacagaatgagaaagacaacaacagtgagaaggtgaacttctgcaaggtaagacttctctcaggtcaggaagaaattctgagcagagctgcttgggacaatggggccagtgacgagctatggaaaataaagaaaccaggtaagtgggaaggttaggtaatcttcgaaggaaagaaggagagacaagacaccacttatgtaataccttaaggagagggtctatgaaggtgcttccttttggccctaccccgtcctctgtaaattttgatgagcatcttgggctgggcaraggccaaaggtgaaaagtctggagcagtcaacttattgacgaaggaatggagt

SEQ ID NO: 129792 - DNA, 462 bp, Homo sapiens
gacaggcaaaggagccctcacaggaagacacgcagactgtgctgctacctgtacacagaggagagcaccaaacccatgtatgccatgagattgtccccgtgtgggtgaacatgcggaagacgacagccacggtgacttccagagaggggagggcagacagaggcagagggtgtggggggggtcataaaccccagccttatcagaagtgttctcatgtttaactgatgagtatattacttgggtaattaaaacccaatttagtaaaactgcagataataacccactttacaaaagaaaacaaaagctgggagattaagtaacaagtccaaggtttcatggaaagcaacagagtcaggtagccccctccaggcctcggccccctcgtctctagaatagggaggccagacaagatgatgctcacagttcccyggagcacagaccttctggggttccagcccgcat

SEQ ID NO: 129793 - DNA, 401 bp, Homo sapiens
gtcttggccctagcagtggcaagacctacagcattctggtgaaatgggtggcctcctgattccagctgggagggaaggtggagactccagactttggtccacccagaccccattgctcccttccacagccacacagtgcacccaggccacaaagaggccacagccacacccmtgcctgcttctcactgctctcactgtacatgcataggaagccaggggctgtgtaatgcagacagcgctttgattccagaaatggcatgagaccagctgagcatgcaagccaggctgtcatcgggggctcagggggagcagggtggcactctctcctgcccatcccaaccagcacacaccaaattttgctgttgccattctcaggcaaccaaagatctcaaagcaaaaag

SEQ ID NO: 129794 - DNA, 531 bp, Homo sapiens
ctcagtgatgtgtgtcaaatgaataaatatatgcccaaactgaaaatagctttatggagaatgttaccaaaatcaatatttctgtgtattgagggaatttttttaaattgcataactctatgtttctgctcttggtatatactgttattttctgtaagatgtttaagaaaatttaccacaaaaatgatttatactcaagagatggctgcacagcccagtgcttaattaatatgcattgaatgaaacagctcattcattaactcattcatccggaacayttatggctgcctgatatataccaggtattatgctgggggcctgaaggacagagagatcctggtctctagggcatcactatctagtagataattaagacaagagacagatgacaaatatcgtgggatagatgccccttataatcccatgccagacaacgtgaatcagtcacagcattatttcccactgagctggaaacagcctctgaatctttcttaacataatgccctgggtattcattcccagtagagtagc

SEQ ID NO: 129795 - DNA, 531 bp, Homo sapiens
ctcagtgatgtgtgtcaaatgaataaatatatgcccaaactgaaaatagctttatggagaatgttaccaaaatcaatatttctgtgtattgagggaatttttttaaattgcataactctatgtttctgctcttggtatatactgttattttctgtaagatgtttaagaaaatttaccacaaaaatgatttatactcaagagatggctgcacagcccagtgcttaattaatatgcattgaatgaaacagctcattcattaactcattcatccggaacacttatggctgcctgatatataccaggtattatgctgggggcctgaaggacagagagatcctggtctctagggcatcactatctagtagataattaagacaagagacagatgacaaatatcgtgggatagatgccccttataatcccatgccagacaacrtgaatcagtcacagcattatttcccactgagctggaaacagcctctgaatctttcttaacataatgccctgggtattcattcccagtagagtagc

SEQ ID NO: 129796 - DNA, 496 bp, Homo sapiens
tctgccattagtgcctagggaaagttgagagggagaagcctgggaggcaggctggtgccaggtcagagaagcatcgaatgtcctattaaggcgctcagcaatggggcccaggggaaacaacaggactaaagaactgctctggggcaagcagcatacttttctcttcacatctcatataatcctccacatccctacagaggaggaaactgaggctccaagagaccaactagcttaggtaagataatagctaagggctggaggcagcactggtaccaggarcagggctggtttcatggatgttctgcccgtgtagtcacagaggaccttgttgctcagaagggtcctacatttggtttagtgctccgctgttaccatcttgaaattcttaatgattttttgaacaagcagtttatgtttttactttgcactgagctccacgatgatgcagccagttctgcccagaagtgactcattctgagacatgagagagaagcct

SEQ ID NO: 129797 - DNA, 496 bp, Homo sapiens
tctgccattagtgcctagggaaagttgagagggagaagcctgggaggcaggctggtgccaggtcagagaagcatcgaatgtcctattaaggcgctcagcaatggggcccaggggaaacaacaggactaaagaactgctctggggcaagcagcatacttttctcttcacatctcatataatcctccacatccctacagaggaggaaactgaggctccaagagaccaactagcttaggtaagataatagctaagggctggaggcagcactggtaccaggaacagggctggtttcatggatgttctgcccgtgtagtcacagaggaccttgttgctcagaagggtcctacatttggtttagtgctccgctgttaccatcttgaaattcttaatgattttttgaacaagcagtttatgtttttamtttgcactgagctccacgatgatgcagccagttctgcccagaagtgactcattctgagacatgagagagaagcct

SEQ ID NO: 129798 - DNA, 424 bp, Homo sapiens
ccctgcatgtcaaagtgtcagaatggagaaaataaagaacatggttaataaaaaatagctggggcaaaagggatgcctttttgaaatgttaggatagattttgccaaattgcccccaaggaagyttgaactaaatgatctctcacatcagtggtgaaagttccttgttttctatattgttgccactaggcactaccgccaaaagaattgtggtaaaactccttgcaaattcaataagtgccatttgggtatctggtttgaatttgcgtgtcttggtgtgtgtgctattcatctgggaaaatggtattttgtggatgtgaagaccccttggaacctgattggtgggatggagggggattgtggactgtacccaccccgatgtggtcctggcctccatagaagtacagctatgtgggaagtttcag

SEQ ID NO: 129799 - DNA, 604 bp, Homo sapiens
gtcttttcataagtagggattttaaaatttaagttcaagttacctattgttttcattatgcttcgtgattttaatgtctgaagaaatctttgtctaatctaagaatgcaaaagtattcttttgtgttttattctagaagctttatggttttcacttttatgcttaggtctatgatctgtcttaatttatgtttgtgtatggaatgaagatagagttgaagttcattcatttccatatggattgtttcagcgcttctgttaaaaacattttcttttcgccagtgaactgacttaacgccttggaagtttatttttcaattaaaaggtctaaaaagaaattttattttaaaagtataagatagtaccattgacttttggaaggatgtactgttctatgacttttaactcaggtataggtttgtgcagccactgctagaatcagaatatagaacgatttgatcaccccaagaaactcycttatgctatctatgtgcctgttcttttgctgacaccacactatctggactactgaagctttataggaaatcatacaatcaggtagtgtaagtgctccaactttgtaattcctttttcaaaattgtttt

SEQ ID NO: 129800 - DNA, 594 bp, Homo sapiens
ttgattattatatgccgtggactagtctcactcgggtcagatctttttggaattctctgaycttcctatacctagatatttatctctttctcaaatttggggaagttttttctctttgagtaaagctttttatctctcattcttgttgaactctctttgaacaacaataattctcagatttggccttttgaggtaactttttacatcttgtagataatcttcattgcttttcattctttttttcttctctgagtgtgtattttcaaaagcctatcttcaagctcactgatctttcctttgcttgatccattctgttgttgagaagagcttctaatgaatttttcagttcagtaaaaatatttctcagttccaagattttggtttgatttttaaaattatttcagtctttgttaagtttctgtggtaaatttctgaattgtttttctgttttatcttggagatcactgagtttccttaaaactactattttgaattcttggtgaaagagataacataccaccatctcgttagggtcagtcactggttccttgctttgtccatttgagaagatcatggttccctgtttgcagttgc

SEQ ID NO: 129801 - DNA, 617 bp, Homo sapiens
aactttatagtgtgaagctttaaaaacaaaacaaacatcttttaataagatgcctccaaggtatgtgcttgctggctttatttcccttcctttctgggaaagggcctgtattagtctgttttcacactgctaatgaagacatacccaagcctgggtaattataaaggaaagaggtttaattgactcacagttctgcatggctggggaggcctcacaatcatgatagaaggcgaataaatggcaaagtcatgtcttacatggcagcaggtgagagagtgtgcaggggaactcccctttataaaaccatcagatcttgtgagacttagtcactatcatgagaacagcatgggaaagacccacccacatgattcaattgccttcccccagrcccctcccatgacacgtgggaattatgggaggctacaattcaagatgagatttgggtggggacacagccaaaccatatgaggcccctggcctaggtatgagagaggtgggcagctctccccctgactcacacaaaccccttcctctttgtgcttcagtttccctatcacacagtgaggatgtgggatgggataagcacttcccacgtgcactttaaagacaagtgtttg

SEQ ID NO: 129802 - DNA, 486 bp, Homo sapiens
aaactatctgtcccatgtgggatcttagtttccccattgtacattgagagctttggaggagatgctgtctcaaagtccttccatccagaaaatttgggtattctgggggtgygtctctgatccaggctcttgcctggtcatctctagtacaaggctggcttccataggactgatccctttggtttgggtgttgactgacaagaaaggccaagtattcctcaagaaaagcaaggcaaaccttcatcttggtccccttcctggagcctgggccacttagaaggccctagaaccctttttcccccttctgtaagtactcttgtcttctacccctgggagcatcttggcattttggtgagactaatgaatagatcactccccctgcccctggcttcctgctggctctcccactaaccctaggcaaagtgctttgtttcctacataggacagcagggaatggttctctgtcaggacagcagggagtggtac

SEQ ID NO: 129803 - DNA, 486 bp, Homo sapiens
aaactatctgtcccatgtgggatcttagtttccccattgtacattgagagctttggaggagatgctgtctcaaagtccttccatccagaaaatttgggtattctgggggtgtgtctctgatccaggctcttgcctggtcatctctagtacaaggctggcttccataggactgatccctttggtttgggtgttgactgacaagaaaggccaagtattcctcaagaaaagcaaggcaaaccttcatcttggtccccttcctggagcctgggccacttagaaggccctagaaccctttttcccccttctstaagtactcttgtcttctacccctgggagcatcttggcattttggtgagactaatgaatagatcactccccctgcccctggcttcctgctggctctcccactaaccctaggcaaagtgctttgtttcctacataggacagcagggaatggttctctgtcaggacagcagggagtggtac

SEQ ID NO: 129804 - DNA, 613 bp, Homo sapiens
tcaaagtccttccatccagaaaatttgggtattctgggggtgtgtctctgatccaggctcttgcctggtcatctctagtacaaggctggcttccataggactgatccctttggtttgggtgttgactgacaagaaaggccaagtattcctcaagaaaagcaaggcaaaccttcatcttggtccccttcctggagcctgggccacttagaaggccctagaaccctttttcccccttctgtaagtactcttgtcttctacccctgggagcatcttggcattttggtgagactaatgaatagatcactccccctgcccctggcttcctgctggctctcccactaaccctaggcaaagtgctttgtttcctacataggacagcagggaatggttctctgtcaggacagcagggagtggtaccctggggttggatgctcttggcttggatgtarcaagtagaatacttagccatccctggagacacaagctggagaggagcagaaggcaagctctttccacagcagtgagaaggccctgaggtagaggatgggggggatgcggggatgggggaatgagggttagtttaggggtgcagaaatactcctgtggttcccaa

SEQ ID NO: 129805 - DNA, 613 bp, Homo sapiens
tcaaagtccttccatccagaaaatttgggtattctgggggtgtgtctctgatccaggctcttgcctggtcatctctagtacaaggctggcttccataggactgatccctttggtttgggtgttgactgacaagaaaggccaagtattcctcaagaaaagcaaggcaaaccttcatcttggtccccttcctggagcctgggccacttagaaggccctagaaccctttttcccccttctgtaagtactcttgtcttctacccctgggagcatcttggcattttggtgagactaatgaatagatcactccccctgcccctggcttcctgctggctctcccactaaccctaggcaaagtgctttgtttcctacataggacagcagggaatggttctctgtcaggacagcagggagtggtaccctggggttggatgctcttggcttggatgtaacaagtagaatacttagccrtccctggagacacaagctggagaggagcagaaggcaagctctttccacagcagtgagaaggccctgaggtagaggatgggggggatgcggggatgggggaatgagggttagtttaggggtgcagaaatactcctgtggttcccaa

SEQ ID NO: 129806 - DNA, 486 bp, Homo sapiens
ttctccacagtactcttccccagtataccaccatacttcattgcaccaccattcaaataaatataacattagctaaaaatagtgtgcttaccatgtacacagagcttcaagaaaaatctcctggatccaagatcccttctatattatagttctgaaactcctactcatcttacctaatacgtattctgttttataggaaataagactgatagcataagtttcattatatttgtaagtcagttttcaagtgaataataataatttaacaggactagttttagtctcaggaatggtggagtagctcaatgtagacaatgtagacaaacaattataaaccctagtcaaaatatgaaaaactacacgaaggcactatagagcaacacaaatcagacagaaactggagggatttgtttcttgaaataatacttctatactgtgtaacattaccccagcccctttttttycctgaaggttatcacttgacac

SEQ ID NO: 129807 - DNA, 628 bp, Homo sapiens
ccacttttaaggaaaggcccattgattttttttaatgtcaaaaaacagttcagaaatgtaatgatctacctaggagttttataaacacatttacataccttaaaatgtggccttgggtagtttctctagagacttgggcctttgagtctgtgttgtcaaggaaacttcaaatttgtggtttagtctgttgagctgaggctctgactgaaatacatatttggtattcatttgatgatttaacttttgaataataattgtcaagaatacttgtctaagccgggcacagtggctcacacctgtagtctcagctacttgggaggctgaggtgggaggatcacctgagcccaggaggttgaggctgcagtgagccgtgattatgccactgtactccagactgggtgacggagtaagaccctgtcccmaaaaaaaaaaaaaagaatagttgtctaggcccaaaaagtgttatagctgcagtgtagcatttataaatgcaaaatatatgtgaagtgtgatgtgagggtatttgtgtataaagaaatgattgttgaataatataagatgatacttgcatgactgtataaagatagacttttcttttttctcttcagcattcagctttgtatgctta

SEQ ID NO: 129808 - DNA, 367 bp, Homo sapiens
aacttgaaacatgtaaccaccctggctggccagaggggcatcaccttgctctcatctttttactcctttaatgctgacctctgccaaattgaatgatrtattttcacatcctgacaaaaggaactgaccatagctgatagagccccacacctccttaaagaaaatgttttgtgaaagctaagagatgctacttggggtctaggggagagacatagaggtcagaagccttcactgtgaaatcaccctgcacatgaaaagcccaaggaaattctatctgggaggcagcacatatcatcatccacaggacagtcttttggtttgaattacagtggcaggtagtgagagaggagttattacaacattctga

SEQ ID NO: 129809 - DNA, 588 bp, Homo sapiens
cagatctttcctccgatccactttcctccagttctttgtagagaaatgccaggccagcctggcacagactgaggtcaacttagagacatgtgtacagtcagcataatggttaagaacaccaactttggagtctcaaagacttaaagtagccttcaactcaagcctgtygctttttgatgggtttatcttgagaagctttcatgacctcccagggcctcagctttgtcctttgcagaatggggagattgaaagtcacggctgatgttcagccatatccaatagtacaaaatccataccagcagtttaaaaattagagcatttcccaggccagttgtcaaatagcttcccaatctccccttcattgtgccaggcaccctggctcctccccacctctttcctcatctagcaacaaatacctggcacagtcaggggtctccaggaccctgttctagtgtttaactcagtgttctttctgattggcaagtatctgtggcttattgatagttaaataaattgacaaccactcctgttaggaatacccacctcaaaggttgttgtaaggggtaggtgaaatgatgtgaaagaact

SEQ ID NO: 129810 - DNA, 657 bp, Homo sapiens
ttgcaagttcaattccaggcagccaccatgaagcaaatattgcaataaagcaagtgacacacagtttttggtttcccaatacatataaaagttatgggcagggcatagtggctcacacttgtaatcccagcaatttggaaagctgagggsggaacattgcttaagcccaggaatttgagaccagcctgggcaacatagtgagaccctgtctccacaaaaaaaatcaaaaaaattagctgggcatggtagtgcatacctgtggtcccagctactcgggaggcggatgtgggagtatcacttgagcccaggaggtagaagctgcagtgagccatgattgtatcactgcactccagccttggtgacacagtaagaccctgattataaaaaaaccagttatgtttacattacattatagtctattaagtgtgtaatagcattatgtttaaaaaaaagtacatactctaatttaaaaacacttgattggtaaaaaaaaaaaaaaaaaaaaaaaaaaaaaaaaaaaaaaaagagcaccatcatctgagccttcagggagtcatagtctttttgctggcaaagagtgttgcctcattgttaatggctgctaactgatcagggtggtggctgctgaaggctggggtggctgtggcaattgcctaa

SEQ ID NO: 129811 - DNA, 607 bp, Homo sapiens
gtatgacagctatagccttatgaaataaatttcttaaataataagacttgaaagtcagaattactcctcgatccatgggctgcagaatggatgttgtgttagcaggcatgaaaacatgaatctcatacatctcaatcagagctcttgggtggccaggtgccttctcaataagcagtagtagtttgaaagaaattttcgtaagggcccaatatttttgaattagcgggcaagcattggcttcaacttaaagccactagctgcattaacccctgacaagagagtcagcctgtcctttgaatcaggcattgacttctcatctctagatataaaagtcctagatgggatcttctttcagtagaaggctgtttcmtctacactgaaaatctgttgtttagtgtagccaccttcatcaatggtcctagctagaccttctggataacttgccgcagcttctccatcagcacttactgcttaccttgcacttttatcttatggagacggcttctcttcttaaacctcatgaaccaacctctgctagcttaaacttttcttctgcagcttcctcacctctctcagccttcatagagttgaagagagttagagcctt

SEQ ID NO: 129812 - DNA, 534 bp, Homo sapiens
agcaggatttaattttgatgaggtctaatgtatctattttctcttttgttccttgtgcttttaataccatagctaagaaagctttgcctaatcacagatcatgaagatttactgctatattttcttctagtagtttcataattttcactcttatgtttagatattgagttactttgggtatatagtatgagtaagggtcaaactttattcttttatctgtgaatatccagttttcccagcacctttccctgaaaatactgtttttccccattaagttatcttggtaccctgataaaaaatcaattgactataaatgtaaaggtttacttctttatttaagactttgtwtttttctagctttattgaagtttgattgacaaataaaattgtatgtatttaaggtatacaatacaatattttgatatatgtatacattatgtaatgaatacaaaaatcaagctaattaggatacccaccatcccacaatctcacatatttttatagtaatctcattatttttatagtaagaacact

SEQ ID NO: 129813 - DNA, 619 bp, Homo sapiens
ggccttggtggcagctgttcactgtcacatggcatttcagcagcccccaaagctggctggagaagggcaaggcttgtcagtctctgtctttgagatgtccagtgacctctgagtcttttttctcccaacccgaaagaatgatccctacttttccttgcttatactttggggatgatgagatcccattcgtaagaaactctcagctccctggaggaggaatgagtgaataggtgctgctattatttttgctaatagcataattctaactcgagatttcaggaagagccatgtcagcttctggtcacctttgtggagctccttggcttacctctgaggaaagaacctccaatagcctcatccctttcctttcccagggtggacttttgatgtcccaggggtcaaacttaatcctttacacttctcctgtcagatatctaggtgcagtactgatgttacaattgaagggattctctctctctctctctccctgkgtgtgtgtgtgtgtgtgtgtacttcaaagcagtaaagggttgctttagcgtttaatgtttaaacagtaattaattgacacggagattggacagataagagcatagaaacctaagaatgctgggtacct

SEQ ID NO: 129814 - DNA, 618 bp, Homo sapiens
tttaaaagcaatttacatactggtattacagtattagagtattctgattttgactacatacatacctttaccagtgagttttatattttcttatgtattcatgttactaattggtatactgtcagttcagcttgaagaactcccttttattgtttcgggtctagtggtgataaaccctctgagatattgtctgcgaaagttttaatttctccttcatttctgaaggacatcttttctgggtaaagcattcatccttgacaggttttttttttctctttcagcactttgaatatatcatccaactctctcttggcctgcaaggkttgtactgacaaatctgatgctagcctgttggagagttccttgcatgtgacaagtctccttgctcttactattttcaaaattaattgttttttgttttttgatagtgtgattataatgtgttctctttacaattaacctgtttagaaatctttaagcttcatataactaaatgtatatatttcatccccaaattagaaaagttttgtcatcattttttcaaataaatttctgcttctttctctttctcttttccatctagaactcacataatatatattagttctttttatgata

SEQ ID NO: 129815 - DNA, 527 bp, Homo sapiens
ggttttttttttctctttcagcactttgaatatatcatccaactctctcttggcctgcaaggtttgtactgacaaatctgatgctagcctgttggagagttccttgcatgtgacaagtctccttgctcttactattttcaaaattaattgttttttgttttttgatagtgtgattataatgtgttctctttacaattaacctgtttagaaatctttaagcttcatataactaaatgtatatatttcatccccaaattagaaaagttttgtcatcattttttcaaataaatktctgcttctttctctttctcttttccatctagaactcacataatatatattagttctttttatgatattccattatcctatagactatttttttattcttctttgttctttttaattttttttctcctctgactggataattttaagtgaactgtcttcaacttcacagattctttttttgtagcttgatcaagcctgctctttatgctatttattgcattttttattttattcat

SEQ ID NO: 129816 - DNA, 585 bp, Homo sapiens
gtgtgctcattcacaaatgccagtgcatactttttctctagctgactgccaggtttctctcaaagttaaagaagaaaggaaagttataagttcttaccttacttggagcgtggctaaacaggggtcataaaaatatactgataaattaataccaaatttccaaatatctgtgatattcttgtttatgttcttgaattattattaatggtaygcatggcttaatttcctatggagtataaaagcataattgtttttatcatagggtcataattatccattgtcacattgccttagtttatcagattagctcttatcacacctaggagataataaagtaagaaatgttaacaagactaggaaaattgtgtttgcttattctaagatgaaaggagaaaagaaatgttcattaccttgagtattttccaagtggactcttgcagatggtgctcataattgggagacactggaaagttagatatattgaagagactaaggaatataatacaggtaaatcctgtagcacagtgcttaactgtggtaggtcttggtaattaattgttttctttttggctatacatagaaaat

SEQ ID NO: 129817 - DNA, 561 bp, Homo sapiens
gaagcatttataatacgttcgttgaaatatacccaataatttactttctgtgtaacttctattgatcatgaaaactcttatgtgatctgtttgttaggtctgggcttccttgatgatattgatcaagtagattcctttgtgaaaacctacattgattagtttcctgacaagctgttaaggccacttgcaaagctgtcactggtgatacttgcagtcggaagagtggggctcacccataatgtctttctgaaggaagattgaatggaagatagatgaatgcagacaacattctctgtgctgggtaaccactcagtgattcatctcccagctcctttttctatggggagaraattaatatccaggcagtgaacaatctctacaacaaccatgatttgcaggtttgctgaaaaatccacatgaaacacagaaggctaaggggagacaggtctggtcatttttagctgccttgttcaagcatacctttggcaaagccatgctcctctgctcctcctcagaatggcaactgctcaaaaccccacaaacagcacttaaaatctggat

SEQ ID NO: 129818 - DNA, 536 bp, Homo sapiens
gacgcccaccactgcacccagataatttttgtgtttttagtggagacagggtttcaccatgatggccaggctgatcttgaactcctgacctcaagttaatcccaaagtgctgggattacaggcatgagccaccactcccagacacatcttttcacattaaaaaaaaattgaaataagggatttggagttgttattgccatttgatgcctttctcacatgacaatgcattatcaacagtcctccaggtcaatagagagaggcttatccatttcaggaaacatttaatgttccataagagkattataccagactttattcagtatctccctcattaatgtacatccatgtgtgtgtgtgtgtttgtacttgccttgacaaataatgtgataaacatccttgtttattaaagtccagctgttgtttcattaggatagattcctataagagagttttctgcgacaaaagctatggatatatcttaaatttaagatatgttgccacattaccaaaataaaacccaggaggattaaagattt

SEQ ID NO: 129819 - DNA, 608 bp, Homo sapiens
aagtgctaatcagctcttagaaatgttactagtgtaaaaggcygtatgatgaatatatttttattttggccaaacataataatgatgatttgcatttatatattgctttgtaaacttttaagtcactttaatttgtattatttttatatatcctccttgtagaaaagagatatggtaagcaatattatccccgctttatagatcgggaaacagagatccaaaagggtgtttttgcccaaggatgcaaggtaagtaaatggtagtactgtaactaaaacatatcacctgatctctaactattagccattcccattagacaaagctatctctctcctgacaatatagattaaacatttatgaatgctgctggagttccaataatacaggcttgggttctaatcaaggctggaaagaacaggaagtctctcaagctagctcaaatgaaagatggaatgtatgtaaaagaaccacttggagcagaaaagccataggggcatacaggttttatagacatgaaaattctcagtaatagaagaatctcgcttcatctctcagggtggcctctcccatttctgcttcttggtctcctctatctctcacccgccagc

SEQ ID NO: 129820 - DNA, 597 bp, Homo sapiens
cagcttaagttattttaatagagaagggtaacttgccattggagcagttaactgttactcaatttgtcataaattgaataattgggaaagtgtttaacatattttaaaggaaaagaacattttaaacaaattagtagcaaaactaacataaatatgctaacagcaaagaactcctacctgcttattaggtgagttattaaaatattattgcatgtgctatccccaagttagcacttacagaatttgataacattaatattctaccttaaagtgctatgcttagcactttgcaatttataacatgatgtaatctaatagtgatattaatagaagttaaaatttggttaatgctaagtgctttacatgaaacatcattagatcctcaacagcacttcatgaagtatgtttatcattatccctaaattataaatgaggaaactacagctaagagaaggtgagaaacttactcatgtctgccaattacaaatgtataaactctttaattcaacaatcccacttctgggatattttyctactgatacttgcaaatatgtaaaattacttatgtataagaccatttacctccacgctgtttgt

SEQ ID NO: 129821 - DNA, 484 bp, Homo sapiens
tgaagccaaaacttcttagacaccagatttccttgagaataggaccagccctcctttctaaccttttcaacctacccctttccattaaacctcatgayatcccagtcataaactcataaactgcatacccattttttactttgtcatcacgaaacattgtcaagctgaaaatcttttgtttcctacattaaaaattgggatacctaaagtcatagttccataagtaccttgtgatgtactaggcattgtagtgaatgttctacatgtattatcttcacttaatcttcacaacattttgatgcgataggcattgttattatcactggccatttaacacacaagggcatggacacttagagcagtcaagtctgaatccaatgcatacttggttaagtgttacgctgtactcttccttaattaccctgccaggaccaagagaatccttgcagtctagactaatgactcacataaagtaggcactcat

SEQ ID NO: 129822 - DNA, 620 bp, Homo sapiens
ctttatataaacatcttcaagaagtactatccaatgaaacctccaagggcactctgtctcctcaaccactaattttttcaagcacctctgtcctcattactacaagcgtttggagtgataagacctccctatctcacagggttttgtgacaaataaaggcaagaatgtgcataaaaggctttgttaatgtaaatgctcacaaatgtaagaattatattgatgagaattttatgtatagtttttaagatgctgtagaaaaaraagacatacctaccaaaaaacaggttctacattgaccttaacaaaataaatggatgtcagttacatatagctcgcttgcaccaacctcccattttcccacttcatcaatctcaactctctcagatcttcgcctaatgcactccacatagtacactctgaactttttgcacaacccagatggtatacatggatccatatgcctgttttcaagattggctaattggcctcatttgcacaataaactattaagaactctctaataaaagtcgacaatgttgccacactttgttaaagagctaaaggttctgaaatgcaatgcctatcatcactttataaaagagctgaatttgagagaaaaa

SEQ ID NO: 129823 - DNA, 553 bp, Homo sapiens
aggcaagaatgtgcataaaaggctttgttaatgtaaatgctcacaaatgtaagaattatattgatgagaattttatgtatagtttttaagatgctgtagaaaaaaaagacatacctaccaaaaaacaggttctacattgaccttaacaaaataaatggatgtcagttacatatagctcgcttgcaccaacctcccattttcccacttcatcaatctcaactctctcagatcttcgcctaatgcactccacatagtacactctgaactttttgcacaacccagatggtatacatggatccatatgcctgttttcaagattggctaattggcctcatttgcacaataaactattaagaactctctaataaaagtcgacaatgttgccacactttgttaaagagctaaaggttctgaratgcaatgcctatcatcactttataaaagagctgaatttgagagaaaaagctcttacaaacccttattgaaggagaattttcccaatggacacagtcttaggaacagttgggaccagggactccaatgccaccaggat

SEQ ID NO: 129824 - DNA, 562 bp, Homo sapiens
ttaatttcaaatctttatggagaggatatsgggggaatatcaataaatggctcaagaataatttttcttgttctgttttactttattacatcattgtatcaagcgtagggtatcagtgagttttggaaattatgccacccagacaaaccagtgcagtgatgacgatggagatttctggctcctgtagtctttgcccaccctcctctgaacctgctttttagaattttagaagaattgagaggaactctagaaactacagctttgaccattcaaaggctatcatctgggaagttttaatggctacatggctagactatcatatttttgccccaagctactaattgagtctcaaaggtagcattcagcatcctttcctaccgagatctcattatgcacgtgtaatgtgagtaaacaatgagattctattaaattactttcctccccttaaattagccttaatacagaaagggaggagacagtgtgcttattcttacagagatcaagtaattaattttgtaggttctatgaaatattgaaggaaatcatgcaaatgaatttgcaa

SEQ ID NO: 129825 - DNA, 566 bp, Homo sapiens
accagaaaatgtttaaatttacctatagcctagaagcctccacattttttcccacctttctgaacaaaaccaatgtatttcttaaatgtatttgatgtctcatgcctccctaaaatatataaaaccaagctttacaacgaacaccttgggcacatgttctcaggacctcctgaggactgtgtcacgggccatgagcatatttggctcatatttggctcagaataaatctctaaaaatatttgacagagtttgactcttttcrtcaacagtttctttgcttctcatcccccaaacggtcattttttctacttaaagtctcccattgggaggttgtttacttatagacccaacccatacacgatttcttgggaaataccaggtaaatgtaaaaatgtacagacctcaaagagtgatgaagtcataaaacagaaacccttcaatgtttgaaaatagttttataagagtgaacagtctatcgactcaccattatgccaccaaagcaatatgtaaatgtgtatcttatttcccagtgctgcttagaagccacagaaagaaggaggtgccca

SEQ ID NO: 129826 - DNA, 546 bp, Homo sapiens
tggggcttggcaagaagaagtcacctgatttttacaacttcgtggcattttcccaatcatgaaaatgccctcatgtttctcactcatacaacaaacaaaggcaagaaagcaaatccatctgcagaatagtgccatatgaagctagattaaaatgctaacgggtgagcatgcacagagaaaacagcacactgccgagggttaaagaaacatggatttcatccagaaaggccctttgcaccacagtctctactacccagctctgtctgaggggctggagacaaagaaagtaagayagaagtggataccaaacttttatgcctcctagtcccagttatagctcctttcaacactttggtttgttttttcttggaatgaggctatgtaaaccctgaagaaacagcgcctggcaatgctttctcacagaaatttccccccttatatttcttccccctccaaccctttatgtaatagaactactttggtatagacaataggttgcaattatccttcggaactgagcaaggaaagaatgcaccaagatgggca

SEQ ID NO: 129827 - DNA, 601 bp, Homo sapiens
caactctctctctccataaataattccaggctgagtgtttcatggtctgactcattgtgactatcatgtatgtggttatgttgccaattaggatgccaatattcccactgtcagagcactaatgagtgtttttagtattcaagagattactttttggtattcttccaaggtcctgtgagtaagttggctattcactgatagagaaatttatttttttctggaactttatggtatgcattattaaatccttgctacaacaatctaaatgatccttgagggagtcagagcccttccaactgcaagcaaaggacttttgatgttgagatatggccccaatggtgctcttcagtaattcctattttctttactatggaaacctgtaagaatatccaaactagcagacttaagctaggcaatctacactaataatggttttgtctttaccatggttaaattgtgtaaaagttgcagatggcaacgctgagcactttgtacatatacacaataacagggctgtyattcttttatcaggtcaccaaatcaaccagacagcccactccacatatgggcaaatggcttgaagagacacattaccaaagaa

SEQ ID NO: 129828 - DNA, 581 bp, Homo sapiens
gccttgaacttcattctagtacctcaatacatccaaagccttctccagggtttccacaagcaaagtttcctcctggctttggctataatttccatgtatgttgactctgttaccttcatccagtcataaaattctatgctactttttataatttacacaagcacatatattcacyttaggcacgtacgtgcgaaacaaactttactgaagaggtggagagtagggttgcaaagatgtgggactcatgccacagcagtgccaagagcaatgagcaaagccagcctgttctcacacatctcccagcctctctgccaccagaggctttatgtagctcttcagccttgtgctgcacccagatttccaccatcaccctgtctcttctctgttcctctttgtcttttctccttcctctcaggaacagaaacaaattcctttctttgttgcaggtggaggagttcagctattaccttgactttgccgaagtcctaggcactcccatgccctcagagtctcattttgaatccaggcacttagggatgctatttttccacatcaaacagcttcctcccagccaaagaatt

SEQ ID NO: 129829 - DNA, 477 bp, Homo sapiens
aacctacatacttcctctgtcccaacatacacattttgactgacaactctacctttcccctgtctgaacatcatgccacctctgacatgaatgcttctgtaacacatacagactttttttaaggtttaatttcaaacttgcaataaatttgataaggatgctacttcagcttttgtttgaaatgtgcattcttgatgtcaagttggaaaagcatgtctacaggagtaaaaagtcatctcggaaagccaaacttkatttcatcctcatgtcatcccactttcccagcaccttccaccagctcagctccctgccatctctcagctgtagcctgagatcctgagtgtgctacttcatcaacaaaaggacaggtttcagctctcctagatggagagtgcttttgaccagtcactaataaagagccagaagaggatttgccaacacaaaagatggaccacatttgaacaagaaggtatttgg

SEQ ID NO: 129830 - DNA, 543 bp, Homo sapiens
ggtgtgtgttacagtcagcagcatcttaggatcaaggaaacagagtgtgcacacttgtgggaaatatgagcatggatgtgtgtacttgcttgtctgggtatttccactcattagctcctttttactactaaatgcacaccaacacagccctagggtcctggtagggcccatggtccagactccactagccagcctacagtcttcaaggaaagctacagccctacacgatcagtttctattctaaagggagaagcctccataagctcccagcatcatcaataagccaagaaaaccctgcgattatcattgttgctatatcccttggtgctcagaggataccctcagaagagttcaaactcttagaggtccacgttcctctctgtgccttgtcyctctctctgtcagctcagagggacaacctctctgatctggcacagaaactctctcttatctggcacagagggggacagagtctgagccagcacagagagggacaaggacacaggccacatgcctctgttctgggttcctattggagacacc

SEQ ID NO: 129831 - DNA, 566 bp, Homo sapiens
actggacacacagccacacccaggtgcagggtgtgacatgactacactgtggaagggaagaacagattttagtggatgtctagcattctttgccacctatccttccagaaaacgttgcacatgaatccaatatataaaacggttcatcatgtagctgtacaagatgaagacagaataaggaattcctaaactccataatgaaagttgcatcactgctcaaaatattttttggtcatggagaaagaagatgtctctttgttgcactgacatcaggcttggccatgtgactcactcttgcccagtgaatgtagctagaagtgatgggtgctattgttaaacagaagctttgaaagccatggtccaccactcttytattttccttctgaagggggaccagtatgtcacagaaaagagcttctttttcagtagaattagaatgaagaagataggaaacaaaatcagagctgctttatgatagtcatgtcatatgaatgaaaaatgcatctttaattttgcaggtcattaagatttggtgccatttgttactgcagtataacttggcttaa

SEQ ID NO: 129832 - DNA, 582 bp, Homo sapiens
ttctttttaattctaaaaaggtgggcaagctgattatcatttataatttaaaggttatatttgataaagaaggagatcgtccttctgtggtgatcatttcttcaaatagagtaaattttaaaaatcactttaagaatccaatagagaacaacaaagccatattgagatgcaggttttaggaatttggtagtaatccctcacaaggtcagacttgatctcctggacaatcagggcatgctagtcagctttcatgactcagcaaagctacaaattatgtattttggctttttgtggaaattgccaaccctacagatagcaaacgtctcctcggttgtcaaaaagtaagagtagtttttagaattctgcctttgggtcttgtagaatgaaatatttacaagatttgctatttgttaacattttagctmcttccttgttccttcagtcttgctgctgtgcacaccaccataccaggaatatgagggagaaagctagcaagacagctaaataattggaaattctgcttggaggttagactgtgttgtaaaatggtacagacagtgcctgggcattttcattgataga

SEQ ID NO: 129833 - DNA, 484 bp, Homo sapiens
tgtccctgctccagaccctggcattgcaagtgtggaccgggaggatctggcatcccttggctctcccttggggccgggccttctgcacccaccctcctttcctgagcaggaggggtgggatgtgctcggccagccctggcactcacagcaagctctagcatggtcattcactctcttgcactttctttcttgaggtccagggagacggttggagaatggggggaaaatggggttgggggaaaatggggttgagagaaaaaggggcaggaggaaggctgaagacaggagcaggcagaaaggcaggacagaccctctgggagagcagagaggaaactggccgagtgctagcaaagacatgggtagggtgagagctggcttccgaaggggaaggggaggaggaacaggagactggggggtaattagaggacasaaatggagggaatggaggaaggatgaggggaggcagagagcaaaaggggagata

SEQ ID NO: 129834 - DNA, 579 bp, Homo sapiens
accacactctcacgtcttcactaggtggacaagtatttgtaaggcttggtcatattttgcctggtttcccttagttgcagagagacatttcttcacatgaaaccagaccctattttgtgtgttggaaatgctcacaagtatttcccaaggctctccctaccctacctcaagatgctgttaggagtaatcctccaccctcagtgtggctggcggtgcctgccctggccagagggcatcagagcccttcctggatggaggagggcagggcctcccttcctttcccttggaggccagtggagttctatgtgtggtgtgtctgttgcaggagaggaaggcataggggatttgactcttagaagtctgggggtatwaagaatgggaaagaaaaggtatcccctgaaggcagctgagcacaggggcggggggcatgatttccaatccctgcttgcagatgagcagaggcaggatgtttttaccatgtggccaaaaaggtgttcagggctggaggcacaaaatcatgtgtgtagctttacaaatccaattctactgctagtgcccctagcaattgggggatttaat

SEQ ID NO: 129835 - DNA, 596 bp, Homo sapiens
atcccccttcctccggtggccccaagctcatagcctccttgctgaggtagagcatctctttcctgtagtgtaatgaggtctcaggattcackctgattggcctggattggtcatgtattcatccttaagccaatcactgtggctggagggtgcagtgctatttggccaggcttgaagtacctgaatcacatagcgggtagggagtgtttgctcaaggaagacagggctggtctacagaatgcagggatagatgctggccaggctgaaaagcatggagcatttcaccacggtcattgataagcatcctttgaaccttattcacgcataagacaggaccaggagcctgactgtgggttctaatcccacgtatgcatccttcttactgtgtgacattgggcaggtaacttaattctcttagcctcagtttcctcatctgtaaaatggaactaacgatagcatatacctcatactcacgggttcttcccacaccctgctcatttctgtggacccctattattagcatagggaataaagatgcttaatagatatttgatgaatggaaaggagggaagtaggaaggggaagccggagggaga

SEQ ID NO: 129836 - DNA, 580 bp, Homo sapiens
tttggaatataccagagatacaaaaataagcacatatattagtggaagccttagctgtgcrgtggaggaacttactgataagaaaatgatttctgaagtatcaatggggtgctgaatctgtttccgaaaggtaatcagttgggtgcttatggacccatttatcactgatgtggatttcatcaatgccttaaaataaacagtgctaagacgtgagtcaagagaaaaataacagagtgggaagacaggtaccctcttcacactgttggcaggagagtaaattgatacaacctttcagagggcaatttagtaatatttatcaaaatttgaaacatgtatactctgggcccagcagttccatttcaaaaaatctatccagcagacatattcacacaggtacagaaggacatggtacagaaggccatctatgtgtaagaacacttactgtagcaattgctgcaactgaccaaaaaaaaacaaaaaacagaaaccacctaaatatccatcaatagtggagcgcttaaatacatcagggagaatctattctgtgaagtttatgtggccattaaaaattatgatgtgg

SEQ ID NO: 129837 - DNA, 476 bp, Homo sapiens
ctttgtaattattatgggaaataaagaaatgctttgtaatattgtttcgagcaaagaatttaagaacagtaaaacaacarcaataaaagcttttgacaactcttattatctagacaacaggaaactcctatctttaaagtaaaagaaacaaaactggggccagcccaaagaaaaagcatttctgattttcacatacacctaaaatagctcctattgccattttttcaccatctctgctagaaaactcacgtaaggcttgtccactctcacacatgattgacagtctggctgtgtatagaattccaagtggcaatcatttttcttcaaattctgaaaacatccttccatttgtcttccaacatccagtatggcttttgagaatttcaaaatcattctgattcctgggcctttgtgtgcaactagtttctctctcgctttctttttctcactctttctcgctgctagtgttctgagat

SEQ ID NO: 129838 - DNA, 425 bp, Homo sapiens
ttcttcaaattctgaaaacatccttccatttgtcttccaacatccagtatggcttttgagaatttcaaaatcattctgattcctgggcctttgtgtgcaactagtttctctctcgctttctttttctcactctttctcgctgctagtgttctgagatatatgaggcttgtgtattttcaatcactaatagtaatagcattccagcttccaactccatggctctccctatctgggaatttgcccttccgttttgagaaatgttcttctattgtttctccccacgtgttttctttctggaactcccgatgttcagatcttgaacttcgtgagctggtggtcctctaaattttcttactttytatcatattgtctttttaactctactttctagattttcttgttttcatttttcctcagctgaattc

SEQ ID NO: 129839 - DNA, 469 bp, Homo sapiens
cctctaaattttcttactttctatcatattgtctttttaactctactttctagattttcttgttttcatttttcctcagctgaattctctaactcttgagtttttcatctctgccctcgtttttaattaagaactctattttgttttctaaatgttccttttttaaagcatcctcttcttgatttatggatgtaataatgataggmaatttttttttcttttccctgcatgggttctattttttaccagattggtttttggtgatgttcactttgacttctgtcaatggcttaagctttctcttaactctggtaatccaattggctgctggattggaaaatatggagaaaaaaaaaagactcgaagctctaagtgtgctatactgtctgtgaactttaccaggtgatcgggctgggctgttcccttgtaaaatgtccacaaaccagaccagattcccgagagaagactc

SEQ ID NO: 129840 - DNA, 469 bp, Homo sapiens
cctctaaattttcttactttctatcatattgtctttttaactctactttctagattttcttgttttcatttttcctcagctgaattctctaactcttgagtttttcatctctgccctcgtttttaattaagaactctattttgttttctaaatgttccttttttaaagcatcctcttcttgatttatggatgtaataatgataggaaatttttttttcttttccctgcatgggttcyattttttaccagattggtttttggtgatgttcactttgacttctgtcaatggcttaagctttctcttaactctggtaatccaattggctgctggattggaaaatatggagaaaaaaaaaagactcgaagctctaagtgtgctatactgtctgtgaactttaccaggtgatcgggctgggctgttcccttgtaaaatgtccacaaaccagaccagattcccgagagaagactc

SEQ ID NO: 129841 - DNA, 661 bp, Homo sapiens
acactgtataagcattctcttctccacattcttgaagggcaayaatattattagaggaacttcagctggtaaaataaagcagttctaacattcatacttcttataatttgagtatgtaaaataaaattttctctcacagttcttgattatctttgttttcctcaagagtttgagggagtgagaaaaggcttataatgttttcttttacaagaagggatctattttagcataacattaaaaaggcatatctctcacgcttcctctctctttctctttttctttttttttttttatttaaatatgctcttcatgtctttcaactgattggatgaggctcacccagattattgaggataatctcctatacataaagccaatgttaaccacatctacaaaattaactccacagccacacctagattagggtttgattgaataactgggtgctattgagaggtgaagccagctgaacttctgggtttggtggggacttggagaacttttctgtcttacaagaggattgtaaaatacaccaatcagcactctgtagctaggattgtaaaacgcaccaaccagcgctctgtggctagctagaggtttgtaaaatgctccaatcagcactctgtaaaaacacaccaatcagcactctgtggctagctag

SEQ ID NO: 129842 - DNA, 661 bp, Homo sapiens
acactgtataagcattctcttctccacattcttgaagggcaataatattattagaggaacttcagctggtaaaataaagcagttctaacattcatacttcttataatttgagtatgtaaaataaaattttctctcayagttcttgattatctttgttttcctcaagagtttgagggagtgagaaaaggcttataatgttttcttttacaagaagggatctattttagcataacattaaaaaggcatatctctcacgcttcctctctctttctctttttctttttttttttttatttaaatatgctcttcatgtctttcaactgattggatgaggctcacccagattattgaggataatctcctatacataaagccaatgttaaccacatctacaaaattaactccacagccacacctagattagggtttgattgaataactgggtgctattgagaggtgaagccagctgaacttctgggtttggtggggacttggagaacttttctgtcttacaagaggattgtaaaatacaccaatcagcactctgtagctaggattgtaaaacgcaccaaccagcgctctgtggctagctagaggtttgtaaaatgctccaatcagcactctgtaaaaacacaccaatcagcactctgtggctagctag

SEQ ID NO: 129843 - DNA, 543 bp, Homo sapiens
gattattattgttggagggggaatccctgaaaacgcccgtgtttgaaaatccctcaccaagaggattactgctagctttattgctatgtcacaaagccaggtgctttgttgtttaaaacaacgataatatrgtctaccagaccaggagccagtggtcagatagtgctcctggccttctctgtactatgcaaccttgaatttgtcattttatttctttatgccttggtttccccatttgcaaaagaagggctttgggctagattatctttaaggccgcaacagctcgaagaaatcttaagattaaatttgttcctgcctgccagccagatatcactctaagcaaacatatttgctccactgaatggctgtgtttttccacacacataattgaagatattttatacctgaagttacaatttcatcacttacctaccccatatcatttaaggtctcctcattctgctttgaagttcaaagaaagagaagactctgtataatgagaatggcccctttgaaatgctccctttcgcagctgcaagcttg

SEQ ID NO: 129844 - DNA, 367 bp, Homo sapiens
gaaagtctgaaaaaaatactcatacaccagaatcattatagaggctacatgtgagcttcaatcgttgatttatattatcttttttggcctcttgtcttttctgcatttccaacaatgatcatgcattataattatattattttaaagtttttttttttttttaagcatgtcccaatttcacttttagtatgrcggagtgaaaccatccaggtctgtctgtctgcatgaccttggacacattctacccttttggacttccgttttctgatttgtaaataaagaagctgattctgaaatctcttttaaggctcatatgttgagtcatctaagaatatctgtttcatcctagggataaaacaagaataag

SEQ ID NO: 129845 - DNA, 512 bp, Homo sapiens
aggcatcatgaaagcacaaaaaaaagaagtgacccttgagcaacattctaaagggggaagaggagtcaaaaggaagcaaaatagtggggcataggtcaaatccagccctcaactttttcttgtggatcttttcaaaatttaaactagttactaacatttaataatccagattgcccatttttcaaaagcatattgggagatttgctaacacagagcccatattcctccatggcaaaaactggttgaggctgaccagcagccgctatttcagagacagtgagcacacaccagtttgcctcaggcccacctgrtccactgcagaaatggcatatgcaaaggtatgaaacagcgcggcacattaggaagactggagtgaagagtacatatagaagtgatgaggaggaggccagagtaaccaggaggagccaggccctattccaggtagcatttacaggcagaataaaagttgccatacctgttctttagctcatgtggtccattgactccacttg

SEQ ID NO: 129846 - DNA, 475 bp, Homo sapiens
ctcacaggagcttttgacaaactggttttgccctccacgtcgatatttcactgtcagttcccagattcatctccaccgctttgcctgcttcctataagagtctcctctgagtccaggcagatgctagcttcttccttgctgtgggggcagcttggagacacttcacaggcgatattaatcatgctgattaggcatgacctccccttttgtaaactcaygttgatggcctcaaaccaatcagtacctgtcgcaatgtttatggtcccgaaatgagagtggaagatggtggaggaaagagtgttttgtgtgacaatgaggaatcccttcagtccagcctgctgatggcagctaatgcttctgagagaaagtggctttcagaaatttgctcattgctgtggcctctttggtcttcactcataaggcattccccatctccctggtgaaaaaaataaataaccctctacatttatgcaac

SEQ ID NO: 129847 - DNA, 584 bp, Homo sapiens
tccaatggagcaaccaaaagtgactccagatggggccagaagaagcctagcccaaattgctgaactgtccagaataaaatggttcttccgagttttggggtgatttactaggcagcaaggtataacttgtaatgtcccaagtagtcagccagctctgcaccaacaaaggccagagcagcaatcacccctctaattactcaaagaagagacagaaagtgtcttattaaatattgcctagaaattcagagtgaatctcttctgactagcccctctctcagcgcagcaaatcaatgttaacaaaacacatgtgctggaattcccctgatgcccttctaggcagaagtttttggttaggaaaagaaaaagaaacttaatttgaagttttaataacctcccaattaggttgtttctgttagcattaatatttaatcatgacactactgtgactattttggaattgaactgaaattaagtaaaaatgtttgatcataaataatttcrttattaaagataatctttgttatatatgttcccatgcctatcttttattaaatttacttttcatgttgacatttttaagggga

SEQ ID NO: 129848 - DNA, 596 bp, Homo sapiens
aatttgcataaagctcttagcccagtgcctagcacattttaagcctttgttaaaggtcagttattgctgccaccattaaaccctgttgtggcagactggggaattgttcacatttgcctgtgtccttccctgttacaagaccctcactggctgccctttggcaastgacttctagagtcttgctggaggtggtgggcacttcttgtcccattgtcaggcttggccatggaactgctttgcaatgaactgtgagcagacatgagccaggccacatccaaggagaagttctgaagcaagtacacactttggccctgcctcttgttcttttctctttatgataagaaaggtatttcctaaattattaggttccacctgagtcctagctaagaagacacatggcacagagctgctatacagagcatgtaaagtgagatataaatgtttgctgttgtaagtcattgagatgtggaggttatttgttttcatggtaaagttaacaaacataccatttatggatactgtttagagagttaccaactcacaccacatacacaccctgctatctacaaaaactatactttgatcatagctatcct

SEQ ID NO: 129849 - DNA, 646 bp, Homo sapiens
tttcatcatgtatgcctcatatttgaatactataactagattctattatataagaatatgttgaaatgcttacactcacttttggtgtattttgtgtctatctatctatctmtatcatctatctatcattttagcatataaatataaatatagagaaaaatgttttttacattttaacaaacatttgtcggatcaagttgaagtctcctatacccacttctactatttcattctcctttctttcctccatagaggtaaacattatgatgaaattttatatgtatagtctatttttctacttgtactacacttattacatacataacatatttgtgaaaacacatataattttatttctttctaaacgtataaaaatggaaccatacagcatgtattattctgtggcttgcttttatcttttaagatgaatagatctgatattagaccatccttgaattctagcataatgcattatgttcaagtaggattattatttaaaaaactaactgtgcaattcattttgttagcatcttattgggagtttaaattaagattggtttataatttactttctctgatggactttgcttgctcatgcattatggtgttactggattataaaagtgaattaggggaattttacctc

SEQ ID NO: 129850 - DNA, 516 bp, Homo sapiens
gtatggctgaacaatcagaacagagattttaattctagtttgttttatatgaagggtagaaaaatccttcctaaatttttcatcatgtatgcctcatatttgaatactataactagattctattatataagaatatgttgaaatgcttacactcacttttggtgtattttgtgtctatctatctatctctatcatctatctatcattttagcatayaaatataaatatagagaaaaatgttttttacattttaacaaacatttgtcggatcaagttgaagtctcctatacccacttctactatttcattctcctttctttcctccatagaggtaaacattatgatgaaattttatatgtatagtctatttttctacttgtactacacttattacatacataacatatttgtgaaaacacatataattttatttctttctaaacgtataaaaatggaaccatacagcatgtattattctgtggcttgcttttatcttttaagatgaatagatctgat

SEQ ID NO: 129851 - DNA, 664 bp, Homo sapiens
ttcccaaaccattgtcattcccaggtgactgtggacatactcaaagctgtgctccctgaggaacaacttcagagcctgtacactacaggggtgatggtgaggaatggacttcactaaaatagttgagtcattcactagcaaaatgaacaagcaaacaacaaaaacaatccccaaaagtggggcaccagtacccagaattgcaaaaaaatatatatctaaaatgtcccattttcaaaacatattatgagacatgcaaagaaatagaaaaatatgatgcataaactaggaaaaaagcagtgaacagaaactgtcagtaaaaggaaccmgatgtcaaatttaacagaaacacctcaaagtagccatgctaaatatagtcaaagaactaaaggaaaccatggttaaagaaataagaaagtatagagggcattccaagattgctgaataggaacagctctggtctgcagctcccagcgggatcgacacagaagacaggtgatttctgcatttccaactgaggtacctggttcatctcattgggactggttggacagtggatgcagcccacggagtgtgagccaaagcagggcagggcatcacctcacccaggaagtgcaagggttcaggggaattccctttcctagccaagggaagctgtgacagacta

SEQ ID NO: 129852 - DNA, 664 bp, Homo sapiens
ttcccaaaccattgtcattcccaggtgactgtggacatactcaaagctgtgctccctgaggaacaacttcagagcctgtacactacaggggtgatggtgaggaatggacttcactaaaatagttgagtcattcactagcaaaatgaacaagcaaacaacaaaaacaatccccaaaagtggggcaccagtacccagaattgcaaaaaaatatatatctaaaatgtcccattttcaaaacatattatgagacatgcaaagaaatagaaaaatatgatgcataaactaggaaaaaagcagtgaacagaaactgtcagtaaaaggaacccgatgtcaaatttaacagaaacacctcaaagtagccatgctaaatatagtcaaagaactaaaggaaaccatggttaaagaaataagaaagtatagagggcattccaagattgctgaataggaacagctctggtctgcagctcccagcgggatcgacacagaagacaggtgatttctgcatttccaactgaggtacctggttcatctcattgggactggttggacagtggatgcagcccacggagtgtgagccaaagcagggcagggcrtcacctcacccaggaagtgcaagggttcaggggaattccctttcctagccaagggaagctgtgacagacta

SEQ ID NO: 129853 - DNA, 567 bp, Homo sapiens
gtaagggaaggggtccagtttccattttctggatatggctagccatttatcctagcaccatttattgaatagtgaatcgtttccccatttatgcacctttttttaactgactttattttttagaacagttttagaaatacagaaaaattgagacgatagtacagagagtttccatatagccaaacccattttccttattttattttattttattttatttttgagacagagtctcgctctgttgccaggctggagtgcagtggtgccatctcagctcactgcaacctccacctccgaggttcaagctagtctcctgccttagcctcccaagtaactgggactacaggcatgtgccaccacgccgagctaattttttttttttttttttttgtatgtttagtagagaygggttttcaccatgttgggcaggatgggcttcatctcttgaccttgtgatctgcctggcttggcctcccaaagtgctgaaattacaggcatgagccaccacacctggcgcattttccttattattaacattttatcagtatgatacatttgttataatta

SEQ ID NO: 129854 - DNA, 559 bp, Homo sapiens
aggaacaggcaacagggaacacggaagctttatttttggtttctattaagatatcggattgacttgtcagtaactgtcacaagcatgtttttagtttcatagatatcttgaaaaatctttaaatgtgtgtgcatgtgtygctctcaagactgaatctcccaggaaaaaaagaaaagaatttgtttgcttgcttgtttcgttagagataaattatttgaaatgccagaaggggccaggtatggtggcttatgtaatcccagcactttgggaggctgaggcaagaggaggatcacttgagtccaagagttagagaccagcctgggcaacacagtgagaccctgcctttatgaaaaagaaaaattgttgggcatggtgttgtgtgcctgtagttccagctactcgggaggctgaggtgggaggattccttgagcttgggaggttgagagtgcagtgagtcatgatcgcatcactgcttggatgacagagtgacaccctgtcttaaaaaacaaacaaacaataaacggaaagccattgatgtgggttggttgagttttgggag

SEQ ID NO: 129855 - DNA, 577 bp, Homo sapiens
ctggagaccacataaggaatggctcatgtcttctttatcctggtcctctcttccaaagcctctagttatttttccaaaagtttatattcaagctgggggaagtgatctgaagacaagaaacawatttaagcgtcaaagtctgacacaaacaaaacatgctggagggatctggaaggagatgaatcagtttcgcttaaaagaatgaataagtattctattatttggttatttgtgtcaccacaaataagtttaaaattttaatttgggtttttatctgctgagtaataaggttgaaaaccaaagaggggtaaatatttataataaaatttagctttgatattgcaaagtaaggcctgctgttagaattcatgaaaatggttaatattatctaaacattaatattagtaaaatgataggcaagagattgcttatgcaaacttttaaagatagtaggtctctctctttctcctttccttcctttctctccttcccttcctgaagtactggtatctgctcagtatttattcattgtttatgaaatgacatttttggaactctgatatgtttcagttagacc

SEQ ID NO: 129856 - DNA, 615 bp, Homo sapiens
cagtagcatttcttataagcctgccctttctcgagtcctttatatgttgaattgaaaactgtctcttggcaactttgcccactggtagtagtgctacccaataggtcatgagtcatttctaacctctcttttagttgaacctatccttgagtatttgaaaatatctatgtgtgtctttaccttgcactcgagcattccttaccaagtctccttggtaagcagccccagtccctcgacctggagaccacataaggaatggctcatgtcttctttatcctggtcctctcttccaaagcctctagttatttttccaaaagtttatattcaagctgggggaagtgatctgaagacaagaaacaaatttaagcgtcaaagtctgacacaaacaaaacatgctggagggatctggaaggagatgaatcagtttcrcttaaaagaatgaataagtattctattatttggttatttgtgtcaccacaaataagtttaaaattttaatttgggtttttatctgctgagtaataaggttgaaaaccaaagaggggtaaatatttataataaaatttagctttgatattgcaaagtaaggcctgctgttagaattcatgaaaatgg

SEQ ID NO: 129857 - DNA, 276 bp, Homo sapiens
ataggcattaaaatgattttaaaggctctccaaatgactctaatatgcagtctgcgttgaagacattaatggattgaattcctttaattacaggtgagattacytgaattcattatatctgtatctttacatctgctaaaggtgtcatctcagtactaccattcagtcattcccctgtttatgaatataaaaagaactttcaaaaaattggcagtatctagaagcacaggtaaattatattcttggtattaacttttctgtctcagttatgctgta

SEQ ID NO: 129858 - DNA, 406 bp, Homo sapiens
ggtgggcacaaaagaacaagtgagattgcaaatagccgtataagaggcatttgacaagacgtttgctcttgatagtaattcctcagtcaaaatgagattactcatggagcattttcatttgttctaaaataggaaaacattgccttgatctgggtagaggtgacagctcagggaatggataaagttttctttyttctctctcttttgtaaaacactgaatttgggctgctgagatggcacaactatgacagctcaaagttttagtcttggtttgaagatgaaagccaaatcatgtacacgagttctttattcctctgcaaaataaattcctctgtgaactacagggaaataaaaggctctactgagggggattgtcacactgaattgcagcagagtcaaagatggc

SEQ ID NO: 129859 - DNA, 406 bp, Homo sapiens
ggtgggcacaaaagaacaagtgagattgcaaatagccgtataagaggcatttgacaagacgtttgctcttgatagtaattcctcagtcaaaatgagattactcatggagcattttcatttgttctaaaataggaaaacattgccttgatctgggtagaggtgacagctcagggaatggataaagttttctttcttctctctcttktgtaaaacactgaatttgggctgctgagatggcacaactatgacagctcaaagttttagtcttggtttgaagatgaaagccaaatcatgtacacgagttctttattcctctgcaaaataaattcctctgtgaactacagggaaataaaaggctctactgagggggattgtcacactgaattgcagcagagtcaaagatggc

SEQ ID NO: 129860 - DNA, 572 bp, Homo sapiens
ataccaaaaggatggtgctaagccattcatcagagacacctccatgatcttatcacctccctccaggctctacctccaacactggggattacaattcgacatgagatttggtggggacacagattcaaaccatatcatggtgtaaataaaaaagatgggacataagcatggagctgttgatatctttccgtcacgaagagataagttatctaagagtgagaccacactagaagaaaaaarcaaacttgatgtgatggtcctaatgacactgtttgagttcctggatacagtcatatttgcagcctcatatatctagccatgaacttttcagttaagtgagccaatcttttgtctcctttgtgtgcactgaatcacttgaaggatttgttaaaatacctattgctgtgccccacctccatgttggtcgagggagctgcctgtgaacttgcatttcaaatgattttccaggagatgctggtgctactggtctgggaaccacactttgagaaccagtggcttataatccttttttttggtttctgctacttgtaaccaaaatgtcctgactgata

SEQ ID NO: 129861 - DNA, 515 bp, Homo sapiens
caggtgacctggtttggatctcggctatgacttttgttagctttgtgactttaagcaaatacatggccttcctatgtctataagttagggcaataatagtgcctatctcataggattactgtgagttcttaacagcattaatccatgctctaatccaataagattagaacagtgtttgacaccgaataaacacttaaaagcattttgttattggttcagtggtagagtcattttgacatcatttctgtttcatttcccagtctgaggcactaatagaccatgtagcaactcataaaacatctcgaaggcggaagtaagaatttactctttcaagcaccctaccaacttttgcaaatttcacacccctggtggttgtgtgttgatacacatctgtgcaatctgatcggcctaattttacyttgtatagacagaaattaataaagctctcagaatgtggaaaagggctcttctaggagcacaacaatttgactgcctgtagttgtggttttctctta

SEQ ID NO: 129862 - DNA, 551 bp, Homo sapiens
taccctagttgcaccccagattaattaaatcagaatatctagaagtaggatcaaattattagtagttttaatcgctatctaggagatttcaatgtgtatccaagattctgagaacctttgtctcagcacagctgttctcaaactttagcatccattagaattgcctaaaagacttgttaaagcacaaattgctaggtcacagcaccagagtttgtgattcaataggtctggtgttgggcctgaaaattaaagtttttaacaagtttgcaggtgttaatgttgctggtccagggacctcactttgagaaccattgttcacaggacttgagttcttatcatgaaagtgggtgtaagtattatacatctttcatgtcccattggaggatcaatgaaataaaatacttagwatgatgttcagcacatggtagacaatcaagaaatggtggtttgtttctattattgctaatactagtgttatgtctttgctgaagttaatgggttagctaatcttaaatggtttacccataattttggccaggctattttcacct

SEQ ID NO: 129863 - DNA, 597 bp, Homo sapiens
actcttctagctccagctgggagataacactggctttgaagggatgacagcccacccatggggaaagaaagatataacaaatatctgaaaattcagccctaaccccttaaagtttggctcactgaatgatggctactgtgaggtttaagggaggagtagtatagaaagctcctaacatcaactctttaaaaataaaggcaatttacctggggaaaatgtattaggaacatcttgtgtcttgggggccaactagattttawaacctttggttttgaggaccatataagcccagcagagtaaaatgctatgaagactcatggctgttaataactgaggacgcaaagaccctcaaataggaagattttcagtaacaaaagaaaacggctcttacgcacatagattagattcctacagttctccagtgtcacttctctgtacagattcctctgtggagggctcagttatctccactccccctcagtaaagtctacaacaacattcttgaatgtcactggctcctaaaatataagcatattcacccccttttagctatccagaaaatgttcctgacataatgtgtaaagctgatagtcacag

SEQ ID NO: 129864 - DNA, 585 bp, Homo sapiens
gaagtcttaagagtccctgccccaaagtaaatgctcagtaagtgctatacattatgactatagttaacagaaagagctaacagaaagtatacaaagtgattaaaatgtaaaatctctaataaagtgatttacttttttttttttttttttgagacaaggtcttgctctgtcacccaaactggagtacagtggtatgagcacagctcactgcagcctcaacctcccaggctcaagtgatccccccacctcagcctccccagtagctgggaccacaggtgtgcgccaccactccaagctaatttttstattttttgtggagatgaagtttcgccatactgtccaggctggtctcaaactcctgggctcaagtgatctgtccacttcagcctcccaaagtgctggggatcaggtgtgagccactgcacatggccttttaaaattctcttaattagaattaggtagtatatatatcctaagaaatagcaaaacaagtgcaatctgaaattattttccagatactccaaagaaagaagatatcttcccataaatgatcacattggcctcactcagactcagtacaaagct

SEQ ID NO: 129865 - DNA, 310 bp, Homo sapiens
ctctctaaatcaagtagatttggattgaatagggcttgttggcttttgtatcatttccttctgcatctcggttggaaacaggatgtggtatggtaagggtggtgtttgcgtctcctctcctttcgactcttggcctactgtggccatttgctacccaaagtggcccgtcagaccaggagatccctcaccaagctttgaggcaacggaccccacaggctgagtggtctcgactcccaccctgtggtctaytatccagaggatgaaacagtgggagcaggcaggggacagtgatgatcatttgaggacctgc

SEQ ID NO: 129866 - DNA, 578 bp, Homo sapiens
ggctttcatctgctggcgatgtacatgtacattcccactaccacacggagggaaggaggctcgctggacccaggcatgcgcagccaatttggggcctgagcggagcrggtgactatctcagtgttggaggccttgtgaagagccaaggcgcagattgagcctggaggaagcctgaaattacctctccacaatgtcccctgccgtcaccagccagcagtgtggggactggccggggaatttttcaaccctggccagtccaaccagtctgacctcccttccagcaaggacatccctgtttctgtgtctgctgattaagacgcatttaccttgtaaagaagggaatgaaaagcatgtgagtgagccagtcgtcagggccttccataactgtagtgtgtgatgccatatgttctgggttcaaatctagactctgcctgtatgagctatttaaacctaagcaatttatttcatcgttctctggcttagtttcctcgtctgtagaatggatatggtattagtatcagccggtgaggccgtcgtgaagatacagtgagttaatatgcctacaaagctcattgctc

SEQ ID NO: 129867 - DNA, 589 bp, Homo sapiens
caagcttgctggtaaatggtgtaaaaagaccaagaagatgaacttggtggttcacttmcttatgatctgatcaaaaggaggcatacatttatctagagaggaaaatttttcttggcgttacattcttggaggaatttattgcagggattcttccataagggacataataacataatgcataatgtaaaaaaaaaaatgaaaactggcaaatgctctgccattatgaaaaagagcagtggtttttaacattttgttttctgctgggatatacgtgaatgtcacgaacccaggttttgactaacgttaaaaaatttgtcaaagaagctaatctctatggtaatggaatagatcaggatgaataacagtacactggaaacaatcagtacattttttggcaaagataaactgggctttggattatgtgtaattctggtgtatcataaaccacatcctcttctctcccattcaaacaggcaaatgagtgagagtgaggctgttctattgatctctttgatttggctttatttatatatacaagagtcaatcacttgcaaaacttcattggctcttattagtttaactgttgtgc

SEQ ID NO: 129868 - DNA, 589 bp, Homo sapiens
caagcttgctggtaaatggtgtaaaaagaccaagaagatgaacttggtggttcacttccttatgatctgatcaaaaggaggcatacatttatctagagaggaawatttttcttggcgttacattcttggaggaatttattgcagggattcttccataagggacataataacataatgcataatgtaaaaaaaaaaatgaaaactggcaaatgctctgccattatgaaaaagagcagtggtttttaacattttgttttctgctgggatatacgtgaatgtcacgaacccaggttttgactaacgttaaaaaatttgtcaaagaagctaatctctatggtaatggaatagatcaggatgaataacagtacactggaaacaatcagtacattttttggcaaagataaactgggctttggattatgtgtaattctggtgtatcataaaccacatcctcttctctcccattcaaacaggcaaatgagtgagagtgaggctgttctattgatctctttgatttggctttatttatatatacaagagtcaatcacttgcaaaacttcattggctcttattagtttaactgttgtgc

SEQ ID NO: 129869 - DNA, 589 bp, Homo sapiens
caagcttgctggtaaatggtgtaaaaagaccaagaagatgaacttggtggttcacttccttatgatctgatcaaaaggaggcatacatttatctagagaggaaaatttttcytggcgttacattcttggaggaatttattgcagggattcttccataagggacataataacataatgcataatgtaaaaaaaaaaatgaaaactggcaaatgctctgccattatgaaaaagagcagtggtttttaacattttgttttctgctgggatatacgtgaatgtcacgaacccaggttttgactaacgttaaaaaatttgtcaaagaagctaatctctatggtaatggaatagatcaggatgaataacagtacactggaaacaatcagtacattttttggcaaagataaactgggctttggattatgtgtaattctggtgtatcataaaccacatcctcttctctcccattcaaacaggcaaatgagtgagagtgaggctgttctattgatctctttgatttggctttatttatatatacaagagtcaatcacttgcaaaacttcattggctcttattagtttaactgttgtgc

SEQ ID NO: 129870 - DNA, 589 bp, Homo sapiens
caagcttgctggtaaatggtgtaaaaagaccaagaagatgaacttggtggttcacttccttatgatctgatcaaaaggaggcatacatttatctagagaggaaaatttttcttggcgttacattcttggaggaatttattgcagggattcttccataagggacataataacataatgcataatgtaaaaaaaaaaatgaaaactggcaaatgctctgccattatgaaaaagagcagtggtttttaacattttgttttctgctgggatatacgtgaatgtcacgaacccaggttttgactaacgttaaaaaatttgtcaaagaagctaatctctatggtaatggaatagatcaggatgaataacagtacactggaaacaatcagtacattttttggcaaagataaactgggctttggattatgtgtaattctggtgtatcataaaccacatcctcttctctcccattcaracaggcaaatgagtgagagtgaggctgttctattgatctctttgatttggctttatttatatatacaagagtcaatcacttgcaaaacttcattggctcttattagtttaactgttgtgc

SEQ ID NO: 129871 - DNA, 607 bp, Homo sapiens
gaattctatacccagacaaactatcaagggttggggtrgaatcttatagacagaaaatttatctccaatgggccccttctcaggaagtgactagaggatgtaattcatcaaagaaaggagcttgaaacccaggaaacaaatctagtacatgaaagtcctaacaggcaaccagcccagattggagcaggagggcagaagactccaggaggaaagttgccagaaaaaaaaaaagagagaattaaaccaatagatgatctgatatgttgaacacttggataactgaatcaagaagttattggaggaaataggaagaatttgaagtacatattttgaaaaagaagaaaatggtcacggcagcttagagtgcaggctggaggtatgcattggattctgcaggcaggagtggagtgaagaccagttggcttgcttacatgcttttgcattcattaaagccatcagatgcccgccgtgtagctgtaaagtgggcgattctctgtgggcatgggttaaggtcacctttccagtggcctgctgggctcctttgcatcctgggttctgctgtactggcaggccctggtagtaggatgactgagcaggaaacctgcaa

SEQ ID NO: 129872 - DNA, 568 bp, Homo sapiens
gaaaatttatctccaatgggccccttctcaggaagtgactagaggatgtaattcatcaaagaaaggagcttgaaacccaggaaacaaatctagtacatgaaagtcctaacaggcaaccagcccagattggagcaggagggcagaagactccaggaggaaagttgccagaaaaaaaaaaagagagaattaaaccaatagatgatctgatatgttgaacacttggataactgaatcaagaagttattggaggaaataggaagaatttgaagtacatattttgaaaaagaagaaaatggtcacggcagcttagagtgcaggctggaggtatgcattggattctgcaggcaggagtggagtgaagaccagttggcttgcttacatgcttttgcattcattaaagccatcagatgcccgccgtgtagctgtaaagtgggcgattctctgtgggcatgggttaaggtcacctttccagtggcctgctgggctcctttgcatcctgggttctgctgtmctggcaggccctggtagtaggatgactgagcaggaaacctgcaatattcattcccgc

SEQ ID NO: 129873 - DNA, 602 bp, Homo sapiens
aataaattccatctttcttcaattagatttataaggatggaaaagtttgaaaacaaattctatgggtraaggtgtgtagagaaagaggcaccctcatacatcattggtgagacggtggtaacaaggacaacctctaagaaggcatattgacaacatccatcaaaatcacaagggcacccccccttttacaaagaaactccacttccaggaagccatcttccagttattttcaaacctggacacaatgctatgcacacaaggctattcattactatattgtgtgtactggcagaacattggcacaaacccaaacacccatctgtgggggactggttaaataaatcatggttcacccacacgatggaatactatgcagccataaaagaagaatgaggagactctgtaatgatttctcattaagcataaaaagcaaagtgtggtcatttggatgaaagggttggaagagaaaatggagccctagcaatacaatgtattttggaccatggatacacacgtgaaactgaagacactgatcggatccaataaggggattgggtggctggggaacagcgtagcagggaggtttcactggatgacctttt

SEQ ID NO: 129874 - DNA, 602 bp, Homo sapiens
aataaattccatctttcttcaattagatttataaggatggaaaagtttgaaaacaaattctatgggtgaaggtgtgtagagaaagaggcaccctcatacatcattggtgagacggtggtaacaaggacaacctctaagaaggcatattgacarcatccatcaaaatcacaagggcacccccccttttacaaagaaactccacttccaggaagccatcttccagttattttcaaacctggacacaatgctatgcacacaaggctattcattactatattgtgtgtactggcagaacattggcacaaacccaaacacccatctgtgggggactggttaaataaatcatggttcacccacacgatggaatactatgcagccataaaagaagaatgaggagactctgtaatgatttctcattaagcataaaaagcaaagtgtggtcatttggatgaaagggttggaagagaaaatggagccctagcaatacaatgtattttggaccatggatacacacgtgaaactgaagacactgatcggatccaataaggggattgggtggctggggaacagcgtagcagggaggtttcactggatgacctttt

SEQ ID NO: 129875 - DNA, 602 bp, Homo sapiens
aataaattccatctttcttcaattagatttataaggatggaaaagtttgaaaacaaattctatgggtgaaggtgtgtagagaaagaggcaccctcatacatcattggtgagacggtggtaacaaggacaacctctaagaaggcatattgacaacatccatcaaaatcacaagggcacccccccttttacaaagaaactccacttccaggaagccatcttccagttattttcaaacctggacacaatgctatgcacacaaggctattcattactatattgtgtgtactggcagaacattggcacaaacccaaacacccatctgtgggggactggttaaataaatcatggttcacccacacratggaatactatgcagccataaaagaagaatgaggagactctgtaatgatttctcattaagcataaaaagcaaagtgtggtcatttggatgaaagggttggaagagaaaatggagccctagcaatacaatgtattttggaccatggatacacacgtgaaactgaagacactgatcggatccaataaggggattgggtggctggggaacagcgtagcagggaggtttcactggatgacctttt

SEQ ID NO: 129876 - DNA, 548 bp, Homo sapiens
tagattacattaatgcaggatattacttatgagtttaaaaattcctgataactggtgaaattttcttattaaaaagatcctttgtagaaaagagatattttcctagtctgctggtaggattaaatattggtacagcctttttgaaattgttttyacaatgctgtgaaaaaacataaaaaaaaaagttaatgctgagttttacatctgtgtaataaaatatttcacagctgttaaaaataacgttatttaagaatactcaatagcataaatactgtttcaatattaagtggggaagacaggctaaaattgtatatagataacgattctcttttggaaataaaacatatatgcatggagaaaagatgggaaagaaacacacccacatattaacattagttatctttgggtggtaagattccaggtaattttgttttcttcattttattagtctatattctccatattaagggtcagcaaagtatggcttgtgagccaaatttggacttccatttgtttttataaataaacttttattcaaacacagccaa

SEQ ID NO: 129877 - DNA, 548 bp, Homo sapiens
gaattctggcatcaagacacccgttttccagcagggggaatccgattacttttctcctgagaaaatattttaaaagagatgctcagccaggtacagtggctcatgcctgtaatcccagcactttgggaggctgaggtgggcggatcacttgaggtcaggtattctagaccagcctggccaacatggtgaaaccccatctctactaaaaatacaaaaattacctggggtggtggtgggtgcctgttatcgcagctacttgggaggctgaggcaggagaattgcttgaacctgggaggcggaggttgcagtgagctgagatcgagccactgctctccagcccaggcgacagtgtgagacattgtggggaaaaaaaaaaagatgctcatcatagattccaacaaacagcctactctaattaccctawcacagtggttcttaatgggggacaattttcctgcccaggagacatttggtgatgtctggagacatttgtcatgttacagcttttgcgtgggtggggtggtttcccctggcagctagtgggtaga

SEQ ID NO: 129878 - DNA, 537 bp, Homo sapiens
gataaacttacctcttccattcatctgaatagtttattattggagtattctgtctcacctgcactaattgcagaaaactacatacaagttttctcttttccactgaacttcctttctacatttcccttcttccccattcccctctctgctttcaatccagaagtttttctttatctttatggggaatattgtggtatagcaggaagtacaggtgctgtaccaaagtaagataccagscttcaaatagaaactcacttgcattcatttagcagactaataaattcttgtgtcaggtattttgctaaatgccaggaatactaaaatgaaaggattatagttgctgaaaaaaaataaagtaggagattattaattctgtatattctgaataaagaaagcctttgcaaagaaaagaacattcaacctgagtcttgagggaattgcgaatttcattgttttacaaagagaaagaaaaagccagctaaatgagtcatatgttgctaaactacaaggaatatttcaggaatgtgacataggcat

SEQ ID NO: 129879 - DNA, 623 bp, Homo sapiens
cttggtgatatagaagctttcccatgcaggaagtccagtgctataatagtagctaaaaggttattggaaaatgtgtttttcttaaggcattcctggaaaactctccagtgatagaggcacttgttkcactcagtaagttataaaacatttaaataaggtattacaaaccaaatggcatgaaacaaagctaattaaattgactggattgccttggccaaaaagtattattgttgaccttgatgataattagatctacccccagtggaaaacacagattgaccctttataaaatagttactagaagcccaatgcccctaataataaaacctcatgtacaaattctgacatgcttttataaactctgacatgactcaatattgcaaggccttaacacattatgccaaagtatgttttcaccaggtaaaaaagccctttatgacccaccaagtgataacaaccagactttttacaatctagaacccagagatcaggtcttttagaaaagatgctaatggaagactgcccttgaactccattggaaggtaccataccaagtcctcccgtacagcaaaacttcagagttggtcagaaatggtggcatatgcctgtaatcccagctactg

SEQ ID NO: 129880 - DNA, 610 bp, Homo sapiens
tctattgtgtatatgtaccacatttctttatccattcctctattgatggacacttaggttgtttctaattcttggcaattgtgaatagtgctgcaaacatgggagtgcagatattcctttgatgtatggatttcctttcttttgggtatatattagcagtggaattgctggatcatatggtagttctatttttagctttttgggaatctccaaactgttctctgcagtgattrtactaatttacattcccaccaacagtgtatgagggttccctttcctccacatctttgccagcatttgttattgcctgccttttggataaaagccatttcgactggggtaagatgatatctcattgtagttttcatttgcttttttctgatgatcagtgatgttgagcaccttttcatatacctgattgccatttgtatgtcttcttttgagaaatgtctgttcagatctttggaccatttttaatgagattattagatttgtttatggaattgtttaaagctccttgtatattctggctattaatgtcctgttgaatggatagtttccaaatattttctcccactctgtgggtcgtctcttcattttgttgattgtg

SEQ ID NO: 129881 - DNA, 622 bp, Homo sapiens
tactcagccctcacatatccctatgatattttaagttgtgttttataagtatttgtaaatagtaagcattttacatctgacttacctggatatccacttttgaccyaattctccccacagaatttctgtgcctgagctgatgtttgggcactgttagtagtgatctatcaaagaaagaataaaggcagactgcttcactaaaagacgctttcaacatgaaggccagtggggacatggcaagctgtgaggtgaaagttccacagtagttaggacggagacatgttgtgtgggaaccaagtcattactcagcccccacgaatgaaagaaccccaatctgaaaaaaaaaactagagcatggcagtgtggcccagattcattctgtatgttacagtgtggtttctgcaaaactattttctatcatcttaaattaacattgttaattacatgccttaattcatagctttttttaaatgtgaaaatctattttgggtttatatgaatgaaagccataaacttaaggagtctataaaacaatgtaatatttatatttgtttatacttatctaggtaatgttataataaaaccatttttaattttttaaatgatgtaaaaggacatatga

SEQ ID NO: 129882 - DNA, 622 bp, Homo sapiens
tactcagccctcacatatccctatgatattttaagttgtgttttataagtatttgtaaatagtaagcattttacatctgacttacctggatatccacttttgacccaattctycccacagaatttctgtgcctgagctgatgtttgggcactgttagtagtgatctatcaaagaaagaataaaggcagactgcttcactaaaagacgctttcaacatgaaggccagtggggacatggcaagctgtgaggtgaaagttccacagtagttaggacggagacatgttgtgtgggaaccaagtcattactcagcccccacgaatgaaagaaccccaatctgaaaaaaaaaactagagcatggcagtgtggcccagattcattctgtatgttacagtgtggtttctgcaaaactattttctatcatcttaaattaacattgttaattacatgccttaattcatagctttttttaaatgtgaaaatctattttgggtttatatgaatgaaagccataaacttaaggagtctataaaacaatgtaatatttatatttgtttatacttatctaggtaatgttataataaaaccatttttaattttttaaatgatgtaaaaggacatatga

SEQ ID NO: 129883 - DNA, 603 bp, Homo sapiens
taatacaggtgaaagagtagcagaagatgaagacagaaggcagcggccagatcccaagcaagcttgcagattatgctaagaggcttctatcctgcaggccaaagagagtcattgaaatgttttagggaaactaattagatggttttgaaagtttattctatgctgtagaggatacgttgaatgtggttagaaccagaggtaggggtaccacttattatcttgcaagaaatgataaagacctagatcagcaagtggcagtgatgatttagggaaagagaaagataattagatggacatacaggaagaatgggcaggatttgcaatagcttgaatgtggggccggggggcttaaataaaggaggttcaataattaatcttccacctcacacccatttggatagccactatcaaaaaacagaaaataacaagtgttagtgaggatgtggaaaaattggaacacttctgcactgctagtgggaatatracatggtggagattaaaggagataaattaccaccaacctagaattttatatacagtgggaaataccttcaaaagtgaagatgaggctgaggcgggaggatcacttgagcccaggagttc

SEQ ID NO: 129884 - DNA, 502 bp, Homo sapiens
tctaacaggggggttatgatggcactttgggcctccaggtgtcaatgtcaattaggttcctgtgtccagtaatcctggaaatawttgggcacaccccgtttcccagtatacagctactcaagtaagtggtagtcagtccatgtgggaaaagcctggaggaatcattactgtttgtacttgctgtgatgttgcagggtctttcctcctgaagaactggcctctcactgggtttcaggtttgaaaactggcccacgtctagcaaacatgggcaagggattgatccttattattgggcgtgactgttctcagcatcctgattattcatccttgattccttttcattgtacagattgagcagcactcttgttgacttgatgccattttccataaccattcaaaactctccgcaggaagggtcttcctggttcctcctccatacttcccaatcattacggcaaatgtctaccggatggttaaacgtcaccatctggcctctaaaatc

SEQ ID NO: 129885 - DNA, 492 bp, Homo sapiens
tatatatttatggggtacatgagatgttttgatacaggcatgcaatatgaaatgaacatatcatggagaaaggggcatccatcccctcaagcatttatcctttgagttacaaataatccaattacattttttattttagaatatacaattaagttattaatgactgtagtcaccctcttgtgctatcaaataggtcttattcattctttctatgtttttgtacccattaattatcctcaccttcccttcaaccccactatccttcccagcctctggtcatcatccttccactctctatgaccatgagttcaattgttttgatttttagatcccacagataagtgaraacttgcaatgtttgtctttctgttcctggcttatttctcttaacatcatgatctccagttctattcatgttgttgcaaataactggatctcactcttttttatggcttaataatactccattgtgtatatgtaccatattttctt

SEQ ID NO: 129886 - DNA, 625 bp, Homo sapiens
tatacatcaaatataagtgaaaaaagaaaggaaaatacatctatttgtaaatctaaaaatacacgtttataaacatctataggacaaaaattacaacaaaaagttatacacattttagctgaatgacaaaatgatattgttatgagcttcagatagactcatgccttaagaaaaatttatagctttattagaaaaagagaaagatggaaaaagagctaagtatgtatgtcaataagattcaaaaataacagaggaagtctaaaaacatatagaaatggaagttaactaaataaaaattaaacatcaacaaataaaaccaacgaatccaaaaattaattctaggagaagctgctaaaactaataaacccataggagactccaagaaaagtagatagaaggcacaaataaagtcagaaattaaaaatcggatgacactacagaccctattgaagttagaaagatcataaagggatattatgattttatgccaataaatttaattgatgcaaaactatggaaccaacctaaatgcccatcaaccaatgartagataaagaaaatgtggtatatacatcatggaatactactcagccataaaaaggaataaaataatgtgttttgcagt

SEQ ID NO: 129887 - DNA, 567 bp, Homo sapiens
tgatatatctggtctgggttcaggggtatatgatatatttatgtggatcatggtcacttccatgactagctgtctttctrtaggagtagctcccaggataacttctgtagctcagcacccagaagagtgacccaaagatgcagggccagatgtccagtggggataaaaattcattctacagagccctgggctggaattctgtgaggagtagagagtggagaagcaacgtggtattaaatccacagaaccggaagtcatctttagaaaattttcccaacatctgatgtgcaaactcgtaagtagaagtttcacttctcattgaaacttaatcaaaatggaagttctctcccattgggaatatgcccaagactgctgagactacaatgataaatgcacctctgttgatggaatctcaagaaatagagtttatcaggcaaaggcacaaaccagagacagtgctacaaacagcaagtctatctgtatgcaaagccacctaccatcaataataaaaaacaaatttcaaacaatcatcctagaggaaaaactgaattatcttgctattctctc

SEQ ID NO: 129888 - DNA, 567 bp, Homo sapiens
tgatatatctggtctgggttcaggggtatatgatatatttatgtggatcatggtcacttccatgactagctgtctttctataggagtagctcccaggataacttctgtagctcagcacccagaagagtgacccaaagatgcagggccagatgtccagtggggataaaaattcattctacagagccctgggctggaattctgtgaggagtagagagtggagaagcaacgtggtattaaatccacagaaccggaagtcatctttagaaaattttcccaacatctgatgtgcaaactcrtaagtagaagtttcacttctcattgaaacttaatcaaaatggaagttctctcccattgggaatatgcccaagactgctgagactacaatgataaatgcacctctgttgatggaatctcaagaaatagagtttatcaggcaaaggcacaaaccagagacagtgctacaaacagcaagtctatctgtatgcaaagccacctaccatcaataataaaaaacaaatttcaaacaatcatcctagaggaaaaactgaattatcttgctattctctc

SEQ ID NO: 129889 - DNA, 603 bp, Homo sapiens
gatttaatcttcacagatgctaagattaagacacagactaacctttttcagtatgaatgttagtgataaacaccataaatagcaagggagtctaagtggcagtgttgtaaaagaagagatattctccccgcaaaaaaagaaattctcttaaaaagacattataggccaggcacagtggctcacacctgtaaccccaacacttygggaggcccaggcaggataggatcacttgagcccagaaatttgagatcatcctgggcaacacagggagacccctgtctctacgaaaattgtttttaaaaaattagctggacgtggtcgtacaagcctgtagtcccagctacctgggaggctgaggtgggaggatcacttgagcccaaggggtagaagctgcagtgagctatgatcacaccactgcactccagcctgagcagcagagtgagacccagtctcaaaaaaaaaaaaagagagagagagaagaagacattatataacagagattttataacttcaaaaggagagaaactgtagagcttgaacatggggtgtacaacaaccaatgagcggataaagaaaatgttttacatataacaccatggaata

SEQ ID NO: 129890 - DNA, 389 bp, Homo sapiens
tcctaaagaccccacctcttaatagtattacattggagattaagtttcaacatgaattttggagggacacaaacactcaaaccataacagttattaaaaacaataatgtcaakaaagaaaagcacacgaaaataagtaagttgctgtttgtggagcaatggacacttccatactcaggggtccttcaggggcaagaactgaggtccttgtcactgagcttggaggtgaaagctgcagcctagcttcttttccagaatttgaagggttggtctcaaatgcaaagaaaccaggagcttccttcttctcccttcatttcccaccccccaaatatcttcttgtaagaccctgccttgccatttccctataggtccccctttcaattagaagtc

SEQ ID NO: 129891 - DNA, 510 bp, Homo sapiens
tttttcagttctagaatttttatttgattcttttgaccgtttctattyctctgcctagattttctatcttgttattcattgttaacatatttttttcactactgagcataattataaatagctgcttcataacatttgtctgctaattacaatatataaataatttcagggttggtctcagttgatattccttctctcctgaaaatgtgttccatctttttgtttgcttgtaacttgggtaattttgcattgtatcctggacattatgaatataaagttatgaagattctatgttccattatttagcctcaatgaggaaaaaaattaactgcaaactgtttattttgggtggttgcttttgactcgactaaaatattttgttatcatttcagcttttagtctacactctgcatgtgtggcttaggggtcagccagagctgagagcagacagaagttggaaatcctccctcggactctttcccttcctgcattccctttctcttcccagca

SEQ ID NO: 129892 - DNA, 510 bp, Homo sapiens
tttttcagttctagaatttttatttgattcttttgaccgtttctattcctctgcctagattttctatcttgttattcattgttaacatatttttttcacyactgagcataattataaatagctgcttcataacatttgtctgctaattacaatatataaataatttcagggttggtctcagttgatattccttctctcctgaaaatgtgttccatctttttgtttgcttgtaacttgggtaattttgcattgtatcctggacattatgaatataaagttatgaagattctatgttccattatttagcctcaatgaggaaaaaaattaactgcaaactgtttattttgggtggttgcttttgactcgactaaaatattttgttatcatttcagcttttagtctacactctgcatgtgtggcttaggggtcagccagagctgagagcagacagaagttggaaatcctccctcggactctttcccttcctgcattccctttctcttcccagca

SEQ ID NO: 129893 - DNA, 510 bp, Homo sapiens
tttttcagttctagaatttttatttgattcttttgaccgtttctattcctctgcctagattttctatcttgttattcattgttaacatatttttttcactactgagcataattataaatagctgcttcataacatttgtctgctaattacaatatayaaataatttcagggttggtctcagttgatattccttctctcctgaaaatgtgttccatctttttgtttgcttgtaacttgggtaattttgcattgtatcctggacattatgaatataaagttatgaagattctatgttccattatttagcctcaatgaggaaaaaaattaactgcaaactgtttattttgggtggttgcttttgactcgactaaaatattttgttatcatttcagcttttagtctacactctgcatgtgtggcttaggggtcagccagagctgagagcagacagaagttggaaatcctccctcggactctttcccttcctgcattccctttctcttcccagca

SEQ ID NO: 129894 - DNA, 548 bp, Homo sapiens
cttttactgcaacatttacattgcagaatattggacagaatctaaatttccaacaacacaacaatagggaattgggtaaatgaatgataacaaagtcatacaataaaatatttttcagttataaaaatgatgctgtagaagggcaggcaataacccggagagggattaaagcatattaagtgaaacagcaagttataaaacatgtacacttgattaagttcttgctgggaaatatccacttatcatctcttcccctagtctgccattaatcatttgcctgttcaaggagagacaccaaactgctagaactggttatctcaatatagaaagatgatgggtcgttttaagttttatttttcttttgcttatttttaactctgtagtatttttctatgttggatatctcttacttttaaaataagaaagatgttatgtactatcatgagagaaagcgagggtraaaactagcatgtgctggcatgctagggagagggtgtctgtgagatggcagagagagcattcattcagcaccaggctagtggcttagg

SEQ ID NO: 129895 - DNA, 613 bp, Homo sapiens
acctgcccacaacccctattcccattacctttttggagtcatttcctactaccctcctctcaccctgytccaaacacattgatttccttgcttgaccctgaacatgccagggaatactatcaaagggattttgctggctcatttcctcaacctggaatactcttcctccacagatctgcatggctgttttacctccttcaagtttttgcttaaaggtcaccttctcaaagaggtctcccatgaccccattattctaaattgcacctcttctactctacactcttgattgctcataggttgctctattgttttctacagctcatatcaccttgtaatgtacagaataagtacttatttattatgtttatagttcattatatctctgttccattaactagaaacccaaaatgagtaccttgcctatatgattcctctcaagtgataacatctctattctaacataacatatagagcaatagataggagacaatagataaggagagatcatgttcatgtacatatagagggtgggtaattaaaaaatctgaaaggcaatgtttgaatttagttcagtttttaaaatgcatcttcttatctcaaaaagcttagaaaa

SEQ ID NO: 129896 - DNA, 574 bp, Homo sapiens
ctatgaacaactttcttaagaaagatctcaaatcaataacataactttatcactccttaaagaagagaaaaagaaaagcaagcagaaggaataataaagatttgagtgcaaattaatgaaatcagaaatagaagaacaatagataaaaatcattgaaataaaaaaattgcttctttggaaagagcaacaaaattgacaaaattttatctagatttaccaagaaaaaaagagagaagactgaaattacyaaaatcaggagagaaattagatactttctagatagtactaccaaccttacagtactaaaaaagattttaagagaatactatgaaaaattgcatgccaacaaattagataacatagatgaaatggacaaattcttagaggcacataaactaccaaagctgactcaagaagaaatataaaatctgaacagacttataataagcaaagcaattgaatcagcaattaggaaaaaaaactttcaacaaaaaaagttcaagattagatgacctcattggtgaaatctaccgaatatttaaagaattaacaccaaaaatagaagagaggggaa

SEQ ID NO: 129897 - DNA, 568 bp, Homo sapiens
agacataatgctagatttttatacacctggaaagagataaaaagtagtttagaatttctcttttttaaaaaaaatgtccaaattgcatcctatgagtgactaagcagcattattaagagcctttataaaacagcagacagcccagaggtaccttacaatgatagcaatgaaacaaagcaatttttaaattgatttagcaaaatgcttagttactatttcatggtaggcaaaagaataataaaccttaaaggaggaatcatcctaagacactatgaaaaataaaaccagcatgaactcattggttgctgtcagcccttgtttttatggcttgtgtatgaatgttggtaagagagagtgagagaacccgttggtgggcttttggctgaagttggatgcatgtcagtagggatgtccaagtctgtcagtagtcatggtctctgttttgcagagaatcacattttattaactgtacaataggaacactctggctcaaccctgtctcctctctccaatgtagacacagtggtgtgatggagctggcttstattgtccccctaccgccaattgt

SEQ ID NO: 129898 - DNA, 544 bp, Homo sapiens
tctgtaagtaatgcattcagaaaacaggttttgagcatgtaccctagaacaggctctgcactagggctggggaaaattggtgagcaacacctgccagccctggggcatggtggagtagatggagtgagggatcgctcccatgggggtgtagttgcagggtgtgataagggccatgcaagaatgccaggagaatgtttaagagcaaccttatctagactggggatctcagaaaccttccctgagaaagctactcagctgcatattgaaggaggagtggattttaactaggagaagggggaggaagaacaccccagctagaaggaacagcatgtgctttagaaggcgacctgtcttaggggagaggrtgagggctcagctttgaatgctgtctttgccacttattagtaatgtgatggtaaaaagagaaaatcatgtgatgcctctgggccagtgttctggggccttttaggcaattatctctgcagttgcttatagaaaacaggcctcacattccaactctcaggggctcatctgagggtgctct

SEQ ID NO: 129899 - DNA, 607 bp, Homo sapiens
ctgaatattggcaacacgctgatacttttggtccctgatggtattaccacctcagacttggtagatgtgaaatgtgtatattgaaatgtgtatattgctctctgacatagagctcctgaaactgtgtaggtaagggcactagggaaatcttttttttaaatttkaatttggtctctgaccccagttcctgatacagagctcctaagacctttgcaattaatttcctgaatggtaggagtgagagatgcagagcttctaaatcctttgtaatttacttggtgataggagcatcttttgttctaatgagatgatccttggggggctcctggacagcctcaggatggagaggggctccattgctagaggaaccaaccatgtaattagagggttggactttcagcctctccctctagcctccaaggaggggagaggggctgaaagttgagttgatcaccaatggctggtgatataattaatcaggtctatgtaatggcacctccacgaaaaccccaaaggtcagggtttggggagcttctggatagctaaacacacaggggttctggaaggtggtgtgcctgggttctggaaggtggtgtgcctggagagg

SEQ ID NO: 129900 - DNA, 520 bp, Homo sapiens
tgtcctaatgtaattgatctgggatgaagtctgggcatcaggaagttccccaggtgatcctaacttccatttgtgaccaccattagtccactgaagcataacaacacatgaatacaattactctgtataaatatgatattcagcttggatgtttccaaatcattaagcaaatgcaatgtatagggtattctgttagtcactgagaagagaaaaaaagaggacttkgaaaggatcagtgaaaagtcaaaagattatcacagaagcctaaattgagagacttaaaggaagggttatgtcaatccacccactcactcacccatgtatccatccactcaatctcccaatagtcctctgagtagtaaatgttaaacaccatactcctgcagaaggtaaagaaacagaacagtgttcccctctagtagcctatatttgagttggtgtgtgtatgtagcgagagagagaaagactatgagaggatgaaactgatgactacaatttcatgttgtaaatgcagtgatgg

SEQ ID NO: 129901 - DNA, 581 bp, Homo sapiens
ttggacctttgctccctttttgctatggtttcaatgtctttgcctcctccaagattcatgttgaaacttaatccccaagacaacagtattaagtgatgtggcctttaggaagtgattcggccataagggctccaacctcatgaatgtatttgtgccccatgaaagggcattgagggggtgagtttgccccttctgtctcttttcgcatgtgaggacatagcattcatgcttccagaggatgcagtgttcaaggtaccatcctggaggcagagactgggtcctcagcaaacatcgaactgctgatgycttgatcttggactttccagcctccagagctgtgagaagtaaatatttgttatttataaattacccaggctcagctctgttatagtaacacaagcagagtttctgatctcatcttatgcttcttttcctctctctctctcttctccagcaactctggcctctttgctgtcttcagattgccaggcatatttcaagatctttgcatttgctattccctcttcccagaatgtgattccttcagatagtcatatggttcagcccctcatctcattcaa

SEQ ID NO: 129902 - DNA, 566 bp, Homo sapiens
caaatggaaggaaaggtattataaaatagaagcaagctttaaactggttatattaagtaccatattgtgttaaccatgtgaatgagctcatgccttctatcactgagagaggcaattggcaagggagaargccacccagctggaggggcactgggaggacagtgactctgcacctgcgcggagcaggtcagtcagtgctggaagggcccaggcatgtggttctctgtccaagtctcaattatatcatcagatggctatttctcaatttcctttggtgttctttccatctgtttactctctcctgctctccagcagttcttccatcattgctgtaaaatgcattctatttggcgaggcttatttgttcagattgagttaagagatgggatgacttccaatttttaagcaatgcccagtttttcttaacacattcaggtagatttattctgatgtcctttagctgtggcttcgagacctcctactttgaaatttctttgtcattatattcaggattcagaacaaacctttgggcacattttttcctcctttgtaaattatgaaagctc

SEQ ID NO: 129903 - DNA, 521 bp, Homo sapiens
gtttctggcctccagggctgtaagcaactccaggtcccttaacaccgagagtctgtccttaactcaggaaagcaaggaaattcgaaaccagagctcaagatgcttgtagaataagaatttgtggtgttgactttagccctgccaaggaggtgttaacctaagtggccactgaagtttctgctccagcatctggagtcgggcttgacactgttcctcaggcccaaacagcagacaggggtggcaaataaaacccactgtaccacacatggtggctgggagatcccacaccrgtagaagccacgctggaaggagcatgaggaaatcagtctgtcttctgttttatatgctgttctgctctaagggatactgttactttaatttttcttgctgtaaattagtacagagttgaaggagactgaagttattaggaatcaccttttctctaccacctattgtcaattcccacagggtgttagtactcagtaagtccttgataagtgattatttgatgaattaacaat

SEQ ID NO: 129904 - DNA, 521 bp, Homo sapiens
gtttctggcctccagggctgtaagcaactccaggtcccttaacaccgagagtctgtccttaactcaggaaagcaaggaaattcgaaaccagagctcaagatgcttgtagaataagaatttgtggtgttgactttagccctgccaaggaggtgttaacctaagtggccactgaagtttctgctccagcatctggagtcgggcttgacactgttcctcaggcccaaacagcagacaggggtggcaaataaaacccactgtaccacacatggtggctgggagatcccacaccggtagaagccacgctggaaggagcatgaggaaatcagtctgtyttctgttttatatgctgttctgctctaagggatactgttactttaatttttcttgctgtaaattagtacagagttgaaggagactgaagttattaggaatcaccttttctctaccacctattgtcaattcccacagggtgttagtactcagtaagtccttgataagtgattatttgatgaattaacaat

SEQ ID NO: 129905 - DNA, 479 bp, Homo sapiens
atgtcatgtgcttataaactatttctttccttttcatcttttgctttcaaggaccacttagtaacagtttctaaagaaagaaactgatttttttttcacatcttgcttaagatgttctcaattgatgtgttattagcaactcagtgattcttgacttttgagaagtcacagtttgttttttttttcattgtttgtttttttgagattctgagagagttgagtctccttttcccggaaaaatgcactcctacctttgcctacaacaggggattctctgcctggggtgcaggtcagtggacaccrggtcaagaaattctgtttccttcctccctccctccctctctctcttcaactgttatataaatattttttgagccctattaaatgctaggcactgtgctctgtgttacgattacaggggtgagataaacagcatgattcctgtcttcatggagtttatagtccagttaatgaagaag

SEQ ID NO: 129906 - DNA, 507 bp, Homo sapiens
tttgccagtgttgagtacaggaaacagcacaagacaaaacaaataaataccttttcagattacaacatggatctgcaagacttggtagagatttgaaaatattaataccagtgagaggcctgcattgattccataagtccaattattaacggtgctattgacgggttaatggagattgtttgtctttcgatatactgatccctggcagattagacctacatgggggttgtacacttctgtttttttcagtgttgtgaaatgaacctggctctgtagaaatggacttgcatcataaccttagataagctaaggaggcatgtggaacyggtctcatgaattgttccctcattgtgaagtcaactcattcctggagcccacagcccactggctgaggtcacacagtttccatgttaattttctttcactgtcctctcttggtcaccaatcttactgggcagtattcttcacaatgctggaaagcattatgacatactgagtgacatacag

SEQ ID NO: 129907 - DNA, 611 bp, Homo sapiens
ttaggatggaaaggtttagttgtgtcgtagggagatctgggatgagctgcatctgggaagggttttctatggaagccaaaggtgcaggcctcaagccccaaaactattctttccaatctggatcagattgttttttaatttataatttataattggagtaataaatgcattcaaactgaataatcagacaaaattatraagaattaggtatggaacaattgatactaattttaggattgagagattgttgtaggtctctggggttaaagtctctcaggggagatttacatgaactcaagaacttgtgtagaaagataaagatggcttttgcccttaaaatgtttccaagagaaaaagtccttctggttcagcagttttcttttaagttcaatggctgaacctgctttgaaagcaaaacaaggaaagtaaatgctgggatttccataagaaagattgatgcttaaattagttttcagtgacatggtcctgttaacaacttgttggaaaaattattgaggagaggcagctttttattattttttcgtaagcgtttatggaatctcctgctgtttcatagaatttcaaatgggaaatgagagactcagtagcat

SEQ ID NO: 129908 - DNA, 565 bp, Homo sapiens
acgtccttgttagctgtgttcaattggagtaaatatctagatcatgaaycaaggactcctagagatgaggtcaactcctggggtatatgtatttcttgggcagaactgcacattggtgtcacctgggagttttctgatgccctggccacactcaggacaatttagtcagaatcttctaagctgtggcctgggcatcagtgctatttaaatctccctgatgattctaaagtgcaatcaggagtgagaaccagcagtggagaggcctggtcttctttcacgtctgaactccactctcatctcctggattatagtttaacttatgattttgctcagtctgagccaaattcatggatgattgagcatctttctttcccttaacttcacattatccttctctgttaatcaaacacatttagattctcctaaatatgtttatattctaagaatagggctgttctttaatttgaaagcatcattttttcataattttcagctaattaggatccacattagatttttgtttgtacttaaaggaatgcatgtagacttcttttgggttgagact

SEQ ID NO: 129909 - DNA, 482 bp, Homo sapiens
cattcttaatttgtaattatttttacactcaactgtactgaggtcagagagtttcaaaaattaatgagattccctgtggagttcaaatagtaatatctacgtgagctgtcacaaaaagataagattatgatggtatgttttcaacatagatttaactgtcttatttggaacatactccatttgaaatatatatgaaatgtacaatagtttatggaagcctatatgtttttggaaattagttggttttttttaatgatgaggagaaattgactcaaaattagactgtagaggatgaacactttgtgtagagatattactaaaacttaatagacattgttatggcaatagagaatatcttatactttcgaggaaataagaaataatgaatgagtcgcacgctaaaaagaaatctgcaaatgtgttttcatttyaagtaatacaaaaaaactcagcagatatttatagtgaaacattgctggcat

SEQ ID NO: 129910 - DNA, 588 bp, Homo sapiens
gagtgctactgcctttcaagttcattataaattactgaattcttcacagtactgtcaatttaagctcttgtttcactaaaaggcaggcatcttaaccactcatcaaacctgtgcacatttttgaattaaggaattagatcaatccaaactccagttctcaagggagaagttccattgtttatcaggccatgtctacactggctgagcaaagcgctctgttcagaaggagaagcgcctttggcagctagagtccacatagctgacccatggacgctcgggtggagtttcttcacctaattacacagtgcaatgaaattactgaacatttgatgaaaatgacccatgacgacaaaaaagccatgacacgattgttgttctaatctattgacatggtagtcatttataatgtaattcaaagaatctataagaatgagaagatgcttacacttacagcagatgatgcatatgggtatygaaatacttgataactcaacatttggtattgcccaagtcattcttcctaaacaagacaatggtggcacaattttaaaatgcaatacctcttcccaactggtccaggttaagctc

SEQ ID NO: 129911 - DNA, 546 bp, Homo sapiens
agtggactaaggtaaaacttgacttcagaaaatttcaaaagatcagaagaatacaggcaggactgacagcagtgagtttaaattgcagcaagaaaaactaacattggttaccaggaaaggattgccagatggaagagagagaagcaaagaactttatagaaaagcattctctgcaggcctggaagatgtagaatctaagatttttagagttaatgtggtaggcaaaattccagaatggttccctaagatattcctaattccgtcaacagtgacggcgatgagacatcatgcctctgactgtgttacatgacgtggcagaaggcatttcacagatgtcattaaggttactaatcaattgacttttatttaatccagaaggaaattatctgggtgagcccaacctaattacatgagtccttttaaaacactgtgttttcttgggctagtaacaggataaaaagctagaggrattagaagcatgagaaggatttcacctgctgttgctggcttgaagatggagaagaccacaggataagagatgtcagt

SEQ ID NO: 129912 - DNA, 533 bp, Homo sapiens
acagtaataggtatattttaaagggtgtagctgaattttgtttttctcaagttcaaamtgagttaagaatgtcacatagctcctttaaaatgttcatagtattgaaaacaaaagatgaaaatattattgcatcccaggtgtcagtccttctgtaatgtgcataggtctaaaaaacatcagaaatatcactatcaattctaagagggacatggtacaataaagcactgaaggtaatatggtttggctgtgtccccacccaaatctcatcttgaattgtagctcccataattcccacatgtcatgggagggactcggtgggaggtaattgaatcaggggggtgggtctatcccacactgttctggttatagtgagtaagtctcaccagatctgaggttttataaacggaaattcccctgcacaagctctctctttgcctaccaccgtgtaagatatcccattccctttgctcttccttcgtctttcaccatgattgtgaagcctcccaagccatgtggaactgtaagtcaattaa

SEQ ID NO: 129913 - DNA, 502 bp, Homo sapiens
atgaatagcatgtgcaaagccctgcagcatgaaagaggttgtggttgtagaacaaaaagactgctgggatgaggcatctcagtagcaagccgaggataagagggtcttgagatgagagtgggtacagaccagatcatggagacatttacaagtcacggttaaacagtttggatttcattccaagtttcttaaatggcatattgtcacaagaccaaaagagacctttgggactcattccatctgtcaggtaggaggtaattcttttkctttttatccatgcaccaacttctgtaagtaaacttgactaatgtttgtttataatcagtgagtaagctgctactttaataccgctaccctggaagaggcccttcaaggcatgttaaattaactgatgtgaataaaaacaatgaataaaaatacctctctcctttaatgagaacagcgacttctgtttccctgagctttttcagtcccataagaccttttaaaacagagtgagcat

SEQ ID NO: 129914 - DNA, 678 bp, Homo sapiens
aattttaaccttgtttgaattaattatctctttaaagaccctatttccaaataagaccaacattcagaggtagagaagattgggacttcaacagatctttttggagagacccaattcaactcataccagtaagatatggaaaggagttggattttattctaagcacccatgtgaaatgcctggcacagtgcctggcacatggaaaacaataaattttagtatcattattatgcagagaatttatttaaaaatacaaaatttaacaggagagtctttaaaaacatgaaattggattatgtcactgctctggctaaaatctctcaatggcccccttttgtactccaaaaaaattccaagtcctcacagggccttcaaacccgctacggtctgagcccttggtgatctcagacattgtctcccaccagcccccacctgctccgtccactccattcaccctggtctccttgcttgtcctcaatcaccccaagctgcccctcccacctcagagcctcttcctgtttgttgcttctgcctggaatgcttatctcccaatattggcaaggctggctctgtaatgtcatccaggcttcacctcaaatacctcccaacytcgcccagagaggctgtctccaagagccctctttaaaataatgcccacatcactttctatctccttct

SEQ ID NO: 129915 - DNA, 573 bp, Homo sapiens
aggctactcccatcttgtggctccattatattgagattttagtcaccctagcattacccaacaccagacaggagaaasacaatgagaatggaggattacatatggaaatttctttctcagccatgctgtaaagtggcttatattatttctctatatattccattcactataacccatcaaatggcccaacaaactgcaagtaatgatttactggggaaaatacctgtgaaagataaagtaagtaaggctgggaaatgtcatttcttcattgtgtgaacatcacagagtgcacttacacaaagctagatggtatagcctactacacacccagattatatgttatagcctattgctcctaggctacaaacccatacagcatgttactgtactgaatacggtaggtgattgtaatacaatggtaagtatttgtgtatctaaatatagaaagggcacagtgaagaaattacagtctaaaagataaaaattgcacacctatacagggcagttaccatgaatggagcttacagacctggaaattgctctgggtgagtcaatgagtgggtggtgagtaaa

SEQ ID NO: 129916 - DNA, 573 bp, Homo sapiens
aggctactcccatcttgtggctccattatattgagattttagtcaccctagcattacccaacaccagacaggagaaagacaatgagaatggaggattacatatggaaatttctttctcagccatgctgtaaagtggcttatattatttctctatatattccattcactataacccatcaaatggcccaacraactgcaagtaatgatttactggggaaaatacctgtgaaagataaagtaagtaaggctgggaaatgtcatttcttcattgtgtgaacatcacagagtgcacttacacaaagctagatggtatagcctactacacacccagattatatgttatagcctattgctcctaggctacaaacccatacagcatgttactgtactgaatacggtaggtgattgtaatacaatggtaagtatttgtgtatctaaatatagaaagggcacagtgaagaaattacagtctaaaagataaaaattgcacacctatacagggcagttaccatgaatggagcttacagacctggaaattgctctgggtgagtcaatgagtgggtggtgagtaaa

SEQ ID NO: 129917 - DNA, 573 bp, Homo sapiens
aggctactcccatcttgtggctccattatattgagattttagtcaccctagcattacccaacaccagacaggagaaagacaatgagaatggaggattacatatggaaatttctttctcagccatgctgtaaagtggcttatattatttctctatatattccattcactataacccatcaaatggcccaacaaactgcaagtaatgatttactggggaaaatacctgtgaaagataaagtaagtaaggctgggaaatgtcatttcttcattgtgtgaacatcacagagtgcacttacacaaagctagatggtatagcctactacacacccagattatatgttatagcctattgctcctaggctacaaacccrtacagcatgttactgtactgaatacggtaggtgattgtaatacaatggtaagtatttgtgtatctaaatatagaaagggcacagtgaagaaattacagtctaaaagataaaaattgcacacctatacagggcagttaccatgaatggagcttacagacctggaaattgctctgggtgagtcaatgagtgggtggtgagtaaa

SEQ ID NO: 129918 - DNA, 628 bp, Homo sapiens
tggaacaataggctctcatggctgtttcctcctctctctgtcactatttcttactttatttttctagctcttctttcttttccttcctctgaatctgttgttacttgttacttctctttctctattattctttgaataatagtaagaagaagaagaataacagctgtcattaggtaagcaactgttacattgcaggcaaggaayggtgtttcctgatgtctttgtccttcctcccaccagtgtgttccttcagctcacctccagccagcacatcagcctcttttattcctagaaaataccttacttgtattgctagtctcatttaacctctttataactatcaggtaaggtcaaacttattatttccattttcagataagaaaataaaggcccaaatatattagattagttcccatggacctgactggtaggtgacacagatgatattcacacactgatcacacactgagattattctctttccactagaacaggtatgggtaaattactgcctgtgggccaaatcagaccccctcacctgcttttctatagcctatgagctaataatggtttttacagaaaagaatcaaagaataaatgataatgttttgtgacatgggaaaattat

SEQ ID NO: 129919 - DNA, 568 bp, Homo sapiens
tgaatttcagcttatatagcatcgtcaacaaagaagagtaaatttttagaggaatgacaagaaaatgaaaagagttttgaatctctagggccattaaattgtgagaaggcatataaattatataaatatagatttctttggtgttatctccaggtctacaagggtctaaagttaacttttgttctccctggcagagaaaggaggtgggatatcttttggttttattaatttgtgttcagcttttaggcaaatgcaggggtaaacacaagagttttcctgcatctgcttctttttaattgccatcagtgcacagtcactatgccaaagaggtatattttggggtgacatattctggcctctcacactcttaaatctatctgacagttttaaaatttcagttatattttcaattttagaatttatatttgttttctttttacttgctcaatttmcctgctgaagtttcctacctttcactcattataagcattttttttttactttattgcagggtcataataatggctttaaaatccttgtctgatcagtccaatatttggattatttg

SEQ ID NO: 129920 - DNA, 440 bp, Homo sapiens
ttaatagaaaaatgttatataacaatattgatataaggtgttataggaacataaatgaggaagtaagcaattctatttagtttgtatatataagtcaatgtgttataaacctgagctggttttttaacgttaaatatgtaaccactaaaatatctatttgtcctaaaataattccttaattttataatgtgctttatccatttgcaatgtaacttttcacaacaatgtaacttctgattaggtgycttttcattcaatctgtgctgtttcccctggcctctgaaacatgggcacagccacatacacacacctgggcacaaatgcatatacacacatgcacacaccacatactctcagacaccagaagtgtctcccagcgatcattctccttgcttcagtcagagctatcaccacatgtatctgggcacatggctgcccag

SEQ ID NO: 129921 - DNA, 546 bp, Homo sapiens
agtatctgttgagtgttccttgtatactaggcgctgtgtaagtaatgttcatgggtgacctcattttaccctcacagctctatgaaggcgcaatagctttcattttacatgtgaggaagcaagtgctcagggaagttaagggacaggccaaagttactcatgcatgcagaggtgcagaatttaaatccagccctgtcttccttttttttttttttttgagacggagtctcactctgtcacccaggctggagtgcagtggcgcgattgcggctcactgcagctccacctcccgggttcacgccattctcctgcctcagcytcccgagtaactgggactacaggcgcccgccaccacgcccggctaattttttgtatttttagtagagacagggtttcaccgtgttaaccaggatggtctcgatctcctgacctcatgatccacccgcctcagcctcccaaagtgcagccccgtcttccttaaatgcccggaaacattccgtgctattctatggtcccctaattacaaactgaaacctcatgtctcac

SEQ ID NO: 129922 - DNA, 546 bp, Homo sapiens
agtatctgttgagtgttccttgtatactaggcgctgtgtaagtaatgttcatgggtgacctcattttaccctcacagctctatgaaggcgcaatagctttcattttacatgtgaggaagcaagtgctcagggaagttaagggacaggccaaagttactcatgcatgcagaggtgcagaatttaaatccagccctgtcttccttttttttttttttttgagacggagtctcactctgtcacccaggctggagtgcagtggcgcgattgcggctcactgcagctccacctcccgggttcacgccattctcctgcctcagcttcccgagtaactgggactacaggcgcccgccaccacgcccggstaattttttgtatttttagtagagacagggtttcaccgtgttaaccaggatggtctcgatctcctgacctcatgatccacccgcctcagcctcccaaagtgcagccccgtcttccttaaatgcccggaaacattccgtgctattctatggtcccctaattacaaactgaaacctcatgtctcac

SEQ ID NO: 129923 - DNA, 533 bp, Homo sapiens
acagtaataggtatattttaaagggtgtagctgaattttgtttttctcaagttcaaactgagttaagaatgtcacatagctcctttaaaatgttcatagtattgaaaacaaaagatgaaaatattattgcatcccaggtgtcagtccttctgtaatgtgcataggtctaaaaaacatcagaaatatcactatcaattctaagagggacatggtacaataaagcactgaaggtaatatggtttggctgtgtccccacccaaatctcatcttgaattgtagctcccataattcccacatgtcatgggagggactcggtgggaggtaattgaatcaggggggtgggtctatcccacactgttctggttatagtgagtaagtctcaccagatctgaggttttataracggaaattcccctgcacaagctctctctttgcctaccaccgtgtaagatatcccattccctttgctcttccttcgtctttcaccatgattgtgaagcctcccaagccatgtggaactgtaagtcaattaa

SEQ ID NO: 129924 - DNA, 535 bp, Homo sapiens
cgtttggcttgaacaatttatttagcttaaaattcttctgattggcaatttgggctgggcttagctgggtggtttttccagccttggctgggcttccttctatgtcagctgcaggttgggtaggtggctttgatgatcttggctgggcaccgtcccatctctagactaaaactgagctcattcaactctggtccatatggtctttcatccttcagtagggctggcctggrcttgttcagatggcagttggtcagggtgccaagagagtcagaggaagcatacatgaacttcacacagtgaatcttgtcacttccacttcattatattttcaaagtaattcacaaggccagtctgggtttaaaagatggagaagcagatttcaccccttgatgagaggagctacaaagtctcattgcaaaagggagtggatattgggaggtataagcaattgcagccatttttgtaagcacgctcccacatctggtaactaagcctgcatttctgagtggcaataatcatctgtgtccaagttaca

SEQ ID NO: 129925 - DNA, 389 bp, Homo sapiens
aggacacacattgactctcatgcctgaacttagggcaacatgtaggatcatgggtttataccatcagtaagttctcagagcaggtttcactctcatgcagatcatatgaagctcttacatggcacaaggggtgtcttatagagacccaccacagaggtaacattgtgactcttctatgcacacacaacatacagtcaggaatgtcatcttcccatatagacatagcccattattcaggttctgaatatcacatccagatcagttgaaagttgacattgtgactctcawacatggatcaatttcacaggtagaatggtgacttttataccaatggtgagtttgggtataaactcaacacaactgtgaggcagtgactgccctaattggac

SEQ ID NO: 129926 - DNA, 639 bp, Homo sapiens
attcaatgaaaatatacagatataccttggagatatatggcttttgctctagacaggtactataaaataaatatcacaataatgtgagtcacacaatttttcttctttcccagtgcatataaaaatcatgtttacactacaatgtagaataagactgaaatagcctatgtttctaataacaaggtacaaaccttgacaaaaaatgtactatattgctaaaaaaggckgacacagatatacacacaaaaaaatcacatgatgctggaaaaatagtgttaatagagtcgctcaatgtaaggttgcaaaacaccttcaatttgtaagaaatccaatatctataaagaacaataaagtgcaataagactaggtacgtctgtgtaacaatcaatgttcactagtaatatgcctagaaattatacataaaggatgtttgcatacatataaaagtaattgacaacttacatattggatgggagataaaaattacaaaatgatttttaaagtgaattaaagggtagaccaaaacattcctgagtggacagaatcagttagacatcctcagtgacctcttcttgttgacttgcaaacaagcaaaacataatgtgagctaatttttttgtgaatgcctgtattaaaaaa

SEQ ID NO: 129927 - DNA, 639 bp, Homo sapiens
attcaatgaaaatatacagatataccttggagatatatggcttttgctctagacaggtactataaaataaatatcacaataatgtgagtcacacaatttttcttctttcccagtgcatataaaaatcatgtttacactacaatgtagaataagactgaaatagcctatgtttctaataacaaggtacaaaccttgacaaaaaatgtactatattgctaaaaaaggctgacacagatatacacacaaaaaaatcacatgatgctggaaaaatagtgttaatagagtygctcaatgtaaggttgcaaaacaccttcaatttgtaagaaatccaatatctataaagaacaataaagtgcaataagactaggtacgtctgtgtaacaatcaatgttcactagtaatatgcctagaaattatacataaaggatgtttgcatacatataaaagtaattgacaacttacatattggatgggagataaaaattacaaaatgatttttaaagtgaattaaagggtagaccaaaacattcctgagtggacagaatcagttagacatcctcagtgacctcttcttgttgacttgcaaacaagcaaaacataatgtgagctaatttttttgtgaatgcctgtattaaaaaa

SEQ ID NO: 129928 - DNA, 581 bp, Homo sapiens
ttaagacaaatgacaatattctttggtgtattaggaagaatgaaagtattctgatttggctcgagaagggacaacataaatgggagtgttctgatgacaaaggcctttgaatgtcatgcttaagggtttggattttattccattgctcccaaagcatgtaaaaatgtttgtagcaaggagtgatgtgacagaatatttgtttttgtaaagatcatctggtagcagtttgcaagatggtttggaaaagaatttgaatggaagtaagacaatcattcaggagcctgttaccacaatggaagtcgaagatggaaggtccttagacagtgagagaattgagatgagggagatgtatttgaaagacattgatttgagaaatgaatagaatctttcaggaagcttagctgaattgcatataatcttcacaataacgtttttcttgagttggcrttgaaaaccttgaacagaaaagcgaactaattttagggatacaaatgtttttatcagttttaaaggcagcgagattgggagaaagaaagaaagtttttccttttcaaagaataattgaatcaaatggaaattaa

SEQ ID NO: 129929 - DNA, 429 bp, Homo sapiens
tttttcatcttggaatcttttgggagaccgtatgccccagtctttttgttgtgggattatttgggatactgtattcaccagtctttccatcttggaatgttttgggagattgtatgctccagtttttatggcttggaatcgcttgcaatgccctatgccctagttatttcaccttggaatattttgggatatcaaatgccccagtcttttgtcttggagtcatttgcagtgttgtatgcgctagtctttttatcttggaattatttggtggactgtacaccccaatgttttcatcatgaaatcttttgggaaacgctatgttccagtcttttcatcttggaatcttttgtagtgccatacgmcccagactttttgtcttggaatctttaggggcagcttatgccccagtcttttcattttggaattctt

SEQ ID NO: 129930 - DNA, 540 bp, Homo sapiens
ctttgagttgcacatcaaatctggggctgatcacgccacacttgtttagcctgcctgtgrggcagctctttgatcatcaatgatttcagttttgccagtgtaaccatgcttcatcatcatagtgaaaaactggacgatgacttcagagcacagcctaataagaacctgagttcatggcctctcttttcagcattgtcgatgctcttgagagcatcagccaggacattcatgtgcaccattgtggcggtgcagaaagataaaggcaagaggacaggaggggagagcgcacagaattattgagatatatttttcttattgatttcattttggtcacagagcatactttgtataactcgaacccttttaaattattgaaattcgttttatggcccagaattggacgattttggtaaatgtttttttgtgtaccaaaaaaaaaatgtatattctgccaatcttgggtggacctggaaactttctcaagccagtaggccggggcactcaaagagctcattttgtttatttcctgtctctcaggaa

SEQ ID NO: 129931 - DNA, 551 bp, Homo sapiens
gtctttaaaaataaagaaataaataatttaaattgaggtataatctacataaagtaaaattcactttgttttggcagtgtacaattctatgaggattgacaagtgaaataccaccatgataaagatacagaacagctccatcaccctcaaaaattcccttgcgtccttttgtaatcaatcccttccttctaawttttttttttttttttttggaaacggagtctccctctgtcacccaggctggaatgcagtggcgcaatcttggctcactgactgcaacctccgtctccccaggttcaagcgattctcctgcctcagcctcccaagtaggtggaactgcaggcatgcaccactacacctggctaatttttgtatttttggtagagacagggtttcaccatgttggccaggctggtctcaaactcctgacctcacgtgatcctcctgcctcgactgcccaaagcgctgggattacaggtgtgagccactgcacccagcctcgatcccttccttctatttgcccctgccccctgtatacgcagcgatcagtt

SEQ ID NO: 129932 - DNA, 551 bp, Homo sapiens
gtctttaaaaataaagaaataaataatttaaattgaggtataatctacataaagtaaaattcactttgttttggcagtgtacaattctatgaggattgacaagtgaaataccaccatgataaagatacagaacagctccatcaccctcaaaaattcccttgcgtccttttgtaatcaatcccttccttctaatttttttttttttttttttggaaacggagtctccctctgtcacccaggctggaatgcagtggcgcratcttggctcactgactgcaacctccgtctccccaggttcaagcgattctcctgcctcagcctcccaagtaggtggaactgcaggcatgcaccactacacctggctaatttttgtatttttggtagagacagggtttcaccatgttggccaggctggtctcaaactcctgacctcacgtgatcctcctgcctcgactgcccaaagcgctgggattacaggtgtgagccactgcacccagcctcgatcccttccttctatttgcccctgccccctgtatacgcagcgatcagtt

SEQ ID NO: 129933 - DNA, 551 bp, Homo sapiens
gtctttaaaaataaagaaataaataatttaaattgaggtataatctacataaagtaaaattcactttgttttggcagtgtacaattctatgaggattgacaagtgaaataccaccatgataaagatacagaacagctccatcaccctcaaaaattcccttgcgtccttttgtaatcaatcccttccttctaatttttttttttttttttttggaaacggagtctccctctgtcacccaggctggaatgcagtggcgcaatctyggctcactgactgcaacctccgtctccccaggttcaagcgattctcctgcctcagcctcccaagtaggtggaactgcaggcatgcaccactacacctggctaatttttgtatttttggtagagacagggtttcaccatgttggccaggctggtctcaaactcctgacctcacgtgatcctcctgcctcgactgcccaaagcgctgggattacaggtgtgagccactgcacccagcctcgatcccttccttctatttgcccctgccccctgtatacgcagcgatcagtt

SEQ ID NO: 129934 - DNA, 599 bp, Homo sapiens
caatctacctctttaaccctaaaaatacccatgtgcacccatcttgaaatacatagaacatacccatcctttccataaaagaaggcaatgacccaaccagtaactgcattcagcttaaatccagagtgtatgactggtgcccagtcctctccatcaggcccagatgcagctcttagtggtcaggtgatctatacgctaatagtaagttatcttcccatcacatacctaaaattaaaatggtagagaagaaacaagataataacaatttytaaagactcccatttggaaatggggagaaggggaaatgcccagaagtcactggcccataactattatcatatcccactgggcaggaatagcaaaggctcctgtccttgatagtgaagtcgcttccttggttggacactctggcagcttctcactctcctttctgagaataattcccttgtccattggccctggttttccctctcctttatccatcatcctcttgaccacatctgaaaagggccttggagggcacacacaatctcctttcccacactcttcctgctaatgcagcttctggaacacaggcattactctacagattgctgctc

SEQ ID NO: 129935 - DNA, 516 bp, Homo sapiens
tacctgtcctcccttcctacccaccccaacctcagagcagtcggcaacatcggtgagcaagctggctaggaggaaaacacttgtaaggtcaggtgagaagtcaaggcttcccaagtctttctccctaactcagaattgtaggcaagagaaagagaacaggagaggttttcattttaaatagaattggaatttttcatgatttatctggaattgcacattycatttctgtggttctcaaccctgtctatccatctggaattcctgggaagctttaaaaatactgatgtctgggcttcatcctcaaagatttttttttccaatcaccaaagattcttatttcactggtcttggcggtagcctaggcatcaatattttttaagagctgcccgggcaattctgatgggccacctgggttgaaaaccactgtgataatattgaattacaaacatttttgcaaacaaaagatcctggagtagccagaaaagtgatggaactttctctagatctgacccaggg

SEQ ID NO: 129936 - DNA, 580 bp, Homo sapiens
ctgaatgtcatcattgcacaaataaaatccctgagatttttaaactattaagttttttttgaaggatgagatgaacactgaactgaagcatggaattttgaccgaaaggcccatttcaaaataaatacccattatattcatgtctcttttatcctatcaaaaagaaatagatggttatatttggctacagagtcactgttaactggctattttactttggaggaaagtctatttatttggtgggggtagagataatgagcacagggaattttattgacaaatgttcgagtgaatagttagatgggtttcactgctgatctaattcagttgttaaaatggcttggacacaaccacaccaaatccattatttttcagtataacacgagtattatataagagttctcatacttaacccagtgaatggtattctgcctcttgtggaggattggaaattgggagagcatggaaaccaaaattaaaggaaacatgtcaactatccaagctagtactctaacccaggagcctccactccacctagtgtgtscagtagaaacacctgtggaatttttcaaagaaatca

SEQ ID NO: 129937 - DNA, 573 bp, Homo sapiens
ctgcttggtttctcagcctctccacctgtgcaatttttgaatcagcaaatgcctcgaggggagaacaggtatagaatgtcaggcaccactcagggggcttgtcttttctctggtaccttgctctttaaatccagtctacaatggcaggcctgtgctttcacacagatttttgttgtttacattttaattggctattttaattttattctgtttcttggtaagccatcccatttcagctggcattataattctcggaattagtcttagaacttttctagcaagtttttttttttttttttttgagacagagtcttgctgtattgcccaggctagagtgcagtggcacgatctcagctcactgcaagctccrcctcctgggttcacgccattcttctgcctcagcctcccgagtagctgggactacaggcgcccaccaccacacccaactaattttgtgtatttttagtagagacagtatttcaccatgttagccaggatggtctcaatctcctgacctcgtgatccacccacctcggccttccaaagtgctgggattataggtgtgagccacca

SEQ ID NO: 129938 - DNA, 557 bp, Homo sapiens
ctattgtgtgcaatgccctgtgttatatgttggagggaatgcagacaccaacaagaatgggcctgattctcaagattataatgtataatacaacagtagatctcaaccaggagcaattccctcttccctgccygaagtatatttgtcaatgactggagacattcttagttgttactattggcagtgacattggcatctagtgagaagaggctgttggatgctttaaatgtcctacaattcacagagcagtctgcccaaaacaaaattatctagcccaaaatgtcagaagctgaaaactcccatttctggaaagatggaatggatgtacttttctattcctcctgctaagtatgacaaaaaattctgaacattatttattaaaaagcaaaccaaagacatgaagggactctgaaaggtgtaaagaaaatgacagactagggacttcaagactcaaggaacaacacagtgctgagttcactaggttttctttcagtctcatatattctagacttgaagctaaagaagtcaacatcctgcaaatgccataggcactggca

SEQ ID NO: 129939 - DNA, 514 bp, Homo sapiens
gagaacaagagaaagagggtgaagctgaaaaaagtactcaaagaattagcagctaaaagtttttctaagaagctgagcaaaccccaaagaggacaaaactaaagcaatccacacaaaaacacataataataaaacttctaaaaacaaaacgtcttgaaatagcaagagaaaaagaacatctgatatgagaaacattagttgaatgaaacgttttcatcagaaactatggaggccagaagtcaatggtacaatattttccaactgttaaaaaaagctatcaatgctgaatcttatattcagagaaaatatccttcagkaatgtgaagaaattaagacattttcaggggaaggaaaactgagagaatttgtcactagcagacctaccttaaaagaatggctgaaggaagctctatatgcagaaaggaaatgataaaagaaggaaacttgaaacatcagaaaggaagaaaaaacttagtaaacgtacttgatactacaatgcagtacaacagaatgt

SEQ ID NO: 129940 - DNA, 583 bp, Homo sapiens
agcaatcttaagtatataagcatcacataacagagctgaaaaatatgtgcaacagaataatataaaggaaaggaggaatagataaatctacaattatagttggagacttcaacaccactctttcaaaaactgatagaactacagaaagaaaatcagcaaagatatagaagaattcaacagcaccattaaccaacagaatctaattgacatttacagaacactccatccagcaacaccagaatatacatggttttcaagtgaccatggaacacataccaaaataaactatatcctgagccataaagcaaacctcaacaaacttttaaaaattgaaatcatacagagtgttttctgacacaatagaattaaactagagatcaatgacagaaagataaaaggaaggtcaccaaacacttggaaactaaacagtgmacatctaaataatccacagatcaaagataaagtcttaagggaaatttaaaagacaatgaactgaatgaaattaaaacatatgaaaatttgtaggacacagcaaaaacaatgctgaggccgaaatttatagcactatatgcacatatttaaa

SEQ ID NO: 129941 - DNA, 617 bp, Homo sapiens
caaaatttaaaacttttttacccggcacaagaccctgttaagagaatgcaaatgcaagctatgaaatgggaaaaatatttgcaaatcacatatctgacaaagaactgctatctagaatatataaataattttcagaacacaccagtaaacaaaatacatcattagaaaataggaaaaatatgaayagacatttcaccaaagaagataaccagatggcaaataaacacatgaaaacatttaacatcattagccataagggaaatgcaaatttcaaacatgagatattatgatacttctatcagaatacctaaaataaagaataagaaaaatgccacatgctagtaaaaaggaggagaaactagatcactcaatacgttgttggtaggaatataaaatgttacagccactctggaaagcagcttgacagtttcttaaacaactaaacatgcaactaccacataacccagcagtttcacttctggtcactcatacagagaagtaaaaagttatattcacacagcaacctctacacaaatgttcatggtagctttattaataatatctctaaactggaaacaaacctggatgtcctttcaatggctgaatggttaaaccaa

SEQ ID NO: 129942 - DNA, 623 bp, Homo sapiens
tggcaaaatttgttgaaaggcaaggagaaaccattgtgtcttggtttatgggaataatgctgggcagagaaatcaatattctttgaaggttgtcctcctaccatggcaaagtggagctctccaaagaggtctttggggttggacataaactcaaagcagtgcacatcttatgtgctattagctcttttctggaatgataatgctgacactcctgttattttccttttaggcaggtttggtcaacatttcccatctcaaatatattttctctgttgacagagaccagatactgctacactcagcacacaatggaagtcacaggaaacagtatctcagtcaccaaacgctgtgtcccactggaagagtgcttatccactggctgcagagactccgagcatgaaggccacaaggtctgggcaacagagcaagtgaccagtactacatagccagctgccttctcttcagacatctgccagtactcatgagcagattcttactcccccgtgaaggctgtcttttgattgtctttatgctctrtgaaaagacgcttcctttcctgtttactctaaaagaatacacatttataccagagcataggacaactgatataaattgtgtaaaca

SEQ ID NO: 129943 - DNA, 412 bp, Homo sapiens
gtgtaaaatgagcttgggaggcagccttgaaggggcatatggacaatcacagaaaggcagccttgccctctatacgtgtgtctatacatgtctatatgctgtctatacgtgtgaccttaacatagcatrctttggcctttatttagcagctgaacacttctgcaggtggccttcctggtggtttgggcaatgtccattctcaatacctgggaacagcactgtttcttaagaaggcagacacctaattttcaagcaacctcttgaatacactaataattaaaattttaaatataatctgcctattctgctcctggttcaaaatgagtaaaaccaaaggctttccctgacctctccagcaaattggacttgattctgaggagttactgtggcctctttaccaaggagaaagtta

SEQ ID NO: 129944 - DNA, 414 bp, Homo sapiens
tttttaaaatatacaaaagtttaaggaagaaaataatcattccccattttatcacacagatttaattattcgtgtgtaatttctttattattttaatgatattctttttctctgtgtcacatggtggctacctagttatggatacagcatatgttgaatgtatttgatccttatcttcctagagtaaaccagaggccaatatagcaaatttactatgtataaagatgtacactgttcttctatgctactgaaaaactctttcatcartagtctcccatgtggcctcctatttgtgggagggaataatgtgcatagttagggctggtattttttaaacaaagaaatagacaaggccagatctgtttaatctctaacggccagtgttctttctgttcattcccatagattagaatc

SEQ ID NO: 129945 - DNA, 582 bp, Homo sapiens
gtaatttctttattattttaatgatattctttttctctgtgtcacatggtggctacctagttatggatacagcatatgttgaatgtatttgatccttatcttcctagagtaaaccagaggccaatatagcaaatttactatgtataaagatgtacactgttcttctatgctactgaaaaactctttcatcagtagtctcccatgtggcctcctatttgtgggagggaataatgtgcatagttagggctggtattttttaaacaaagaaatagacaaggccagatctgtttaatctctaacggccastgttctttctgttcattcccatagattagaatcacagccaactggcttaaaatgttgttttaaggagcaccaggtgagaggtggccagatcagcatcagctccccacagtcctgataaatgactcaggtttgaactcctcctgttgccaatgttgttattctttggtaaggtgaaccaggcaagcaaaaatcaacatggtacaaaaaaatttttctcaccaaagctatttggaggctcaactttctcaatgaagggcactgcatttcatagataga

SEQ ID NO: 129946 - DNA, 582 bp, Homo sapiens
gtaatttctttattattttaatgatattctttttctctgtgtcacatggtggctacctagttatggatacagcatatgttgaatgtatttgatccttatcttcctagagtaaaccagaggccaatatagcaaatttactatgtataaagatgtacactgttcttctatgctactgaaaaactctttcatcagtagtctcccatgtggcctcctatttgtgggagggaataatgtgcatagttagggctggtattttttaaacaaagaaatagacaaggccagatctgtttaatctctaacggccagtgttctttctgttcattcccatagattagaatcacagccaactggcttaaaatgttgttttaaggagcaccaggtgagaggtggccagatcagcatcagctccccacagtcctgataaatgactcaggkttgaactcctcctgttgccaatgttgttattctttggtaaggtgaaccaggcaagcaaaaatcaacatggtacaaaaaaatttttctcaccaaagctatttggaggctcaactttctcaatgaagggcactgcatttcatagataga

SEQ ID NO: 129947 - DNA, 582 bp, Homo sapiens
gtaatttctttattattttaatgatattctttttctctgtgtcacatggtggctacctagttatggatacagcatatgttgaatgtatttgatccttatcttcctagagtaaaccagaggccaatatagcaaatttactatgtataaagatgtacactgttcttctatgctactgaaaaactctttcatcagtagtctcccatgtggcctcctatttgtgggagggaataatgtgcatagttagggctggtattttttaaacaaagaaatagacaaggccagatctgtttaatctctaacggccagtgttctttctgttcattcccatagattagaatcacagccaactggcttaaaatgttgttttaaggagcaccaggtgagaggtggccagatcagcatcagctccccacagtcctgataaatgactcaggtttsaactcctcctgttgccaatgttgttattctttggtaaggtgaaccaggcaagcaaaaatcaacatggtacaaaaaaatttttctcaccaaagctatttggaggctcaactttctcaatgaagggcactgcatttcatagataga

SEQ ID NO: 129948 - DNA, 613 bp, Homo sapiens
catttattgaaccttttgctgtgtgccagtcactgtggtcaacatttatacttgatcttcataatcactgtatggcaccattattatccctatttggcagatgagaaaactgatgcacaaagtgttttaataattttcccccaatcacactacccaatatgtgatggcactgggacttggaagtgagcagtctggctcccaggtctgtggccacagcgctgtatcctgcttagtcatgttctcatgtcacatatatgcaatttatgtgtgctgtcctagtgtgatatgtcgtgaagaaaattggaagagctagatttgaatattgatgccttcagtaatcagttgrctctgtaaatgtgggcaagtcagctaacctagatctgtgtgcctgtctttgttaaatcattccttttctgcttaccttatggggttaatatgaagactgaatgataaatcacatgggaaagtgctttgagaaacagcaggcactacacatatgctatttataagtatatatttggttgatgtagatcttttgcagatttcctcataccaggattacctggctggtctgattcatttggtgagtaggggcttaataatatttggtaaa

SEQ ID NO: 129949 - DNA, 587 bp, Homo sapiens
ttgagccttggaggaccacaaactatgatatctgatgtttttgttcctcaacaaccaattttaatcttgggagttcaaaaatgctgttaatggacacaccaatttagatgactaaccctggctatcagggcagagaggagagctgttgaacattctgatagatcttataaccgtatgtgtgcaactagtggaacacatgacaccgacattactctcagctcacatcaactaatgacttacaaggaagctgtgcttcagtgtgggtggctaattattcaaacttgcattctgtatgattaaaccacatggaatttcacatttgcttttgttttccatatattttatgggtcatatagattatatctccacctttcacccactgcctgccttttttattaaatrtgagctttgtataaggcttttgtctactttttgtcatagctctgggctgaacttttagattcattagtctctgatttgtggcagttacctacatttttacttacaattttagataaataaatgccggcgtgttcacaggcaggaaaacactgcattggtagataagggccattccatgctgggct

SEQ ID NO: 129950 - DNA, 400 bp, Homo sapiens
gtggaggagaccaccaggggagagtatgcggacccagaggagaaatagggtgaagggtgagtgcctgtgacatctgcagttagaggggagaggacactgtaagagaggaggagaaatgagtggtatgataatcaaggttcccggggttacaggccacgggagccaacacaagctagctcaagcaaaaacacactttttagaatttaggttatcaaaggcactcaaggttctggaactaggacccaaaaagtctccaggagcacagcaggcactctgtcacactaaggtcctcatattgcagcaaggctgttccctttttctgtctaaaaaccatcttcctccattgctctgtgtgggygacatacccacagctcctgagttgaagcctcctcagataatg

SEQ ID NO: 129951 - DNA, 577 bp, Homo sapiens
ttaagaggtaactgggcagggattgtgcggaagtcaagacatgctttgaaaatgtcacagtccttattaatatgcaactggatatatcaagaaggaagctggatatatgagcctggaattcaagggagtaatcaggattggaaactaaagttgagagtcgatagcatacagataaartcatggaactggatgaacttacatagagactttgcataaatgaagatacgggagccagtactgatcctggatctataagcacttagaacagcatagaggaggagaagaaggagtgagaaaaggagcttaagttagagcaacttaataaatataaaggaaaccaagagaaacgagtcagacaagacaaaagaacatatgcttccagaaaaaagaaatgatcaaatgtgttgaatgcaactgagatgtagaataggatgagaatgaaagattaccactatctttggccacatggaagaaattaataaccttgacaaaaggaatttccaaccagagttgggtttgaaaataaatgcaaaggatttgtgcagtgaatgggaagtaatgaaatagaagtagcaag

SEQ ID NO: 129952 - DNA, 577 bp, Homo sapiens
ttaagaggtaactgggcagggattgtgcggaagtcaagacatgctttgaaaatgtcacagtccttattaatatgcaactggatatatcaagaaggaagctggatatatgagcctggaattcaagggagtaatcaggattggaaactaaagttgagagtcgatagcatacagataaaatcatggaactggatgaacttacatagagactttgcataaatgaagatacgggagccagtactgatcctggatctataagcacttagaacagcatagaggaggagaagaaggagtgagaaaaggagcttaagttagagcaacttaataaatataaaggaaaccaagagaaacgagtcagacargacaaaagaacatatgcttccagaaaaaagaaatgatcaaatgtgttgaatgcaactgagatgtagaataggatgagaatgaaagattaccactatctttggccacatggaagaaattaataaccttgacaaaaggaatttccaaccagagttgggtttgaaaataaatgcaaaggatttgtgcagtgaatgggaagtaatgaaatagaagtagcaag

SEQ ID NO: 129953 - DNA, 611 bp, Homo sapiens
atgatattttgtggaaaaccatgtacttgtatgattctgaatcgaaagtaattaagaagctaggttttgaaatcaataatctttttggaaactttaaccaacttatttcacatacactttcctcatactgaataatgatatatggcaaatttatgtttacataagtgtagaggtcttcaaatacatataaaataaaaattctaagcaatagcactgatcacagattgctagattttttttcttttttaggaatggataagataatcatgtacctcacaattgctggtagcttagattctataaattactgtattttgagggtagatttaatgagaagaatgagagggaaagagtcaaggatgactccaaactgttttgtcagagcaaccaataatctggagctcccagtaacatagaaagggagaattgtccagggaggagagtggggcaggagcccttcttggggcatgtaagatttgagatgctkcttaggcatctgcgttagttttctagggctgttgtgacaaaatactaaaactgcatggcttaaaataacagacatttattgcctcacagttgtggaagctagaagtctgaaataaagttgtcat

SEQ ID NO: 129954 - DNA, 353 bp, Homo sapiens
actataaggtttcaataccataattaagaagtatataagcattatgaacttgggcaaaaatgttagattaagtgcataagacagggctactgaagagattttttgtgtcgaattcttgcgaacagtaaatgttacagaacatgaaaggcactgagcttggtgccaagcatacagcaagcacttgagaagtgctagctgttatgagcgtcatcctcatcatcctattcatctcactgttgggtgattgcttgtcttcttgtgcttgtcttcttctctacatgtrtatttgttgaggatactatctgtgtaattggattttatatccctagcacctggcacagtgcctaccacat

SEQ ID NO: 129955 - DNA, 314 bp, Homo sapiens
aagcttaatatcactgatcgttagagaaatgcaaatcaaaaccacaatgaggtatcatcacacagcagtcagatggttattattaaagtaaaaaataacagatgctggtgaggttgcagagaaaagtgaacacttatacattgttggtggaagtgtaaattagttcagtcatcgtggaaagcagtatagtgattcctcaaagagctamaagcagaagtaccatttgacccagcaatctcattactgggtatatacccacctgaatacaaattattctaccataatgacacatgcacatgcagcactattcacaa

SEQ ID NO: 129956 - DNA, 600 bp, Homo sapiens
agcaactttgaatatacatggttctatatcaaggtaggaaacatggtaacttcatatgaaaatgaggaatttatagaacaaaagaactatgttcttcagtaacactggtatccttgcagctggaaagacatttttcttaagtggttggagcttgtcatttgtctagatacatcctatttatggtgactttctctaaagctcatgattaatgtgggcttttaaaaattgtttttctttgtgttatgtttctctccagtaygcctgaatgttggttttaattaaatttaggaaggaagagaaggggggttgggtggcctgacaaagttgaagagcatcagtgaaaatcacatttatgttttggagcatggaatttgaaaatggaataaataatacgaaagagaggacttctccaaatgggaaaataatgaatatgcttaaactcttttgtattattctcattttggctgaagatgggattcttgatttgggaaaaagtttttttaatcattaactctatgtattttatacataccaccccaagaatcacctttctttttgttttatttttctccagaataagtcattattttgtagaagtgg

SEQ ID NO: 129957 - DNA, 628 bp, Homo sapiens
cactgcgaagaccatattcagacatggtgtacaaatatgggcccctcctcctcccaaaaatgttggcagttgaagcattaatctcagttatctggaaaggtgtcttcctgggaacactataccatgctgctgtcccattgatgtggccttggtttggctttgccagaattagaatctcgtgtctaccatgtattagtgaatgaccctaggcaaggtaccacccatttctaatcccaggttcttcatttgtaaattgaagattataatatctaccacatagagctgttctaagtcttagtggcttgaaccaatatgtgtctagtgcttagcttagtggctaaaacataggaaatgttcaataaatatttgttattgctgtgttgttggcagtaataataacaataatttccccttctactttagtttatgtccatgctgcagatataaaggatgaagttgtagggcaggaagtcttatgwaacttggagcagctactcaatggaaatcacaaacagaatgagtttcatccacatgtcaagacactactaccaacagagctatttcaggacacctacctaaataactagctgtctcttccacttaaagcaaggtatgtattagtttaaca

SEQ ID NO: 129958 - DNA, 628 bp, Homo sapiens
cactgcgaagaccatattcagacatggtgtacaaatatgggcccctcctcctcccaaaaatgttggcagttgaagcattaatctcagttatctggaaaggtgtcttcctgggaacactataccatgctgctgtcccattgatgtggccttggtttggctttgccagaattagaatctcgtgtctaccatgtattagtgaatgaccctaggcaaggtaccacccatttctaatcccaggttcttcatttgtaaattgaagattataatatctaccacatagagctgttctaagtcttagtggcttgaaccaatatgtgtctagtgcttagcttagtggctaaaacataggaaatgttcaataaatatttgttattgctgtgttgttggcagtaataataacaataatttccccttctactttagtttatgtccatgctgcagatataaaggatgaagttgtagggcaggaagtcttatgtmacttggagcagctactcaatggaaatcacaaacagaatgagtttcatccacatgtcaagacactactaccaacagagctatttcaggacacctacctaaataactagctgtctcttccacttaaagcaaggtatgtattagtttaaca

SEQ ID NO: 129959 - DNA, 584 bp, Homo sapiens
ctacctaaataactagctgtcwcttccacttaaagcaaggtatgtattagtttaacattattcagcttatatggtaattttgtaaactttatttcgtttggccttcacaataaacttgtgaaagaaatacagtccgccccttatcacagatgaggaatgggctatttaggatttaaataacttgtctatatttatccagctctaaaacagaaataaacttgaagtttacactctgactctaatggtatctccttttggtaatgctgcccaaatactacaattgatagcttacaaaagagttgttaatgatttgggaaataattggtcttgggactatgtgtggtttttgctgctttagagaataccttgaaactgcatagaattggatgagaaattcacagtaattcagagaaaactgaatcaaagctttactttgtccaacaaatactttatctatagataatttgatagtacaaataaaatatgagaattttttctctttaaataattggagagaaaaggatgttttcaagcatctttaaacttatttggaaacatcttgtcatataaaaatccaaccacca

SEQ ID NO: 129960 - DNA, 580 bp, Homo sapiens
gtgaaagttttgaaatctgcattgtgtagaaagggcttgttgcttgtttattgtgcatctttctctccttatgcctcctctttgcctgaagctaccatcaggaatgagacattgcagttgccattttctggtgaagtatgtaaaaataaacatgagctaaatgcacatttatgtggcgtttagaagagaggcactgcractctacatctgattttacttcttccttctttgctttctttggtttttgtctgcagtttctgctgcagccgtgggtgactgctgtatggaatcattaaaaaaatcgagtcagctaaaagaggcaactggaaaaaaataaacactgctacctggaggcacagatattagttctaactcttctacaaactgtgatctcgaaaaaaaaatgacttgattatttaatttcactataaaatgcaaaaggaagttggttaaagtattccctagaatcacgtgtctcagaacaagacacttaaaccaatcaccccctaccagtgtacctggcatcagaaggatgctgggatgggggctacccacactcttagaacagtacctggcagat

SEQ ID NO: 129961 - DNA, 595 bp, Homo sapiens
gctgggattacaggtgtggggcactgtgcccagccttgggtcaattttagaaaatactccctgtccatcacagactcaccataaaacaaaaatcatgtttcttcccagaagaatgggaggaactacttgcatgttttttctatattcttttcagtgtrccacatctcaggggcagggaaatattccttggagaagacattgacagtctcttggtggaggagcaaatgaagggttgcttctactgggtgacttttatccctgaatagagatatgttactttaaaaaatttttaacatttgaacaattttcatatgtttttcaagccttgggaatgctgagtatatcagaatatgaaactagaatgagagcagaaaaaacagccttcagatttccaaaatgaaaatagaaaatagaagaaaaagaagtgtgtccttatacaaaacttaactcaagatgcattaaaggcttaaatgtaaaacccgaaaccataaaaaccctagaagaaaaactaggcaatatgatttaggacataggcatgggcaaagactttgtgactaaaactccaaaagcaatggcaacaaaagccaaaattgac

SEQ ID NO: 129962 - DNA, 585 bp, Homo sapiens
agaacctccagaaagcatttgcaaaactttgtgtttacacacattttactaaggaagagcaagagctttcataccatagttccacgggggccaatgaccccaaaatattaaaagcaccaacttagaatcttacaatccacttatgaataatttcagacggatctcatcatcaaattgtgtatrgattataataaatatttcaagttatttattcatttatttagtacacacaaggtactgtacttccagatgccaagtactgtccttgatgctgggaagataagaacaataagctcatagaacgagaatgttagaagcatttcccaagtaaataaaaccaaacagaattaggccaaggtgactctcctttaagttttctggtactgatctgacactttgttctttcaaaggttggttatcactacaagtacatatttttaattgagttaccatactaactataaatcacttcaattaacattaacttctattgtggcagatataattaagaatacatatgtgactgtttctgctttttgtaatgagctttcatagtaatcactattggaactacagtattaagta

SEQ ID NO: 129963 - DNA, 585 bp, Homo sapiens
agaacctccagaaagcatttgcaaaactttgtgtttacacacattttactaaggaagagcaagagctttcataccatagttccacgggggccaatgaccccaaaatattaaaagcaccaacttagaatcttacaatccacttatgaataatttcagacggatctcatcatcaaattgtgtatggattataataaatatttcaagttatttattcatttatttagtacacacaaggtactgtacttccagatgccaagtactgtccttgatgctgggaagataagaacaataagctcatagaacgagaatgttagaagcatttcccaagtaaataaaaccaaacagaattaggccaaggtgactctcctttaagttttctggtactgatctgacactttgttctttcaaaggttggttatcactacaagtacatatttttaattgagttaccatamtaactataaatcacttcaattaacattaacttctattgtggcagatataattaagaatacatatgtgactgtttctgctttttgtaatgagctttcatagtaatcactattggaactacagtattaagta

SEQ ID NO: 129964 - DNA, 708 bp, Homo sapiens
atgtgactgtttctgctttttgtaatgagctttcatagtaatcactattggaactacagtattaagtataattactgagtaatctactagaacccagaatcactttataattatatgatattttcctaagcatatagcatgtagttactttgagagtgaagcataagagtgacattttagcaatccattacgtaattgatgaaattttactaataaatgtgagttaaaattcataaatgctagacatttgatttccaaaataaagccagtgattcattcagctactttttgaaagggaagacaccttattttaaaaccctaattccaagggggaaaattatctgaacacacaaatcatgtggttttagagtccaaaagtaaagcagatggcattaattgtctatattgaaagtaagtgtgtgtttaatatgctagaataggatttttaaaaacagttatatctttgtctgcagctcrtttttttttggcatatatctctaaaagtttctaatagaagctttgggatatatttttcaaaaaattattttcagcttaaaaaatgtattttctggcagatgcagaactcacattaaattctaaaaagttgaggggagggtgattgtgttttctcaagatctgtgacttgttacttaacaaagaacccattgtaaaatttccaaaaacatcgtagcaatctaagacagaaag

SEQ ID NO: 129965 - DNA, 593 bp, Homo sapiens
aatgtatcagatgcttgccctcagaaatttccaaggttttttaggataagccgaggcatagtctctcaatttcatttctctcttttttttttttttttgagacggagtttcactcttgttgcccaggctggagtgcagtggcacaatatcagctcactgcagcctccacctccccggttcaagcaattctcctgcctcagcctcccaagtagctaggattacaggcgcctgccaccacgcctggctaatttttgtattttcagtagagacagggttttgccatgttagscagactgatcttgaactcctggccttaggtgatctgcctgcctcggcctcccgaagtgctgggcttacaggtgtgagccatcgcacctggcctaaaatggatttcttatgtgcagttttcatagtactctgtctcctttaatccctctctctctcaatagtattctctgtccttatcaatagaagtattttcttcacaattgcgaaggttcacgatgttcattttcaatccgcaggatgaaacaaaataccttagcgcttagcgattgtcacacccctgttcttcctgtttactaagcacttgc

SEQ ID NO: 129966 - DNA, 593 bp, Homo sapiens
aatgtatcagatgcttgccctcagaaatttccaaggttttttaggataagccgaggcatagtctctcaatttcatttctctcttttttttttttttttgagacggagtttcactcttgttgcccaggctggagtgcagtggcacaatatcagctcactgcagcctccacctccccggttcaagcaattctcctgcctcagcctcccaagtagctaggattacaggcgcctgccaccacgcctggctaatttttgtattttcagtagagacagggttttgccatgttaggcagactgatcttgaactcctggccttaggtgatctgccygcctcggcctcccgaagtgctgggcttacaggtgtgagccatcgcacctggcctaaaatggatttcttatgtgcagttttcatagtactctgtctcctttaatccctctctctctcaatagtattctctgtccttatcaatagaagtattttcttcacaattgcgaaggttcacgatgttcattttcaatccgcaggatgaaacaaaataccttagcgcttagcgattgtcacacccctgttcttcctgtttactaagcacttgc

SEQ ID NO: 129967 - DNA, 540 bp, Homo sapiens
agtagtgattttaaatcttcagtctttagttatttcaatattttaaagtttcttcaattatatgcacaagtaaaacttacttctgccattaactctagtggggcctgagtattctttttagggttactatcttcatcatcatcttcatcattggtatcatcttcaccatcatcctctgctgattctgacaatttatcatcaatatcctgaaggcaatattcattatttttctcctgctttacaatgactgcatctttgctcacttcacctaaaagagaatatacctaatttaatcaaaagagatcgaaaagttcgcaaattaaattttgccagatcctattactattcattaaactgatatattaataaaagtaacataattatcataacaaacttatattcaaaacactacatattttaactcatttaaatctctcaacatcaaggcggtatgtactatttttattcccatttataggtgrggaaactgagggacacagaggttaaatatactggccaacttcacacagctaattaagt

SEQ ID NO: 129968 - DNA, 366 bp, Homo sapiens
ttgttaactacaagcaatttgctgggtagacaaaatctttcccacataggatttctaaggaaaaagaaaatgttaaatgtggcatttgtgtgcccagaagtttgaaacttgtggtttatagagtccacatacttcttgtggytgggactggagtgaaaaatacaaaaactagagcaaagaaaaaacttttagttttccctaacccaacctaaatgaaatcttttggcaaatctcacttgccagtcagactatgaagccagcagcagggtggagagcggaatggaagctatgctgaaaaaattcatcaactttgcaggtcagtcacactcttcccatgcaaagatctccccactccaatgttttttc

SEQ ID NO: 129969 - DNA, 405 bp, Homo sapiens
tgcattaaatacatattttatttctgctgctgaaaatagtttgttaactacaagcaatttgctgggtagacaaaatctttcccacataggatttctaaggaaaaagaaaatgttaaatgtggcatttgtgtgcccagaagtttgaaacttgtggtttatagagtccacatacttcttgtggctgggactggagtgaaaaatacaaaaactagagcaaagaaaaaacttttagttttccctaacccaacctaaatgaaatcttttggcaaatctcacttgccagtcagactatgargccagcagcagggtggagagcggaatggaagctatgctgaaaaaattcatcaactttgcaggtcagtcacactcttcccatgcaaagatctccccactccaatgtttttt

SEQ ID NO: 129970 - DNA, 405 bp, Homo sapiens
tgcattaaatacatattttatttctgctgctgaaaatagtttgttaactacaagcaatttgctgggtagacaaaatctttcccacataggatttctaaggaaaaagaaaatgttaaatgtggcatttgtgtgcccagaagtttgaaacttgtggtttatagagtccacatacttcttgtggctgggactggagtgaaaaatacaaaaactagagcaaagaaaaaacttttagttttccctaacccaacctaaatgaaatcttttggcaaatctcacttgccagtcagactatgaagccagcagcagggtggagagyggaatggaagctatgctgaaaaaattcatcaactttgcaggtcagtcacactcttcccatgcaaagatctccccactccaatgtttttt

SEQ ID NO: 129971 - DNA, 416 bp, Homo sapiens
cactgtaggaaatagagtcgcatgtccttctgcaggattgtgtccggtgatcggcatgtgtgacaagtgacataytccttgatatatcttctcaagacattttctatctgtttctgttggaatcttcctttgattacaagttggttattaccatctatagaaccacttgtacccaattcagccaataaaaatgcaaggagatgtttgggttgacgatgtaatagtttacagatatctgtaaagttgacaaaagaagttttcttggttcctactcggacgacttgtggaggtttcatgacaaatttccttttctccccagcaaccatatctggattcttttccctcatgatgttgaacactcgattcagcagctcctcgtatgtgtagtctctttctgagcctgcccaagcagggcc

SEQ ID NO: 129972 - DNA, 190 bp, Homo sapiens
tcatcctcatctgggaacttaacattcttctttttcttctttttattgccaagcataatgtcaaggtcatyctctggttcagttggttcttgaacatcactttcaatcttaagatcctttacaccttcttcagcttcatcaatatcaaatatctttttagtttttttcttctttttcttttgattaaaga

SEQ ID NO: 129973 - DNA, 434 bp, Homo sapiens
gaattctttcaggattcaactaaagtttggatgcactctccagaaaaatttggacattaaaaaatttgcatatgtcttagtcagttctggctactataacagagttccataaacctggtagcctataaacaacagaaatttatttttcatagttctggaggctgggagcccaaggtaagagtaacaacatggttgggttctggtgagggccctcttcaggtttcagacagccaacttctcattgcatccttacatggcagaaacaggactagggarctccttggggtctcttttataagggcagtaatcccatttatgagggctccaccctcatgacctaatgaccttccaaaagctccacctcctaataccatgacatggtgggttaggatttcaacatatgaattttgaggagacagaaacattccatctat

SEQ ID NO: 129974 - DNA, 443 bp, Homo sapiens
cataaagacttgtacatgaatgttcatagcagcattattcatagtagccaaaagttggaaacctagatgtccatctcctgataaatggatcatatctgataatctatgtaaaggaatattattcagctataaaaagggatgaagtaccgatacatgttacaatatggatgaaccttgaaaacatgctaaaggaagccagtcacaaaagtcacctattgtatgtttccatgtatatgaaatgtctagaatagaaaaatccagagacggaaagcacattagtggctgccagggacttgggggtgggggaagagggaatgactgccagtgggtaaggctttttggtgggggtaaaartatcttcaaatcgattgtggtgatggttatacaactctgtgaatatattaaaaaaatggtacagtttaaatggatgaattatatgatac

SEQ ID NO: 129975 - DNA, 563 bp, Homo sapiens
taaatacaaatctcactaattttaatcttttctctttggctcacaaatgcacgaaaataccataaacagttttcagaacttacttcatatataaataagatacattacaaatgggaagaaaatacaagacgcctctttaacatggtacatctctgaatataaataagcaaatatttcattgacctacaattaaacaatcattgaaatcatgacacatagtctccccctcccaccaccaaggtcagacaacaggaatttacacaatctacacaaattaatctctaaaaatacagccatagtacacctgtaacaatgactctgctactattttcccctaacaggatactaatggggagggtgtgacttgtcatttggtggtgttttttctcatccatcatcacttcaggtggagaaacgctgacagtgaggtcgattctcaccaacagcatttccctyggcccctaggacatggcgttttgaaaaacagttttcctggagttgttggacaagctggttggcagcatgtttagctcctcggtaactgctgaaggtaaagtgaattc

SEQ ID NO: 129976 - DNA, 512 bp, Homo sapiens
tgatgggaaaagaaggcctcctgattaatcacgtytgaaggttgatgacacgcacgagcgccgctgcacgcgcatggggcacccgagcacagaggtgcccggaaggggcggaccagccccccttgccctggcccgctcccccttcgatttcacgcgctttaaggattctccctttgcaatatttaggcgtagttaaaagaaccgctgcgttgggagaagcccctcgccgtaaaaatgcgttgaaagagaaattcccaccagagggcgccaagagcccagagacggagaggccctgcgctcccgggtctctccgccagcgcccgagcggagcccacacctggagctgctggccagacggttacgcgccggcttgcctcttcatgccttccctcaccgccctgtcactagtttaagttctcccctttcttctcccccagtttttttctttagggcaaaaatgttgatgtctgtgcgtgtctgggtgacaccgtgtaggcagtgattcctttact

SEQ ID NO: 129977 - DNA, 485 bp, Homo sapiens
cctgtctcaataaataaataaaggcaggttatcaccttttttagtatataatatagggtaattgaaggctatgaaaggaccaatactggagaagaggagacagctctgattccacacttggactgccggggcagtggtwcacctaaacactgccatgtattagggttctcttacatggatcttctaaaatattagataaatgccttgtaagttatccctttttccaatctgttcctctctactggcctcttagggaggaagccatagcgtgaagggcagggtattagaataaaatgacctggacttgaatctgccagttcccaagtatgtgatctttagaaagttactttcagcatctctacacctcgctttcttcgtatgtaaattgggaataataatgtctatcccatacaggtgttatgaggattaaaaacattaacatatgaatgcttagtatagtgcctaacacataacaggctatcagt

SEQ ID NO: 129978 - DNA, 485 bp, Homo sapiens
cctgtctcaataaataaataaaggcaggttatcaccttttttagtatataatatagggtaattgaaggctatgaaaggaccaatactggagaagaggagacagctctgattccacacttggactgccggggcagtggttcacctaaayactgccatgtattagggttctcttacatggatcttctaaaatattagataaatgccttgtaagttatccctttttccaatctgttcctctctactggcctcttagggaggaagccatagcgtgaagggcagggtattagaataaaatgacctggacttgaatctgccagttcccaagtatgtgatctttagaaagttactttcagcatctctacacctcgctttcttcgtatgtaaattgggaataataatgtctatcccatacaggtgttatgaggattaaaaacattaacatatgaatgcttagtatagtgcctaacacataacaggctatcagt

SEQ ID NO: 129979 - DNA, 485 bp, Homo sapiens
cctgtctcaataaataaataaaggcaggttatcaccttttttagtatataatatagggtaattgaaggctatgaaaggaccaatactggagaagaggagacagctctgattccacacttggactgccggggcagtggttcacctaaacactgccatgtattagggttctcttacatggatcttctaaaatattagataaatgccttgtaagttatccctttttccaatctgttcctctctactggcctcttagggaggaagccatagcgtgaagggcagggtattagaataaaatgacctggacttgaatctgccagttcccaagtatgtgatctttaraaagttactttcagcatctctacacctcgctttcttcgtatgtaaattgggaataataatgtctatcccatacaggtgttatgaggattaaaaacattaacatatgaatgcttagtatagtgcctaacacataacaggctatcagt

SEQ ID NO: 129980 - DNA, 560 bp, Homo sapiens
tccctgctactgtctcttttcaggttacaattttgaactgctagagtctgtattcaactctagtctgttctctaagctttcaaattttatttttcatcgagatccacaggaagaaatacatttcacttcaaggtctagggaatacacactcctgaaacaaaagtttcataaaacaatgcttgccatactcttttgcagtatatgctgatagtttctattctatgtatttaactttgtaaaacccccaggtatttgtgatttactgcaatgatttcataactgaccaatggatcgtaatgtgtagtttaagaagacatcttttttacctaccagaatgctctttctaaaatacaattattttccttaaaagcattcaatgcctccattactctaaggataaagttcaaactctaacatggcttctaagaccccccatcacccagttcttttatcactgtagcttcgtctttctccactctaaatggttcattttataatccaaccttacctgcttaactttctgawatcagattgtgtctctgcgcctttgcaagttgtgt

SEQ ID NO: 129981 - DNA, 601 bp, Homo sapiens
cttctacatatgaatttcaggggcacacaatccagcccataacagcaggtaattcaaaacactctagaaaggaagtaaaatataatacataataatctggactttggactttgattgctttggctgaatcctgattctttcattaactaggtgagtaaccttgatcaactcattgaacctatcttcccctcagtctcccagtcttttaaatggagatactctcttgtagaatttttgtgtgtgtgagaaaataaaacaagttaatacatattagacacttagaagaatccctggaatgtaataagcacagtatatgtagtaacttttataggatagatgaagtaaaatgaaacrttaatttttattgtgtatatttaagatgcacatgttttgttatacataggcatagtgaaatgattactacggtcaagctactgaacatattcatcatctcacacagctacctttgcatgtgtgcatgtggtaaaagcacctggtatctattctcagtgaatttgcagtatacaataaaatatttttaattagagtcctatgccatgcattaggttgctagacttattcattccaagtaactgcaact

SEQ ID NO: 129982 - DNA, 535 bp, Homo sapiens
gaacatacacaaagatcatctagaaatgagttaaagacctaaatgtaagacctgaaactataaaactcctagaagaaaacacagagaaaacattggccttggcaattatttttggatatcccaccaaaaactcagttgagaaaaaaaataaacaagtggcactaccacaaaataaaaaggttctacacagaaaagaaaacaatcaacaaaataaaaaggcagcctacatattgggaaaaacatatttgtaagccatgaatctgataaggggttaatatccaaaatatgttaggcgcttacacaactcgatagcaaaaaatacagtaaattaaaataatcygattttaaaatgggcaatcaatctgaatagacatttctccaaaaaagacaaaaatagccaacagatacaggcaaaggtgctcaacttcagtaattatcagggaaatacaaattaaaagcacaatgagatatcacttcacaccaactagcatggttattataaaaaatacaagaagggtcaggcacggtggctcaa

SEQ ID NO: 129983 - DNA, 360 bp, Homo sapiens
gacataaggcagctttgctaacaagaaatgctstatttttcaaaaatttgaatgctgccagtatcattccccttccccacttatgcctattctataccatgttttcctttcatatatggtgctaccttctcattagtatcccagtaggaaagagccttcatggagaaaggatgctgaccaaagttgtccctgtagaaacctctttccctacttgcattttcatgactgaaacctgtggttatatttgctacctaccctttatcacctggattttcatgaaaaagatatatttgagaagtaaatatgataggaatctaaaaagaccagaaagtgtacttcaggactgaatctccagcagag

SEQ ID NO: 129984 - DNA, 419 bp, Homo sapiens
  misc_feature (1)...(419): n = A,T,C or G
ggggcccaacatcgtgaatggaatgaacaccactgaattgtacacatgggaatagtttaaatgacacattttgtgttatatatatttgactaccaaaaaagagatctctttcaaamaactttcaaaaaactttgaaagagatctctttcaaaaaactgaggcaggacagaaatctgtgggttttgcaggatctttatcagttgctcagaagccacattctcagagagagcattcctgatgacttgatttaaagttaccaccctctcccaccttagcatcctctatgcctcttccttgctntatttgccgccataatacttatctagctgaaatattgtgtattttaaattaattttgttttcttagtgtatctctcctagctagaatgtaggctttatgagagtagagatttttacctg

SEQ ID NO: 129985 - DNA, 571 bp, Homo sapiens
atcagctcctcctttctcttatccatacttgtttaagtaggctttatccttcttgacagtgacaataaatgggaaaggtaattgggtaaggcagttgtgataattcctagtaaaccaagttaatttacaaagccatgaggtgtgagttatgagctctattatctacatgtcctagagtttccttgcctgaagtgatggctccaggtggaacaggtaagatactgaagaatcactaacatacacctacttcaatgatatcagaaagaaatggaacaggtcagcaaccaagagagtctccagcccacatttatttatgactcaagcccatctcctaatgatttcatcctttattgcacatacacctcaaccctacaaatttaattccaatacctcctctcagatggarctaactagccacatggtactctgaacctaattatttttgcaccatttgcattttttattgcatcattaacatgaggagggtactcattgctagggcaactaggagtgatgccagcatcacttggtcttagccaaaatcttcatctcagttggaattgttggtatc

SEQ ID NO: 129986 - DNA, 622 bp, Homo sapiens
cttaggcagcttctgtgcattagtcatgatggattaaggtcatctgctcagccacagaagctgagataacaggaagccaaactggaacctctccacatccagtctagctttctgttatcccagcttctgacatgtccctcgggtatatctgtgatattcagaggttccctaggtatgaaacccctgaattcactgtaagtgtagagaataatggcagaggtgttggagcattagtgctttggaagtcttggccacatccctaatggaatgtgtaagggacaccaaggtcacaaagggagagggtgatctttcccttaaaattgagaaaagatgtttctctgttttgtcaaattacatayacaataacatttctgagggcaatacattacatttcacataatacattaaagattataggctgtggaagaaaataacatcattttttacttttccttcttaaatattagtaaattcattttcttctcatcttttacttcatctgcttttccagtccccagtcctggatcaattcaaatttccacttcctctaccactcttctccaccatttttctccaactattaagcacagctacagataatgccatagtggtgccaactggc

SEQ ID NO: 129987 - DNA, 476 bp, Homo sapiens
tttgttttttagattatgctacatggaatgctaggtgattgcaatatcagagtcctagttccaactctgctatttattaacttgtataagcttgggaaaattttctaatttcccctcaacctttgtgacaatattctcatcttaaaatgggagtaattgtcctcatttatactgtaaagattaaataaaatatakagagagaatgcttagaacactgtgagtgctataaaaagttagctaatataattattaactctttgatataattaatatttggaaggaagagacagttcttactcatttttgtaacccttgtccattgcacagtacctggtataaaataagatcaaataaatgcttgatgaataacaatacctaccatttttataaagttttataatttatagcatatgttgacatatattaactcatcagattcttccaaaatcttactaggaagccagagcaggaatgag

SEQ ID NO: 129988 - DNA, 629 bp, Homo sapiens
ggctgaactccagggttgagataaatgaagatgtacaagaaactgctgcttgttatagaatgggcaggctgcacatttctgtacaagygccattttgcttggaggcagcatctagccaatatcctgtccctatctgtccataaagaagggtacttaacataagcttagcagtttgcttgttcatatgctgttttctctttgaacccaagttagtcttttctccttcttaccagctctttatgtattcagctccagattctctctggtcttcatcctcacccatcttttcttggcctgtctgaactctgaccaaggagttctaccaaagatcagacacagtagctgcctgggccatcctactgatcttgattctgaactcttcaccttacctatacctacttggttggcttggatatgctgaccctggcctcaattccactttttggatttattatacctgtagaataccttgttctatatcagggattggcaaactatggtttgtgggccaaatctggcctgcagcctactcttgcaagttgtcttataggaactcagacatgctcattcacttttgtgttgtctttgtctgcttttacactacaacagcagagaccatatgtcccaca

SEQ ID NO: 129989 - DNA, 629 bp, Homo sapiens
ggctgaactccagggttgagataaatgaagatgtacaagaaactgctgcttgttatagaatgggcaggctgcacatttctgtacaagtgccattttgcttggaggcagcatctagccaatatcctgtccctatctgtccataaagaagggtacttaacataagcttagcagtttgcttgttcatatgctgttttctctttgaacccaagttagtcttttctccttcttaccagctctttatgtattcagctccagattctctctggtcttcatcctcacccatcttttcttggcctgtctgaactctgaccaaggagttctaccaaagatcagacacagtagctgcctgggccatcctactgatcttgattctgaactcttcaccttacctatacctacttggttggcttggatatgctgrccctggcctcaattccactttttggatttattatacctgtagaataccttgttctatatcagggattggcaaactatggtttgtgggccaaatctggcctgcagcctactcttgcaagttgtcttataggaactcagacatgctcattcacttttgtgttgtctttgtctgcttttacactacaacagcagagaccatatgtcccaca

SEQ ID NO: 129990 - DNA, 629 bp, Homo sapiens
ggctgaactccagggttgagataaatgaagatgtacaagaaactgctgcttgttatagaatgggcaggctgcacatttctgtacaagtgccattttgcttggaggcagcatctagccaatatcctgtccctatctgtccataaagaagggtacttaacataagcttagcagtttgcttgttcatatgctgttttctctttgaacccaagttagtcttttctccttcttaccagctctttatgtattcagctccagattctctctggtcttcatcctcacccatcttttcttggcctgtctgaactctgaccaaggagttctaccaaagatcagacacagtagctgcctgggccatcctactgatcttgattctgaactcttcaccttacctatacctacttggttggcttggatatgctgaccctggcctcaattccactttttggatttattatacctgtagaataccttgttctatatcagggattggcaaactatggyttgtgggccaaatctggcctgcagcctactcttgcaagttgtcttataggaactcagacatgctcattcacttttgtgttgtctttgtctgcttttacactacaacagcagagaccatatgtcccaca

SEQ ID NO: 129991 - DNA, 378 bp, Homo sapiens
gaattctttgataatgccttgaagaaatccctccacttggtggactctcaataaggactcactgtggtcaataccaccaaccacttcagcacttccctcttcatttccctacattctctcctcaacccatatttgcaacaaggccaaggggctcatcccctgtctgtaatcatttctacttcccactgaaagcaaatgagccctacagctggcracaaatacaaatcatgccttccagccttcccttgcctccttgatgatctctagacctttgcttcttttctaaggacccttacctgattcctcaacttctttatactgggcctgaatgtcagactggagaaacagggctcagttttcaatcaggccctgtgctgt

SEQ ID NO: 129992 - DNA, 418 bp, Homo sapiens
gacccttacctgattcctcaacttctttatactgggcctgaatgtcagactggagaaacagggctcagttttcaatcaggccctgtgctgtcttgcttcaccaggctgctttcagatgaagaattcttcgaagcatagtgcttcgtctgcaggcatctgcccsgaccaatggagacagcctgggctttagcaccagagcagtctgaatttgaatcttttctattatcggctgtatgacacacactgcagccggagtgttctttccaagatgcagttctgatcaagtccctgccttccttagaacctttcagtagcttactattgctttttacataaaggctctgatggttagttttatgtatcaacttgactgggccatggagtgcccagatatttgactaaatattttttggggtgt

SEQ ID NO: 129993 - DNA, 418 bp, Homo sapiens
gacccttacctgattcctcaacttctttatactgggcctgaatgtcagactggagaaacagggctcagttttcaatcaggccctgtgctgtcttgcttcaccaggctgctttcagatgaagaattcttcgaagcatagtgcttcgtctgcaggcatctgcccgkaccaatggagacagcctgggctttagcaccagagcagtctgaatttgaatcttttctattatcggctgtatgacacacactgcagccggagtgttctttccaagatgcagttctgatcaagtccctgccttccttagaacctttcagtagcttactattgctttttacataaaggctctgatggttagttttatgtatcaacttgactgggccatggagtgcccagatatttgactaaatattttttggggtgt

SEQ ID NO: 129994 - DNA, 401 bp, Homo sapiens
gaattcttcgaagcatagtgcttcgtctgcaggcatctgcccggaccaatggagacagcctgggctttagcaccagagcagtctgaatttgaatcttttctattatcggctgtatgacacacactgcagccggagtgttctttccaagatgcagttctgatcaagtccctgccttccttaraacctttcagtagcttactattgctttttacataaaggctctgatggttagttttatgtatcaacttgactgggccatggagtgcccagatatttgactaaatattttttggggtgtttctgtgagggtgattctagatgaggttaacagttgaaccggtcgattgagtaaagaagattaccctccccagtgtgggtgggcctcattaggctcattgaag

SEQ ID NO: 129995 - DNA, 351 bp, Homo sapiens
aatgtaaatagtccttggactgttacatgatggggaggaggtgaggctgggttgaaaatggatggtaatcataatgactggtgttgaagaacatttaccatggtcaagttcctttcagagaaatttacrtatcatgttttcccttaattatcgtaataaccccatgaggttacttctatcattatccccattttggagataaatagaagtagaaagaagttaagacatgtttcccaagggaggtaaacagagaccaggttataaataacctcatatcacttgtcaaggaatttttattttatcttgatgatacttatatatttattggagatttgttggagattcagggag

SEQ ID NO: 129996 - DNA, 518 bp, Homo sapiens
tctttgtgaagcaacttatctgttttgaagtctttttatagtgtcactgtgtttttagtagatatttcttttgttcactctttatgttaggaaaaacaattctattactgcaaattcaattgaatttagcaacaatttattgagcacctagtaatgttcctagcactgtgctagaagttgtggggaaaacagatgaagtgtatgatrtacccttgccctcgaggagtataggattctagcaagaaacaatatgtatgcaaataatccaattagcctggaaacccacagagttcaaaaatgaaaaagtctagaataaaataagtcaactgcatataagttataccagtgcctggttcatggtaggacctcaataagtcatttaattagtgcaaaaaatggacaaaatgggtgggaccaactcttactaaaaagatgaagaggaatcaaaagctgctggggtttctgctgtggcttcaaggatgtggtaagatgttaggtaatatcatatctgaagatta

SEQ ID NO: 129997 - DNA, 289 bp, Homo sapiens
cagcctactaatgggtttccatgyaccaataaaattccttcaatctatcctccatactcctggaatttatatttctgtagaagttaaacagagtcatgtcaccttcctttttaaggataattttgcatctctaattgcctatgaataaaggcctattgtttagcattcttaagaaactgaatgccagttttctcatttgtaaaacaggaaaacagtacctacctcatagaactctgaggattaaagggtttaatatatatgaagcttaagaattgtgtccagcatggag

SEQ ID NO: 129998 - DNA, 596 bp, Homo sapiens
gctaggccttaacctccagctatataattccaaagcccatacattttactatgtctcacataggtatatgtcttatctcttgactggattaaaaatgttctggaacaaaaattgtgtcttacatttctttcatatttcctatagcatcaaataaatgacattgagtcagcaaatagttattgagccacctaccaatgctaacacatgacaaatatttgttgagttgaggagacagtgcaattattagtcttagccttactgtatttaagacaatctttacatgcaaaatgaaaatagatcaatttatttctgtgtgttagtcttcattgtactttgtacagagcagtttataagaaattagatgacctattctttttccctcaaggaacataaagargtaaataaaccttaacaatcttattctatatgtgcatgttataaaaacatatagcatagtttgctgttatagtagatatatgcaaatgtctaccataccttagagagttacaagtgtcaaacagtagtgggtctaaaatggaaggatgttagataatggataccttacactagaccacagatttgggtaagtcttcgta

SEQ ID NO: 129999 - DNA, 486 bp, Homo sapiens
agataggtactctacataccctcattttacatagagggaacctcccagtcttgctgcgaaagtttaaaaaacagcatacgtaaagagctaggtaaataagaagttcactcaagaaatatcagtctttgttctactctcccccaaatcctctcagcagatatcaatggacaaggccgatacacaatattcttcttgttaccttctgcagaaaaaatactacgcatctcctccagcaaaaagctaacccccccccctytattttcttggtataagtctcatggccccttaaatgttttgagaagaacaggaatcacacaatctctattcaggtaccttagagtggccaccctcaggagccatgcagagcatgtaactttctggtttcaagcctattcaggacaaagaggttactgaataaggtggtccatttgcctgggctaaaaagtgctttgaggtgttaaaactaagcattttctgaagtaccta

SEQ ID NO: 130000 - DNA, 587 bp, Homo sapiens
ttcacgccattctgctgcctcagcctcccaagcagctgggactgcaggtgcccaccaccacgcccggctaattttttgtgtttttagtagagatggggtttcactgtgttagccaggatggtctcaatctcctgacctcgtgatccgcccaccttggcctcccaaagtgctggrattacaggcgtgagccactgtgcccggccgcattctcttttttaactccctccccccgccaccccccggctggagcagatccctgttctggctggtcccatcccctccacaagcagcccatggacactgaagcttattcctggagagaaagtgattgggagatccagggttttgcctggcttatagtttctgtggcatcatttgccctagatgctcaaacgtcctatcttgtcggtggaagtggcaaaaccacatttgacaccgctctaggtggcggctcaatgggagtggagtgctgcgcatctcctgtttgacctttcagtcgctgcatggctcttccaagctgccgcagcctggagaaatgtgaactttcaccaaagcctttgcaaatgagcttttccagacaaggcaga

SEQ ID NO: 130001 - DNA, 587 bp, Homo sapiens
ttcacgccattctgctgcctcagcctcccaagcagctgggactgcaggtgcccaccaccacgcccggctaattttttgtgtttttagtagagatggggtttcactgtgttagccaggatggtctcaatctcctgacctcgtgatccgcccaccttggcctcccaaagtgctggaattacaggcgtgagccactgtgcccggccgcattctcttttttaactccctccccccgccaccccccggctggagcagatccctgttctggctggtcccatcccctccacaagcagcccatggacactgaagcttattcctggagagaaagtgattgggagatccagggttttgcctggcttatagtttctgtggcatcatttgccctagatgctcaaacgtcctatcttgtcggtggaagtggcaaaaccacatttgacaccgctctaggtggcggytcaatgggagtggagtgctgcgcatctcctgtttgacctttcagtcgctgcatggctcttccaagctgccgcagcctggagaaatgtgaactttcaccaaagcctttgcaaatgagcttttccagacaaggcaga

SEQ ID NO: 130002 - DNA, 462 bp, Homo sapiens
gcactgatcctgaaggtcgcctgggatgctgtcctccccaggctagctgccgtaaggccttgacaaccactgcttcctgctgccagccggagccaccaaacccaagctctaagaacagttctgcaagccccctctcccatgcactgatagcacttaaaaggggcgtttgtcttcggcagctattctcgatcctattgagatttctaattagctcagaaaagaccgcattcactgacaactaaggcggggatggggtagggagaggagacaggcagggtggcttcccccagctcaggagtgaccacagcctgtgaagatgctgctyctgctccagcatcaaccctcctccaaatgcttggatgcctgtccagggtctcaactgacctccctgcagtcagaggttgctccaaaaagggaccatctccaagcctctcttgaactcccttctctactcagcaaggc

SEQ ID NO: 130003 - DNA, 546 bp, Homo sapiens
catacttttaatcatgatgtttgaatgtttatgtacatgaaagattcaaactgcattgccatgggacaaaaggaattaaaaaactgtatatgatggacagacagtgcaggcataacatacatccttagaagaatcagactttcagcctccatcaacagatggagattctaatgtgaacatgagcagggaagaaatgaatccttttgagaaacactggtttctgtaaggcattccgaaggatatcccagtgaattatgcaaagaagacatttgcttgaactctgaagctaatgaaaaatgagtgtatataacatatgctatataactgaagaaagacacagggaagtttatggcaacccaagggcagagataatgaacatcaagacctctgggaaggagagaagcccactctcttgcggctacatgggtatgtaacygtggttattcaaagacatgagttctaactctctccgtgaaatcagattgttacctagcttaagcaatgatctcccaaaagaatgagagacacatttccagggaagaattc

SEQ ID NO: 130004 - DNA, 569 bp, Homo sapiens
gaattcttcaatctgtctctaaccctccctaccatttcattttcatcaaaaatattttcctggcatataattcaaatccctatcagatttgatctttattgtatttttcattatttattcagctctgcatcagctcctctgctgtgggtgatctcctttgaagtgaagccttcttagaaatggctcttttgtaacagtgttccttccactgtgcccaggattgatctacaatgcagcccgagataagccccgaacctgctgttgctgtctctgttaaattccaaatgtctttcacyggcaccttccagaaagcatttatcgggagccttttaggaaacagaaatgacacatcctgactgctgagatcataagccaactgtctactcacaccctgcggacctgaatatttcaactctgttccggatggagtcaaaaatttccaaataatcataaaaatgtccttctcactggcctgtaattcatatgctttttatcaactcttgaaccgtgaaaagttaaccacctggcccctttgccccagtcagcatgctcttctctcctacataatt

SEQ ID NO: 130005 - DNA, 566 bp, Homo sapiens
cctccctaccatttcattttcatcaaaaatattttcctggcatataattcaaatccctatcagatttgatctttattgtatttttcattatttattcagctctgcatcagctcctctgctgtgggtgatctcctttgaagtgaagccttcttagaaatggctcttttgtaacagtgttccttccactgtgcccaggattgatctacaatgcagcccgagataagccccgaacctgctgttgctgtctctgttaaattccaaatgtctttcaccggcaccttccagaaagcatttatcgggagccttttaggaaacagaaatgacacatcctgactgctgagatcataagccaactgtctactcacaccctgcggacctgaatrtttcaactctgttccggatggagtcaaaaatttccaaataatcataaaaatgtccttctcactggcctgtaattcatatgctttttatcaactcttgaaccgtgaaaagttaaccacctggcccctttgccccagtcagcatgctcttctctcctacataattatcagctcttaagtagaatt

SEQ ID NO: 130006 - DNA, 566 bp, Homo sapiens
cctccctaccatttcattttcatcaaaaatattttcctggcatataattcaaatccctatcagatttgatctttattgtatttttcattatttattcagctctgcatcagctcctctgctgtgggtgatctcctttgaagtgaagccttcttagaaatggctcttttgtaacagtgttccttccactgtgcccaggattgatctacaatgcagcccgagataagccccgaacctgctgttgctgtctctgttaaattccaaatgtctttcaccggcaccttccagaaagcatttatcgggagccttttaggaaacagaaatgacacatcctgactgctgagatcataagccaactgtctactcacaccctgcggacctgaatatttcaactcygttccggatggagtcaaaaatttccaaataatcataaaaatgtccttctcactggcctgtaattcatatgctttttatcaactcttgaaccgtgaaaagttaaccacctggcccctttgccccagtcagcatgctcttctctcctacataattatcagctcttaagtagaatt

SEQ ID NO: 130007 - DNA, 568 bp, Homo sapiens
atgtgttcccactccatatacttacctaacttccctagctctaattaattcataaagcatacctttttataaaagaggcttaatcatagatttccttgaagaaaaaaatgtatgcatataaaaatttgaagaagattttctccttatatgaaagtaataagtgcttatataattatcataaataaaaaaggaataataatctgtttacacagaaataaaatattcttttttttttttttttgaggcagggtctcactctgtctgccaggctggagtgcagggatgctagttccgctcactgcagccttgacctcctcaggctcaactaatcctcctgcctcagcctccaaagcagctgggaccacaggcccacaccatcacatccggctaagtttttattttttgtagagacggggttccgccatgttgcccaggctggtctctaactccygatgcacccgccttggcctcccaaagtgttgagattacaggcatgagccaccgcgcccagcctgaaaatattctgctacatgaaacaacatgatgtgagtagaaatgtaaggcacgc

SEQ ID NO: 130008 - DNA, 568 bp, Homo sapiens
atgtgttcccactccatatacttacctaacttccctagctctaattaattcataaagcatacctttttataaaagaggcttaatcatagatttccttgaagaaaaaaatgtatgcatataaaaatttgaagaagattttctccttatatgaaagtaataagtgcttatataattatcataaataaaaaaggaataataatctgtttacacagaaataaaatattcttttttttttttttttgaggcagggtctcactctgtctgccaggctggagtgcagggatgctagttccgctcactgcagccttgacctcctcaggctcaactaatcctcctgcctcagcctccaaagcagctgggaccacaggcccacaccatcacatccggctaagtttttattttttgtagagacggggttccgccatgttgcccaggctggtctctaactcctgatgcacccgccttggcctcccaaagtgttgagattacaggcrtgagccaccgcgcccagcctgaaaatattctgctacatgaaacaacatgatgtgagtagaaatgtaaggcacgc

SEQ ID NO: 130009 - DNA, 625 bp, Homo sapiens
taatggtgttttgttcagtctgaggagaagaaagttaacacaccatgaaagcataggaatgttttagaagatttttagctctcgcaattgggaatctcctggtttaaatttctatcatttcagcctcagggcaatccaaatcatacagggcttggacttcattgcatcaattctaatagtttttgcttttcttccccatgaaaacccccgtactttccttgtattgaggtgtggcttcagccttcaagggtccattctcagtatgcttgaaatctgaagatgaaatgaatttcataactggaaaatccagttatcaggcatgagcaaatggctgcatttgtttcagattcttttgctagtcgcttcattttcttctaatttaacaaggtcatgtatgaaattagactcagctgttatttattttattactgagctccaaggtataaatgttcctctcctatctagaaatttgctttcgactttctttctctttatatgtacrtacctatatcatgttttgcagcctccatagatataagctcaaagttaattttaccatgtcttttactcatctagaaaagaaaggtagccattctctcccagtgaacaatcaaattctgctgcc

SEQ ID NO: 130010 - DNA, 580 bp, Homo sapiens
cttccatttttcttcctgcaacatgagttcagtcaatacaaactcagggaagggaccagacatgactgttttcttctttggcaggtctggactttaggcagataaaggaacttcagagaacaatccatcatgtgctttgggagagacagaggattgagagagatggggaagggagatgtcagagagaccttgaggcttctttttcagttcggaaggtggaaacaccatattataagatactggtttctaagacctgacaagaatatatttgyaatccaaccatttttcactgtctctgttgatgtgttcccaactccatcatcagtacacagacgtccactggttgtcacccaagccctgcttcttgctgaatctaatgactgtcaattatttggtctttttaaatttgacctctcttgatgaaactttttttctctttgtgcctctgtgacctccagttatttcagtatggagaacttaacaaaagaatgttatctgggtaactgaaagggatatgtagaattgtgtatccttatatgatgaatgtgttaaccaggtaactgaaaggtgtgaaaagagg

SEQ ID NO: 130011 - DNA, 430 bp, Homo sapiens
attccggttaaagatgaaaaaataaaagtcagaaatcactagtaaatcatgaatttactcaacaggtgaactgtaattgtctttttttttttttttttttttttttttttttagtactggctttcctcaraactaggagttaaaccgtaagttggctgtgaatgaactcagcatcattgtaagcagcaacgtgtctatgattacctcctcctgggacagaggggcagtgacaggccctggaagcagaggaattaggtgtcatgtcaggttcttgtcatgttggtgttgaccggttggttaccagttgagcagagggaatacctgtgaggtatctggagtagctggaaagccagtattccctggacagaggagcctcattacccatccacattttcttgaggtaagggagaagccccaggaatgggagaac

SEQ ID NO: 130012 - DNA, 589 bp, Homo sapiens
acaagttcccagtagaaagcaagtattataaagacaaggatttttgattattttatctgctgttatatctccagtacctagaataatgcctggcacacagttagtgttcaataaatatttgtagaaagactaatatagagcaatgtttctcaacctggggcaacttagccctccaggggtatttggcaaygtctggacacattttttttttatttgagacagagtcttgctctttgcccaggctggagtgcagtggcatgatcttggctcactgtaacctccacctcccgggctcaaacaattctcctgcctcagcctcctgagtagctgggactacaggcgtgtgccaccacacccagctaatttttgtatttttagtagacatggggtttcaccatactggtcaggctcctcttgaactcctgacctgccttggcctcccaaagtgctggggttacaggcatgagccactgcgcctggcctggatgcttttttatcatgaggattgaagggataagcagtgctattggcttcctacaatgcacagaacagtctcttaccacaaaggattatctggctccaaatgctg

SEQ ID NO: 130013 - DNA, 406 bp, Homo sapiens
tgttttatgataaagaaaaatgtataagctagtttttgctgtataacaaaacaacttaatcacttaaaacagtaacaatttaatgtagctcatgatctggtatgggctggctcagctgatctctgcctgggctctatcatgcaatggttgtcagccagtcccttagctggctgctgggtaatccaggatagcatcagctctacattatggatttggctgagcacgttgtttctcctctgtttggcctcttctctccagcagtgctcagacttattcatgtggtacctcagttcctraaacagcaagatggcaagccccaatcctctttgcaagcttttactttcatcacgtttgctaatgagccattgactcaggaaagacatggccagatttaagagatgaggga

SEQ ID NO: 130014 - DNA, 589 bp, Homo sapiens
acaagttcccagtagaaagcaagtattataaagacaaggatttttgattattttatctgctgttatatctccagtacctagaataatgcctggcacacagttagtgttcaataaatatttgtagaaagactaatatagagcaatgtttctcaacctggggcaacttagccctccaggggtatttggcaatgtctggacacattttttttttatttgagacagagtcttgctctttgcccaggctggagtgcagtggcatgatcttggctcactgtaacctccacctcccgggctcaaacaattctcctgcctcagcctcctgagtagctgggactacaggcrtgtgccaccacacccagctaatttttgtatttttagtagacatggggtttcaccatactggtcaggctcctcttgaactcctgacctgccttggcctcccaaagtgctggggttacaggcatgagccactgcgcctggcctggatgcttttttatcatgaggattgaagggataagcagtgctattggcttcctacaatgcacagaacagtctcttaccacaaaggattatctggctccaaatgctg

SEQ ID NO: 130015 - DNA, 589 bp, Homo sapiens
acaagttcccagtagaaagcaagtattataaagacaaggatttttgattattttatctgctgttatatctccagtacctagaataatgcctggcacacagttagtgttcaataaatatttgtagaaagactaatatagagcaatgtttctcaacctggggcaacttagccctccaggggtatttggcaatgtctggacacattttttttttatttgagacagagtcttgctctttgcccaggctggagtgcagtggcatgatcttggctcactgtaacctccacctcccgggctcaaacaattctcctgcctcagcctcctgagtagctgggactacaggcgtgtgccaccacacccagctaatttttgtatttttagtagacatggggtttcaccataytggtcaggctcctcttgaactcctgacctgccttggcctcccaaagtgctggggttacaggcatgagccactgcgcctggcctggatgcttttttatcatgaggattgaagggataagcagtgctattggcttcctacaatgcacagaacagtctcttaccacaaaggattatctggctccaaatgctg

SEQ ID NO: 130016 - DNA, 512 bp, Homo sapiens
tcatgggtgatggctttagcattggatatcaccatttccctttgcagtgacggtgtttccaattgaccaaaagggaaaaattaggtagagagcaaagagttctctacatgattgttcaagaaacagaaataaagtatcaagtctgtaagcccagggttctttggagtagtatcattcttaccttggtgacggtttggtgaggattttactgctgcttccttctcctctcatcaactaaacaagaaactatgaagtccctttcctcaaggaaagggactgtcctgatagaatacccgacctatatcatgacttgttggaatattgtgaaagcacaaaattgagagaaaaataaagttatccaatgtttagatgctgaattacactgttgtrtaaccttgattggccactacctgtgaggtgagacactggagttagccattgtgaattcaggagtcagtaaacatccagaggtgtgaagcctgctgcaggcctccagttcccccagaaaacag

SEQ ID NO: 130017 - DNA, 579 bp, Homo sapiens
cctgaaaggtaaaatcactcctagttaagaatcactggtttaaacccttgaaaacagtgaggtctcacaaatagtaagagaccagttggaatctggtgtcattctattaactgcatagctcaaaytccgaaacatctgcaaagaaaattagtacaaaacagatgcaaatgattagatcaaaactttgttttgaaaaaagaggttgctcttttctaaaagcttcagtacaaagtgaaaaaaatttacaaactaaaggcttttaataaaaagaaaaagaatgaaatccaattaaacataacgttgaagggtctgaatgtttggcttgagctgctgatggagatctggagttgtaggaaaagaaatcccacacatgcacaccacagttcatgcctgtgggtcctgcaattttatctggtgatgccttaaagtaaatgtgacattacacacattttagcatctattttcccagcaggaagtgtaagataaagaggctcaatcagtatgttaaaataagatctgatgcaggggagggaaaaaagctttcagatcataagaaataccattccgaggaaattaaaa

SEQ ID NO: 130018 - DNA, 589 bp, Homo sapiens
atctgacatttaatagctgagatgatagtggtcaaatacttctcgaggtcagattcatgcagagttcctgaaaaggtgagaaatcactgagatctgtaatgacaaagctgatgagaagattgatgaaatggtggtggcaacaggacaagtcttcaaaatagcttgtgaatgatttattttgtagcagcagagccaattgacaatagcggattgctaattaaataccaaccactgggaaaataccataaatttcttttggctcagtattggcaattgtgtactttgaagcagaggccaaattatwttccagtgagtgcttcattttagacctaaattttgtgggcctccatctctttttgctttcccttcaacctccagcatatttgatttaaaagcaaaaaggagaagagggaagaagaaagaaggggaagaagagattgaagaagagaaagaacaggtgggaagaagggaagaaagagggaggaagaaagacactcccaagtgtcctaataacatcctatcagaaaggcttatggccacgtgcggtggctcacacctgtaatcccaacactttgtgaggctgaggcag

SEQ ID NO: 130019 - DNA, 621 bp, Homo sapiens
  misc_feature (1)...(621): n = A,T,C or G
cttcattctttctccatagagaggtggtttccatgatcgatggacagtctgaagtctagaataatggtaactatcatgttctgagcttgtgtagctatcatgttctctatcttgtgatgtgccaggccttattccaggtccttcatgtcgcaccagcctcatgatctaggtgttctcttgtctttattttccagatctaggaactgcrgcacagctaagttccatgatcaaggtagtaaatgtccctgctgtatgtacctcgcccgggctcacactcatcctgatgcagtaacttggaagtcctttgtctgtgtgcacattcatgtttgcttttgaagaacactgaagagattctactttgaacagaaaatatttacaccgaggtccttgttctctctgttgagtgctaaaagtgagggccaccaaggcaaagtgacaagtggtgccaggctctcagatttgatgcttctgcttggggtagatttgtgaggggatctccaactccagcctttcaggggccaaggcaggccacgtgaatgagtgaagcaggctgggcagagactccactaacttgctagttcccttggacacagctgcagacacttgttgnnnnnnnnnnnn

SEQ ID NO: 130020 - DNA, 462 bp, Homo sapiens
ggccgaggcaggagaatcgcttgaacccgggaggcggaggttgcagtgagccgagatcgcgccatcgcactccagcctgggggacaagagcgagacttcgtctcaaaaaaaaaaaaaaaaaaaagttgtttgaaaataatatttaaatcagcacactttataaaaaacctaattttytatagaacccttcattggtcctctgtgcaaaagtattaaaccgtgaagtttttggttgtatgtttataatagaattactggttattatttttaggcgggatctcgctttgttgcccaggccggagtgcagggatgtgatcatagcttactgcagcctcaaactctttggctcacgagagcctcctgcctcagcttccctgagtagcaagggcaacggggcatgcaccgctacacccggctaattttctaatcttttttttttttttttttttttttggtacacag

SEQ ID NO: 130021 - DNA, 462 bp, Homo sapiens
ggccgaggcaggagaatcgcttgaacccgggaggcggaggttgcagtgagccgagatcgcgccatcgcactccagcctgggggacaagagcgagacttcgtctcaaaaaaaaaaaaaaaaaaaagttgtttgaaaataatatttaaatcagcacactttataaaaaacctaattttctatagaacccttcattggtcctctgtgcaaaagtattaaaccgtgaagtttttggttgtatgtttataatagaawtactggttattatttttaggcgggatctcgctttgttgcccaggccggagtgcagggatgtgatcatagcttactgcagcctcaaactctttggctcacgagagcctcctgcctcagcttccctgagtagcaagggcaacggggcatgcaccgctacacccggctaattttctaatcttttttttttttttttttttttttggtacacag

SEQ ID NO: 130022 - DNA, 510 bp, Homo sapiens
ggtttcctggacagctcatcccaagaacaagggcagcaagatgtgggtcccaaatgcacagttcgtgagtccatgctggctgatcagaggcagcacttcacctcccacagacagagggagggaggaaaccaagagaccagtaaactaatggggctcccagtctctccagtggaataaaacatcaagactggagtttcctttctcccacccccaccttgccttgacttcagatacacctattttcagatgctgtctgtagagagcctgaatttggccaagtgcattaagcccaccaggccaatgttaatgattacaggagaaaacatcactctcatgtcaacaaaataaacagaggttcaggcagcctaaataatttagccttttttcatcattattggaatgcacaatactattggccagtaatataactatgaaaaaaaatwaaaaccctaggaaataatgctttctatcactttcattgatctatctttggttgtgtggcttgctcta

SEQ ID NO: 130023 - DNA, 539 bp, Homo sapiens
tatagaacagctccattataatcttataggacyattgttgtacatgcggtctgttgttgaccgaaacatttgttatgtggaacatcactgtaaataggtttttaaaagtgtttcttgcattgccagcatgtgatacatatactaacttaatcaagaatgtaatagatcaaagatgcattaaaatcttaataaggtagtcattaatatactgccaaaaggtatagcagaaaactaataatggccataaaacaaaaataagaattaaaaagaacacagaaaaagatggagagaacagatggacagatagcaagatagtaggcttaagcctatcaataataggaattaaactagaatgctgttagtctccattgtatgttaggcacaaacattacttacataactgttaataaatgcataatttgtgatgatctacgttgacatattgatctgaaaaatcttcatgttcattgctcttggtaaacacatagtaccacaataataaatttcttgttcacataaattttgcctgtccctcactg

SEQ ID NO: 130024 - DNA, 547 bp, Homo sapiens
atggcagaattttgggggatgatagagctgttctatataaagcagtccgcatttatctgtggttttgctttcctcagtgtttcagttacccacagtcaactgaggtccaaaaatattaattggaaaattccagaaataagcaatttgtaagttttaaactgcatgccattctgaataacatgataaaatctcatgccattggattcagtcccgccctgtccccacctgggaatcattcctttgtctagcatatcaacgctgtatttaccacatgccctttagtcactgagtagccctctcaattatcagactgaaaaaaaacatagtatatatagagttcagtactatctgcagtttcaagcatccacaaagggtcttgcaatgtatcccccacagataaggggagtctcccatatcaactgcgatgctggttatatgactatacatgtttgtcaaaactcacagaacwgtacactaaaaagaataaagtttactatgtgtaaaatatacctaattttaaaaacaaaagaaaaagggtaaggtatcc

SEQ ID NO: 130025 - DNA, 547 bp, Homo sapiens
atggcagaattttgggggatgatagagctgttctatataaagcagtccgcatttatctgtggttttgctttcctcagtgtttcagttacccacagtcaactgaggtccaaaaatattaattggaaaattccagaaataagcaatttgtaagttttaaactgcatgccattctgaataacatgataaaatctcatgccattggattcagtcccgccctgtccccacctgggaatcattcctttgtctagcatatcaacgctgtatttaccacatgccctttagtcactgagtagccctctcaattatcagactgaaaaaaaacatagtatatatagagttcagtactatctgcagtttcaagcatccacaaagggtcttgcaatgtatcccccacagataaggggagtctcccatatcaactgcgatgctggttatatgactatacatgtttgtcaaaactcacagaacagtacactaaaaagaataaagtttactatrtgtaaaatatacctaattttaaaaacaaaagaaaaagggtaaggtatcc

SEQ ID NO: 130026 - DNA, 579 bp, Homo sapiens
cattattcccttctagacagagcattagcatgtccatgttactttggatttatttgttaaaaaatcaatccagaaatattttatgatactcttgtatttgcatttattccttctaattgttccttgcagaaaatcattttgatattccacccagcaagaaataagttttctgagtgaaaaatgaactctggcctttaaactgattagtactactaacaagcatgggtaagggtcatgatcacacacatttattgggaagaacagttaatgcatgggtaatgattataaatgttttatttatgtacatttaatatttaagtaaaatttcattatctagtggttttaaatcatttgagtgtccatcttgctgacatactcagactcctgcaacaraacatctcatagaaacacgtttccttttatatggaaaatagcttactcatgactattattctcggctttcatcttcagcacacataaaccacaagtccttcaagttatttgagagcaattggctgttgagaaatgtgtcttgctttagtagctgctaatagctagctccttttgaagaaagatcac

SEQ ID NO: 130027 - DNA, 562 bp, Homo sapiens
gacttccatggatgttcaaatgggctatcagtgtgaatgcaaaggakccaaaataggaacaaacgaaatggacattcagaggtcacacagtaataacattccctgcatcttacctatttgtggccattcaactccttttcaaaattacagtgaccataaataattttcaatcacatatgcaggggaagcctctacaacgcttatttctcccttagagtaaactaacttatttgtaaaagaaaactagaagactaaatagttctcacctggcctgatagagcaaacatgcttcttcaagaattgaactaagagaagactttagaccctcagcattcatcttttaattttgatgtatgcattcatgtatcttttttttttttttgagttggactttcactcttgttgcccaggctagagtgcaatggcacaatctcagctcactgcaacctccacctcctgggttcaagtgattctcctgcctcagcctcccaagtagctgggattacaggcatgtgctaccacgcccggctaaatttttttgtatttagtagagaaggggttt

SEQ ID NO: 130028 - DNA, 562 bp, Homo sapiens
gacttccatggatgttcaaatgggctatcagtgtgaatgcaaaggatccaaaataggaacaaacgaaatggacattcagaggtcacacagtaataacattccctgcatcttacctatttgtggccattcaactccttttcaaaattacagtgaccataaataattttcaatcacatatgcagggraagcctctacaacgcttatttctcccttagagtaaactaacttatttgtaaaagaaaactagaagactaaatagttctcacctggcctgatagagcaaacatgcttcttcaagaattgaactaagagaagactttagaccctcagcattcatcttttaattttgatgtatgcattcatgtatcttttttttttttttgagttggactttcactcttgttgcccaggctagagtgcaatggcacaatctcagctcactgcaacctccacctcctgggttcaagtgattctcctgcctcagcctcccaagtagctgggattacaggcatgtgctaccacgcccggctaaatttttttgtatttagtagagaaggggttt

SEQ ID NO: 130029 - DNA, 562 bp, Homo sapiens
gacttccatggatgttcaaatgggctatcagtgtgaatgcaaaggatccaaaataggaacaaacgaaatggacattcagaggtcacacagtaataacattccctgcatcttacctatttgtggccattcaactccttttcaaaattacagtgaccataaataattttcaatcacatatgcaggggaagcctctacaacgcttatttctcccttagagtaaactaacttatttgtaaaagaaaactagaagactaaatagttctcacctggcctgatagagcaaacatgcttcttcaagaattgaactaagagaagactttagaccctcagcattcatcttttaattttgatgtatgcattcatgtatcttttttttttttttgagttggactttcrctcttgttgcccaggctagagtgcaatggcacaatctcagctcactgcaacctccacctcctgggttcaagtgattctcctgcctcagcctcccaagtagctgggattacaggcatgtgctaccacgcccggctaaatttttttgtatttagtagagaaggggttt

SEQ ID NO: 130030 - DNA, 453 bp, Homo sapiens
gatccgacagcctgtgatcggcaacaatgggtagattaaaaagcatttcatccccctcgctctctccacacacatatactcacatacatgcacacagagccrtaagcctacttcccaggtgggcttcttccagctctttctgatccagaacaggtttttaatcacttcatcttgtttagtgatggctgctatttgctgctttacaaagccatgaacatttacaatatgagacaaatctgattgtcctgattaaatcctacaacctgtggaggtttccctttgattatctaatgaattttcttttctctacctgttattgatttcttctgaaagaaaacaccccaggaatcaaggacaaaataccatggatctgattataaaagatttacttgtaatcataaatagccctactggattggaccataaatagctaacacggtgaccctctaaagg

SEQ ID NO: 130031 - DNA, 561 bp, Homo sapiens
tgccgtttactgattcacgagcaaaagcaaagaggcagagaagttaaatagatctttggaaggactgggtagcaataattggagtttaggactcatcaacaagaaaccctagaaaagaccccaagctttcaaytgggcttccccaaagggccacactttaagtatggggtaaaatggaattagactggccctcacaaagactaaagcccatctgactggtttagaataatctatttctaccttaactgtctgaaagagcacatagtccaaaaccaagaaaaaaaaacagacaagaaaagcaaaccctgaagaaatgtggatatagtaattatcagacatggacattaaaacaaccataatttatttattcaagaaatcagatgataagatagaggacttcagcatagaactgagagccacaaaacaataaaataaaaattttagaaataaaaaatgtgataattgaaattaagaacacaatagatgaggtaagcatcaaccaagacacagctgaggagattattgaactgaaatacaggtcacaaaaaaattatatacaga

SEQ ID NO: 130032 - DNA, 401 bp, Homo sapiens
ttttcttttgaaattcttagttgcawatattcccttttttaagctatgcaaatgatagtgagcctactttgcatacattttgtgtagtctgttcggtgggaattttggtagaaacttataaaggatggaacatgctattttgttacctttgaaatatttgcagaataaagagatggtgaacagatgggaaattattcactgcaggaatcgaaacagaaatatttcaaattttcttcatcagtgtatgggaaaatcttgagcacggaaaagggtgacttctctgtatttaaaacagacacaacctggttgttttcacaggcatattattattatttcttagataagtgagtaagtatgtaagtatgtcaacacataaatgcatgcgtgtgggaaagtagcat

SEQ ID NO: 130033 - DNA, 373 bp, Homo sapiens
tgcatatattcccttttttaagctatgyaaatgatagtgagcctactttgcatacattttgtgtagtctgttcggtgggaattttggtagaaacttataaaggatggaacatgctattttgttacctttgaaatatttgcagaataaagagatggtgaacagatgggaaattattcactgcaggaatcgaaacagaaatatttcaaattttcttcatcagtgtatgggaaaatcttgagcacggaaaagggtgacttctctgtatttaaaacagacacaacctggttgttttcacaggcatattattattatttcttagataagtgagtaagtatgtaagtatgtcaacacataaatgcatgcgtgtgggaaa

SEQ ID NO: 130034 - DNA, 428 bp, Homo sapiens
tagaaagtcaaatgttttcttttgaaattcttagttgcatatattcccttttttaagctatgcaaatgatagtgagcctactttgcatacattttgtgtagtctgttcggtgggaattttggtagaaacttataaaggatggaacatgctattttgttacctttgaaatatttgcagaataaagagatggtgaacagatgggaaattattcactgcaggaatcgaaacagaaatatttcaaattttcttcatcagtgtatgggaaaatcttgagcacggaaaagggtgacttctctgtatttaaaacagacacaacctggttgttttcacaggcatattattattatttcttagataagtgagtaagtatgtaagtaygtcaacacataaatgcatgcgtgtgggaaagtagcatggtcaccaaggaa

SEQ ID NO: 130035 - DNA, 575 bp, Homo sapiens
agatctgttttacagtggcctgaactgtagatttggggaaaagatgaaaatgatccattccatcttggtcatgctcagtttgatctatctgtgagatatacaggcaggatatacrtgtctgggggtatagagggatctgggctgcagatacagggtaggaactcatcacattatctatgtccaaagatcacccagctagtaagtgacagaggttggatttatacccagtctaggtgactcccaaaccctgtacacaactaacactcagtactgttgctttcttagatgacctgcaatcccaaagtcaagattctaaagatggcattattccattggctgtagtccatgccattccttcacctccagagtctccattcctcattccatacccttaaggggacttagaaccatccttccctttcctgtgctgtgcagcttgtgtttgccaaaatgagctttagcctctgacatggtttggctgtgtccctacacaaatcttatcctgaattgtagctcccataattcccatgtgttgtgggagggacctggtgggagataattgaatcatggggatg

SEQ ID NO: 130036 - DNA, 575 bp, Homo sapiens
atttggggaaaagatgaaaatgatccattccatcttggtcatgctcagtttgatctatctgtgagatatacaggcaggatatacgtgtctgggggtatagagggatctgggctgcagatacagggtaggaactcatcacattatctatgtccaaagatcacccagctagtaagtgacagaggttggatttatacccagkctaggtgactcccaaaccctgtacacaactaacactcagtactgttgctttcttagatgacctgcaatcccaaagtcaagattctaaagatggcattattccattggctgtagtccatgccattccttcacctccagagtctccattcctcattccatacccttaaggggacttagaaccatccttccctttcctgtgctgtgcagcttgtgtttgccaaaatgagctttagcctctgacatggtttggctgtgtccctacacaaatcttatcctgaattgtagctcccataattcccatgtgttgtgggagggacctggtgggagataattgaatcatggggatggtttcccctattctgttcttgtggtagtga

SEQ ID NO: 130037 - DNA, 561 bp, Homo sapiens
atttggggaaaagatgaaaatgatccattccatcttggtcatgctcagtttgatctatctgtgagatatacaggcaggatatacgtgtctgggggtatagagggatctgggctgcagatacagggtaggaactcatcacattatctatgtccaaagatcacccagctagtaagtgacagaggttggatttatacccagtctaggtgactcccaaaccctgtacacaactaacactcagtactgttgctttcttagatgacctgcaatcccaaagtcaagattctaaagatggcattattccattggctgtagtccatgccattccttcayctccagagtctccattcctcattccatacccttaaggggacttagaaccatccttccctttcctgtgctgtgcagcttgtgtttgccaaaatgagctttagcctctgacatggtttggctgtgtccctacacaaatcttatcctgaattgtagctcccataattcccatgtgttgtgggagggacctggtgggagataattgaatcatggggatggtttcccctattctgt

SEQ ID NO: 130038 - DNA, 588 bp, Homo sapiens
ctcaggtctaaccttcgttattagcctgaatgctttgaggggtaatgaagtaaatatacaaaaaaagccattttgtgaggcatctgttkaggtgaggccattgcatgtttggaggcaaatggaagatacactattttagcaaattggcctggattcccccagggatacagcctagccatgatgcaaatgtggcataataatgtgatgctgtgtctgtggctacatgtggggctggctgtggcagtagtagaaacctggattgaagccataaggacatagcaacccattgctaagacctctgtaggccaggggagtagaaggtgtgttggtctaaggtgatgtaaaaatcaaattcaacagagactccttttttgtaagcatgctgaaatgtcctggcacttccactttgctttactgtaagccatcttccagtccaggcctggaggagccatctatctcaccaaactcatctcagatcattaatatcaagtattaggtaagtgccttcatgccaataaattctatcctgttcattgttctatttttctcacctggttaacagccaccatacttactcttacatgcatt

SEQ ID NO: 130039 - DNA, 621 bp, Homo sapiens
gaattcacctctttatgttttcaagtctgtgggcatgagttgttcatagtattctttcattagccttttaatgtccaagcatctgtggtaatggtacatmtttcagttctggtattagtgatttgtttcttccttttcattaattagcttggctggagtttcatcaattttattaatatagtcaaggaaccagcttttagtttcattgattttctctagtaatttcattaaaacggattttttaagaaataaaacacacatatacacaaacaaaaactttcaaatgagccatcagttaaggaaataaacttttcaactacagactccttagaatggcagtgcataatgaaccctatgagatgaggcataagtggcattcactcatttaagccaaaaactatttatgagaatagaagccaggttggaaataaagaagtcttttgaggaaagtaaaaaatggatgagaaaactaatgtaagaaaattgaaggtaaagcggatgtagaagttaggaattaagagaccagtagggtcttgagagattactgcgtttaaacctgtaatttttactggtaggcaacgtgaagttcagaaaaggtcctttgaccaataataacaataa

SEQ ID NO: 130040 - DNA, 563 bp, Homo sapiens
aattcatggtttgcgggtagagtcctaagaaagcatgtcaaagggcatagatagcatgttgaagaaatatcaaaccctgtaaatgtcatttatttacttatttaagtataagsaattatttttaactcctaaggacttttcatcacctaaaaagtttaactcctaaggacttttcatcacctaaaaagaaaaaaaaaaagcacaatacttaaaaacagaatagattaatgatgttgattatttcaaatataactgagatgtgttctggaactaaaaattttcaggttatattggatgaaaccaccaagtaacaattgtatgtgacttaaaaaaagtgtgtgtattatgcagttaggtagttaaaacgtattcaatcaaatcataatatgaaaaataattctgattataatcaattttgtttcattatatctcacaaaatgtttgctattttctgtctcctacttaaaaaagtaaaatttaatacaactggaccaattactttttagcagtatgatcatgtccagcaaatttaattgagccacttttgaatttgtatttattat

SEQ ID NO: 130041 - DNA, 531 bp, Homo sapiens
gtggaatttatttaagttgctttgtgactttgcttttaaaacttagtaatttagcttgattttattggaaagagtatctgaaaaactttgccccagttttagttttagtctgagactatataaagctcttgcaaaaattatcaccctgtaacttggcttctcagaagagtgtcttctagcatttctcatcatgcccacctctttgcactctttttttctgtctctcactctaggtcaggcacttccaggcatctgtttcctcttggggactcatgattaatttctgcctgactctgatgactctcatgtagaaaatgcctagaaaaagagtaacttccagcaggcgagcctgcyttctgattattgattgagtggaaaacccatatttcaactcccatccactagccgccaggatcagctattctattttctaaagtaaaccaaggtggtggccatttagctcagttggttagagtgttgctgaagaagtaaaccaagcctgcagccttatagtatatatggttatagaac

SEQ ID NO: 130042 - DNA, 205 bp, Homo sapiens
ttcttccctcagattctcacataatttaatacaacttagtaaaagatctattgaaaaaactcatcatagtcaaaaagcactgttatttaggcactatcacagttgctgatggaaacagaaattggtacaacgttttgggagaaaactggcacaaacaggaagggayggctaaggtagagttataaactgcctagctgagtgttga

SEQ ID NO: 130043 - DNA, 538 bp, Homo sapiens
cctctcttgccactgcttagtgaagacacaagagcactggagtaccagaggcagctattacaggttattaacttctttccagttaagggcatacatttaatttgcattactgaatatgcatgagcagctttcagctgaaaaagaattttggcagttgtgacaaggccttcaccaaaactatgacatgagtgttaagtgatgargaagtagagtttcctctttcaacaggaaggttgaagatctggcaagctttcctgttggctctgtgggcgagtgtctcactttctaacaaccacgtaaaacaaaatcagttcagactggcttctgttggcatagggctcatggggacatggctaacaacttctgcttcatatggtagtggaaagaacaccaaattgaaggctgaagaccacggttcagatcacagattggctgttaatcatctgactcattgagcaagccactgagcattttggagccaaaatttcacagtatgaaacagggactatgatgtcaactcagcgttgtttgagaaaaa

SEQ ID NO: 130044 - DNA, 538 bp, Homo sapiens
cctctcttgccactgcttagtgaagacacaagagcactggagtaccagaggcagctattacaggttattaacttctttccagttaagggcatacatttaatttgcattactgaatatgcatgagcagctttcagctgaaaaagaattttggcagttgtgacaaggccttcaccaaaactatgacatgagtgttaagtgatgaagaagtagagtttcctctttcaacaggaaggttgaagatctggcaagctttcctgttggctctgtgggcgagtgtctcactttctaacaaccacgtaaaacaaaatcagttcagactgscttctgttggcatagggctcatggggacatggctaacaacttctgcttcatatggtagtggaaagaacaccaaattgaaggctgaagaccacggttcagatcacagattggctgttaatcatctgactcattgagcaagccactgagcattttggagccaaaatttcacagtatgaaacagggactatgatgtcaactcagcgttgtttgagaaaaa

SEQ ID NO: 130045 - DNA, 538 bp, Homo sapiens
cctctcttgccactgcttagtgaagacacaagagcactggagtaccagaggcagctattacaggttattaacttctttccagttaagggcatacatttaatttgcattactgaatatgcatgagcagctttcagctgaaaaagaattttggcagttgtgacaaggccttcaccaaaactatgacatgagtgttaagtgatgaagaagtagagtttcctctttcaacaggaaggttgaagatctggcaagctttcctgttggctctgtgggcgagtgtctcactttctaacaaccacgtaaaacaaaatcagttcagactggcttctgttggcatagggctcatggggacatggctaacaacttctgcttcatatggtagtggaaagaacaccaaattgaaggctgaagaccacggttcagatcacagattggytgttaatcatctgactcattgagcaagccactgagcattttggagccaaaatttcacagtatgaaacagggactatgatgtcaactcagcgttgtttgagaaaaa

SEQ ID NO: 130046 - DNA, 538 bp, Homo sapiens
cctctcttgccactgcttagtgaagacacaagagcactggagtaccagaggcagctattacaggttattaacttctttccagttaagggcatacatttaatttgcattactgaatatgcatgagcagctttcagctgaaaaagaattttggcagttgtgacaaggccttcaccaaaactatgacatgagtgttaagtgatgaagaagtagagtttcctctttcaacaggaaggttgaagatctggcaagctttcctgttggctctgtgggcgagtgtctcactttctaacaaccacgtaaaacaaaatcagttcagactggcttctgttggcatagggctcatggggacatggctaacaacttctgcttcatatggtagtggaaagaacaccaaattgaaggctgaagaccacggttcagatcacagattggcygttaatcatctgactcattgagcaagccactgagcattttggagccaaaatttcacagtatgaaacagggactatgatgtcaactcagcgttgtttgagaaaaa

SEQ ID NO: 130047 - DNA, 499 bp, Homo sapiens
gggcaaaatgcagccaagttctttgctaaagcataacaaaagtgacttttacgccattcccaataagttccttatcttcatcttagacrtcatcagcctggctatctccatatcactatcagcattttggtcacaactattcaacaagtttctagaaagttccaaattttccttcatcttcctgtcttccaatctctgcctgctacccagttccaaagctgcttccacattttcagatgcctttctggcaatgtcccattcctcagtgccaatctgtattagtccattctcgcactgctataaagaaatacctgagactgggtaaactttttttttttaaagtttaattgattcacagttcccccatccttctacagaaatcatgcggctggcattctgctcagcttctggggaggcctcaggaaacttataatcatgacagaatgttaagggggagcacacacatcatatgactggagtaggagcaaaagagagagtg

SEQ ID NO: 130048 - DNA, 499 bp, Homo sapiens
gggcaaaatgcagccaagttctttgctaaagcataacaaaagtgacttttacgccattcccaataagttccttatcttcatcttagacatcatcagcctggctayctccatatcactatcagcattttggtcacaactattcaacaagtttctagaaagttccaaattttccttcatcttcctgtcttccaatctctgcctgctacccagttccaaagctgcttccacattttcagatgcctttctggcaatgtcccattcctcagtgccaatctgtattagtccattctcgcactgctataaagaaatacctgagactgggtaaactttttttttttaaagtttaattgattcacagttcccccatccttctacagaaatcatgcggctggcattctgctcagcttctggggaggcctcaggaaacttataatcatgacagaatgttaagggggagcacacacatcatatgactggagtaggagcaaaagagagagtg

SEQ ID NO: 130049 - DNA, 528 bp, Homo sapiens
caaaatgcagccaagttctttgctaaagcataacaaaagtgacttttacgccattcccaataagttccttatcttcatcttagacatcatcagcctggctatctccatatcactatcagcattttggtcacaactattcaacaagtttctagaaagttccaaattttccttcatcttcctgtcttccaatctctgcctgctacccagttccaaagctgcttccacattttcagatgcctttctggcaatgtcccattcctcagtgccaatctgtattagtccattctcrcactgctataaagaaatacctgagactgggtaaactttttttttttaaagtttaattgattcacagttcccccatccttctacagaaatcatgcggctggcattctgctcagcttctggggaggcctcaggaaacttataatcatgacagaatgttaagggggagcacacacatcatatgactggagtaggagcaaaagagagagtggaggtgctacatacttttaaacaaccagatct

SEQ ID NO: 130050 - DNA, 507 bp, Homo sapiens
agttctttgctaaagcataacaaaagtgacttttacgccattcccaataagttccttatcttcatcttagacatcatcagcctggctatctccatatcactatcagcattttggtcacaactattcaacaagtttctagaaagttccaaattttccttcatcttcctgtcttccaatctctgcctgctacccagttccaaagctgcttccacattttcagatgcctttctggcaatgtcccattcctcagtgccaatctgtattagtccattctcgcactgctataaagaaatacctgagactgggtaaactttttttttttaaagtttaattgattcacagttcccccatccttctacagaaatcatgcggctggcattctgctcagcttctggggaggcctcaggaaacttataatcatgacrgaatgttaagggggagcacacacatcatatgactggagtaggagcaaaagagagagtggaggtgctacatacttttaaacaa

SEQ ID NO: 130051 - DNA, 586 bp, Homo sapiens
agatctagattctattttctgaagattcttgaattataggagttaaagatttataaacaacggtaattcaacaaaccaaatctacaaaatgctgaatatactaggtggtcacaccctgaaaacaagcaatccacaggtgtataatttcctatcaaaactgatctcaaaatacacacacaaattgcatagctacaacttttaacataaaatgagaattatactactttctacaaaggattgtaatgaatactaaacctgttattaaatattgataaacacatctggtctgagcacatagtaactgcttaataaaagttagttccctctgcctcccttctctcaattktattatatcagttcatacattagtgtctgaatcctcccctttatttgtctcttccactttgttttcctttctcttctttcttgctcctcttacacataacaattttatctctattgagaacatgggaaatattttcagactacattccattccattgtatttccattaggcaaaatacttttttattaaaacagacttggaatttactagtctgaaatattctggttgttcctgaaagct

SEQ ID NO: 130052 - DNA, 537 bp, Homo sapiens
aacttataactatatatatctatgtaaccaacacgacaattgagatttagaaaatttccatcaccttagtaaattttcttggacaccgattcaatcagttccctttgtctccatggccttgtcttctctcttgagacaaccacagctacatggtatttcattgtacagaaacactaaaattgattcaactgtgtatgttttaatgaattcatgttcattcccaaatcttaggatgtaactttggtcaaattacttaaactagtagttcccaattttggttctactagtcttcaaggragtctaccaataagttaatatacacatgatgtttacaacgtttgagaaggccgacataatataactagtaagattatcagtaaagtaaggaggaagagaagagaaaatatatcagaaaagaaaccttgttctgtcaatttgggtggaagctgtctacttagtgtcatcatcgatcagatgtgacatccatgggttagtagtcacactccaatgattgtcacctggagaattcttaaaaat

SEQ ID NO: 130053 - DNA, 576 bp, Homo sapiens
gattaggacccattaactttaagacaaaatttttctcttttttcccaaaacatataattatcttgcatgtatattatcaaacatattattttacatttttttcaaaaataaatatgcaataaatgccaaatataaaaagcttatagctgacatcatgttcaatgagagaaaaaacaaagctttttctctatgatcaggaaaaagacaagtatacccactcttaccacttctattccagttagttctggaagtattarccagaacaatttaacaataacaacaacaaaaataataaaagaagcaaaattatctcttttattcagatgacataatcttatatgtagaaaattctaaagctgccacaacaaagctaatatactaattcagcaaagctgcagaatacaaaatcaacatgcaaaaattagttgcgtttctatacactaacaataaacagtctgaaaagataatttaaaaaattttcatctacaatactatcaaaaaaataaaataggcataaacttaaccaaggaggtgaaggtcttgtatattaaacattataaaacattgctgaaagaa

SEQ ID NO: 130054 - DNA, 576 bp, Homo sapiens
gattaggacccattaactttaagacaaaatttttctcttttttcccaaaacatataattatcttgcatgtatattatcaaacatattattttacatttttttcaaaaataaatatgcaataaatgccaaatataaaaagcttatagctgacatcatgttcaatgagagaaaaaacaaagctttttctctatgatcaggaaaaagacaagtatacccactcttaccacttctattccagttagttctggaagtattagccagaacaatttaacaataacaacaacaaaaataataaaagaagcaaaattatctcttttattcagatgacataatcttatatgtagaaaattctaamgctgccacaacaaagctaatatactaattcagcaaagctgcagaatacaaaatcaacatgcaaaaattagttgcgtttctatacactaacaataaacagtctgaaaagataatttaaaaaattttcatctacaatactatcaaaaaaataaaataggcataaacttaaccaaggaggtgaaggtcttgtatattaaacattataaaacattgctgaaagaa

SEQ ID NO: 130055 - DNA, 576 bp, Homo sapiens
gattaggacccattaactttaagacaaaatttttctcttttttcccaaaacatataattatcttgcatgtatattatcaaacatattattttacatttttttcaaaaataaatatgcaataaatgccaaatataaaaagcttatagctgacatcatgttcaatgagagaaaaaacaaagctttttctctatgatcaggaaaaagacaagtatacccactcttaccacttctattccagttagttctggaagtattagccagaacaatttaacaataacaacaacaaaaataataaaagaagcaaaattatctcttttattcagatgacataatcttatatgtagaaaattctaaagmtgccacaacaaagctaatatactaattcagcaaagctgcagaatacaaaatcaacatgcaaaaattagttgcgtttctatacactaacaataaacagtctgaaaagataatttaaaaaattttcatctacaatactatcaaaaaaataaaataggcataaacttaaccaaggaggtgaaggtcttgtatattaaacattataaaacattgctgaaagaa

SEQ ID NO: 130056 - DNA, 641 bp, Homo sapiens
tgagtcactgtgatatcaaattgctcttggtgaaattatggcatttagaaagacatgtacatggataatacttataatgcaaaaacatgaaaaacacagggtttggcctggagggagcttagatttagggctcatgataaatgcaaaaatgctaacttatgtctctggaatctggacatagaccagctttgaccaactgctggcccaggaacccaaaagtccaggcagattgacttagacacagcagctctaatcaaacagaaaaacaaagacaattgtgaggaaggtctttatagggctttgataaggtgatccaaagcaaagtttatccacaggctgtcagtttgatgagaacattggaactcatcagcttttggggccagcttgaggatagatttacagggtctatgtctaccttgtctccatagactttctcttaaagaygaaaagtgctcaagatattggacaaacagaaagacaatagatgatggtgttaaaagctaaattttgcaaaggaacaatataatttgatgtgaaatcaaaagcctaagaaaccagatataaataacactccagatttcaagcaataattgaaacttagcttcatcatgaaacttactttgctgtagtaggcaaagtag

SEQ ID NO: 130057 - DNA, 641 bp, Homo sapiens
tgagtcactgtgatatcaaattgctcttggtgaaattatggcatttagaaagacatgtacatggataatacttataatgcaaaaacatgaaaaacacagggtttggcctggagggagcttagatttagggctcatgataaatgcaaaaatgctaacttatgtctctggaatctggacatagaccagctttgaccaactgctggcccaggaacccaaaagtccaggcagattgacttagacacagcagctctaatcaaacagaaaaacaaagacaattgtgaggaaggtctttatagggctttgataaggtgatccaaagcaaagtttatccacaggctgtcagtttgatgagaacattggaactcatcagcttttggggccagcttgaggatagatttacagggtctatgtctaccttgtctccatagactttctcttaaagacgaaaagtgctcaagatattggacaaacagaaagacaatagatgatggtgttaaaagctaaattttgcaaaggaacaatataatttgatgtgaaatcaaaagcctaagaaaccagatataaataacactccagatttcaagcaataattgaaacttagcttcatyatgaaacttactttgctgtagtaggcaaagtag

SEQ ID NO: 130058 - DNA, 595 bp, Homo sapiens
caaactattaaggacacaagtatgggaatttttaaggttgacacccttgggaaaggtggtatcttgagagtttattggctgacccatatgtcatgctccccacagagaacatgcacctggcagtgaggttggtattatcacaggggaaggggtccccagggagatgaaataatgccagagaccaattaagtttacwgctgtgccagggctggctcttcctggccatatcccagccctggagtaatatctctgactccagcctttttctcctgaaataaatctttgaagtgctgtattggaaatgcaaacctgcatcactatcccctaaaaatctttctgtggctttccttcgctgaacttttccaaagcatggcaccaaagtgctcagcatcatggcccctgcctcaccctccagctatatttctcctcacgaattccccagcatcctacttcatttcacaattcatagttctgctcataatcttgattttctatattctaatcaaggcctattcatgatttaagaaaaaagtataaagaaacaagaaaacaagtagattaatgaacaaacaagtaactggtgatgaacagttgg

SEQ ID NO: 130059 - DNA, 595 bp, Homo sapiens
caaactattaaggacacaagtatgggaatttttaaggttgacacccttgggaaaggtggtatcttgagagtttattggctgacccatatgtcatgctccccacagagaacatgcacctggcagtgaggttggtattatcacaggggaaggggtccccagggagatgaaataatgccagagaccaattaagtttactgctgtgccagggctggctcttcctggccatatcccagccctggagtaatatctctgactccagcctttttctcctgaaataaatctttgaagtgctgtattggaaatgcaaacctgcatcactatcccctaaaaatctttctgtggctttccttcgctgaacttttccaaagcatggcaccaaagtgctcagcatcatggcccctgcctcaccctccagctatatttctcctcacgaattccccagcatcctacttcatttcacaattcatagttctgctcataatcttgatkttctatattctaatcaaggcctattcatgatttaagaaaaaagtataaagaaacaagaaaacaagtagattaatgaacaaacaagtaactggtgatgaacagttgg

SEQ ID NO: 130060 - DNA, 621 bp, Homo sapiens
attcaatgcaattcaacattccactgcataaaaagtttcttgatgtgattgcttgttccccagaatgtgttatttgactttgcatctggctagcttatggaaattaaatgtattatctctgaagtacatgtaattttcatagtaagctagtagcttaatatattgattttagagtttaaggggggagggggaagcatacattgcccatattgttgcagagctgatttttagtgaaagggatttgtaatacaactgatcagtgtttggagaaagtttcctgaagtcctgcataatttattttaaaacttataaagttggattgttgttcaaagagaaccatgtttatagatttaygtcctagtgtcttctgacttatgcaacttaatattcttgtttagagagttgggattctttattttaggtccagccaagatcattttaaactctctatcacagttttctatcacttgggaaatttgtgatggttttaagaacaaaaatatcccaaatatttgcttttttggtggctttgttttctagcagtactgtgtaggacttcaatattatggaaaatgttcttgtacattcttcctcttcaatatctcagtgatcatcaaagga

SEQ ID NO: 130061 - DNA, 397 bp, Homo sapiens
taatagcatttattgagcaccaactgtgagccatrctccacattagaccctgggatacagaaagttgtaggacatagcccctgctctcaagaatcaccatttattggggggaaaacctacacataagcaattatcaaaatatgttgtcatatgtcatgtgatggacttatatgaactagtgttggcatctttgaacaccacaagctccaccagaggcagagattaaggtgagggtctcacaaggaacccctgaaccacagactgtcacataaaaaatatgtgctgtttcaatcacctagtttgtggcaatttcttatgaatcgttgaaaactaatacaggactattataaacgatagagatttaatatgtttttctaaattattaatcatgatgcat

SEQ ID NO: 130062 - DNA, 397 bp, Homo sapiens
taatagcatttattgagcaccaactgtgagccatactccacattagaccctgggatacagaaagttgtaggacatagcccctgctctcaagaatcaccatttattggggggaaaacctacacataagcaattatcaaaatatgttgtcatatgtcatgtgatggacttatatgaactagtgttggcatctttgaacaccacaagctccaycagaggcagagattaaggtgagggtctcacaaggaacccctgaaccacagactgtcacataaaaaatatgtgctgtttcaatcacctagtttgtggcaatttcttatgaatcgttgaaaactaatacaggactattataaacgatagagatttaatatgtttttctaaattattaatcatgatgcat

SEQ ID NO: 130063 - DNA, 397 bp, Homo sapiens
taatagcatttattgagcaccaactgtgagccatactccacattagaccctgggatacagaaagttgtaggacatagcccctgctctcaagaatcaccatttattggggggaaaacctacacataagcaattatcaaaatatgttgtcatatgtcatgtgatggacttatatgaactagtgttggcatctttgaacaccacaagctccaccagaggcagagattaaggtgagggtctcacaaggaacccctgaaccacagactgtcacataaaaaatatgtgctgtttcaatcacctagtttgtggcaatttcttatgaatcgttgaaaactaatacaggactattataaaygatagagatttaatatgtttttctaaattattaatcatgatgcat

SEQ ID NO: 130064 - DNA, 577 bp, Homo sapiens
tctgttttccttcatggatactttttatcaagcatctctttacttgcagtagcttcaggcagggcatcactcataccccacagtttaacaatcccagagaagtcttgggattcagcttcattgccatggagtccatttctgagcacgtctttttggccagtgggatggatatattatgatttagcaggactgggcagaggaatatgattaacctcacctccaaccatgttggattcagagaggagaaggtggagtgggtgctggggtgcaaactcatggtagtccttgacytcacctactctcattcccttctctcatgcctgaggagaccccagaccctatgctccatacctacttcttggtagttgaacactaagaggaaaaaaaaaaaaaaggaagactgaagtgaagaaatagagtaagagaaagaatgagatttcccaaaagaagatcaaagagagaagaagtacaatagaaaaataacctctcctggacaaaaaaaaattcaaaaatgactttcttcaagaagaaacagggcttctattaagttggtgcaaaagtaattgtggttttgcca

SEQ ID NO: 130065 - DNA, 605 bp, Homo sapiens
cccaccaaacatacaaatttctgagccccacaccaatcctatttaatcagaatctctgggctagaggatgggagtttggtgggggaggcatgaggcccaggaatccacatacttaaaaatatttttcagttggttctttagtactctgatgtttcagattcatttttatagagtaatatattcatctcaattttttgctattcagtttctgaatcacrtgaattcttgcacctttaattaaaaaggaaatgggattcaataccaggagacttcatgagtcacaaattggtttatgttcttccatgaccacactagacaactgggggacatttacctgctcctatggcatcctgttattttagtatcataggatttcttacatgttacttctattgcatgtaatatcatttttcctcttgtctacagtgtgagctacatgaggacatggaccaaggctatttggtttatcattatgtttctagctgctatcacagtgcctggccttcatgaatgcatggacaaataaatgagttagtaggaatgactgaatgagtaaataagcaaatgaagaaaatactttcatctgatattagtttcatcacatt

SEQ ID NO: 130066 - DNA, 609 bp, Homo sapiens
tgcttcattgttttttattattttttctttttgtctcctctgtgtattttcaaatagcctctattcragctaattctgctttatccattctaattctgctttatccattctgctattgagagactctgatgctttactcagtatgtcaaatacatttttctattgcagaatttgtgctgcttttttaaattttcaatccctttgttaaatttatcttatagaattctgaatttcttctctgtgttatcttgaatttctttcttcaagtttcttcaaaacagctattttgaattctctgtctgaaaggttacatatctttgtttctccaggattttttcctggtgccttatttagtttatttggtgaggtgttcattttctggatgatgttgatggttattgatgtttgtcagtgtccaggcattgaacagttgggtatttatcatagtcttcacagtctgggcttgtttgtagccatctttcttcaaaaggctttctatgcacttgaagtgacttaggtgttgtaagctaagccaaactgcattagagggcacacccagcccagtaacactgtggttcttgcagacttgtagagatactgcattggtgg

SEQ ID NO: 130067 - DNA, 456 bp, Homo sapiens
agatgtatctgataagttaaggaaaaaatgaatcattccaagggatagacatggtaaaaatgtagatatttggcaaggctaaagtgattgcagtatgcagggcagtgtgataggggaagaaattgaaagatgaaggacaaattagggagttaattaatacagtaggtcacacatgaagctccagtatatcacagagaaggtcacacaggggacactgtggcaatagaagtagtaataggagctagtgactgatcacttatggcaaagaagaaaaagcctcatttatagcatcaaagttttacccctgagaacatagtgctgatgacagaaatacggaagtcagtgggtgaagagagttttggtatagaagacaaaaagtgaactaasatgcttctgttgcctgttgtaagcactggggtagatagtttacagaatatactttcttctacaaagata

SEQ ID NO: 130068 - DNA, 369 bp, Homo sapiens
gaagccttaatatgtacaatatatcagctctccagatatattcacagatttgatgcactttcatctaaaaatctgaagggtttttatttggtggaggttgcttgacaaaatgatatttaaaatatgaaagaaaaaaacaattagtagcatttacattttgatctaaaacttgggaagayaggacttatttctgctagatatcaagacatgttctaattgtattttaattaacagagtgtggtatttgcataatagaatataacagagcacccagaaagagacccagtaatatatggaagtttagtacacagtagatgttgtataccattccataaattatgtaagagcattgactatttatataatcca

SEQ ID NO: 130069 - DNA, 567 bp, Homo sapiens
ttggtgagaaatgtaaaagaactgggactctcagtctatgctggtggacctgtatgatggtctgactacttaggaaaatagttttttagttttctraaaagttaaatatacatctactatatgagccagtaatcctatttttaagaattaacccaagagaaataaaagcatatgtctataaaaaagacttgtgtaggaactcagaacagctttatttgtaatagccaaaaccaatatccatcaaaaggtaactgtataaacaaacggagatgtatccatacaatgaaatattatccagtaataaaaagtaatgaactattcataacatggatgaatttcaaaatagctatgctgatgggaaaaaaagccacacaaaagactatatatcatgtgactccattcgtattaaactctgaaaaatgtaaaccattctttagtgtcagaaagacaatcagtggttgcctggaggataaggaagagaggaacttcaggtaggaagaaggttctagaggtaaagactgtgttcactctgttgattgtgatgagagtttcatacacggaaataaa

SEQ ID NO: 130070 - DNA, 567 bp, Homo sapiens
ttggtgagaaatgtaaaagaactgggactctcagtctatgctggtggacctgtatgatggtctgactacttaggaaaatagttttttagttttctaaaaagttaaatatacatctactatatgagccagtaatcctatttttaagaattaacccaagagaaataaaagcatatgtctataaaaaagacttgtgtaggaactcagaacagctttatttgtaatagccaaaaccaatatccatcaaaaggtaactgtataaacaaacggagatgtatccatacaatgaaatattatccagtaataaaaagtaatgaactattcataacatggatgaatttcaaaatagctatgctgatgggaaaaaaagccacacaaaagactatatatcatgtgactccattcgtattaaactctgaaaaatgtaaaccattctttagtgtcagaaagmcaatcagtggttgcctggaggataaggaagagaggaacttcaggtaggaagaaggttctagaggtaaagactgtgttcactctgttgattgtgatgagagtttcatacacggaaataaa

SEQ ID NO: 130071 - DNA, 597 bp, Homo sapiens
aagacatagagtggcaacctggataaaaagacamgacccaactctctactgttttcaggagacccatttcacatataatgacacctatacgctcaaagtaaagtgatggagaaagatccaccatgcaaacagaaaacaacaaaaaagagcaagaatagctattcttatatcagataaaacagattgtaaaccaacaacaatcaggaaggacaaagaagggcattacctaatgataaaggattccattcaacaagaagacttaactatattaaatatatatgcacccaacattgagacacccagatttataaaacaagttatttttgacctactaaaagactagggcagctacacagtaatagtgggggacttcaacactccactgacagcgttagacagatcatcaaggcagaaaactaatgaagaagttctggacttaaactcaacacttgatcaaactgacctaatagacatctacagaatactccacctgacaaccacagaagatacattcttcttatccacacatggagcatattctaaggttgatcacattctcagtcataaagttagtttcaataaatttaaaaaaattaa

SEQ ID NO: 130072 - DNA, 392 bp, Homo sapiens
ctaagactgaaccatgaggacagtgaaaacctgaataggccaattataagctccaaaattgaatcagtaataccaaacctaccaatcaacaaaaatccctgaaccagttagattcacagctgaatcctactagatgtacaaagaagaactggtaccaaccttgctgaaactgttccagaaaattaaggtggggctcttccccaactcattttctgaagccagcatcatcctgatgccaaaatctgggaaaaaacgcaacaagaacaaaatttcaggtcaatatctctggtgaacatagatgcaaaaatcttcaacagaatactagcaaatcaaatctagcagcacataaacagaattaaaacaaacatygtatgatcatctcaatagatgca

SEQ ID NO: 130073 - DNA, 573 bp, Homo sapiens
tattttcttacagcttctcaaaaagtcagccaatttcttctgctgaatttagataagtctacaataggaaaaacaaaattatagagtaaatcaatggaagaagcaataatacaaatatattaataaacataatgatctaaaaggagtagggaaggtgatagatgttattttttctcctgccataacaggaactttatagatatgttgttcaaagatgacacagagagttaaatacactacaaaaagtaaacttatgcacttaaaaacaakagagacagtagatcttctaaaatataagaaggaaattatacacaaacatacctcatatagcctaaaataatacatacacacatagcaaaagacagaaaacattaaaaacaaaagctaaataagaagacactggagaggccaattctgttaatttagaaaaatgatataaattttaatctattgaaaagattaaaggctcagatttcacaaaaaattccagtatgcatcatatacaagaaacatatttaaaataatgtgaaccaaaaattttaaatgtaaaatgacagacaagtatctgcaata

SEQ ID NO: 130074 - DNA, 384 bp, Homo sapiens
tgctgtacaaaaatccttgaaaagatagtctggaacaaaagctgtgacacgacacaaaagatccaagggaattgtctcccaacagatactgtggggggctaatgtgagcctgtgagctgagagggaagaggcctccygtctccttaagtacaagggcaagcagtgagcaacaggcttttcttccctgggccttgcatgggaccagagcatccagaagcagcatctgagaccatctgggtgagggttagtaggggagccaggtaccttgggttgcggagaaggaaggcagccagggcaggggtgggcgtttccaggaccatatcaaactaataagggagaggccattgaggggcagcctctgacttagctgacaacccctcctcc

SEQ ID NO: 130075 - DNA, 384 bp, Homo sapiens
tgctgtacaaaaatccttgaaaagatagtctggaacaaaagctgtgacacgacacaaaagatccaagggaattgtctcccaacagatactgtggggggctaatgtgagcctgtgagctgagagggaagaggcctcccgtctccttaagtacaagggcaagcagtgagcaacaggcttttcttccctgggccttgcatgggaccagagcatccagaagcagcatctgagaccatstgggtgagggttagtaggggagccaggtaccttgggttgcggagaaggaaggcagccagggcaggggtgggcgtttccaggaccatatcaaactaataagggagaggccattgaggggcagcctctgacttagctgacaacccctcctcc

SEQ ID NO: 130076 - DNA, 447 bp, Homo sapiens
ttaatgcccctgttttcagatgtggaaacggaggctccagcccagggtcacaaagatctggcctgcacycctgcgtctccaaaggctaatgtttttgttttttaacaaaagctctatatttactccaaagataaattgccttgtaactctaccccaaaccaaaaggaaaagaaaaagctgctcataaatttaaaatggcatttccctcatttattgacagaaagcattcaaacataaaagggtcggaggtcacttcgaagatggccgaataggaagacctccagtctgcagcttccagcaagatcaacacagaagacaggtgatttctgcatttgcaactgaggtacctggttcatctcactagcactcgttggacagtgggtgcagctcatggagggtgggctgaagcagggcgaggcgttgcctcacccggggaagcacaagggg

SEQ ID NO: 130077 - DNA, 447 bp, Homo sapiens
ttaatgcccctgttttcagatgtggaaacggaggctccagcccagggtcacaaagatctggcctgcactcctgcrtctccaaaggctaatgtttttgttttttaacaaaagctctatatttactccaaagataaattgccttgtaactctaccccaaaccaaaaggaaaagaaaaagctgctcataaatttaaaatggcatttccctcatttattgacagaaagcattcaaacataaaagggtcggaggtcacttcgaagatggccgaataggaagacctccagtctgcagcttccagcaagatcaacacagaagacaggtgatttctgcatttgcaactgaggtacctggttcatctcactagcactcgttggacagtgggtgcagctcatggagggtgggctgaagcagggcgaggcgttgcctcacccggggaagcacaagggg

SEQ ID NO: 130078 - DNA, 447 bp, Homo sapiens
ttaatgcccctgttttcagatgtggaaacggaggctccagcccagggtcacaaagatctggcctgcactcctgcgtctccaaaggctaatgtttttgttttttaacaaaagctctatatttacyccaaagataaattgccttgtaactctaccccaaaccaaaaggaaaagaaaaagctgctcataaatttaaaatggcatttccctcatttattgacagaaagcattcaaacataaaagggtcggaggtcacttcgaagatggccgaataggaagacctccagtctgcagcttccagcaagatcaacacagaagacaggtgatttctgcatttgcaactgaggtacctggttcatctcactagcactcgttggacagtgggtgcagctcatggagggtgggctgaagcagggcgaggcgttgcctcacccggggaagcacaagggg

SEQ ID NO: 130079 - DNA, 613 bp, Homo sapiens
attgttttctgaagtagttttctcaattgtcattcctactagtcttatgtaagagttcttcttgcttcatatactttacatttattctacattataatatagtttgaagtatttctaccatcttattttttatttttgttctcctttttttatcacttattttattccgcctttttattgtattcttttggtttgattatgtttgattatttaattaattgcttttgcattttactttttacctccaacttgtttgaaaattatgtcttctcttgctattcttttagtgatttccttaagattttaayatgcacatttaacttaaaagtctaaggttaatcagaattcctttgtatatacaaagctctacaatacattaattctgatcccctgcttctcaatttgtatacctgtaattgtccaatattttagttttggcgtatctttgtttagtcttacaaattatgaattattaatatatttgtttagctttataaataatgaataattatcaccatcttgtagccaatgataatttagaattacctgtgtttaccatattctttattcattgttctgttttgcatttctgacgttttgggtggtcattttc

SEQ ID NO: 130080 - DNA, 530 bp, Homo sapiens
gaatttggtttcatttagtttagatttttttaaaaaaacatagaaacttatttttcccagacaaagtcttgatagagaaagacctcataatataaagcagattgaagcagaattaccctggtagataccagtgggggtgaggaggcttagaacacttgtcagtttccttcttgtaccctgaggtgaccccaggttcatctccagtaagacctggaggaaaaccaaatactgtatttgcctggatcactcctctcattccacagacagggacactgatgttcagagagaggaagttatctscttaatatcacacagcaagtttctgacccaagtttcctgaatctttctatccaccttccaccacctccagaatctcatagctggcagggcctttgagagtggaacaatgtggtcctctccctctgtaatatgcctcgttcatgttggatgtctcccttattaggaattctaacactagagaattctggctgaaatctgcctgactgcaacttttgctcatatgcagttat

SEQ ID NO: 130081 - DNA, 450 bp, Homo sapiens
tttttcccctttctcttagactaggcatgaataatctcaaaatatttgtttgtcaataaagtgattaaaataaagtgatagacaagacataatgattagagaaatgaatcaaagtaatatttgggaccagggtcttacaaatctagagtaagtatgttgagcagaaatagatactaaaaatttacattagaacaaaataaaaatggatttagtaatgctggatttaaattggaaatagctgtttaaactcatgaccttaaagaaaatttgtcttggccaactgcggtggctcacgcctgtaatcccagcactttgggaggccaaggcaggcagatcacytgaggtcagaagtttgagaccagcctggccaacatggtgaaatcccatctctactaaaaatacaaaaattagctgggcatggtggtacatgcctgcagtcccagctgcttg

SEQ ID NO: 130082 - DNA, 450 bp, Homo sapiens
tttttcccctttctcttagactaggcatgaataatctcaaaatatttgtttgtcaataaagtgattaaaataaagtgatagacaagacataatgattagagaaatgaatcaaagtaatatttgggaccagggtcttacaaatctagagtaagtatgttgagcagaaatagatactaaaaatttacattagaacaaaataaaaatggatttagtaatgctggatttaaattggaaatagctgtttaaactcatgaccttaaagaaaatttgtcttggccaactgcggtggctcacgcctgtaatcccagcactttgggaggccaaggcaggcagatcacttgaggtcagaagtttgagaccagcctggccaacatggtgaaatcccatctctactaaaaatacaaaaattagctgggcatggtggtacrtgcctgcagtcccagctgcttg

SEQ ID NO: 130083 - DNA, 616 bp, Homo sapiens
gatgcctaaccactaaaccattcatataacacactgaaaagaagccatttaagaaatgagaaaaataggtattgttttctctgtatggctgtaaaagctgagataagaacattttggcaagttcaatagagccgaaaggcttgtgaaggctatgggaggatgagtatattggaagaagatcagtaggtcaagaatttaagaagagctatttatgtgggagacaggaattaccttgaaggaagagcagacccccagaagaagaaaaccagaatataccagctatctataaaaggccccagggccaggtgcggtggcttaggcctgtaatcccagccctttgggaggccaaggcgggtggatcmcgagatcaggagatcaagcccatcctggttaacatggtgaaccctcgtctctccccccaatataaaaaatcacccgggcatggtggcaggcccctgtagtcccagctacttgggaggttgaggcaggagaatggcatgaacccgggaggtggaggttgcagtgagccaaaatgacagccactgcactccatcctggaccacagagcgagactccatctcaaaaaaaaaaaaaaaaaaaaaaaaaaaggacccaa

SEQ ID NO: 130084 - DNA, 593 bp, Homo sapiens
atatctatagcaaactatattagctttctattttctccactatttgcactagcattaatcaacatccaaaaagtgtacaaattattttatctttataatcaatcttctgaaatgctaacttgaaaatataaacagcacaattacttttttctcttttctttcccatttgaaatgtgtgcttgtgtgtgtgtgtgtgtgtgtatctgaatctgtacatataaatcaaatacacacayatatacttgttttaaaaaaatcctcaaagaatcaatcacatattacagaactgaaggaatattggagttcatctggtccaaagtgttggtattgtaaaatcactttcaaatttcacagttatccaaatggtaatgaatattaatacctaagaaaatcaatcaaagattaacattaagacattagattttaaaaatcattgcatttaatattttttatccattttcaaatttcagaaactaggtctatattgtcctatagatctaacaagcactataaaagaaaaattacaaagatttcccaatatacagatagacacataaatgaaaacttttaattgcaagagaaagggaactgga

SEQ ID NO: 130085 - DNA, 539 bp, Homo sapiens
ttttcagttcttcttgatatagtaacctaagaagattctctgtaaatcatcatttaaaaagacaccatgaggtgtaatgagctatacattgtaaatagaactttttaaaaaaaatgatgttcacgaaactattactcataatcctctcaatacaaagtgaagccttaatcagtgtgcaattcaataaagcagagagggcctgtgaaggcaactgtgaagtggggtgccacataayatgccatcgtgagcattcagctctctcacaagtctggcagaaatctcttatcaaattaggttatctggatgaacggaaggaagcaaggcatcttcttcatgccattctccttagatatattatttcttccaacagattttattaacacaaactgggcagcagggacttcaagaaggacaaaaatcctgtgtcaaaaccattacatatgttggcaacatttatcatcaggaaaagcgtcccaggaagttgaattctaatgtatgtgtggtgttacaatggaaattttagtgtgcaactggaatca

SEQ ID NO: 130086 - DNA, 539 bp, Homo sapiens
ttttcagttcttcttgatatagtaacctaagaagattctctgtaaatcatcatttaaaaagacaccatgaggtgtaatgagctatacattgtaaatagaactttttaaaaaaaatgatgttcacgaaactattactcataatcctctcaatacaaagtgaagccttaatcagtgtgcaattcaataaagcagagagggcctgtgaaggcaactgtgaagtggggtgccacataatatgccatcgtgagcattcagctctctcacaagtctggcagaaatctcttatcaaattaggttatctgsatgaacggaaggaagcaaggcatcttcttcatgccattctccttagatatattatttcttccaacagattttattaacacaaactgggcagcagggacttcaagaaggacaaaaatcctgtgtcaaaaccattacatatgttggcaacatttatcatcaggaaaagcgtcccaggaagttgaattctaatgtatgtgtggtgttacaatggaaattttagtgtgcaactggaatca

SEQ ID NO: 130087 - DNA, 463 bp, Homo sapiens
ggaggccctttctctgggccactgggcgcctgtggcctttccaccaatcagagctggaggttgcagtggccacctgttgtctcgcaagagaacatcttttaagtttcgctattagtatttaacaatggcctacagagcaggatctggccacaggagaggagcagtgtgatgatctggggtaccaaaaaagaattttttwaaaaaaaaattttacagatagctcttacaaggagccaaaactctggaaagctaagtttttctttgcacactcacaatcctcaccttctgctcattctgttttgcatctgaagcaatctgagcttgattaaaggatgaagaaaagtataatcaaagttacagagactaaacctgaacttgtaatcagacttcgaggatcaggaatataaatacgcttcgcagtggaaacccgctagctgcaagaatgggaattgcaagtgggctg

SEQ ID NO: 130088 - DNA, 463 bp, Homo sapiens
ggaggccctttctctgggccactgggcgcctgtggcctttccaccaatcagagctggaggttgcagtggccacctgttgtctcgcaagagaacatcttttaagtttcgctattagtatttaacaatggcctacagagcaggatctggccacaggagaggagcagtgtgatgatctggggtaccaaaaaagaattttttaaaaaaaaaattttacagatagctcttacaaggagccaaaastctggaaagctaagtttttctttgcacactcacaatcctcaccttctgctcattctgttttgcatctgaagcaatctgagcttgattaaaggatgaagaaaagtataatcaaagttacagagactaaacctgaacttgtaatcagacttcgaggatcaggaatataaatacgcttcgcagtggaaacccgctagctgcaagaatgggaattgcaagtgggctg

SEQ ID NO: 130089 - DNA, 619 bp, Homo sapiens
aaaaatgtgggggtattgataaacaagaatagcaaaatattgagaattgttacagcctagtgttagacacatggagtttatgatactattctctctayttttatgtatatttgaaagtttccataaaagttaaatttaaaaagaaatacttaataaacttcatatttaatgatgagttactgaacactttcctctgagatcaaaagcaaataaagatgcctgatatcaccactccaacattgtaaggaagtttctaagcactataataaggcaagaaaataaaggcataagaattaaaaagaaatgaaacagccatcattcatggatgacacagtttcatataaggaaaatccaaaagtatctacaaaatattaaaattaattagtgaactgaataacgtctcaggacacaaggttaatacataaaacttaattgtattacaatatgccagcaaccaagaaaaagaaaataattttttaaagacattaaaaataccaggaataaatgtaatggaagataaatatgacttctttggtgaaaacgacataccactgagacaaattaaagataatctaaacacaattacttactaaacactattatgttatatgccagatac

SEQ ID NO: 130090 - DNA, 663 bp, Homo sapiens
tctattcttgataatgatttattttccttttgccccacttgcctctgagaagcctgtgctaactgtgctcttaccatgaactctaaggaggaaattgccaatgagtcaccatatccagccactcaagtgataaggctagttagctgtccttatctctcagctttgccttcctcaccattggctccattctcgggcacattctcccatgtgtaagtaagatggcaccaggagttccaatatggcatgcttccagcatcaagagaaagagggcttctcttttctaacagttcaaacacaagttctagaatccagtccctttgggyctggatgacctcactcgcatgggtcaggtgctcataagaagcaattgctagtccaggacaacacgatatcctgattggccaggtgcaggtcacctgacctattctgggctgtggtacagttagttcctccacaaaataaatgaaaagatgaccctatacaattgacaataaaattccacacaaattgtacagaggaaaaatggagaaaagattcaatggaaagatggcatctgaagaaggcacccatcaaaggcccttcttgctaaatcaagcctgtttgatgacagctagttgcctggagttcagggttttctctcagaccaagtcaagactcagatcc

SEQ ID NO: 130091 - DNA, 663 bp, Homo sapiens
tctattcttgataatgatttattttccttttgccccacttgcctctgagaagcctgtgctaactgtgctcttaccatgaactctaaggaggaaattgccaatgagtcaccatatccagccactcaagtgataaggctagttagctgtccttatctctcagctttgccttcctcaccattggctccattctcgggcacattctcccatgtgtaagtaagatggcaccaggagttccaatatggcatgcttccagcatcaagagaaagagggcttctcttttctaacagttcaaacacaagttctagaatccagtccctttgggcctggatgacctcactcgcatgggtcaggtgctcataagaagcaattgctagtccaggacaacacgatatcctgattggccaggtgcaggtcacctgacctattctgggctgtggtasagttagttcctccacaaaataaatgaaaagatgaccctatacaattgacaataaaattccacacaaattgtacagaggaaaaatggagaaaagattcaatggaaagatggcatctgaagaaggcacccatcaaaggcccttcttgctaaatcaagcctgtttgatgacagctagttgcctggagttcagggttttctctcagaccaagtcaagactcagatcc

SEQ ID NO: 130092 - DNA, 591 bp, Homo sapiens
gatttgtgataaaatcccacactaactatacagaggaaaaatggagaaagkgttgaatggcaagatggcatctgacaaagtcacccttcaaaggcccttcttgccaaatcaaacctgttcgatgacagctaattgcttgaattcaggatttctcaaagatcaggtcaagaattggaccctcctaaatgcattgtaaaccctagtccttaggtcatttgtgaacaattagacattgttacttagcagttagttaatgacgtcctggactgttctcaaatttggaagtgcttgggctcgtcttattaatcataagcctcagcagttcagaaaccttgttctctatcttccctgcccctttttcaccatgcctagcaagagtttatattcatagccaaagctaaatactataaactggtgttaatatttactggaaataaagttaatttagctaatgagctctaaatacagtatatagctttttaaccatgcagtgtttaggaaacactccctgaaatcttggcataactgagaactagatgggaccaaacagcagctgggaaatagcacgttgtaagtgcaggctaccctcag

SEQ ID NO: 130093 - DNA, 591 bp, Homo sapiens
gatttgtgataaaatcccacactaactatacagaggaaaaatggagaaagggttgaatggcaagatggcatctgacaaagtcacccttcaaaggcccttcttgccaaatcaaacctgttcgatgacagctaattgcttgaattcaggatttctcaaagatcaggtcaagaattggaccctcctaaatgcattgtaaaccctagtccttaggtcatttgtgaacaattagacattgttacttagcagttagttaatgacgtcctggactgttctcaaatttggaagtgcttgggctcgtcttattaatcataagcctcagcagttcagaaaccttgttctctatcttccctgcycctttttcaccatgcctagcaagagtttatattcatagccaaagctaaatactataaactggtgttaatatttactggaaataaagttaatttagctaatgagctctaaatacagtatatagctttttaaccatgcagtgtttaggaaacactccctgaaatcttggcataactgagaactagatgggaccaaacagcagctgggaaatagcacgttgtaagtgcaggctaccctcag

SEQ ID NO: 130094 - DNA, 591 bp, Homo sapiens
gatttgtgataaaatcccacactaactatacagaggaaaaatggagaaagggttgaatggcaagatggcatctgacaaagtcacccttcaaaggcccttcttgccaaatcaaacctgttcgatgacagctaattgcttgaattcaggatttctcaaagatcaggtcaagaattggaccctcctaaatgcattgtaaaccctagtccttaggtcatttgtgaacaattagacattgttacttagcagttagttaatgacgtcctggactgttctcaaatttggaagtgcttgggctcgtcttattaatcataagcctcagcagttcagaaaccttgttctctatcttccctgcccctttttcaccatgcctagcragagtttatattcatagccaaagctaaatactataaactggtgttaatatttactggaaataaagttaatttagctaatgagctctaaatacagtatatagctttttaaccatgcagtgtttaggaaacactccctgaaatcttggcataactgagaactagatgggaccaaacagcagctgggaaatagcacgttgtaagtgcaggctaccctcag

SEQ ID NO: 130095 - DNA, 599 bp, Homo sapiens
ttaaggagttcgaatgttgggctacatgaggttttaataaagcagaaggaaacctcagtttcaccaaaacaagacctataatttcttaaaccctcctgagcaaagcattgtgtctcatataatacatttcattatacaacctccttgcaaaaaagttattgtgttttaaagatagggaaacaacaagctcttatcaaggttgcagagctagtaagtaataaagcccagattcagattcaaacctcaggccatctatttccaaagtaaaatactgcccactaccccctcatcatattttcttattttctcaaaatattaaaggaacaaacacacaattatatcatattcttggccccaatgaagacatgataatgtttactagtagtgcataataaaataattcataagttctatgtcaaatgtttatgtgcattttgatcytttttaaaattttcttaataattgtgtgaggctatttcttgctaattctccctggtgaaaagctttccttagaaatagctttctgagtaggagcccgtgatgggcaggtgttatgcaatggctattgattcagtcattcaaagattcatagagtggac

SEQ ID NO: 130096 - DNA, 597 bp, Homo sapiens
tagaagtcagacttggggagtgcaggaatttgacccattcctccttcactttacccgtggccacaaaatccctaggtggccccatggaaaaggaccaaaaataaggtgcattttggaaagcctgaatttaaagaataagggggagggcagtgagggtacagagggaaggttgagggtttaccacatttttttcctcyaccatactcctctcccccagcccctttgcctatttgctcagagcttgcagcctccatctagcagtgcaggcaacatttcagcttcccctagcccctccaagcctctgaagaggactggagccctcgaacttatttctgaagccggagctcttgatagcaggccagccgggcagccctgactgcacagacttctccctgaaccccgtggtcctcctgttttattaatactgcacataacgagcagatgcagcctgagtggcagctacaaagacactcatctcctaaaatgtgatatttgatcacaggaggattttgcggtgggatagcttataatcctaaatttaaatgcttcccgaatttcagaggttccagtattaaaatccttttaggatttttcaaa

SEQ ID NO: 130097 - DNA, 570 bp, Homo sapiens
gatgccacccatgagtaggagcaaaggagggcatgatttccatacccattacaggtgtgttagaaaacaaaactatcacaaagtcatttattctgaagttcgcttcctgtgctctactgttccctgcatgaagagttgccatgcttatgaacacagacctgttttgcatatgcaattaaaaagaaatgaagtttcacttaaaactctaatgaattttatttttggttgttttgtagcttgggggtgatagggacataggcttatctttctattagaaaacataggagattatgcacataacaattagacactatagattcactaatttcatccagaaatattaaaataagcattatgctaatgtgccaattgccataatttggcccaacagaactctcctttgctcacttggagaaagatagagaactgtgtatttkccacagaacatgcccgttcttctcttctcttttgtatctgccaaaatattgttatccacattcattcattcatttgggtggtccaatgcagttgacttctcaagtccacaggtgactagaaggggagcttgct

SEQ ID NO: 130098 - DNA, 480 bp, Homo sapiens
tttaccttgaacatgttaaagtagtatgtacatggttaaataccatctgtactgaaatgttcaaaacatttgttccttttgataaaaatgcaaatctggagaactgttgtatcaacatataacagccaatgtctgacacggtgaattatcacagctggaattaaattgtctctgaacagctgctggcagtagagctttcatcaatgtttgattcaaatgtagggaaaaaaaaatcctacagaatgaaacatcatgtcgtccttacagatggggtttgtgttcattaccacaaacaacacagcagccagtgscaaacaatattcccttatctaaactgtcttcttggttagagagatgatggtcactataaaaatgattaatctaggaatagctttaattcttgatcccccatttattctaataatttctcaaagttaatttctttcataacacttgcctccctttaccaagatcatttat

SEQ ID NO: 130099 - DNA, 480 bp, Homo sapiens
tttaccttgaacatgttaaagtagtatgtacatggttaaataccatctgtactgaaatgttcaaaacatttgttccttttgataaaaatgcaaatctggagaactgttgtatcaacatataacagccaatgtctgacacggtgaattatcacagctggaattaaattgtctctgaacagctgctggcagtagagctttcatcaatgtttgattcaaatgtagggaaaaaaaaatcctacagaatgaaacatcatgtcgtccttacagatggggtttgtgttcattaccacaaacaacacagcagccagtgccaaacaatattcccttatctaaactgtcttcttggttagagagatgatggtcactataaaaatgattaatctaggaatagctttaattcttgatcccccrtttattctaataatttctcaaagttaatttctttcataacacttgcctccctttaccaagatcatttat

SEQ ID NO: 130100 - DNA, 604 bp, Homo sapiens
aaaaaattcagccaaatgatggaaatgcatacacattcacatacactccagttctctcctccaccctcccactctccctgttgactctattgtcattacctccatctagaaggtctgaatttcattttttctgccactggccwattaggcaacctctgaacatcttcactctaagattctatttgttcatctatggaataagatcaataatttaattcttacctaccttcccagaaggatcactgtatccagtgaaatgtggctatgaaggtatttggggagaaataatgacccatctaaataaaagcagttattttactaaaacaaaaaatcattaggagggctcctgaacagagttaggaagttgaggctttatgctgaattgaaaattcttattagaattgagaagttctggaaagactcagtgtagattatccactgcttgttgagttatttattaaagatctattttccagaaataattacaaaatcagtattttcaaatgctccccaccccgtagagttttgttttttcagaacacaagcattggttcttgccaattgatggctcttgccaattggtggctcttgggtccatttgcct

SEQ ID NO: 130101 - DNA, 604 bp, Homo sapiens
aaaaaattcagccaaatgatggaaatgcatacacattcacatacactccagttctctcctccaccctcccactctccctgttgactctattgtcattacctccatctagaaggtctgaatttcattttttctgccactggccaattaggcaacctctgaacatcttcactctaagattctatttgttcatctatggaataagatcaataatttaattcttacctaccttcccagaaggatcactgtatccagtgaaatgtggctatgaaggtatttggggagaaataatgacccatctaaataaaagcagttattttactaaaacaaaaaatcattaggagggctcctgaacagagttrggaagttgaggctttatgctgaattgaaaattcttattagaattgagaagttctggaaagactcagtgtagattatccactgcttgttgagttatttattaaagatctattttccagaaataattacaaaatcagtattttcaaatgctccccaccccgtagagttttgttttttcagaacacaagcattggttcttgccaattgatggctcttgccaattggtggctcttgggtccatttgcct

SEQ ID NO: 130102 - DNA, 508 bp, Homo sapiens
ttcccttttgtcccagtttttattacctttggctaggtaggagtaatgttttgttttcttccttaaattataaaacccatatatgcatttgattttttaaaagtagttcatgtggtgcaaaagtacacaaaatggaaaaagttttcytcaccccaatccttcacatagactccctcttcagaggtaaccagttgttttttttaattaatagtagtaaagtaattcgtgaagatgatttttaaaagtcaagagtactacacagctttttgacacaaagcaggctgctgctccactctggacactttttaggtatttttccttgcctacttatttctatttcaaaataaaggtttatattgctatttactgatttagcagtttatatcttctactgacatcatgttatggaagatgagaattcagtttcccttgctcaaggtataggtacatcacaattattggttaaatcaatattaaagtgattgtagacaagtatagtatgcaaata

SEQ ID NO: 130103 - DNA, 506 bp, Homo sapiens
ttggggatttcttaagtctattccttcccttttgtcccagtttttattacctttggctaggtaggagtaatgttttgttttcttccttaaattataaaacccatatatgcatttgattttttaaaagtagttcatgtggtgcaaaagtacacaaaatggaaaaagttttcctcaccccaatccttcacatagactccctcttcagaggtaaccagttgttttttttaattaatagtagtaaartaattcgtgaagatgatttttaaaagtcaagagtactacacagctttttgacacaaagcaggctgctgctccactctggacactttttaggtatttttccttgcctacttatttctatttcaaaataaaggtttatattgctatttactgatttagcagtttatatcttctactgacatcatgttatggaagatgagaattcagtttcccttgctcaaggtataggtacatcacaattattggttaaatcaatattaaagtga

SEQ ID NO: 130104 - DNA, 452 bp, Homo sapiens
ggaaaggaattcctcaccaatgaaacagcacatgagaggaaatgcctcattttgctgaactgtgtgggattgtctgcaaagactgcaagtgcagtatgactagcggcggggggacctggtggacatggtgaggacagcatctttgatgatgtcacctgaaccacagaacaaacccaccccacaacagctctgtctctgggcttgcagttatatgatgtgactaacattcctattttgcaacagctatgaaggaggtctctgaagcctrattgcctgctgtgtgaccttgggcagatgcttaacctgtcttgccttggtttcttcatctggaaagtggacataaaataagacccaactcataaggctgctaggaggtgtaaacatgtttatatatgtgaagggcttataacagtgcctggcacgcaggaaatggtgtacaagtgttggctgtt

SEQ ID NO: 130105 - DNA, 452 bp, Homo sapiens
ggaaaggaattcctcaccaatgaaacagcacatgagaggaaatgcctcattttgctgaactgtgtgggattgtctgcaaagactgcaagtgcagtatgactagcggcggggggacctggtggacatggtgaggacagcatctttgatgatgtcacctgaaccacagaacaaacccaccccacaacagctctgtctctgggcttgcagttatatgatgtgactaacattcctattttgcaacagctatgaaggaggtctctgaagcctaattgcctgctgtgtgaycttgggcagatgcttaacctgtcttgccttggtttcttcatctggaaagtggacataaaataagacccaactcataaggctgctaggaggtgtaaacatgtttatatatgtgaagggcttataacagtgcctggcacgcaggaaatggtgtacaagtgttggctgtt

SEQ ID NO: 130106 - DNA, 481 bp, Homo sapiens
tcagcctcccaaactgtttgagattacaggcrtgagccaccacacctggcacactctcttgatagtgtcttttggtgcacaaaagttttaaaagttgacaaagttcaatgtatgtatttttgttgttgtttcctttacttttggtgtcttttctaagactctattggcaaatacaaggtcatgagtatttatccccatgtttaccatggggattacaattaacatcctaaatatataaaaacttagttggaattaattcctacttagtttcaatagcatacaaaaactctgttcctatgtacctcagtccattcccttttaaagtcataaattacatctttatacactgtttgcctattaatataaaattttaattgttgttttaaggcatttgtcttataaataagttagaaaacaaaaagtggagttagaaaccaaaaatataattacactggcttttatatttatctatggaaatatt

SEQ ID NO: 130107 - DNA, 633 bp, Homo sapiens
cagaaccctgatagcccttatactgtgggacttgccctcttggagtgtggccctgagatagcatgtgaaaaaagccaggctattctccttcaggatgaaagaccatgaagaggcaggccagtgcagtcatcccaccaaaccccaaccccaggtaacaccagctgagtgtagctgcatgaataacttagtcaaaaccagcagaaactgcccagtcaacccactgaatcatgagaaataaaatgaytctagttctaagccagtaaattttaggttaatttgttacacaacaataattgcaagaaagaatgtagtattctgctttgcttcatgagccaaatataagcaaatttacaaagatggaagtattgacacggataaagacatatgttcgggaagctcaggcatgagtggataggaaagggatagaaacatagagaagcagaaggtgacaatttaagagtttaaaagaatatgcatactgacactcacaactttaataatgtcctctaggaagaaggtacacatgaaagaactgactttgctaaaggaaaaatttaaaggtgtttttgtgttttatgtctattgacagctagtaactgcctctaggtctctccaagttgagtaacatgtatg

SEQ ID NO: 130108 - DNA, 517 bp, Homo sapiens
aatgttaaaaatcatcactgcagtaatacatttcatcacttgctttctttggccaatattctagcctagttgataatttttatttaaaaggtggtccctgggattttactggaaattagtataacaaccatgatcttctgttatccagaatattcagggcattgggttctcagatcaaaacaaatatttaaataagaagtcattaaaatcactttatattttttaattgatatcttatagaattacaatatgtatatgcggcatytaacatacatattcttttctaaaagtttacatgtcagttgtttgatacatggaacaccttttttgtacatatttaaacatatcaaggaaatagtcacattatcagagtagaccataaactccaatttaattgctagccttttttctggctagaccatctgatttgatatactttatatcaaatactatacactttataatgagtctcatcacattaaataacacaaattattaccccaagttggcatttaga

SEQ ID NO: 130109 - DNA, 580 bp, Homo sapiens
tatatttacttcatttttttaatcaagaaagtaatattttactgataaatctttgatctcatcctttctcattctcatttccttccctctgttctttctaagaagcaccactatgattattatgctgtgtagccatccactatatcttttatatttttactagatatagaatatgcctaaaatatatagagattgcttttatacattttaaaaatttgacataaattctatcataatacacaaattgtccttttttttgagcttgatccattttagtgcatatacatttagttcattttaactatggtgtattattcccttgtgtgtgtttacctcaatttctctttcyttcttctacctacagacatttagagtttccagtagtttttcctattacaaacaaagcttatgaggacatccatgaaaaatatttatttacacacttggggaagaattttcctaaagtatatatctagatgtggaattattggactgaatattatctacatcaaatttattagatattgttctccaaatggtagggtgcttctaccaacagtgtataagaatcttccttctt

SEQ ID NO: 130110 - DNA, 591 bp, Homo sapiens
tatttttgcttactcttttggcaaacttgagtgtatttctgagtggactgactggcattaggatgtctgaccctggagctaccctgtctctgttctaagccagctaccccatgcatttgaccccattcattagtacacgctttaaatgtccaagtctacattttccagcaaaggtttctattcccaatgtwggcattgcccacaactttggacaaattatttaacctgaaatattttcttcattctaattctgtcataataataataaacatttggggagtgaaacttctgcctaaaattggatcagaatgttatactcgtttgaaaggcacaaatatgttcattgtacatttcaattaataaagcagtaactgggcaatttctcaaaaagttctcatgatctaaaaaagtttcttagcccaacagatttttaataacatctaacatcctaagaaagcttcttttcctattccctatttctactcaaggataaaatttgtctaattattcagaggaatgtctcaactaacctcaacccaagaaagaaaaaaaaagttcttacctgttttaaactttgttcctgctgtctgg

SEQ ID NO: 130111 - DNA, 531 bp, Homo sapiens
atcggctacaaacacaactgatttctctcctacaacaaagtggtggggtgggttggtggggaggaagaaaaatcttcagcccccagtggcattcacatcaaaatcttttataaggcttcaatcttccgactttacctaaggaatgaagtcagcttcatgtattcagataagcaataatagttctgctgcttatagaattacaaccaaactttttcctttgttctagcaaaagacttcctgtgtgaaagcagtcatcctttaaagctttccagtccaaaggtctcccctggtttgtattcccctattcccgtcccccaaaggaaaagctcaatccacatcacaaggcatttcttggttccaagctgtactggtttctcaaggactcctggtgaggaaagaaaactggtcatctgaacatcctttcctggratctgtctgaagtgtagacaagcagcaaagatgaatattaatatgccttccatcatcaaaagctattgcatacccaaaggatgataaatattttaatcagtt

SEQ ID NO: 130112 - DNA, 480 bp, Homo sapiens
ttccctacttgcacctttactttcccaagtatggagtgagctacataggttattaattgcattttcatgcaagattagaaacaacctaaatttcttaacaataggaaaactagtttaatgamgtatggttgcagaaaacaaaaagagagaggggtgggatgtggaataatttttttctggatgtatagtgttttgttttatgtaaataatctataatcaggcctagtttgagataggtttttttttttttggtaacagctttattgagctataattcacgtcataaaattcaagcatttaaagcatataatgcaatgttgtttcgtatagtcacagagttatacaaatatcactacaattaattttagagcattttcatcaccccaaaaagaaaccctgtgccatttggcagtcacccccaaccccaactgatttctaccaacatttccaaccctaggcaaccactaatctactttctat

SEQ ID NO: 130113 - DNA, 599 bp, Homo sapiens
tcttagctattcaggaggctgaggcaagaggatcacttgagtgctccaagattggagggctgaagggttagagtttgaggctgcagtgagctatgacggtgccactgcactctagcttgggcgacagagtgagactgtctctaaagaaacaaacgtaaagaagaatgaagaaagttgactccttttggatcttaaggggagagagatggctacatatctaagatggctttaggtaggtttggtgtgatctggaggtgaggtggggatgaggtgatcactgggatgacttttgcatcgcagagtttgatgaataccaccacgactgactacccagtggcttttggcagatgcgggccctgggatttgccaggaagtctggtcgtgtgcacacargcagccttccatgagcatgtttgacagtgccctgtcctgtttgtttctcagtctgggtggtgtgatggggccgaggtgcagcttcaggctcactaatgctcttttgctcctcttcatccaagcaaagggtacttggaactcaggtttggaatttgcttttcctcctcaataaaacttttctgtttcaacagatttcaagctaatgg

SEQ ID NO: 130114 - DNA, 489 bp, Homo sapiens
gtttgggctggcatcccttgctggtcttggttagggagggtagatagcgaacaaagaactgtggtctagttctgaaattgatgacacaagcatatacccactgaggctcctttctccaaccctccattcacatcttaaatgggaatatgaaattgtccctctcatgtccctactgtaaaagttgggggtggggggtatagggtgaggggacagtgaggaagcctctgcaggcctctagtttaaacttgtaccactaagagactctaggctttaaaaattaagacaacatcataacacgtgttcactccaaagtcagtttagcaagcttatagaatattcsacggtagaattggggaagtaatctctataggaagaaccatctaagccagggtttctcactctcggcactgttaacatttgtggcctaattctttgctttggagggggggctgtcctgtgcagtgtagggtgttcagcagcctccctggt

SEQ ID NO: 130115 - DNA, 497 bp, Homo sapiens
tgcattgcccaagtggaataacagatcctcgtaaccgcaataactgctgtagagatatttacattctgtattattggggcacagagcaaggcaacagccaatgcggtgagacatagaccaaacaaccaatggccatgaacaagctaaataagtggcctcatttcctgaggcttctgcttctggaagtctggaggaccagaaagccctactgctgtagaagttctagatgcaggamggatccttttcacaagagcgtaaccaagacagtcacaggctgcatctgaaacctgaaaaaacagcccccatcgtggttctgggggagattgttcctccccaggcaaggtccccttcttgtctaaattacttccagccagataaggggcaaagatcaaatcttttccagaataaatgtctttatgatgatacaggggaaaaaaaaaaaacagtagccgtccatgcccccaaacaaacaaagaaaaagaaaaaagaaaggtagc

SEQ ID NO: 130116 - DNA, 516 bp, Homo sapiens
aacagtacatactttgtaagcttgttttaaagactagaggagttggccaggtgcggtggctcacgcctgtaatctcagcactttgggagactaaggcaggtrgaacacgaggccaggagttcgagaccagcctggccaatatggtgaaaccctgtctctactaaaaatagaaaaaattagccaggcgtggtggtaggcacctgtaatcccagctactcaggaggctaaggcaggagaatcacttgaacccgggaggggatgttgcagtgagccaagattgcaccattgcactccagcctgggcaacagagtgagactccgtctcaaaaacaaagaaaccaaaaaaaaaaaaaaaaaaagactagaagagtttgaagagttaacataggtaaaactctcgaaacagtgcttagggcatggtaaatggtgaaaatgttaaccattgttattaaaagtgtttcccaaatcttgtcctatttgatccccacaatactgtgaggtcagctagggccacggg

SEQ ID NO: 130117 - DNA, 544 bp, Homo sapiens
tttggcctacattgcagctagaatttttcctctgcccactgctgcttttcaatcaccccttccactggtgttgatcccaccatgctccatatcaaactccacctcagagttggctttcaaggaatccccccagaagcactcatgcctacctgtttgtatgttgatgggacctggaacttatcaartacttacagagaggggcagcataaaaataacatcccttgggagatttaaatggtttcttcttttccatatgtaagccctggatcatttctcttttgggaactagtaatgacattttatacatttctggactgattttatacattttatacatccatggggtgttttccaatcagttcttgaaagctggatgtgtgagctttcccaggatgctgactaaggaatgattatcccaggatggtggatcctagcttatgtggggttccaatgctaattttttcatggtcaactttttttttttttttgacactggatatagtaggctgaaaaacagccaaccaaaagtatcagaattcaatcc

SEQ ID NO: 130118 - DNA, 544 bp, Homo sapiens
tttggcctacattgcagctagaatttttcctctgcccactgctgcttttcaatcaccccttccactggtgttgatcccaccatgctccatatcaaactccacctcagagttggctttcaaggaatccccccagaagcactcatgcctacctgtttgtatgttgatgggacctggaacttatcaaatacytacagagaggggcagcataaaaataacatcccttgggagatttaaatggtttcttcttttccatatgtaagccctggatcatttctcttttgggaactagtaatgacattttatacatttctggactgattttatacattttatacatccatggggtgttttccaatcagttcttgaaagctggatgtgtgagctttcccaggatgctgactaaggaatgattatcccaggatggtggatcctagcttatgtggggttccaatgctaattttttcatggtcaactttttttttttttttgacactggatatagtaggctgaaaaacagccaaccaaaagtatcagaattcaatcc

SEQ ID NO: 130119 - DNA, 544 bp, Homo sapiens
tttggcctacattgcagctagaatttttcctctgcccactgctgcttttcaatcaccccttccactggtgttgatcccaccatgctccatatcaaactccacctcagagttggctttcaaggaatccccccagaagcactcatgcctacctgtttgtatgttgatgggacctggaacttatcaaatacttacagagaggggcagcataaaaataacatcccttgggagatttaaatggtttcttcttttccatatgtaagccctggatcatttctcttttgggaactagtaatgacattttatacatttctggactgattttatacattttatacatccatggggtgttttccaatcagttcttgaaagctggatgtgtgagctttcccaggatgctgactaaggaatgattatcccaggatggtggatcctagcttatgtggggttccartgctaattttttcatggtcaactttttttttttttttgacactggatatagtaggctgaaaaacagccaaccaaaagtatcagaattcaatcc

SEQ ID NO: 130120 - DNA, 539 bp, Homo sapiens
aaatagggcaaggacaaaatcaaagatcacaaggcaaagggcaaaattagaattactgatgaggktctatgttcagctgtgcacgtattgtcttgataaacatcttaaacaacagaaaacagggttcgagagcagagaactggtccgacctcaaatttaccacagtgggattttttcccccaccctaataagcctgagggtactgcaggagaccaggttgtatttcagtccttatctcaatcacacaggacagatactcccagagcggccattcatagacctcccccaaggaatgcaattcttttcctagggtcttaatattaaatattccttgctaggagaagaatttagcgatatctctcctacttgcacatctgtttataggctctctgcaagaagaaaaatatggctctattctgcctgaccccgtaggcagccagactttatggttgtcttcccttgttccctgaaaatcgctgttgttctgttctttttcaaggtgccctgatttcatattgttgaaacacacattttacaat

SEQ ID NO: 130121 - DNA, 388 bp, Homo sapiens
gtgggggcctccatgtgtcacgcactatttattcactgcctcgagacttccagtcaggaaggtcgagacctgctgtaatttgataagcatttgggatgtcaaagtacagaatccagcttcttttctcytttggacaacagaaatagtgtgctgatgtttggtgtttcttcctctcccattcctctgcagtagtgattatactctcatggctttctttcttttggtttgtcacatctgtggatgaaagggagagatgggcttgggtttggcctctggaagcatgtgaagagttagtcctaacgttgtgtcttctgtttgcgtgatgctctgaccttcccaagggcctccacgtctgtgttttgtccttacagcttcccggccaggaaaa

SEQ ID NO: 130122 - DNA, 388 bp, Homo sapiens
gtgggggcctccatgtgtcacgcactatttattcactgcctcgagacttccagtcaggaaggtcgagacctgctgtaatttgataagcatttgggatgtcaaagtacagaatccagcttcttttctcctttggacaacagaaatagtgtgctgatgtttggtgtttcttcctctcccattcctctgcagtagtgattatactctcatggctttctttcttttggtttgtcacatctgtggatgaaagggagagatgggcttgggtttggcctctggaagcatgtgaagagttagtcctaacrttgtgtcttctgtttgcgtgatgctctgaccttcccaagggcctccacgtctgtgttttgtccttacagcttcccggccaggaaaa

SEQ ID NO: 130123 - DNA, 420 bp, Homo sapiens
atatgtgtcttccaggattttgcacacagtaagtgctctttaaatgcctattaaagagacaatatggtgtaagaaagggaacatgctttggcactaagaagaaataaatttatatcttggctccatcactcagccsctgcacaacctgaacaagttactcaagctgtctgggtctcagctttctctctgttcaatggggtgatgatgggctactctgtgggggtagttgtgaaaacagatgaactcatgcatgaaaagaacccagcatggatccttacacaaagctgctctccaaacaggagaaagccaaccagaagacaaatgatgatgcttctttggatgttcccagcttcacagatgtgggccctgtaaccatattcaatgagtgtgactctgttgtcctggctgtgatgacttgct

SEQ ID NO: 130124 - DNA, 533 bp, Homo sapiens
aatttatccagccaggcgaggtggctcatgcctgtaatctcagcactttgggaggcagaggtaggtggattgcttgagctcagaagttcgagaccagcccgggcaaatggaaaaatcccatctctacaaaaaatacaaaaattagccgggcatggtggtgcatgcctgtagtcccagctacttgggagactgaggtgggaggatccttgagcccaggaggtggaggttgcagggatccgagatcacacctcttgtactccagtctgggtgacagagcaagactctgcctcaaaaaaaaaaaaaaagaaaaaaaaaagaaaaaagaaaaaaagaaaaaagaacatatccatttacccaaaaaccacctgtactccaaacattattgaaattaaaaaatatatttttaaaaaagacagggagattgttaggaggtkttggcgctggctgcctggcataggttgggttggtgggggcaaaaaggaagaggtgaattggagaaatattaaagacttattgcatagctggtcccagat

SEQ ID NO: 130125 - DNA, 533 bp, Homo sapiens
aatttatccagccaggcgaggtggctcatgcctgtaatctcagcactttgggaggcagaggtaggtggattgcttgagctcagaagttcgagaccagcccgggcaaatggaaaaatcccatctctacaaaaaatacaaaaattagccgggcatggtggtgcatgcctgtagtcccagctacttgggagactgaggtgggaggatccttgagcccaggaggtggaggttgcagggatccgagatcacacctcttgtactccagtctgggtgacagagcaagactctgcctcaaaaaaaaaaaaaaagaaaaaaaaaagaaaaaagaaaaaaagaaaaaagaacatatccatttacccaaaaaccacctgtactccaaacattattgaaattaaaaaatatatttttaaaaaagacagggagattgttaggaggtgttggcgctggctgcctggcataggktgggttggtgggggcaaaaaggaagaggtgaattggagaaatattaaagacttattgcatagctggtcccagat

SEQ ID NO: 130126 - DNA, 491 bp, Homo sapiens
accctacttggctgctggggagccggcggtgactcaacctgggcgtggggacacagacttccatgcttgcgggaaggtcccctrgcagatcgaccatctgcaagtgccctccatgtttcctggatttccaggtcttatgcctcctctcccccaagccctcactgggacgtacccttggcttcgcggcggggtgggtttgtctgctgtctggacagttgtgtttccctgcagggtgctgctcagtggctgggctcaggtaaagagcttgcatttgtccaatgcataaacgggggaagcaaattcatttcacagctgaggttgccagcctctgacaagaccagggaacttggaaaaaaatgaagccccctgctgcctgtgaaatgcctgtaaaatcagatgcaagagcccccacaatagcataagttcctaagggcctttctggcctcccctgcaagcctgggcagctttccacatggactgtagccatggga

SEQ ID NO: 130127 - DNA, 532 bp, Homo sapiens
gctttctaagttcctgcatcctcaggattttttttttttctgtctgaacattggtgccactgctcctgaggccttgggctccttcctctcttgaggggatgatgggggaggttgagagagtgagacctcaggtttggaatctgtttcagggaaaattcttaaggttgcagtgatggaaarctggatgcaaacagacatgagcaaaagaagaaactgggcctcataacagaaacattcaggggagagtctgctttcaacagggtttggttgaagctcaagagatgccacaaggcctgatttccctgtatctcaggctggttttcctccacatttgggccttattttcaacctatgtgaaggcaagtaaggggcagcaggttcatattcctcaattccagcttcacaccctaaggggacagttgccgccttctctcccagagccccagaccatgcaccacttcttgctggctcgactctgcatttccctctcttgttaaatgttgatggctgtgggttggctgcagctgctgtg

SEQ ID NO: 130128 - DNA, 576 bp, Homo sapiens
atttacttacacttgcttttaatttactggccaacaattagagccgcctaacaggccaacaagctggcatgatgcacccaattatcttctgaaaatgtatttctatgattggggctttaattgcagcttaaatcaaatgctcatgaacccagttrccatcgagggaatgagaccagctaatgaaataatgagggctttaactccaattcagaggtaaaggaacacagagaaaggagattgttcctttttaaaatctcctttcctcttattttatttttttttgagattgcctttgcaaacattgatgtcataaatcctaccataaggcagcaatgttacaagatgggcagcttgtttcaatcagatcacaaatcgaacatgagcctgttttgtttcccgggattcacttccacgttgcctgcctggatttgtgtgggctccaagtttctcactcccattactccagatcaagtggctatggctttggaattcaaatttgccaaatgggctctcctctcaatgccttcacctgctgaacttggatgtggagcggtacttgcttgcagggtcacgtgg

SEQ ID NO: 130129 - DNA, 403 bp, Homo sapiens
ggattgtatttgtcccaaatttctcaaaataaactacaggaaaccaaactgagagggagttcaggggccacacaacaaaattccaaggcaggctggccaaggctgagtgtccygtcttcctgtgctctgctgagcactcggctgtgctataaactagtcctgggctaagcatggggaggggggactcaggaggggaaaagcagcaactcagcccctgcttttgaagggtacaagaaaataacatggaacacaaaataaccaacacttttataccattttttctttacaatgctgttctcatttggaccttacttgggctgagtgaggaggtggaatattattcctttcattttacaagtgaggtgagttacacagctagtagagagcagagtctggatttgaa

SEQ ID NO: 130130 - DNA, 403 bp, Homo sapiens
ggattgtatttgtcccaaatttctcaaaataaactacaggaaaccaaactgagagggagttcaggggccacacaacaaaattccaaggcaggctggccaaggctgagtgtcccgtcttcctgtgctctgctgagcactcggctgtgctataaactagtcctgggctaagcatggggaggggggactcaggaggggaaaagcagcaactcagcccctgcttttgaagggtacaagaaaataacatggaacacaaaataaccaacacttttataccattttttctttacaatgctgttctcatttggaccttacttgggctgagtgaggaggtggaatattattcctttcattttacaagtgaggygagttacacagctagtagagagcagagtctggatttgaa

SEQ ID NO: 130131 - DNA, 501 bp, Homo sapiens
aaaagtctgccactgttatttcccacttattttttattacgagaattttgctggacgacactcctgtaagacattgttgttatcctcagttttgcaaaataaataattagcatagagaatagacaacctacagaacgggagaaaatatctgcaagctatgcatccaacaggtgactaatattcagaatttataaggaactcaaacaattcaacaaaaacaaaaataaataatmccattaaaaagtgggcaaagggcatgaatagacatttttcaaaagaaggcatacacatggccaacaggcataggaaaaattgctcaacatccccaatcatcagagaaatgcaattaaaaccacaatgagatatcatcttacaccagtgacgacagctattactaaaaagacaaaaaataacagatgttggtgaggatataaagaaaagggaactcttatatactgttggtgggaatgtaaattagtacaacctctatggaaaacagta

SEQ ID NO: 130132 - DNA, 368 bp, Homo sapiens
ttgctatctctcagacatgacctgtgcccatcagaagagctgggcatttgtatccctcagaccgtatgactgggcatgggctgcyctgggaagggtgtggcttcaggtgaggcagctctctgcagctgaggctgactctgaaggagctacaggttgaagccatctgttggccacaccttctgcagttgggcagtaagatgtggtcagccagagataacacatcttagtgcctctgtgttgtgacctctgtgctagagggctggattcatcctgggtggtcttgagggcaggagaaaacttgagattttcctcagtgagtacagagctgtccctcagagctggggagctctttgggaaaagggctgggt

SEQ ID NO: 130133 - DNA, 545 bp, Homo sapiens
gaggttggccttcaaaagtcagtcgtgcattgtacttccacctgcatttgaataaacttcagcagaagttttcagtgctctggggttttggccacaggagacaccaagaattgggggaaagggcaggaacttgaaaaggatggacagggagacagcaatctacagttgcccccaaactggctgcagatcccaattaaccttggcctcccttgccttgggtgaactcaaggctggggttaggaagaaggtaaaaaatgtctacactccaccaccaggccctttagaggccaatcagcttgcttcatggagggtccactgtcctgtttgtctttcctttgggattttctagggctccattaacttacatgataaactagcttrtgttgctaagaggtcttcttctcccagggagttgagctattcttgaattgcagtggggcagttaggattcttctgaagcaaatgatagaaactcaaaccaaataaaaacctgtttggtccctgcaactgagaagtccaattgtagattagacacaggagaattc

SEQ ID NO: 130134 - DNA, 315 bp, Homo sapiens
ttgacctctgctcctgtactctagacttggaaggatttaagcacgtttggtggcttattacaaactcatcatcctaaattatgaaatgccctttgtgcctctcagtgcctgtgtctggcattaggtgtgtcgtggatgtactttttctagttctttggaaggcaggtcactgagtagcagcagtgccaacctcctctctgatagagggtgtgtggtatgtatgagacccagggcaggtgtcacagcacaaagtartgattatcggtaatatgatttgagtacttagtatgtgccagatgctgttttaagggcttt

SEQ ID NO: 130135 - DNA, 608 bp, Homo sapiens
tttctgttagtatattactttcacaattttttrccacatcttcttaaagcttgggatatcctttaattgcttttaaaaatatgactcatttagaacctaaatacatttaagaacaaacttataccataaatagaaaacagcattcacttgccatactacataactttaaaaagttctaaaatgcataactattaaacttattttggagaccaactgtgttacaggtttgacattttaggagaaacactggctagttgaaagagcaccggatttgatgtcaggaaattatattatgtgtcaagctcttctgccaacacaacaacaacaataatatttaacaattattgagcatatattatgggtcatgcattgtggtaagaactttccatgaatccttttatttaatcttcacgttttaatttggagccccaagaagcagaccctggaataaggattcatgggcaagtgatattttaagaaacttctttcaggagaaacaggaggtaagtggcaaactccagggtatgactggttttagggagctgatgcagaatgtattataggcatggaatatttcctgtgcgcctcaagttatagtaaaaaggcgt

SEQ ID NO: 130136 - DNA, 533 bp, Homo sapiens
tgcaatgaccctatttccaaatgagatcacatatgaatcttgggaggggacacaagttaaacccataacagagctaaatacggctctgctgtcacacagtcctgaattccaaccatgtgggaccttacttagaagaacccttcaacattacgaggccycagtctcctcatctgtaaaatgtgaataggaagaggccatccctgagagggatattttaaggcaagctaaaataatgtctacaatacattaaacatgtgaattgggaaaatttaagtcctcaagggacagcagttgctattttgattattctgcccatgcagccacgtagggacctgtccacctgatccagagatcagactgtctttgtccatgtaactgggaaaggagagaccagacctagtccccagccatgtgggtgtctaacccagtctctcatagctcgaggcttgaggaaatgctatgttaaaatagaacaaagatttccaatgcaattaaaattcctttggtaaagaagtaaaagatttgtggcagca

SEQ ID NO: 130137 - DNA, 604 bp, Homo sapiens
catgccatctgcagaaacaattttacttattccttccaatttggatgtattttatttctttctcttgcctacttgctctgactagaacttccagtgctacattgaatagaagcagtaagagtgggcacccttgtcttcttcctgatcttagaggaaaagctctcagcttttcaccattgagtatgctgtttgttgggcttgtaatatatggccatgcaatattgaagtttatttcttctatattcaatgtgctgagagtttttctcatgaaggaatactgaattttgtccaatgatttttctgcatctatttggrctatatgattttatccttccttctgttaatgtggtgtatcacatttattgatttgtttatgttgaatcatccttgcatcccagggataaatcccacttgatcatggcaaatgatagtttgatgtgctgttgaatttggtttgttagcattttgtgagaattttacatatatatttataatatggtttggatttgtgccccaacccaaatctcatgtcaaattgtaatccccactgttggaggagaggcctgacaagaggttactggatcatggggatggattttcacct

SEQ ID NO: 130138 - DNA, 507 bp, Homo sapiens
actcaattgctcaattgtttttgtcaataaaaattttttttaaataatttttaaatgccttcactaaataaaaagacattaagtaaatatcttaaccttcaaccttaagaaagtagaaaaataaaagtaactaaacctgagcaagcagaaagaaggaaatcattaagattagggtagatataaataaaactgagtataaaaaaatagagaaaataaaaacaaaaatttgttctttaaaaagattagtaaatttttaaaacaaagtccacgaagtagctattttattattcctgttttacagatgaacaagctgaagtgtagggagctgattcacttattaattccacagttattgaagcaccccctttgtgcctggccctgggcaaggctctggagagacagctgaaggcaagacgcacagtcagggagcttacgttctgggaggtagacacacaaccagcktggtgactctaaagcgaggccttcttgatctgcaggttcaggaaa

SEQ ID NO: 130139 - DNA, 497 bp, Homo sapiens
gttattattcctactttacagataggaaaaccgagattcaagaggtataagcagctttattgagtcactaagtttgtagagggcagtttccaagtctgactcttggtttttttgatcttaaagcttctcttctctgctccactcaagagcagaggacattatgaagtttcttctagaaggaatgagaaaacaaatasgtttcaatagcaaagactctgctcttttcctgcctgtttgccttcctttctggtgtgtttcaggaagattttctccctaaagagcttctttgccttatatgagcctttgcctcttcatttattaattccttctccagctcattctcaagacagtggggaaagcctggcttttaaataacacatgctttaatttcaccttgacctggatcaatatttccacttgttccaaactggcaacttgtcctctactgccatccctagggccatttatcctgcttctcgctgcaattcccttagcta

SEQ ID NO: 130140 - DNA, 545 bp, Homo sapiens
gatgagaacatcccagtagaaaattttggttgcttcatgcttaattgttagggtcagtgtgcaatcaaattggataaaaggtatwcagacaggctttaaatcacagggcggcatgcaaaagagagttttaattttaatttagtgcacatttttcttgatctttcatccttgcatcctagaccaaggcagattactgagtttcactcaggcaagaactcttctaccagcttataaaaacaaatggccaggtaatggttgatcttcaggtttaatccaaaatgagaattatcatagttaaaaggggagttttaatattcattatcattgtcccctttttctccacttactctcccattttgtctcaaaaatgggaaatgaaaaattatactgataatttttactcaattgtgaaaatagccactgaatggatgtaacaagatgctctaatgcccttaaaagaggaggaaaggtgttgacagctgatatgtaaacagttatgcagcgcagacaggatgagagatgagccctactggctcagatcagta

SEQ ID NO: 130141 - DNA, 622 bp, Homo sapiens
acctacaattaaaattatactccatgaaatactgaatgtttttctccttaagatcgttgaaagttgtctgctcttaccacttctagtcaatattgtaggttctggccagtgcactgggcactgactgtatgtccaacattgttctacatgttttatgcctgttacctcctccaatgctcaaaacaaccctatgtgttagattatgccctttttacagatgatgaaactggatcacagaaargataagtagcttacataagatgatgtagctgataaagaagagatctttgaacgcttaatttttgattttggagctcccactctgttaaccactgtgttactgaggcctctgggcatccacagttactatctttagatactgttgtgtcactttttcaaagatcctgcctatcaaagatggggaaaggaaataatttcatggtttgctatctaaccaatagaaacagtctccaaatagcaataatcaaataatctgacaaaaggatgtcaccagttagtatttactctagatacagaaatgcaaattgttacagagcttttttcattgtcataaacatgaaaattatagggaagggaaggtagaccataccaatgacttgag

SEQ ID NO: 130142 - DNA, 496 bp, Homo sapiens
atttaacatgcaatattcttttcaagcttaagtattgtagttaacatggattcctcttgcttcatattgcttagtccttaatttttaaacatgtgaaaacatacatgaatatataaaagtacacttttccacacagtattttctaaatgctttctttctctcctctctttgtctctcctttccttcctcccatctctatatcatccctgtctctatctccttttcattctgcctaaggcaaatacttggaatttaatatttggyctcaaaaacagttacagagacacatttcttgatgtcctcagtgaagatttgaaggcgaatgctttcaggtggtctttctctttggctagattgatgtacctaatcaaatttaataatatcccaaaatagagtaggataaattagctaattgcttattttcaaatcaatctatgttgctaatattttaaatatacttacagtatttttaaaaacatgtggctagattcagcaa

SEQ ID NO: 130143 - DNA, 511 bp, Homo sapiens
agctggccttgttggagacacacctactcaaactgacaaagcaatgtaatcatttgttttctgtatacttccatttagcattaagttttttaaaacgagaaactattttgttcaaaggattaagatgagattagcatttggtaaaccctttaaggtttacacagtgyttttatatcattaatcctaacaataccctgttaataagggattgctaaccactttttacagatgtggctcataaagattaagtgatttacttaggattacatagctggcttggacttgagcctgtgtcttctgactctaaagcaagttttctcaacctcgacactatcagcattttgggccaggtagttctttgttgtgggggactgtccttggcactgtatgatattgagtagcatccctggcctctactcacagaagcacagcacaccaccccctagttgtgacaaccatctgggtatccttggtgggagagtgggagggggttatgggtggcacaaaaatc

SEQ ID NO: 130144 - DNA, 347 bp, Homo sapiens
taaaatgctgttatttcacgcctcagaattgcccacgcatttcattctttctggagcatctcacgtcctcttctctgctttaagatccacacaaatrtcacctcctctgacatcttccaagatagcccatgtatttaaataagccatttccttcattacatagtatctttattttagcaggtattacataatatgttacctctgtacttgcctgtccacaccctctaaacactggtcttggcaggaaggacagtgctttgtttatctctttaagttcagtcaatgtgtttggaatataagacacacaaaattatgaaagaaaagggtaatctttattacagtgtctt

SEQ ID NO: 130145 - DNA, 527 bp, Homo sapiens
gaagttagttactattaataactgttgtttattgaacagttactatatgctaggcacacactttgtgctatttaatcctcaaacaacctcatatggtagacaatattatcctcatattataaataaagggagaaatagcaaagaaacttctaaggaccrcaaagcagctcattaatgtggaaataactacttttacaacagtttaataatatggatgattgacacatattattattattcctattttgcagataagtaaaattgtggtccaaatattataacattaaatcagtggaaaaacctagacaagtaagctggcttgctgacttttactcacgctaattaatgttaagtaagaatgatggtcactcagaatgaatttcacaccagtgaaagactaactcattctgtcagctactggaggcaacaaaagctttaaggaatatactggggtcaaaaacaccccagttccaattatgtctccatcatttaccgtatctgtgactatgtgcaagttatttaatctt

SEQ ID NO: 130146 - DNA, 623 bp, Homo sapiens
tttttcacctttatttttcaattctataaactgtatcaaatcctctttagaaattagtcagatatatgtaataaaagtgggtacccttcttacagtctcacaacactttaatatatcccttacattgcttcctaaattatttttaaattacagattagaaaagttgttccacttttcaaatatgttcatggctctcaatttttaaacattcaaattttaaaataatgacatttagggctcactgtgaccttcctctatttccattttgcaagcagatttttaagttttcttctgtcatcgctccttcccttatcacaacctaaacactaggcacatctarataattttctgttggcaaaatacatccttttctttctcagcttttcgtgagctgttctttccaccaaaaatattgtctctggccattactgataggccagtgatgatgttcccccttatatatgctgtataaatacttccaaacaggttaaagcattatctcatatatgatacagttatatttctgcaccacactttgatgacgtagttaactattaccttgttgtatagttagatgagtccttgtttgtcctccttgagggaaacagctttttttttttttt

SEQ ID NO: 130147 - DNA, 508 bp, Homo sapiens
gcactattaaccccttaccaaagtacctgggtcaatcgctcatgacccagccacttggttttgcatcttctctctctatggcattctgggtcggggctccatatactctttaattttactgtgtctctgattacttaaagattgtgtccacatgactgactggacttctcagctccgttccaggcttaaattgatagcttatatttaatgctctktgggctcttgtgcacctagcaaaggttggcatggccctggtcctggtatggaggctgccagtcttctctcttcccactctgagcagcagcttgatacaggccacatttcccagcagggattatactttgttttaagccattgcttcggaggtgtgagggcccccatttaagttccgttcctagtttctccccagatggtgggcattaatggatcatgtcacctgcccacccaccacaccgcaccctaaaatttgagtttctggatcttcagtctgtttctagcaggaaggctc

SEQ ID NO: 130148 - DNA, 508 bp, Homo sapiens
gcactattaaccccttaccaaagtacctgggtcaatcgctcatgacccagccacttggttttgcatcttctctctctatggcattctgggtcggggctccatatactctttaattttactgtgtctctgattacttaaagattgtgtccacatgactgactggacttctcagctccgttccaggcttaaattgatagcttatatttaatgctctgtgggctcttgtgcacctagcaaaggttggcatggccctggtcctggtatggaggctgccagtcttctctcttcccactctgagcagcagcttgatacaggccacayttcccagcagggattatactttgttttaagccattgcttcggaggtgtgagggcccccatttaagttccgttcctagtttctccccagatggtgggcattaatggatcatgtcacctgcccacccaccacaccgcaccctaaaatttgagtttctggatcttcagtctgtttctagcaggaaggctc

SEQ ID NO: 130149 - DNA, 632 bp, Homo sapiens
acaacattttattaagagcacttctgattacaaattaagttacaagagcctttgtgagaggctgcctttgaggcatgtctacaattttaaaaatcagcatcatgcattgrtatgaaatcaaaatctaagaattaaaaagaagttctttaaaaccactaaagggcagaacaagagattgcgggcaggctgcaatgtccttacctccacgttataaaaaataactaaccttaaatatagatttcttgaatccttttcggattctttttgaatctaaaaacttcagaatccccgaagcaaccagctcaccaggaatcttatcaatagtggagttctgtcagaactgacctaaggcctgaacagatatgaggaggctctgaggctctggtatttatgagaattgagtgctagattgaatcaatttaagcagactactggccaattaaatatgtttaatttcaacaattatctaagcaacgaacagatattcgaaatgttctctagcttttgaagacgacaacaggagtctccgtgttttaagtttaatataggatatatcagattattatgatcactcttaccatacttcactgcttagtttctgagatgcgctgagtaatttttcacctactttg

SEQ ID NO: 130150 - DNA, 510 bp, Homo sapiens
tatataaatgacatgttaaagtcctttgtacagtgcccttactatcttagaacaaagctctcagtatattctagaatgaatatatttttctggctctgggaaaatcaccctcatctcttccattcattttacacaatgtaattatcaccaaaaaatactttgttctgctamttacaccttccctaatcaaaatcctgctcaagttccttttttgtacctgttcaatctgaccctgaatcaagaatcacgcttcatcgacacagagaaaactgtgcagaatatcacttgcaatggattttggagagtaaacattagacctctgaaaattctgttgcaaagtttgcttttgtcacctcacacccaccattacaaacagcctcagatgctcaggttcactgagcactttttcagcttctcttccataccaaaatgcggacagatccagaatcttactcttccttgtatttgttcccaactgtcatctaacctgatcacttactaatattgcta

SEQ ID NO: 130151 - DNA, 439 bp, Homo sapiens
actgaattctgtttgttaacaaaatttgttarttctatttgctaatataattaattaaataatttacttgttttaaaatttctatgtctaccttcgtaaagaatctggatctggcccggcgcagtggctcatgcctataatcccagcactttgggaagccaaggcaggctgatcacctgaggtcgggagtttgagaccagcctgaccaacatggaaaaaccccatctctaattaaaatacaaaattagccaggcgtggtgatgcatgtctgtaatcccagctactcaggaggctgaggcaggagaatcgcttgaacccaggaggcagaggttgtggtgagccaagatcgcacctttgcacttcagcttgggcaacaagagcaaaactctgtctcaaaaaaaaaaaaaaaaaaaaagaatctggatctgtagtggggttt

SEQ ID NO: 130152 - DNA, 439 bp, Homo sapiens
actgaattctgtttgttaacaaaatttgttaattctatttgctaatataattaattaaataatttacttgttttaaaatttctatgtctaccttcrtaaagaatctggatctggcccggcgcagtggctcatgcctataatcccagcactttgggaagccaaggcaggctgatcacctgaggtcgggagtttgagaccagcctgaccaacatggaaaaaccccatctctaattaaaatacaaaattagccaggcgtggtgatgcatgtctgtaatcccagctactcaggaggctgaggcaggagaatcgcttgaacccaggaggcagaggttgtggtgagccaagatcgcacctttgcacttcagcttgggcaacaagagcaaaactctgtctcaaaaaaaaaaaaaaaaaaaaagaatctggatctgtagtggggttt

SEQ ID NO: 130153 - DNA, 535 bp, Homo sapiens
agaattctttcttctggcttttttattttgatgaaaggaaaaaatatctttgttagtgcccctgagaatgtaaatgaacagatcatctaaattactaagcatctaacctgttttacatatttatgcacatgcaggtgatgagtatagtcagtttttccccctaaagtttatgtgcagacatggggaggagagtattttaracttaaaagtgtacaggtagggatgaaatttatggaatcctgatagactgaaggggggatataaacaatgaccaagtcagctattgctgcttggattctttatttcttcagactgcaagggaatgagtaaggggtggttgggtggtgatgggggggtggtacggtcgtggcgggagagcagtaaacaatctttcatctcattcagctgttcagtgggtgggactaaaggagataagagttgagtgaagctatgaaataaatgtggaagctacataggtgatttgcatggtagcattgtcttattctatgatgggacaacatgatggaaccaggtc

SEQ ID NO: 130154 - DNA, 535 bp, Homo sapiens
agaattctttcttctggcttttttattttgatgaaaggaaaaaatatctttgttagtgcccctgagaatgtaaatgaacagatcatctaaattactaagcatctaacctgttttacatatttatgcacatgcaggtgatgagtatagtcagtttttccccctaaagtttatgtgcagacatggggaggagagtattttagacttaaaagtgtacaggtagggatgaaatttatggaatcctgatagactgaaggggggatataaacaatgaccaagtcagctattgctgcttggattctttatttcttcaractgcaagggaatgagtaaggggtggttgggtggtgatgggggggtggtacggtcgtggcgggagagcagtaaacaatctttcatctcattcagctgttcagtgggtgggactaaaggagataagagttgagtgaagctatgaaataaatgtggaagctacataggtgatttgcatggtagcattgtcttattctatgatgggacaacatgatggaaccaggtc

SEQ ID NO: 130155 - DNA, 547 bp, Homo sapiens
atcttgtcttttttttttttttgagacagggtctcactctcactcaggctggagtgcagtggcaccatcatagctcacttggttgacagtctttttctttcaacattygaaatatgttatccttttgctttcgggcctccatggtttctgataggatgtcagctattcttatttacagtctcttatacatatagttgcttctcataagctgctttcaagattctctgtttttggtttttaacagtttggttatgtgtgggtctctttgattttatcttattcagtttgttgagctttgatgttgatactaatgtttttcttcaaatttgggaagttttcagttctgtttcttcaaatatacattctgccccttccttcctaaacccaccccttttctccttccctcccttacttcatgtttgattttgttctgtaggtctctggctctgttcatttttctttctttacttaaattggttaatgttatttaacccattttcaggtttggtgattcttttttctgcaagctgcaatccttcgttgagct

SEQ ID NO: 130156 - DNA, 427 bp, Homo sapiens
atcaggtcttataacaaagaaaacccaactctatgccctatgtaaaagcatatttaaaataaaattatttcaaaagtttgaaaataaaaacatgcaaaaatgtgtagcaggaaaatgtaaaccaaaagaaagcaatatttgtgatctcagtattagacaaggtagaattctggccaaaaagtgaaacaaaagcgggacctttataatgttaaagggtgtcattcacaataaagatataatacttaagaatattcatagtccaagtaacatcttgtcaacaaaaacaaaaactacagatataagaggaggaacaattatgtgagcagcagaggacctctgttcgccttgtccaggtgttgtcaaactctagmccatgggcaaaatctggccacacgtgtttatgtgggactcatgagctaaaaatggt

SEQ ID NO: 130157 - DNA, 501 bp, Homo sapiens
acatatattaatttaagatgtattgggaggactacagaacaggtgttccaatcactgttggcttgaaaaccttgtgtatccttttttctaaagtgaacaacactggctgtgaatggctgagttattttaatctgtcattcacagttaacgggagtgttcagagcctgtcaggtgttctaaagcatatggaagatgcaaaacaccctgattttaagatgcatacaccttatttggaatgatagcatactgatatgaaaagtttagaatatgtttgccaagtcacctaaggttagttcagcaaacatttatgaaatgcctgattgtaagactattaaaattaatatatagggagtatatcccaactattaaagtactgtgagaacacagagcaagatacaattggaaattagcatcaattcacaaattctttttgaggaackattatgtgcaaactatttccaggcttgaggaggtgagaatatacagaaatcaatataacca

SEQ ID NO: 130158 - DNA, 565 bp, Homo sapiens
gccggctgatttttgtatttttagtagagacagggtttcaccatgttggacaggctggtctcgaactcctgaccttgtgatctgcctgcctcagcctcccaaagttctgggattacaggcttgagccactgcacccagccagtaatgctgattaagtgttaaatataatgtttgaccaaccaaaccagcctattcttcaatgttaccaaataaatatcaagaagagtaaggtctctatgacttagtgatagactttaaggagtgttggaaccacactactgtagggttagaagggcttagtgctggagtggaggacacagcacagcgtccccctccatgtagaatctgcacatatgccatgagagagggacctgacatgacatgtgtccagtttagttagcctgtaaggtttcttcagtcattgtcttaaaataaytggtgcttgtactattaaggaaccaatagaacaagtagaatgctttaaaatatttctagttaatgacctttactattgttttctattctattaggtttcagaaagcccctctggaataatgtgtattat

SEQ ID NO: 130159 - DNA, 172 bp, Homo sapiens
ttagacaaagggtgctagatatgccgcaaaaaaaaccccacaatctataaaagaaaaaaatgacaatttggacttcattaaaatttaaaaactttgtgcctccaaagacactactaacaataygaaaggacaagcgactaaccaggagaaaatatttgcaaatcatttattt

SEQ ID NO: 130160 - DNA, 172 bp, Homo sapiens
ttagacaaagggtgctagatatgccgcaaaaaaaaccccacaatctataaaagaaaaaaatgacaatttggacttcattaaaatttaaaaactttgtgcctccaaagacactactaacaatatgaaaggacaagygactaaccaggagaaaatatttgcaaatcatttattt

SEQ ID NO: 130161 - DNA, 444 bp, Homo sapiens
ctatgacctactggggggtagagcaagggagagcatcaggaagaatggccaatgaatgctgggcttagataggatgatctgtgcaggaaaccatcatggcacacatttacytatatagcaaacctgcacatcctgcacatgtacccctaaacttaaaataaatgttgaagaaagaaaataaataataaaaaataaactatttttttgttcacaggcattaaattagcatttttaaagatgtaagtacttcataacatcagttataaaatacataatgcatttaacacattcctttccaaaatcttctttaacagttagttataatttaaatatgctagacaacagattatttaagaaatgtattttgtgtttgtaggatttttttcagtaaagttactgaattgcatggtaattttgaagtaaattatgtgggcataattttaa

SEQ ID NO: 130162 - DNA, 444 bp, Homo sapiens
ctatgacctactggggggtagagcaagggagagcatcaggaagaatggccaatgaatgctgggcttagataggatgatctgtgcaggaaaccatcatggcacacatttacctatatagcaaacytgcacatcctgcacatgtacccctaaacttaaaataaatgttgaagaaagaaaataaataataaaaaataaactatttttttgttcacaggcattaaattagcatttttaaagatgtaagtacttcataacatcagttataaaatacataatgcatttaacacattcctttccaaaatcttctttaacagttagttataatttaaatatgctagacaacagattatttaagaaatgtattttgtgtttgtaggatttttttcagtaaagttactgaattgcatggtaattttgaagtaaattatgtgggcataattttaa

SEQ ID NO: 130163 - DNA, 507 bp, Homo sapiens
ttgttgaattttattgaatttttctgcacctatttgagatgattattatttttctctttcaatctattaaagtagtgacttagttcaacagattttctgatgttgaattacatttgcattcctggaaataatccaatttgacatgatgtatcttttaatatgctgcttattttgatcaaagtcaaacattaacataatcaaaaataaaattccctctcccagagacaagcattttaaccatttgtactttagttcttctartagttagttccaactcttaaaataatttccttataccattttcttaaactatcagttttagaaaatatatctagtgactttttctgtgacatgaaatattagccataaaaccactcttcttcacttcaaaatgtctatagttatatcaccatttttagttcccctatttttatatatcaacaatgttctaaaagctctttctggttcctctaaatacaggtcatatctcttgatgccttcctttgt

SEQ ID NO: 130164 - DNA, 507 bp, Homo sapiens
ttgttgaattttattgaatttttctgcacctatttgagatgattattatttttctctttcaatctattaaagtagtgacttagttcaacagattttctgatgttgaattacatttgcattcctggaaataatccaatttgacatgatgtatcttttaatatgctgcttattttgatcaaagtcaaacattaacataatcaaaaataaaattccctctcccagagacaagcattttaaccatttgtactttagttcttctagtagttagttccaactcttaaaataatttccttataccattttcttaaactatcagttttagaaaatatrtctagtgactttttctgtgacatgaaatattagccataaaaccactcttcttcacttcaaaatgtctatagttatatcaccatttttagttcccctatttttatatatcaacaatgttctaaaagctctttctggttcctctaaatacaggtcatatctcttgatgccttcctttgt

SEQ ID NO: 130165 - DNA, 597 bp, Homo sapiens
atatattttcagtatttgtcataaggcctagtaaaaataattgtttaggaaatattagctatataataataatcatcatcattattatcatcatccccactatggttttaccctccatgtgtgaattattcatcccctagtcaactagttttaagaataattttagaatccaagtttgttttgaaatatttatagaaaaggagaggacaaatgttaaaggtagtattttctttgtctgtaatttggattattgttgaatcctgtaagaattaggtctatattgcaggatcccaacatgaratcctagtggtgaaagcactgcccatccaagatggaagatggcttccagctaacttccactgaaaataagactcaccaacagtactgggatagtaaatggttaggcaaatgaaattacatgccttcatggagctgtttttgtcactagcagaagatcttgctgtgcaatttggttccttactgaacacacctattacaaattacctttgcctatgttaactcttcctaattaaaataaatattgacatgcacagcttgtgacaaaaagaaactgagaatagcagaaagatgaaggaa

SEQ ID NO: 130166 - DNA, 597 bp, Homo sapiens
atatattttcagtatttgtcataaggcctagtaaaaataattgtttaggaaatattagctatataataataatcatcatcattattatcatcatccccactatggttttaccctccatgtgtgaattattcatcccctagtcaactagttttaagaataattttagaatccaagtttgttttgaaatatttatagaaaaggagaggacaaatgttaaaggtagtattttctttgtctgtaatttggattattgttgaatcctgtaagaattaggtctatattgcaggatcccaacatgagatcctagtggtgaaagcactgcccatccaagatggaagatggcttccagctaacttccactgaaaataagactcaccaacagtactgggatagtaaatggttaggcaaatgaaattacatgccttcatgragctgtttttgtcactagcagaagatcttgctgtgcaatttggttccttactgaacacacctattacaaattacctttgcctatgttaactcttcctaattaaaataaatattgacatgcacagcttgtgacaaaaagaaactgagaatagcagaaagatgaaggaa

SEQ ID NO: 130167 - DNA, 583 bp, Homo sapiens
ttgttctgcccaatggcaggctgcrcttggctcacgctactgacctggatcccatgcctgccaagggcaagtcaggtgtggagcagcaaggattgtgtgagcaagcatggggtctggccactggcagtcagacatgctggctgttgcagtgtggcaggcagctctaggtgctggcatgggcgccagctctctgcaaggctgcagctggaccaggcgaaccagaagcagcttccttggttggcagtggggacacagtggtgcccagaagcctggagatgccaggaactgcaggatctcaaagaagaagtaacagccttggcttggggatcttccaggcctggggtcccagaagggccacagctcttctctccttcttttctcctgcaacatggcgagcaaaggtcatgtttcagccttgtttgtgttacagcttttttagccctgccattcggcagccctgagttcttatcctacgactaggaagaatgaggtacacagacaagtggagggtgagcaagatgaagaggagctttattgagcaatagaacagctcacaggagacctgcagcaggtagctcctttc

SEQ ID NO: 130168 - DNA, 583 bp, Homo sapiens
ttgttctgcccaatggcaggctgcacttggctcacgctactgacctggatcccatgcctgccaagggcaagtcaggtgtggagcagcaaggattgtgtgagcaagcatggggtctggccactggcagtcagacatgctggctgytgcagtgtggcaggcagctctaggtgctggcatgggcgccagctctctgcaaggctgcagctggaccaggcgaaccagaagcagcttccttggttggcagtggggacacagtggtgcccagaagcctggagatgccaggaactgcaggatctcaaagaagaagtaacagccttggcttggggatcttccaggcctggggtcccagaagggccacagctcttctctccttcttttctcctgcaacatggcgagcaaaggtcatgtttcagccttgtttgtgttacagcttttttagccctgccattcggcagccctgagttcttatcctacgactaggaagaatgaggtacacagacaagtggagggtgagcaagatgaagaggagctttattgagcaatagaacagctcacaggagacctgcagcaggtagctcctttc

SEQ ID NO: 130169 - DNA, 572 bp, Homo sapiens
cttctgatatctttttagaagggttcactagttccctctatgaagttaagttagtgggtgctcttatggcccrtaattacaaattttaattgctttggaaaatgattggaaagtaatagaatatccttagaaagatacacacatgatcagagcatttatgaaagcattttccgctgattaggaagacctttggaagacgaagcagaaaataagccttagctttggcagtaggctcagtagggtataatttatggttttgctcagggggatgaagagaatgagacaaatcctaaaagcccttgatgcaaagacaaagtaagagagaagttagaaaaaaaaaaagtcaactcagtttacaagctgcagctaagtacaaggcactgggctggactcactggaggaatcagagatggtgtattagtccattttgatactgctataaagaactgcccgagactgggtaatttataaagaaaaaaggtttaattgactcacagttccacatggctggggaggcctcaagaaacaatcatggcagaaggggaagcaggcatgtcttacatgtggcagga

SEQ ID NO: 130170 - DNA, 460 bp, Homo sapiens
ggatggatatctgaatgggtgataacctcttaaatgcataacaatcagggatataatattttacatttttcttggaaattctgtgtgggctgtagggattacytgcttctgctacacactaactgcatgattttggacaaataacgagccctctatgcccgatcccttatcagtcagtaatgatgacccctgtttcataagcttgttatgatatattacatgtaaaatacttgccttggttcataggaagatttctgtgatgtgagctatcacttttcccattgcatagtttccatatttgaaattaatacatagtattcagatgaaaacattatcagaattattatcgcaacttttacgggtatatatataatcatttctttgcttgccacaaaatcatttcatccaggttagaagcttgctctccatgatggaaccagaatgtaaaaatgttggtgca

SEQ ID NO: 130171 - DNA, 607 bp, Homo sapiens
aggtctccagtcatgaagggctgacgatccaaatgtaaggagagactgccaaagctcattcaatatattttttttttggccttttccatggttatgcattgccttaaactaattagcaattagatttaaatatctgcatgagattttaaagttgcacagaagactgttggaaaagcatctgtgagatgctactgcactaaatctccttttcttattctttataataatcttgtcaattataaaatgattttccagtagtgagtaaatatggttcttccagctgttcaacccaccactagctatctgaactgaaagacaaggcagagagcagagttgcgttctagaactactctatgactcataatatctcacatttagaatcagaagaatcagttcttgattccaaatcaaattaaactacaacamaagtcaaaattttcattaagaactcagtagtctttcacagaagggaatctgagaattcttccactcatgagtaatgtgttaaaggatgagaaaagagcatgttttccttggcttttggattaatacaataaagcctgtgaagtttaacataattaaattaatgttgatatgcagtgtgact

SEQ ID NO: 130172 - DNA, 607 bp, Homo sapiens
aggtctccagtcatgaagggctgacgatccaaatgtaaggagagactgccaaagctcattcaatatattttttttttggccttttccatggttatgcattgccttaaactaattagcaattagatttaaatatctgcatgagattttaaagttgcacagaagactgttggaaaagcatctgtgagatgctactgcactaaatctccttttcttattctttataataatcttgtcaattataaaatgattttccagtagtgagtaaatatggttcttccagctgttcaacccaccactagctatctgaactgaaagacaaggcagagagcagagttgcgttctagaactactctatgactcataatatctcacatttagaatcagaagaatcagttcttgattccaaatcaaattaaactacaacaaaagtcaaaattttcattaagaactcagtagtctttcacagaagggaatctgagaattcttccactcatgagtaatgtgttaaagratgagaaaagagcatgttttccttggcttttggattaatacaataaagcctgtgaagtttaacataattaaattaatgttgatatgcagtgtgact

SEQ ID NO: 130173 - DNA, 435 bp, Homo sapiens
cccatgttttcatttttgagttggagaccaaaatctgaataacagccatttctattgttgatcacaattgtttatttatccctcagcatcttctccaactgaaacagttttcttgttttacagtttcaatctccaaatttctaattattgatatgttcttgctttgaagtttcatcattgtttagcacattcctctatttatgcttaagtttggaaatcaagatggtggtccagagaaggctaaattaattcccaccactttctatcctatcttatatactcrttcactgttaaaatttgcctgcccttctaacctttggttagttcattatcttttttgtgtgtgccctagttcataatctgaccacatgtgccaaaactaacctttccccgattggtatattacaaatgtttcctgtttattgaatttgaatt

SEQ ID NO: 130174 - DNA, 491 bp, Homo sapiens
gttacagccctagtctgatttacaataaaatcacatcattttatgattaagtttttacagagcaaatggagctaaaaggtagcctgttttgttttttgagggctcctgttctggaattattaaaaataaaaaagaagatactrtagatactatggctattacacctcttttcagggcaaacaagcatttactcataaaactagctttaagtcctataggatgtagcaaaacaataactacaggtttcttcaggacagttcttttgagttcagtggcaactattaataggtttttatttttaaaaatactgatttttattttaaaaaaacaatcattatatagtaggctgctgccttttccctgtgttgagaaagaatcttgtttacaaactgttgcttttatacacaatttaaatttctttcaacaggccaggccattctctgtaaatctggagccattataatgcagcattttatgatgacaggttactt

SEQ ID NO: 130175 - DNA, 529 bp, Homo sapiens
ctgggactacaggcgtgtgacaccatggccagctaatttttgtatttctagcgaagatggagggttttgccagttttgccatgttggccaggctggtctcaaactcctgacctcccgcctcagcctcccaaagtgctgggattacaagcatgagccaccatgcctggtcaagttatatcttttttaagagaggaaggaattctgtaaattcaaggtactgtatcaagatcctgagcctaatgtcaccctttgacaagctcagtagaactccagctggaaaaatttctagataatgctctcatgcagatttttcaaaacttaagtatgaatcttggcacaaaatgtgctcgctcatccacataaatctcattactgaggcaataaaccttgcaattgcttgtgctgtctgcaacggcaagagctgcagtatccaaagcccagcctggccaaactcccctcacaaatcagatattcarcctcacaggaaaagagaatcactgttaattaataacaacaaaggattaggcca

SEQ ID NO: 130176 - DNA, 636 bp, Homo sapiens
cctttgtgggcccatcctggaagggagcccgctgtgggtgattttgagagtgctggggtctagattgtgcctgcctcttcagaccttttaaattcagtacccatgtgcccagcttctgttggaaaaggcaaaatccttcccagtttctgctgctgatctcacaccggcctgctgccctcaggtctgtcaggtgtccccttgctgtcccttcccacacacacccgaggctgatcacatgcaggtcgtgtggctgttggtgtttgctcccaccygcttaaattttggggatatcacctagtttgtgtaaatgttgtccctggatttttgttttgttttgttttctgctagctctgtctttttacggagggacttcggaaaaacccccaaaaaatgctgccactgagattctctcatcttcccagaatcctcaatgtcgcccttttattggcattgctggagtgcacattttgtaaattaaataatgctttgggataaatctttctaattttaaaaaatctttaagtatagaactgatatttaaatcaccctttaatcacttaatatcccctatatcatgttattattggagtaattgaagcttgtatagcttagcagttgaaatgaaagtttaaagaa

SEQ ID NO: 130177 - DNA, 314 bp, Homo sapiens
tgatatcttgggtgtaaattagttagtattaattaattgggtacagtgctgaattaatttgaagacaagactcattctaagaaattctgatgttcagacctagaaatatatatggcgtcatagtggtcatattaacagcaaaaaaagtcatcatgaaaatatggtaggctcttttttttttttgccaygcgctattctaagcctttatgtgcatgataatatttagttattgtatccgcacagtaagccatgagtgtggcctattttacaacttaggaaacaggctcagagagtggcagttttgttaagggtca

SEQ ID NO: 130178 - DNA, 450 bp, Homo sapiens
tggttttttaatattcagaggggtcgtggctgatatttctcaccatacctcatggtgtacaccttcatatgatattgttcataatatccaggggtggagaggatgatgttgctacccatattacagggggtgtaacctccttgcgatattgtcrgtaatattcaggggtggagaggatgatgttattccccacattgcagtgggtttacaaaatcctgcgatattatccttaacatcccggaaacagaggatgttgttactcaccatatcgtaggaggtgtacacccccctgcgatattgtctgtaatatccagggtggaagaggatgatattactcccaatatcacagaaagtataaacccccttgtgctatatttcatcatatccaagagtgaggagaatgatattactccccataccacagggagtgtacacctccctgtgctattg

SEQ ID NO: 130179 - DNA, 618 bp, Homo sapiens
ggatattattcatgatatcctggggaaatatttctctttgaaaatcacagtgggtgtacaccacgtgtgtgcaccctctgatattattcataatatcagagggagatattatccgagggagatattattcgtaatattgtagggagatattacagctaatatcacagtaaatgtacaccatgtgtgtacaccctgtgatattaataatatcctagggaaatattactcctaatagcacagtgtgtgtacaccatgtgtgtacagcctgtgatattatttgtaatatcctagagagatatttctcctaatagcacagtgtgtgcaccccttgtgataatatttgtaatatcctagggagatattactcctaatatcgagtgtacaccctgtgatattattcataatatctttcgaatatattgcttctaatatcacagtgagtgtacaccttgtgatattatttgtaatatcctctggagatattacttttatatcacagtgggtgtacaccatgtgtgtacactctgcgatawtattcatattatcctccaaagatattactccaaatatcaaaatgggtgtacaccatgtgtgtacactctgagatattatttgtga

SEQ ID NO: 130180 - DNA, 503 bp, Homo sapiens
actcctcacatcaaatccatcagcaagtacagagcagtccactttccaagcacatccccaaactggtcagtttcaccacctccaccagtacctcctcacccaagtaaccatcctgtcctgtctccacctggattattgtaatatcctcctaactggcctccctggtgccccctatcccctcctcactccagaactcctactatccatgcagcatccagagtagtattttttaaagacataaataaagttaggtcaatcctttgttcagacccctccagtggttttccatcacagttgaaataaaacccaaactgctcttttaaaaagtttaattgtgtttaattgaacaaagaatgattcaagaattgtasagatctcgaaccagaacaggtgtgaagaggctccatttctaccacaaagaaaatttatggacagagaaggaaagtggcagacagaaaatggaagcgaggtgcagaaacagctggatccattacagcttggca

SEQ ID NO: 130181 - DNA, 613 bp, Homo sapiens
aacagaaggggagtcttctgatcaaatagatttgggaaacattcgttcaaacagcaggaaataagtttaaaccgtktctgtagcgcaggacttctcagagctttgaagaggctcatgtgcattgtaaatatctgaggatcccatgatgtacagcatctcttaaatttattttggcttaaacttttttctgtagggtcatattcctcagagccctctttgggaaagtctagagcaaactgcaaaatgaggagagaactgagttgaagctcaaaaggtcagcaggggtcagaaatcagggatttgtgcagccaggagtttacattttatctgaaggcaatgcagtgcacatggtgagtttgcaggaagaagttttattaccatcccccatcacagaaaatgaatatccttgttggtcttttcatcagcaccagtaatcaacatctgatgggccaggagacccatgggactggtactcaggaagcagtgtgtccctcagcaagtccctgagcctctctgagcctcatatttcacatctgtatgatggttcaagttaaatagtggacatcccttctacagtccctgccaattctcctggcagataatgtgactgcaa

SEQ ID NO: 130182 - DNA, 613 bp, Homo sapiens
aacagaaggggagtcttctgatcaaatagatttgggaaacattcgttcaaacagcaggaaataagtttaaaccgtgtctgtagcgcaggacttctcagagctttgaagaggctcatgtgcattgtaaatatctgaggatcccatgatgtacagcatctcttaaatttattttggcttaaacttttttctgtagggtcatattcctcagagccctctttgggaaagtctagagcaaaytgcaaaatgaggagagaactgagttgaagctcaaaaggtcagcaggggtcagaaatcagggatttgtgcagccaggagtttacattttatctgaaggcaatgcagtgcacatggtgagtttgcaggaagaagttttattaccatcccccatcacagaaaatgaatatccttgttggtcttttcatcagcaccagtaatcaacatctgatgggccaggagacccatgggactggtactcaggaagcagtgtgtccctcagcaagtccctgagcctctctgagcctcatatttcacatctgtatgatggttcaagttaaatagtggacatcccttctacagtccctgccaattctcctggcagataatgtgactgcaa

SEQ ID NO: 130183 - DNA, 559 bp, Homo sapiens
tggaggtgggaggaagaactcagcgatggagctagaactatgggcacgtgaaagaaagaacaagttatctaattcacctgatgggtgcactgtgggagacagagcctggtggtgatggggggcagactgaggtgattcttggatgcctggctaagggtttagaatttaccctgaatataatgttgatatcaccaaagctttaagagtggagagtaacatgtccaatgcgccccttgagtaggagagcttcccgtataagcaggaaactcagaagactggaatcaaagytcaggtggaaggtgataaggaccaggtgccagggatggagacgaaccaagagttgggcagtggaagaatggaaaacaccagagggccaggtatagtgtcagagattgttttatgtcttacttagatgagacacaaaataatattaaaagtatgcaggataaaactctgattatctttcaatccttctaattagtcagtgaggaagtctcatcttggtgctaataggtcttcaacacctttctaacacttgctaattatttaaaggagacaa

SEQ ID NO: 130184 - DNA, 392 bp, Homo sapiens
tgatttgttttgggtcactactcggcaggtggaactaacacgtgtcacttgccagcagatttaagagccaacacatttttcactatgtcttttctcctctcgtctgccatgagatkggcaatgttccacttagaggttctcccatctgccaggtcccagagtgaagatggcatggagcagaggcactgccaacccaccacggatgtgcaacatgaggaagaaatagacatttgctgtcagaggccatggaaccttgggggttgtttgttacggtagctaaacctagcctgttgtaactggcacagcatcttgccttaacccactctaggcccaatgggaaaacgtaatcagcagagaaggactgtgataggggcttccgaagtcccaaagac

SEQ ID NO: 130185 - DNA, 392 bp, Homo sapiens
tgatttgttttgggtcactactcggcaggtggaactaacacgtgtcacttgccagcagatttaagagccaacacatttttcactatgtcttttctcctctcgtctgccatgagatgggcaatgttccacttagaggttctcccatctgccaggtcccagagtgaagawggcatggagcagaggcactgccaacccaccacggatgtgcaacatgaggaagaaatagacatttgctgtcagaggccatggaaccttgggggttgtttgttacggtagctaaacctagcctgttgtaactggcacagcatcttgccttaacccactctaggcccaatgggaaaacgtaatcagcagagaaggactgtgataggggcttccgaagtcccaaagac

SEQ ID NO: 130186 - DNA, 510 bp, Homo sapiens
agaattcaaagtcatccccctgctcactgagataaatgtatgtccgattgccacctttggagaggctaaacagaaactcaaaagaatgcaaccatttgtctcttatctacctatgtatgacctggaagccccctccctgcttcaagttgttccacctttctggatggaaccaatatatatcttacattcattgattgatgtctcacgtctccctaaaatttattaaaccaagctttgccctgaccaccttggcacatgtcatcaggacctcctgaggctgggttacaggcgcacatccttaactttggcaaaataaactttctgagttgactgagacctgcctcagatatgtggggttcacactggcatacctcaattcacatgctcwtctttgagcttatcatagtcacctagatggtggtcccatgggaagccaagctggaccatgtgcccatacctatgtgtagcccgcaatgtggggcaatataattagccactacctacctgccc

SEQ ID NO: 130187 - DNA, 540 bp, Homo sapiens
gaaatggtgtctcatgtggttttgttctcttctcttctgaagtttcagaattgttttcaaaaagccattcatgagctccctacatggttcacctggactgtgcccctcctatagtcctgagttcttcttccatcaaacctatgtatggaactacccgttttcttttttctttttttttttttttgagatggagtctgatctgttgcccatgctggagtgcagtggtgcaatcttggcccactgcagcctatgcctcctgggttcaagtgtttctcctgcttcagcctcctgagtagctgcgattacaggtgcacatcaccatgcctggttaagttttatatttttagtagagacggggtttcatcatattgggcaggctggtctcgaactactgacttcaggtgatccgcctgccttggcctcccaaagtgttaggattacaggctcatccttgtagctctagtgtcttgmaagatacctggccacctacacagtagatgccaccaaaggactgcattcaaaataaccacttgaagaccc

SEQ ID NO: 130188 - DNA, 543 bp, Homo sapiens
tctaaacaccgccacacaccaccattctttcattcattaactcattcacttcayaggctggttgatgctctagtacgttccaggtgccagaacacgtgctgtaaaagacagacaaggtccctgtgctcatggagctcacataccacccaaggggggacataaaattaaacaactaggacaaattcggatagcgatgtaacaaatgaataaatagggtgataggatagagtgagcgtgtattttcgatttgagtcgtcgggaagggacctctggactgagacctgaacaactcaggcagagaaaacagcaagtgtaaaggtcttggggtgggtttgagcttaggatgtttacagaatggaaaggtcagtgtggctgggctgatccaagccccacccaacccacttagcacggccacctctctgaagcctccttggatcaacaggatgcttcccttgctgattcagctccaccctacttccacacatctgtggtcacaacacatcctgaccacactgggttgtgatagactctatacactggtct

SEQ ID NO: 130189 - DNA, 543 bp, Homo sapiens
tctaaacaccgccacacaccaccattctttcattcattaactcattcacttcacaggctggttgatgctctagtacgttccaggtgccagaacacgtgctgtaaaagacagacaaggtccctgtgctcatggagctcacataccacccaaggggggacataaarttaaacaactaggacaaattcggatagcgatgtaacaaatgaataaatagggtgataggatagagtgagcgtgtattttcgatttgagtcgtcgggaagggacctctggactgagacctgaacaactcaggcagagaaaacagcaagtgtaaaggtcttggggtgggtttgagcttaggatgtttacagaatggaaaggtcagtgtggctgggctgatccaagccccacccaacccacttagcacggccacctctctgaagcctccttggatcaacaggatgcttcccttgctgattcagctccaccctacttccacacatctgtggtcacaacacatcctgaccacactgggttgtgatagactctatacactggtct

SEQ ID NO: 130190 - DNA, 335 bp, Homo sapiens
cgctcactgcaatctccatctcccaggttcaagyaattctcatgcttcagtctcccaagtagctgggattacaggcatgcactaccacacccagctaatttttgtatttttagtagagacagggtttcgccatgttgaccaggccggtctcgaactcctgacctcaggtgatccgcctgccttggcctcccaaagtgctggaattataggcatgagccaccatgcctggctatataagtctattaagcagctgctttctgaatggacctctagttgagcgcaaatgcctatagaatgagacagggaagtttccgtatgggaaaatgtgtggtgcc

SEQ ID NO: 130191 - DNA, 527 bp, Homo sapiens
ttgccagggctggctgcttcttctgaattactttatgactgtaaagtcacccgcattttgcacctttcattatgaatgcacgctaggcacctcatggttaaccgtttagcaggattcccctgccagaggcacatagttatcttattttattgcttattaagtttttgcaaggaaacaggtgtaagaatctaaacagcaattactagacrtaaaggatgttttctagaatgaaacaggccctaccaaagctgggaatcgataacttaattgaggaggggggattaaacattaggattaaatgttagctaccccactccacatagaaagctaaagaccctataaaggatttgttttgcccttcctacaagatcatgtacatttagccaaacaaatctcgacaatttatacttgtatgtggtctcagctgaatcgagaaacctgtaacctcagaacgcctctatttattacatctcaattatttccatggaaacacgcgcagtgttcccaagtccctagaccaccaaatt

SEQ ID NO: 130192 - DNA, 527 bp, Homo sapiens
ttgccagggctggctgcttcttctgaattactttatgactgtaaagtcacccgcattttgcacctttcattatgaatgcacgctaggcacctcatggttaaccgtttagcaggattcccctgccagaggcacatagttatcttattttattgcttattaagtttttgcaaggaaacaggtgtaagaatctaaacagcaattactagacgtaaaggatgttttctagaatgaaacaggccctaccaaagctgggaatygataacttaattgaggaggggggattaaacattaggattaaatgttagctaccccactccacatagaaagctaaagaccctataaaggatttgttttgcccttcctacaagatcatgtacatttagccaaacaaatctcgacaatttatacttgtatgtggtctcagctgaatcgagaaacctgtaacctcagaacgcctctatttattacatctcaattatttccatggaaacacgcgcagtgttcccaagtccctagaccaccaaatt

SEQ ID NO: 130193 - DNA, 470 bp, Homo sapiens
gctttcactcccagcttctgcaccacctgtaggagcatcttcctcccattagaccacagggttcccccagtatcccacctccaggcgtcccttcatcccgtagcttatgtcccctctgcctccaaactggtgaggagactgcagggtacagggactgtgcctccaacctgcttcctccacggccaccaggcctccatctgcaatcttggcagtgccctgggaagagaatgggaggccccttcctcttcagcaggccagccaatttatttgagcactgataataaaacaagtacagtagtcttgtgggccttctttttgtttgttgtttttttagagayggaatctggctctgttgcccagactggagtgcaatggcgtgatcatggctcactgcagcctcaaattcctgggctcaagcaatcctcttgcctcagcctcccgggtagctgggactacaagcttctgccact

SEQ ID NO: 130194 - DNA, 606 bp, Homo sapiens
acacctcggctcttgtgaacactagtgttcctgccgaagcacgcctacttaccccgctgagcagagcctgagcctgcaacctccagagacgtggggaaagccacatgctccgcttcccgcccccsgcaagggcgtgtcagctacaaggggcgtgtcatctctaggccccgccccgcgctgcgtgcccacgttgcgccggcctcgcgccagtccgctgggctgcagggactgcggcgcctgagggagtcgctgacgggcacgctgactggaggctggcggacaggcgacagcgacctgcggcaggtgagctgtccgcgccctcccggggccttccttccgcccggcttctcggaccgcgctgcgtccttcgcgggccctgcctcggtccaggccttcggacctgggcttggccgggccacagccctttgggtcccctgcgccggtctgaggggagacccggccgggggcggccggaagctgggtgaggccgggcagaaggacgaagaagggcgtggaggggctgtcaggggagggcgaaaccgcggacgccgctctccagaagtcgtctccccgggggcgcggggaggcctgaatggctctctttgg

SEQ ID NO: 130195 - DNA, 484 bp, Homo sapiens
gttgagaagtctctgttatctcgtgccttgttggattagaactgattgagctctgtctgctgccccaaacatgtggctcagccaatctccagtggcatctgcaatgtgggtattctagcctccagtgctcacgtggctcaccttagaaagggcagatattcctatttcctgacgctgctggagaatgaggtctgagtcagaagtcctcaggtgtgacctgcccagaactatctgaaattgctggatttcttgttcttcctcagtgtttaacaatcacccaattgctcattctcaccagcgacttcctcagtaagagctcaatatttgaggtggtgctgcattttgtsaaacattcatgcgtgttagcccacttagtcttcgcagcacacagtggattaatggatttttaaaagctggtatttatgcacgatggaatactactcaaccataaacaagaaggaaattctgtcatttgtgactacat

SEQ ID NO: 130196 - DNA, 621 bp, Homo sapiens
aaaagaggacccaggagcttccattgactagttagttaatgcagtgcgggatcttagctggtttgcttggtccaattcctgtctctcggtttcttttttcccttcccttcgctgccttcccctccctcttccctttttctttccaagagaattgagtcactccatataaaagaagcagccagttggctaaaaagtccaacaaaaaacaagtatttatagctctccaaatttcccacttgtcattatcagtatacttttgcacacagttatagtcggtgtttgggatcctttttaaaaaaataaaaagtttctgtaggcttttccatgcatgaacacagcttatcaacttgccccggctgtgccaggattccattgttgactgttgtttgagcagtcatgccctttgttcttaggctgtgtgttgtttttttcctaacatcatagtatggctgggtattattttgatasagattacaattactattactatttcttgaagtgtatttcccagagtggaatattttaggatctttttttctcttttgtgggggtggggaacatgtagcttcttgtggatattagacattgaagtctaaaaaggttctatatttatgatttggc

SEQ ID NO: 130197 - DNA, 509 bp, Homo sapiens
aacttataaaaaatacacaggcaagcycagcaggagctgtcgcctctgtgacagcaggtgctccagcagagaaaaggtgaggcctgtcatgggcttcacagccctgcagggaggtggccagggaattctgggtctagggcaatggagtcactcataacatgcagaattagaaagttgtgatcaaggccatctcccagtcagacccatagctcctgcagggcagggtcagaccttggggccagtttctccagggcaccgggcagcctgtgaaacatgggttagtgggtggatgggctgcagcttggctgctgctctaggcaggaactctgctctccagccagaggacccttctgttcacttcactcccattgccaaactggatggctgagaggcgctccagacctttctcgtctccttaaaccatgaccagtcagcaagtcctactaactccatggttcaaaggccctcagatccactatctcatctaacagtcaagggtgacagggaag

SEQ ID NO: 130198 - DNA, 619 bp, Homo sapiens
tgaaaaattcccaaatttggcaagagatgtagatgtattcgagaagctgagtgaaactcaaaaggaataaacacaaggaaatccacaccaagacaaatcatattccaactcctgaaaactccaggacaggaaaaaatcttgaaagcagctggagaaaaaatgacaccttatacacagtgaaaaaataattcaaatgacagcagatttctcattagaaaccatggaggcaagaaggaagtggcagagcatttttcaactgctgaataaaaaagaactgtcaatccagagttcttctacatccagtgaaaatgaccttcaagaatcaagggaaaattgagatactctcagataaaagaaaactaagagaatgcgtcaccagcagaatcaccctaaaaagaatggttaaaggaagttttctaaacagagaggaaatgattggaacattaggtagtaagaaagaacatggtaaggaaattttactgtagataccactaattccccttctcttcttgagttttctaaattatgtttgatgtctaatgtaaaatgttaacactgtctgatgtagtactaaatatatgcagaagaaatagttaaracagtcataagtagggaagag

SEQ ID NO: 130199 - DNA, 482 bp, Homo sapiens
ggaattcataatttaaaactccctgtaaagaaatccccagacccaggtgttttactggataaatctaacaaatgtttaaagaagaatcaacaccaattctacataacttcttttggaaaacagaagaggaaagggcacttcccagtttatttcagtaaattaatattgccctatattaaaacccggtcaaagacaggacaagaataaaacttcagaccaatatccctcataaacacagatacaaaaatccctgacgaagtattagcaaatagcagttagcaatatataaaaagaagtatacaccatgaccaaatgagatatatatatatcaaggatgcaaggcttactcaatatttgaaaactggtcaatataatccmccatattaacatacttaagaaaaagtgcatggtctcacaataggtacagtaaaaaaaaaaaaaaaagacaaaaacttcaggcatttgacaaaatccaacaccca

SEQ ID NO: 130200 - DNA, 612 bp, Homo sapiens
cagcattcttaggtttctatgctcttatctgtccaatctccgtgtcaattaattactgtttaaacattaaacrctaaagaaaccctttactgctttgaagtacacacacacacacacacacacacacacacagggagagagagagagagagagagaatcccttcaattgtaacatcagtactgcacctagatatctgacaggagaagtgtaaaggattaagtttgacccctgggacatcaaaagtccaccctgggaaaggaaagggatgaggctattggaggttctttcctcagaggtaagccaaggagctccacaaaggtgaccagaagctgacatggctcttcctgaaatctcgagttagaattatgctattagcaaaaataatagcagcacctattcactcattcctcctccagggagctgagagtttcttacgaatgggatctcatcatccccaaagtataagcaaggaaaagtagggatcattccttcggtttgggagaaaaaagactcagaggtcactggacatctcaaagacagagactgaccaggcctgcccttctccagccagctctgggggctgctgaaatgccatgtgacagtgaacagct

SEQ ID NO: 130201 - DNA, 533 bp, Homo sapiens
tctggtccctgctgggtctctgccttcatgggggcaaattgctccctctggccttgactctattccatcacctgtcaagtggaatggacaggccaattttcaagcccgggctctgccactgagtgycccggtggcctcatcagtaaaatggggatataattgtgcttgatgcataggattgagtgatcctatgcatttgtagagcttggagtgaatgcacctgctgggctggtccctatggatggccctgaaaagatgtgagtcatcatccactctcgtacctcacacagtgttctgtcccatgtgagctggaatgtgcctgctgtgacacatggccagaaggccagaggccaggaggtgtgaggagctgggaggcgagtcagggacagatgccagggaggcctgggaccccccatgaggaggctgccacgtgatggctcccatagccagttcagacactctcaacaaccactttgtctggctgggtgcaggctgggccccagcccaccctggggaggaggcagctccacagg

SEQ ID NO: 130202 - DNA, 527 bp, Homo sapiens
tcatgggggcaaattgctccctctggccttgactctattccatcacctgtcaagtggaatggacaggccaattttcaagcccgggctctgccactgagtgtcccggtggcctcatcagtaaaatggggatataattgtgcttgatgcataggattgagtgatcctatgcatttgtagagcttggagtgaatgcacctgctgggctggtccctatggatggccctgaaaagatgtgagtcatcatccactctcgtacctcacacagtgttctgtcccatgtgagctggaatgtgcctgctgtgacrcatggccagaaggccagaggccaggaggtgtgaggagctgggaggcgagtcagggacagatgccagggaggcctgggaccccccatgaggaggctgccacgtgatggctcccatagccagttcagacactctcaacaaccactttgtctggctgggtgcaggctgggccccagcccaccctggggaggaggcagctccacaggctcacccggccagatgccg

SEQ ID NO: 130203 - DNA, 516 bp, Homo sapiens
gacactggcacactcgtgagatgcatttggtagaaaaaggacttctaatctggctctgactgacggagcataaatcatccagcctcaatgcacccccatgccatcgtgaccctttagtgaaggcctgctttgtgcatggaactgtaacaggcaggctctttctttcattatctcattgaactctcatggcaaccatgtgagatgggtgttaccatccccattttacagataagaaggctgaggctcagagaggttaattgcaccatggccacagagcaccacagagctaaaaattaaagcccataatggttccaataaatcaagctatcttcatttatatggtgagttggggggtatttatttaattctttttcttcctctccctcatttttagctcrtagggagtcaagagaggtgcctcctaatgaagaatgaaacagtttgctataatttgctccaaaacagtatgcttaattaccacaacctcttccccaaccaaaccacttaattgaattc

SEQ ID NO: 130204 - DNA, 597 bp, Homo sapiens
gcctttgctgtgcctggaatgctctttctttagaaatctacctggctccctccttcctctcctttgggtctttgcttccatatgactttctcggcaaggccttccctaactattcggtgtacagctgcaacaccctccaatcccttctctcctgctttattttgtatttttctccatagcgcttatctgcacacaacacattatgtattctacttatttattgtctttgttgttggtctctcacccaagacagcatgagctccaagggaacagggaatttttgctttgtcccttgccttctcccaaggcctagaacaggacctggcatgcaataaatctttgttgagtgaatatactaaaaataatgctgtggttctaataaccaatgaaaataaatgaatcactgtacccccacgagaactgcagcctcacagacataatgttggrtgaaacaggctgagtgcaagagcgtgcatacggaatggtatcctttctataaagttcaaaagcaggcaaaactgcattacaggtaggagccaagatagaggctaccactggggagaaagttggaggtagtgactaggggaggagtgaagg

SEQ ID NO: 130205 - DNA, 412 bp, Homo sapiens
acgtaaactaaagaaaaaaaatcttgttttaggtattaaataggatcaaaatatcaaaactatgttctgaactcagaacagactgaactcaatttcttacaattctgtatttccagaaatgcactatattacacatgtatgttttaaaaaaataagaaaaagcaaaatcaatacactagaaaggacctcatacacatgctttatttgactggttcattaaccaagtaagtgytaagaccatgagtcagagaaaaagtaaagtatatttatatcacattttataagatagggcagtatcatatacattttaaaagattttcaagtaacagtgaaacataggttttggggataattcctaggtaaaccagagaacctaggaaaatcattacctgtaaattctgaccaaccagaa

SEQ ID NO: 130206 - DNA, 414 bp, Homo sapiens
aattctgaaagaaacaggagaaaagaggcactaaagcctatgtagaagcttgaggaagagaatgtggcctgtgcagttggagtcccgccttcctgccctcatcctgacattctggtgacaccagcctgacttccagctgccacccactgtatttccctgcctgaggacttccttgagcccccaggtcctcctttgccacagaatgacaggtcagaagtgcagggagtggactaacctgccccaatccctccatggatgactgacaggtggaggtgcacaaaggtcccacactcctgccccttaggcwggaggatcagatgcgcattctacattggctcccagagttctctagcagattaggttttagaggctcccaggggaccctgctggaaaacacacccactgttgctccca

SEQ ID NO: 130207 - DNA, 591 bp, Homo sapiens
ggaaggtcagcatggtattggtggcaattactgtgtagtcactgagctgtggggccacaggcaatcaaaggcaccatctaacagttcatctgatgagacccctcccccagctaaggatgcagacccttccaggtggagacactgccctggctcagatcgtattgaaacattcctcaagatgcactttcagaccccagacacaaacctcmctaccaccaacacttacggagacttgacaatgaaccaggtgctgccctgatgctttacctgcattgatacagttagtcttcatgcagtgctatcaggtattacccccacttacgattagaagctcaaatacacagtacctacctaatttgcccaagaccacacagctagtaaggggcagagccgagatttgaaccctattgatctaagtctaaagcatatgctcaccctctatgcactgctttagacagcgctcattggcggtcaggctttttgattaaaacagaatttgtttttggtgagaacaaacaaagagagaaagagagtggtaaacaaagcaaaatataaagtcagatatcaggccgggcgcagtggctcaagctt

SEQ ID NO: 130208 - DNA, 542 bp, Homo sapiens
gttcctgtcccatcaccatcctctgccacccaccagcagcaagattcttcctgctcttaagagtccaccatattcaataagcgtttgtaatacagcaacagcttgaaagtaattcttccccacccttctggctctccagacatgtccaggacaccttcctccattcatgagctcttgaaaatrggcactattattatgcccattttacagatgaggaaattgagtctcagataggttaagttacttgccctgaagtcacagtagcagagctggaacttatatccaaactgactgactcccaagatcaaattcctattcactccactatactattaggagtttgtcacttgtagatgggggatgatcagagagctgcttgactctatccaaatctggacagttacaggttttaaaacagtcacaactggataacctacaggtattttctgaacacctagtgctgtcagagatatgaaatagcatgtcaaggccttgagaagctcatagtctagttgggaatgtgggcaggagacagcaagggt

SEQ ID NO: 130209 - DNA, 604 bp, Homo sapiens
gattgcctactgaagcaattgccttggggaccaagtggctgctgcacttgactgttaaaggtatgacaacgacttcaaggaccatatagtgggacagctatatctacctgaactgaagagattaagaaaatcracaaattcaaggctttaatgctcaccttaagtcatggtcagagaaccagagagctttaattattatttcttataactgcagatactatctcaacaaaaaccgaatgcaaaacctaattgtgagttactgaatcacaacttaagttgaattgtcagaccaccaagtctcatatgttaaggcattgattaggaaagagtgggaccctggatataaaataaggatatatgggtggactcagatgatgctaaaaaccctaagcccctgtctttctgagtctctttttcatagaaaggaggagcacctccttctgtgtctaggaaactaatcttcctttgcttgaggatcttgtaacatttcacctgggaccatgcaaggtatgtctatttttctcaacacccgcccagtattagttatctattgccacacaactaattcctgtaaaacttagaggcctaaatcaatttttattat

SEQ ID NO: 130210 - DNA, 495 bp, Homo sapiens
gaacaagatttgccccagtggaccccagmaccactctgactcctgtagactcaggctcaagggtcatcctggcaccaccttggcccccatgaacccaggctttaagctgacacccgtggacatggactctaggcctgcccccacagtcctaagctccaggtttagcttccatggacacaggctccagaatggctcccatgaaccaagcaccaggccagtcctttggtacccaggcaatatgcactttcacctgttgacccaggcaccaatccagcccaccaaagaactccagaagcaagtctgtccatggatccatccagatggcttgctccgaatctcttgatgggctgactagtaaagggctcctcctgccaaagccagtctgtaaatagtagaaagggttcctattccttcaaatgtgcagacaccaatgcaaggccacaaagatcacaaataatcaggcaaatatgacaccatcaaataaataaaaagtaa

SEQ ID NO: 130211 - DNA, 495 bp, Homo sapiens
gaacaagatttgccccagtggaccccagcaccactctgactcctgtagactcaggctcaagggtcatcctggcaccaccttggcccccatgaacccaggcttyaagctgacacccgtggacatggactctaggcctgcccccacagtcctaagctccaggtttagcttccatggacacaggctccagaatggctcccatgaaccaagcaccaggccagtcctttggtacccaggcaatatgcactttcacctgttgacccaggcaccaatccagcccaccaaagaactccagaagcaagtctgtccatggatccatccagatggcttgctccgaatctcttgatgggctgactagtaaagggctcctcctgccaaagccagtctgtaaatagtagaaagggttcctattccttcaaatgtgcagacaccaatgcaaggccacaaagatcacaaataatcaggcaaatatgacaccatcaaataaataaaaagtaa

SEQ ID NO: 130212 - DNA, 495 bp, Homo sapiens
gaacaagatttgccccagtggaccccagcaccactctgactcctgtagactcaggctcaagggtcatcctggcaccaccttggcccccatgaacccaggctttaagctgacaccygtggacatggactctaggcctgcccccacagtcctaagctccaggtttagcttccatggacacaggctccagaatggctcccatgaaccaagcaccaggccagtcctttggtacccaggcaatatgcactttcacctgttgacccaggcaccaatccagcccaccaaagaactccagaagcaagtctgtccatggatccatccagatggcttgctccgaatctcttgatgggctgactagtaaagggctcctcctgccaaagccagtctgtaaatagtagaaagggttcctattccttcaaatgtgcagacaccaatgcaaggccacaaagatcacaaataatcaggcaaatatgacaccatcaaataaataaaaagtaa

SEQ ID NO: 130213 - DNA, 544 bp, Homo sapiens
cccctttcacttagttctcatttttctcttgtctgccaccatgtaagacatgcctctccccttctgccatgattgtgaggactccccagccacatggaaacttgagtccattaaacttttttttatgaattactcagtctcaggtatgtctttatcagcaacatgaaaacagactaatacaaggaccaaacaaaaatcctagagctgagaatacaatgactaaaatgcaaaattcaatagagtttcaatggactcaattaagtagaataaagaatcagtgaacttgaaaacagatcatttsaaaagaaccagagaaacaaacaaacagaaaaagaatgaaaaagagtaaagaattcctgtggaactcataggaccccaaaaaagcaagctaatattcatactatgggagtcccaaaaggagcagaaaaagagaaaggaaaagaaagcttacataagaaataataatggaaaatttcccaaatttggagagggaaatgaatatccagatccataaagaccaaagaactgcaaatattaaatataa

SEQ ID NO: 130214 - DNA, 537 bp, Homo sapiens
ccctttcacttagttctcatttttctcttgtctgccaccatgtaagacatgcctctccccttctgccatgattgtgaggactccccagccacatggaaacttgagtccattaaacttttttttatgaattactcagtctcaggtatgtctttatcagcaacatgaaaacagactaatacaaggaccaaacaaaaatcctagagctgagaatacaatgactaaaatgcaaaattcaatagagtttcaatggactcaattaagtagaataaagaatcagtgaacttgaaaacagatcatttgaaaagaaccagagaaacaaacaaacagaaaaagaatgaaaaaragtaaagaattcctgtggaactcataggaccccaaaaaagcaagctaatattcatactatgggagtcccaaaaggagcagaaaaagagaaaggaaaagaaagcttacataagaaataataatggaaaatttcccaaatttggagagggaaatgaatatccagatccataaagaccaaagaactgcaaatattaa

SEQ ID NO: 130215 - DNA, 537 bp, Homo sapiens
ccctttcacttagttctcatttttctcttgtctgccaccatgtaagacatgcctctccccttctgccatgattgtgaggactccccagccacatggaaacttgagtccattaaacttttttttatgaattactcagtctcaggtatgtctttatcagcaacatgaaaacagactaatacaaggaccaaacaaaaatcctagagctgagaatacaatgactaaaatgcaaaattcaatagagtttcaatggactcaattaagtagaataaagaatcagtgaacttgaaaacagatcatttgaaaagaaccagagaaacaaacaaacagaaaaagaatgaaaaagagtaaagaattcctgtggaactcataggaccccaaaaaagcaagctaatattcatactatgggagtcccaaaaggagcagaaaaagagaaaggaaaagaaascttacataagaaataataatggaaaatttcccaaatttggagagggaaatgaatatccagatccataaagaccaaagaactgcaaatattaa

SEQ ID NO: 130216 - DNA, 442 bp, Homo sapiens
tttttttcatgtaatgacttattttcctctgggtagatatccagcagtgggattgcttggtcaaatggtagttctacatttagttttttaagaaatctccacactgttttccatagtggttgtactagtttacattcctccaacagtggaaaagtgttctcttttcaccacatccacaccaacatctatttttttttatgttttgattatggccattcttgcaggagtaagattgtatcacattgtggttttaatttgcattttcctgataamtagtgatgttgagattttttttgtatgttttttgaccatttatatatcttattttgtgaactattcatgtcctttgcccacttttgatgggattttttttttcttgctgatttgtttgagttctttgtagattctggatactagtcctttattggatgcatagtttgta

SEQ ID NO: 130217 - DNA, 414 bp, Homo sapiens
gaattcaacccatgtggaggttgaaaaaaccaggtctggacagtggagaggtgaaggtggaatacgaagagccccacgggagaccagctatgttttcctccagtctcctcaacttggctcagtgggctgcttcaagtcaattccagatgcaacttgaagtcaaagagaaaaaagtggtcctaacctcaatacacaaacaggaaagataccagtgaagcttctctagtgtgacctgtgcagctcacatagtatcatggcgacagtggtgcagggacaggtggtcagaaccagaaaagctgcagttggagtcygtgcagtggaaaggcttgatgcctgtgtgctcgaggaaagagctagtgagctcatctgagtgagcgaatttccaggagcagccatcgcaggtgcatttataag

SEQ ID NO: 130218 - DNA, 423 bp, Homo sapiens
cacattgcaaagccacaggaatcacattggtaggggtacaggtctttctgcagacttggttgtggaaggctgttaaggaaaacaagtccataaccctatattcaccggcatcattcctaagaacacgggatgggaatsggtggtgtgcacatcagccaaggcttcagaaccgtgacagccggttcctcaccacaccaagattgaaactaacttacccagattgcaactcaggactttacactctcagtacggcatccaggccacaggggaaggtggaccccaaagtcatgaggcaggaaaagtgagtactgttggaaaggagaagtgatgctggggagtggaaggcgttgtgaggtggttctgctaaaacattatgtcagctggtgggatttggacgtttctctttctctaccctatctcatt

SEQ ID NO: 130219 - DNA, 429 bp, Homo sapiens
catcacattgcaaagccacaggaatcacattggtaggggtacaggtctttctgcagacttggttgtggaaggctgttaaggaaaacaagtccataaccctatattcaccggcatcattcctaagaacacgggatgggaatcggtggtgtgcacatcagccaaggcttcagaaccgtgacagccggttcctcaccacaccaagattgaaactaacttacccagattgcaactcaggactttacactctcagtacggcatccaggccacaggggaaggtggaccccaaagtcatgaggcaggaaaagtsagtactgttggaaaggagaagtgatgctggggagtggaaggcgttgtgaggtggttctgctaaaacattatgtcagctggtgggatttggacgtttctctttctctaccctatctcattctg

SEQ ID NO: 130220 - DNA, 501 bp, Homo sapiens
cctggagaaatcccaagtcactcccaagtgctcactcctcacaatagctgctccctggaaacctaagccaggttctgctctaggaatgtccaatatggcagcaattggaattaaaaaaaaaatttgatttctttcaataatttttgcgggtacaggtgatttctggttacatgaacgagtgttttatttgtttttgttttttgtttttttgagacagtgtctcactctgtcgcccagggtgcagtgcagtgacacgatctcagctcactgcaacctccgcctcccaggttcaagcagtcctcctacctcagcctcccaagtagctgggattacaggcacacacacagccatgtctggctaatttttgtatttttastagtgacgactgttctcgaactcctgacttcaagtgatccgcccacctcagtgtcccaaagtactgggattacaggcatgagctactgcacccggccttgaacgagttctttagtggtgaattct

SEQ ID NO: 130221 - DNA, 404 bp, Homo sapiens
atccctacctttgaccatctatgcatccattcctgtctccctctaaccatccctctaacctctacccatttgtttactcatccatccatccatccctctatccctctctctacctaaccattcacccatgcatccrtcactctacacatcttactttttggatgcatttcacaataagttgttgacgtcagtacccatttccttgaacaatttgttacgcgtttaaataactaaagtttactatccagaatattttttcaatgcaaaaaaaaaaatacacaggttaaaaaggtagccagctatgtatatctaaaatgagattgtggaattaaaaatacctgtgattcctattggaaatctactaatattaacatgagaattgctccattaggaattaaagttag

SEQ ID NO: 130222 - DNA, 597 bp, Homo sapiens
tagactgtcaaagggatcatgaacaaagtgtgaaaccatttgatatttactgctcttcccaaagagtctcccttctcayttgctctctgtcctgtttatcagggctctctggttttcagcaatggaccccagattcccccatcaaaaaacaagcatccctctccctagcccagtgttttcctttactgtaaagttgtaactgacaaagttcagaaactttagcaaataaggaaacaaaacaacagagtaatgtagttgtcatcatccttgtaaggttgacatcagtaaactcatctataggtttaagatggcctcaaatgtctggcaatctaataactccatcacaaagtcctgctctgctcactgactggcagaaggatggatgaatagaatggttaactggcttccagatgaacagggagagatctcagcagactgcctttgctggctggttccatgggtggatgactttggccctggctttcagatgggccatgtggttctaattgactctgggcaacagacagcctacccgggttccatggtggggggaaagagatttggacaggactcctgccctccaaagagagggaaaga

SEQ ID NO: 130223 - DNA, 597 bp, Homo sapiens
tagactgtcaaagggatcatgaacaaagtgtgaaaccatttgatatttactgctcttcccaaagagtctcccttctcatttgctctctgtcctgtttatcagggctctctggttttcagcaatggaccccagattcccccatcaaaaaacaagcatccctctccctagcccagtgttttcctttactgtaaagttgtaactgacaaagttcagaaactttagcaaataaggaaacaaaacaacagartaatgtagttgtcatcatccttgtaaggttgacatcagtaaactcatctataggtttaagatggcctcaaatgtctggcaatctaataactccatcacaaagtcctgctctgctcactgactggcagaaggatggatgaatagaatggttaactggcttccagatgaacagggagagatctcagcagactgcctttgctggctggttccatgggtggatgactttggccctggctttcagatgggccatgtggttctaattgactctgggcaacagacagcctacccgggttccatggtggggggaaagagatttggacaggactcctgccctccaaagagagggaaaga

SEQ ID NO: 130224 - DNA, 566 bp, Homo sapiens
ccagcccaggtcgtcaggggtgaggaagggaacacacggggacagctacactaatttgtggtctcctggcagccgccatatagacctgaagaaaactggggttctggaaggaaaggggcagagagaagcagtgaagagatgaagtagccaccactgcaccagcacgtcctgagctttttgctcagagcatcccatagcacttgttatcccttgtctggctaaatgtgtgcaagctccctttcctccccttcactctgggctttcccttctatttctgttctgttaaaattatccaagacttcctgcgttgttggctgacccatatccttttaggaatgtaatggaatcttttatttttttttaaccaaacttataacagagggaatggaatttctaacctgattttacttagagagaaactgacagtcagaacttatgaagtgactttgtcaacctgtcayatcaagtaggagtgctcagagctcagtgttccttctgtggctctgtcctggtcagggggacgcaccttcgctccaccccgctacgtcccgctggaagccgaattc

SEQ ID NO: 130225 - DNA, 596 bp, Homo sapiens
attatgatgtaccttgctgtaattttcttcgtatttctttcgcttggggtttattgaatttcatggatctctggttttattttttctatcacatttggacattttatatccattatatcttctaatttttttctatcctgtcctctttttatttcagggactccagtttcttaagtacaggctacttgaagttagcccacaactcactgatgctctactcattttataaattatcttttcctttgtcttccattttaaatatttttgtagctatgtcttcaagttcactaatcttttcttctgcagtctctaattttccattattcccatccaatgtaattcttatcttagacattgttttttatctgtagaaatttgattttggcctttaaaaaatatcttccatgtatctacttaactttttaagcatttgaaatgcagttatagyaaccgctaattctgtgttaatttggggtctattttgattgattgatttgatatcctcttatggtcctattttcctgctttttgtgtgctggttaattgttgactgggtaccagatattgtatattttactgtattggtactggacatt

SEQ ID NO: 130226 - DNA, 481 bp, Homo sapiens
gagtttcttcacgggctctccacagccccaccctgaggacgggagccctttggatggggccggtgtcagcaaaggaagcacaagagtctcagctgctcgacctggtcctgcccgccgtggtcccagagaaccatgggagcaacatctaccatttgggctgactctctgctttctgtgtcagctcacctgtcacctccgcctctgcagagggagggtgatggcgcgcaggggtcaggcackccccgggtgctcctggagtctcatcttcctcttttcttcccttcagagtgtgctgatccaggctcagattcccgactctatggcttccttagcagaggggccctggtgtcaaaggactgcttttaaaagaagatacaattctgactcaaaaatacagaatacatacatgtcaaagactttatttaactcattaactaatgcaggcaccagtaagatgtttccggcatttgggagagaattc

SEQ ID NO: 130227 - DNA, 507 bp, Homo sapiens
gaattccatgatatagcatatttttaaaaatatgaaaatgatgttcataataaccaactggttgaattattattttttgctgttctcaccctccaaccctcaaatacaatcgatcctccatgaagtggcgccactgtggttcagaacactttacactttgcttagagggtgctccacctggaagggcctgagctcctaaacaatcggtaatgcagtgataaagcgttaacytccaactatcaaaaagtacctgactcattcattccaactggagctcatccccgtgagctctgggtcagagagatgagctccccagccctgccacagcgtcatgccaggaaccaaactaacacgagcctcaggctcctcatcttaaagtggggttagccttagggtcatctcggcctctggtgagccatcatggcagcctctcggcagggtctggtgggcaggaggtcctcggtgagtcttgtcactgcctctgttcttccttggaatctgtggagc

SEQ ID NO: 130228 - DNA, 418 bp, Homo sapiens
tctcactaaaaacactgaaaggacattgcttatacactggccttctgtagagagcctctggagcctcgaggaagtgtagctcctaacgcagtcggctgcactgactcaattatacatctattggaccttcscaagtgcagagctgccactgtcacttctgatcgtaacaacccaaatgcatgtctccagatagcaccagaagtaagagctggagggataaggatggtaatgcttgggtgtcagccccacagaggagaaggggagcaaaggtctgatggggggatgtgacggttcttcccaaccggggtctctgatggggggatgtgatggttcttcccagctggggtctctcatggtctctctctgactggagttggggaaggatatttggacacctggacatgcgtgtctgcatgcc

SEQ ID NO: 130229 - DNA, 490 bp, Homo sapiens
gtggactgggggcggacaccaacaggaactcttagagggaagctggaggaggtgggggagacagagctttggaaaaagagcttcgacttctctcttgggtggaggagacaaggggagggcacgcagccagggaccacgggccgcaatgctccctccttcccagggtccacaggcggcaatgctccctccttcccagggtccacgggcggcaatgctccctctttgtcagggtccacgggcggctggtgctttttccttcccggcgtccacaggcagcaatgctccttccttctcagggtccaaaggcagcatcactccctccttcctggcatccagggcggtcggtgctccctgctttccagggttccaggggaagtcccaccccctgaatcttgggagttggggaagaggtgggaccctcraggacaggctgtagccctcatacccagccacccctaagggagcatagctgctccacacagcggaattc

SEQ ID NO: 130230 - DNA, 596 bp, Homo sapiens
tgccattgcactctagtctgggcgacatagcgaggctccctctcaaaaaaataaaaagcaaaactattcttgatgtctctttcatggcccttgctagatctacttccaattcactcatgtgcctgcaaaaaaacaggcgactcactgtaaacatttgagtcatacagggaggagaggaccaaggaaccaaaaggcaaatcagaattctgcaagtaaaattccaacgtctagatttactcctaacagaaatcttgagcccagaaagtcagagaaggatttttaacatcccaaacacgacaggctctcactggggagaaaactgaggccaaatggtgtgcatatatgaagccatgtttataaatagttcagtatccaacagaagggttctcrttagcaactgggaagtcagttgtcccagagaaaacattttcacgggtaacactgtggtcagcaaagaatccatcatatgcttaagtctggcttcaagagatgcagtagctgaatgattttgttaagccacaaaccaacacttcttagaaggccacctcgcctagatggacataacagaatataagatatacagtcacttttggttt

SEQ ID NO: 130231 - DNA, 531 bp, Homo sapiens
aagactccagggttcaggctctgggtgatggggcagggtggaaggaggttctagtggggaagcagaaaagttggcttacgtcaacttgcagaagttggctctgtaattctcagaattaacttgatcatcaatggggagaggttaggagagttcctacaactgtattcagctaatatacrtgtattttggggacagattatatttttttaatttttaaattgtggcaaaatacacgtaacaaaatagccattaagtggcatcaaatacattcgtaatgttgtgcaaccatcaccactatcatccccagaactctcttcatcttgtaaaattgaaatgcatattttcactacatgaagtacctcatataagtggaatcatacagtacttgtctttttgtgactggcttatttttacttagcataatgtcctcaagtttcagccatgttgtagtatatggcagaatttaattcttatggcagttttattgttttgggccttgcatttaggtatttgatccattttgaattaatt

SEQ ID NO: 130232 - DNA, 531 bp, Homo sapiens
aagactccagggttcaggctctgggtgatggggcagggtggaaggaggttctagtggggaagcagaaaagttggcttacgtcaacttgcagaagttggctctgtaattctcagaattaacttgatcatcaatggggagaggttaggagagttcctacaactgtattcagctaatatacgtgtattttggggacagattatatttttttaatttttaaattgtggcraaatacacgtaacaaaatagccattaagtggcatcaaatacattcgtaatgttgtgcaaccatcaccactatcatccccagaactctcttcatcttgtaaaattgaaatgcatattttcactacatgaagtacctcatataagtggaatcatacagtacttgtctttttgtgactggcttatttttacttagcataatgtcctcaagtttcagccatgttgtagtatatggcagaatttaattcttatggcagttttattgttttgggccttgcatttaggtatttgatccattttgaattaatt

SEQ ID NO: 130233 - DNA, 531 bp, Homo sapiens
aagactccagggttcaggctctgggtgatggggcagggtggaaggaggttctagtggggaagcagaaaagttggcttacgtcaacttgcagaagttggctctgtaattctcagaattaacttgatcatcaatggggagaggttaggagagttcctacaactgtattcagctaatatacgtgtattttggggacagattatatttttttaatttttaaattgtggcaaaatacacgtaacaaaatagccattaagtggcatcaaatacattcgtaatgttgtgcaaccatcaccactatcatccccagaactctcttcatcttgtaaaattgaaatgcatattttcactacatgaagtacctcatataagtggaatcatacagtacttgtctttttgtgactggcttatttttacttagcataatgtcctcaartttcagccatgttgtagtatatggcagaatttaattcttatggcagttttattgttttgggccttgcatttaggtatttgatccattttgaattaatt

SEQ ID NO: 130234 - DNA, 396 bp, Homo sapiens
aaactcccaggcaattctgtgatcagtcttgtttagtgtgtgtttctggcaggtaataacaccttgggagccatcaggctgcacatgataacagtgagaccctgaggcttcagccacttccagccagcaaactggtcactgcagccagtagcacagggcatagctctcagccatccrcagcttcacacacaaagcaggaagagcaaaagagggccaggagctgcagccccacgctgggagcccggctgccagtccccttggggccaaagacccctcgaggggagttctgaaggggcatttcaactcagtgtctgtaactccaaacacacaagaaaggcaagaagggccctctccttctagctggaattccactttggagaaacacaaaagcccgtg

SEQ ID NO: 130235 - DNA, 542 bp, Homo sapiens
acagaaaacagacaaagacagcaaccctttattttacaaatcaatggtgttcccaatggaaatgactcttaaaggcataagatacatctggtgacttagtccagatattctgacccctgtaataatggcaataacaacttacaagtgcatagctctgaacacttttccatatactgtctctctttagctcagtctttacttctccttctctccatcataaaytagctgccatcattctcaaggtcctggctttttctaggaggatcctggaaataaggatcctctcggaggatcctgcacagctcttatgtcataggatgcacttcaccccccaaccccatctaccaactacttgatactgtcatcaactacagaggggtttttgtttcttatccatgtccacattgataagatagtgtgtaaagaagcaaaattcattgttacaaaactcccacagatttaacactggccttttcttgcccatagaatttatctcctggtcagtcagtctctacctgattttcagacacagtaagcatttg

SEQ ID NO: 130236 - DNA, 539 bp, Homo sapiens
gtgagaaatacatttttgttgtttataagttactcagtctaaggtattttgtgatggcaggcattaaggactragacaatgttgtgtacagcactatcgaatgaagctttctgtgatgatggaaatgttctattgcactgtccagtgatgtagccacaggaacatgtagctgttgagcatttgaaatgtgactagtatgctgaggagttgaatgtgaattaatttaaactgaagtagtcacatgtgactagtgactcctttgttgaatgatgcactgtatgactttgaaagagcacagtctgcagaatagccaggtgattcatacccacagtaaatgttgggaagaactgttgtacatgatactgacaaaggtagctgtagaccacattttgagaaatactgctccactccctgctcttacagaatccactttcaaaaaacgcaaacgtggtattatcaatcccacttaacgggacagaaggtcaactgctgaaaggcaatataattagtcagtggtcatgcagtttggttataaaaca

SEQ ID NO: 130237 - DNA, 597 bp, Homo sapiens
agtgatgtagccacaggaacatgtagctgttgagcatttgaaatgtgactagtatgctgaggagttgaatgtgaattaatttaaactgaagtagtcacatgtgactagtgactcctttgttgaatgatgcactgtatgactttgaaagagcacagtctgcagaatagccaggtgattcatacccacagtaaatgttgggaagaactgttgtacatgatactgacaaaggtagctgtagaccacattttgagaaatactgctccactccctgctcttacagaatccactttcaaaaaacgcaaacgtggtattatcaatcccacttaacgggacagaaggtcaactgctgaaaggcaatataattagtcagtggtcatgcagtttggttataaaacaaactgaaagcagcttgtctagatccagttgattgtagcccagaattgccagatctkgcaacttttcagaaaactccacaaatctgaatttttatataagatattctcggattttcaaaatcctatgtagaccaaacaaaatgagttttgaatcctgatatagtccgtaggctaccagtttccaaccccggtacaaagatta

SEQ ID NO: 130238 - DNA, 549 bp, Homo sapiens
ttctcgcagcacttgttagtatggcccgttcaatgttcaatgctgtgagaagaaaatttctgttatttataaatcacccaatctaaggtattttattacagcagcccaaatggactgcttgtcacatatccctaaaaagttatttacatgccgtctttccaactagattgcaagtccctggagaagaggcacatactcagctacctattgtcagcataacacctgaaaaacagaaagcatttaatatatcttagttaaatgagtgcgcatgaaaattagaagcttaaaccaggcatagcggctacacctgtaattccagctccttgggagcctgaggcaggaggattccttgagcccaggagttcagaccagcttgagcaacacagtgagatttcccccmaaaataaattaatcaattgaaagttttttaaaaaaatcagaaactggccggcctcagtggctcccacctttaattccagcactttgggaagccaacaggggaggattgcttgaggccagaagttaaagaccagcctgggcaacatagca

SEQ ID NO: 130239 - DNA, 549 bp, Homo sapiens
ttctcgcagcacttgttagtatggcccgttcaatgttcaatgctgtgagaagaaaatttctgttatttataaatcacccaatctaaggtattttattacagcagcccaaatggactgcttgtcacatatccctaaaaagttatttacatgccgtctttccaactagattgcaagtccctggagaagaggcacatactcagctacctattgtcagcataacacctgaaaaacagaaagcatttaatatatcttagttaaatgagtgcgcatgaaaattagaagcttaaaccaggcatagcggctacacctgtaattccagctccttgggagcctgaggcaggaggattccttgagcccaggagttcagaccagcttgagcaacacagtgagatttccccccaaaataaattaatcaattgaaagttttttaaaaaaatcagaaactggccggcctcagtggctcccacctttaattccagcactttgggaagccaacaggggaggattgcttgaggccagragttaaagaccagcctgggcaacatagca

SEQ ID NO: 130240 - DNA, 578 bp, Homo sapiens
cataatggtttatttattgctgccacaaataaaaacatacatgttaaatgtgtacagttataaaacttacccttatttatttatttatctatctttaagacagagtcttactctgttgcccaggctggagtgcagtgacgcaatcatggctcactgmagctttgaaccccctggactcaggtgatcctcccaccacagtagctgggactacaggtatgcaccaccaggtctggctaatttttttatttttaatttttttgtagagatgggggtctccctatgttgcccagattagtcttgaactcctgggctcaaaagatcctcctgccttagcctcccaaagtgttaggattacaggcacgggccaccacacctagccaaacttaccttttatttatataaaatatacaactcatacaatgtaacatctgtccaggtagaaatatgtcaattaaccataccgattgataggcctaagtattatgtcttaattaatttttaaaaatcacatactttccaaggaacatgatatattcctattttgaacagatccaaatttttcccatgctgacttttga

SEQ ID NO: 130241 - DNA, 546 bp, Homo sapiens
gccacagctcccatcacacagacctccccacagctgttcctctctaggtgcagtcactgctcctgattgaatgaggttggatgagatcacttagggagtgtgaatagatagaaaagaagagctttgaggactgcctcctaggacactgtaatatttagaggccagaaagaagaggcgggctctgccaaaggggagtctgtgtggcagaagaaaaacaggaacatgtggtgtctgggtagaggctcagtgaaggtagcgttcttcaagagacagttctcctggccgagcacagtagctcacacctgtaatcccatcactttgggaggctgaggcagttggatcacttgaggtcaggagttcgagaccagcctggccaacatggtgaaatgctgactctaccaaaaatacaaaaattagccaggcgtggtggtgcgcctgtaatcccagctactcgggaggctgaggcaggagaatcgcttgaacccgggaggccgaggttgcagtgagccragatggcaccactgtattccagcctcagcaacagag

SEQ ID NO: 130242 - DNA, 501 bp, Homo sapiens
tgtttttaaacaaagaaaatgcaaatgatggttcttaatgaaaataattctgcaacagtttaaaaatgacaggtaatgacaggtacaaacctggaatcgtatccccaatgcatagcatagattttagctaggtggcccctcagtgtacgtcttgttcgcatttgtattcgacccacrgagtccatatttgatgtaatcttttgaaagcaacaaaaatgttattctttaccttaatcatagttcatgagataacttgaactagaaacagtgaggagttaaaaaagcaaacataaagtacatttatagtaactgaaggtaatttaatgtatataattccacagagccgttatgggatcaatatgttcctgaaaattatgattagtttaaaataatcctatgtgctgttataaataatatacataaatgtataataagaatgccttctgcagactattaactaaaaagaatagatatacctctatgctttagtaaaaaaccagc

SEQ ID NO: 130243 - DNA, 587 bp, Homo sapiens
gaattcttttttagagggttcctactgcaagtaagacaagcatctcagtgggagtttgtccttacccagtaaggtatactacatttcytttgtaataactacacagtatatgaacaaaccctgctaaagccaaaagtggaggaacaattaagctgttactgccataaatatgaaatatagacactaagagaaactttatattatttcagcaagtcagtagcatctgagtgtagaaacatttcatgtgatttctatttcaaaaaagataaaataacacatctttcagcaattctggaagaaaaggctctctataaacatactggaaaatggaactgaggaacacacactgtgaacttaccaagcatttttctgtccataactattgctccaaaggaaattctccggtccctgtaccatccacacgaccttggcacaaaggtggtagtgaagcatgaagatttagggcactgactctggtcctccactgctggagtttgaacactggcttcaccacttgtgtacgttaaccgacacatggtagtcaataaaggttcactgaaattattactacagttgagagaaagagg

SEQ ID NO: 130244 - DNA, 606 bp, Homo sapiens
cattatactgctttcacatccacttcaaacttcctatatataaactgatataacatgggttcacttacccagctcagtctcactataaggatttttaaacaaaatcagtccagtccactgaacagtatcagcttactgcaggtacattgtctttcataataaataacagtatcagtaatgcaataccaacacacagggaactagactaagaccaaggatataaataaggtaagaacatacctattccctggatgcctgcctgaatccaaattaaaaccttctgaatggccaggggcggtggctcacacctgtaatcccagcactttaggaggcccaggcaggcggatcacctgaggtcgggagttctagaccagcctgaccaacatggttaaaccccatctctactaaaaatacaaaaattagccggttgtggtggcaggcacctgtaatcccagctacttgggaggctgaggcaggcgaatcgcttgaacccastgggtggaggatgggaggatgcagtgagccaaaatcacgccactgcactccagcctgggcgacaaagcgagactccacctggccggggtggacgcagtggggaagaagctt

SEQ ID NO: 130245 - DNA, 468 bp, Homo sapiens
acaagccctacaggtgattctgacgtacactaaagtttgasaataaatgtgccagggaattgtttatattgtacctaactgtaatgtgtgcctttgcaatttaaactattttcttgggtcaggaaatgtttcctgttttgttcttccacctgtgggctcaggtagactcagacactgaggcccttctagccctgaggagggtgtacagaactctagacatactaggaggcttgagtgttgcctctttgttgctattcttgctgggctggttacctacatttctttttttcttgcccaggctcttattgagttcatagacaaagggccaccgattttttttttgtcctgttaatgactctccattgcaaacacatgaaagcctgcacccctaagcatggaaagccaagccttctatgatctcaactctgctcacttcttgagtcttctaccttgctgccctgaggggaa

SEQ ID NO: 130246 - DNA, 319 bp, Homo sapiens
attgctattgggctgtcatctcttccaggcctgctgtgatagctatgaaatgtgtcactcagttctcctgctgtggggagcataattgacagatagccccaactactgcctcctaaatctaycaccctattcacactgaggccaacttttaaagggttattcccagtcagtgcctgagcccagcaggggtactaaggtaggtctgttctggcaaaatacaggaatcctctaggggacaactttggcttgggactcccaatctgcttggtaaattcattcttggaacaatgcagtagtccaagacttgtcctactccaat

SEQ ID NO: 130247 - DNA, 319 bp, Homo sapiens
attgctattgggctgtcatctcttccaggcctgctgtgatagctatgaaatgtgtcactcagttctcctgctgtggggagcataattgacagatagccccaactactgcctcctaaatctatcaccctattcacactgaggccaacttttaaagggttattcccrgtcagtgcctgagcccagcaggggtactaaggtaggtctgttctggcaaaatacaggaatcctctaggggacaactttggcttgggactcccaatctgcttggtaaattcattcttggaacaatgcagtagtccaagacttgtcctactccaat

SEQ ID NO: 130248 - DNA, 560 bp, Homo sapiens
aaccactaggctagccaacaggttacccaaaaggggctctctaatgacctccagtccttacactgggctttattctctgcgtatgggagggggtgaagcagagaagaggaatcaaatgaggttacatattccttagcagtgaaatcaaatctaaataggtttttaattctgaaaaatggcaatgccattttatcaatcaacctgaaaataataatagctaaaatttatggctcccttaccatgtgctatgtattgggctaagtgatttatatgtaactatctctcttaatcttctttttttttttttttttttttttgkttttgagacagggtcttgctcagtagctgcaagctggagtgcagtggcgtgatcacagctgactgctgcctctacctcctaggctcatgagatcttcccacctcagcccccaagcagctgggaccacaggcaagtgccaccatgcctggctaatttgtttttattttgcagagatggggtctccctatgttgcccaggctggaggtaggtattattcttaatcccactttaaagatgagga

SEQ ID NO: 130249 - DNA, 575 bp, Homo sapiens
agcagagaagtgattgtcagaagttgggaatgggttgggggatgagattgcctacagtgggggcataagagaacttttaggagtgatgaaaatggtcttsattgtggtagaggttacacaattgtatacatctgtccaaattaatcaaatagtaaacttgacattggtgaattttattgtatgtaaaaatacctcaaaaattcaattaaaaaattatgtcaagattaacaaaaattgaagtgttctgactctactccccagactaggcccactgtatgctctctcatagtacctatctttattgtaattaattgtttaattttctattttgccaaatacattttaaattttggggagaagattcatgtctatcttatttaatgctatacaacatagcactatacctggcatatattagatattcaatgaatttctgatgcctgagggaaagtcaaactggcataatttgaagccacacatattgactcatatatctatttacttggagatgtacagcaaatgtttgctcaaagattgccttaactgctgatttagggtgacttacccctttaagg

SEQ ID NO: 130250 - DNA, 427 bp, Homo sapiens
gaattcagtgctgtatgtacagtgggaaatggaaacaatagaaccatgtttcagctgaaactggcacagttaaaaaaaaacaccaaccacgaaaaaactagaatgcctacataagcttggggattttttcgtgctttatgcttaagacgcttttgaaaggttgcagctaaaagtaaaatttgttttgatagcattctcagcaacagaaagcaaatgaatctcttgtcctccccatggaagtaaaaagaaggagcccagttgctgctctggagaaagtggccatggaatttaccttctctgtccttagaatgaaaggcctcaaagcagccttcgtttgcaggctttgcaggactttgctgatgtaaaaagccttagaagccgwtgagtctttgaagtctttcttggctctaacaggaggctaaaagcc

SEQ ID NO: 130251 - DNA, 614 bp, Homo sapiens
aagctttctgggctgctgacattggaacatagcacgatgttgacattcaaatcttctatgacatcatccgatgacatgcacacatgccataatgctaacacgtgacaagcccatcatgctgacattcaaacatgctgttgctgacattgaatgctctctgacgtcattcactcaggcagcattaactacagccagctatgcgccgatcacgccaacagcctaggaaaccactgagtccataaagagtcccttctcagaactttcctctctgagaatctagaccccatagcagccttggggagtggcttagtggggcttgagctgccccgcctcagtccattctcttatgtgcggaatggatgttgcctcaacataatggaagtgkgactttatgactcttcttccaggcagactcaatctcataaaaatccagagctgtcaattcggtctggtggcatgtgtctgtagtcccagccacttgggaggctgaggcaggaggaccgctttggccccaggagttcgaggctgctgggagctatgatcgcaccactgcactccaacctgggtgacagagtgacaccctgtctcaaaacaaaaactaaaacaaatccaga

SEQ ID NO: 130252 - DNA, 561 bp, Homo sapiens
cctcttcctccaggaagccttccttgatcccatgccaggctaggaagaagaggcacccctcttcttccctgttcccatggtaactcagaatccactgctcttcactgtcatcatcagtttgcttagcttgctctgccctgtaagccctggagggcagggaagggttcatctgagctcaggcagtacctccaccggatacctccgccccagccacacttggcccttggccaagaagctggcccttgaaacaaatgctggctcaaccatcaagacccaggccagaccacctgctacttgtgacactctgtgagtgtgacactctgcgagtccagggctggagaagaggaactgactttgggatcaaaggctctgsgcttgagccccatctacctgctggctggccttaggcatgctgcttcctgtctctgagcttcattatctttgtctgtgaaatgggaacagcaagacctacaaatatggggctgaattgtagtcattattaatgattattatcatcatcataatgatcagttcattgtaattgtaatgattattttgtgg

SEQ ID NO: 130253 - DNA, 437 bp, Homo sapiens
cccttcacagattctgtaaaaacagtgttacaaaattactgaatccaaagacagttttaactctgtgagatgaatgcacacatcacaaarcagtttctcagaaagctttttttctagttttgatctaatgatatttcctttttcaccataccccttcaatgcactcccaaatgtcccttcatagattctaccaaaacagtgtttccaaactgctgattgaaaaggaaggtttacctctgccagataaattcgcacatcacaaagcattttctcagatagcttgcttcatatttttatcctggaatatacgcttttttgccattgacctcaatgaggtcccaaatatccatttgcagaatggacagaaacagtgtttctaaactgctgaagtcaaagcaagctttaactcagtgagatgaatgcacacatcacaaaca

SEQ ID NO: 130254 - DNA, 532 bp, Homo sapiens
aatatccctttgcacgttctacaaaaacagtgtttgcaaactgctgaatccaaagaaaggttgaamtctgtgagatgaatgcacacatcacaaagatgtttctcataaatcttctttctggttttcatctaaagctatttgctttttcaccataggagtcagtgctttaagaaacatcccttcaaaaactctaccaaaaaaatgtttctgaatgctgaatgcaaaggaaagtttaacactgtgagattaatgcatacatcacaaggcggtttttcaggtaacttccttcttctagtttttatcttggggtattagctttttcttctatggcctcaatgggctatcaaatactccttcacagattctcaaaaaagtgtttccatattgttgaatctaaagaaacttttatttctgtgagacgaatgcacacatcacaaagcagtttctcagaaagtttttttctatttttctctcaagatatttcctttttcatcatagtcctccatgcgctcccaaatatcccttcacaaat

SEQ ID NO: 130255 - DNA, 532 bp, Homo sapiens
aatatccctttgcacgttctacaaaaacagtgtttgcaaactgctgaatccaaagaaaggttgaaatctgtgagatgaatgcacacatcacaaagatgtttctcataaatcttctttctggttttcatctaaagctatttgctttttcaccataggagtcagtgctttaagaaacatcccttcaaaaactctaccaaaaaaatgtttctgaatgctgaatgcaaaggaaagtttaacactgtgagattaatgcatacatcacaaggcggtttttcaggtaacttccttcttctagtttttatcttggggtattagctttttcttctatggcctcaatgggctatcaaatactccttcacagattctcaaaaaagtgtttccatattgtygaatctaaagaaacttttatttctgtgagacgaatgcacacatcacaaagcagtttctcagaaagtttttttctatttttctctcaagatatttcctttttcatcatagtcctccatgcgctcccaaatatcccttcacaaat

SEQ ID NO: 130256 - DNA, 532 bp, Homo sapiens
aatatccctttgcacgttctacaaaaacagtgtttgcaaactgctgaatccaaagaaaggttgaaatctgtgagatgaatgcacacatcacaaagatgtttctcataaatcttctttctggttttcatctaaagctatttgctttttcaccataggagtcagtgctttaagaaacatcccttcaaaaactctaccaaaaaaatgtttctgaatgctgaatgcaaaggaaagtttaacactgtgagattaatgcatacatcacaaggcggtttttcaggtaacttccttcttctagtttttatcttggggtattagctttttcttctatggcctcaatgggctatcaaatactccttcacagattctcaaaaaagtgtttccatattgttgaatctaaagaaacttttatttctgtgagacgaatgcacacatcacaaagcagtttctcagaaagtttttttctatttttctctcaagatatttcctttttcatcatagtcctccatrcgctcccaaatatcccttcacaaat

SEQ ID NO: 130257 - DNA, 566 bp, Homo sapiens
tattttttgtcctgggatattcgttttttcctgtttggcctcaatgaactcccaaatgtccattckctgaatgaacaaaaacagcttttccaaactactgaatccaaataaacatttaaatctgtgagatgaatgcacacatcacaaagcaggttctcagaaagattctttctagtttttatctgaagacatttcctttttcaccataggcattaatgtgctcccatatatccctttgcagattctaccaaaacagtgtttccaaaaggctgaatgaaaagaaatgttttcccctgtgagatgaatgcaaacatcacaaaactgtttctcatctagcttccttctagtttttatcctgggatattggattttttgcctatggcctgtatgagcaattaaatatcccttcacagattctacaaaaacagtgtttcctaactgctgaatgaaaagaaaggtttatctctgtgcgatgaatgcacagattacaaagctgtttctcagaaagctttcttctattttttctcctggaatgttcactttttcgcatttggcctcaatgactt

SEQ ID NO: 130258 - DNA, 464 bp, Homo sapiens
tttctaaagttctgggtgttctgggctcagaatggggagtttcatatgaagcctggtgggtaatgcctttatcttcctattttaagggaaagaatgagctgaacctcctatgcaaagtagaatgatgattcgcgttctcctgataagaaataaaataattagcctccagacattcccttctgccagaggaacaatggttttttaaatagccctttggtgcccagtttattactaaaccatacgagtcattttttaatattactgcacgtgagttaacacaatcttcccaaattaaaattttagatgggccctcaaaatttttagggcatggtttttctgcaggtttatattgaaagtgtggggyacctcccattactcctccttacatttgttttaaaggagaaagagagaggccagataccaaatgtcccattttatctgtagctcaactttctggaagttaa

SEQ ID NO: 130259 - DNA, 552 bp, Homo sapiens
tgcatgtctgaggcacagaggggggtatttataacccatggtaacattaaatgcaatgccttgttctcctggttgagcagggcaacgtttatctgtagttccaggtatccacacactattgttagtgkagatttctgctgcagcctctatccaggtgagaggtcgaataagcggaggaaaaggcacataagcccaataagaataattatgtgtagcaggtaaatcagtgtgagaggacactggtgagacagaaaatataaggaggagaatcattaaattaaacctagtgtaagtgagatttagtgctgaaggaggaagagaagaacagagagacgttattttcaggctaatagaaatgatgagatttttaggtttttaaggagaaaaagaaaggtaatcaggagaagtgtgattagttagatgggtctccattgccatcagggaggactgatttacacccattgtgatttggtgtgcctgtctctgaggagttggcacagatctcaccacgtctgaaggcagtctctgacacagacgttttttattgtggtg

SEQ ID NO: 130260 - DNA, 621 bp, Homo sapiens
tatttagcattccctgaggaaatactttccattgataatgagctgcaggctcctgattattgatagatggcacagtaaaagcaaatttttcacaatccaatttatgtaaagcaatataaaaaaatctttaagatcaataactatgaaaggccaatctttaggtattaaagcaggggcaggcatgccagcttggacgtcccccataggtttaattacagcattaatggcccttaaattggttaccgtgtgccatttgcctgatttcgtttttactaggaacacaggagaattccaaggggaaagagaagtttccacatttccwagttgcaactgctcagaaaccaaatgatttaaagcctctagtttttctttagagagcagccactgctgaatcccaaggccacgtgtcttatctcctttgtttaaaatgatattaggtagtaaaagaaattgagcttgtttaacagtagtaaaagaaacaggagcttggcctggggagtgtaatttatcccaaggtctcatacacagctttgttacttgttttctggtaagagtatgaaagtttaattgggcataagcatgagagaaactatcagagcttgtgagctgagcttgaataac

SEQ ID NO: 130261 - DNA, 562 bp, Homo sapiens
taatgcctgtggtgaagaaaatatcttaagataaacatgagaaagaagctttctgaggaactgttttgtgatgtgcgcatttctctcacagctaaaactttctttggattctgcagtttggagacactgtttttctccaatctgtgaatggatatttgggacctcattgacacaaatggtgaaaaagtgaatatcccaggataaaaactttagggatcatctctgagaaaccattttgtgagctgtgcattcatctcacagagttaaatctttcttttccttcaggagtttggaaatrctgtctttgtagaatcagcaaaaggacacttggaagtgcattgaggcctagtttgaaaaaattgtcttcagataagtcccagaaagaagttttctgagaaactgctttctgacatgtgcattcatctcacagagataaaactttcttttgattcagcagctttgtaacactattttgtctattctgcgagtggacactagggagctcattgaggccaatggcaaaaaagtgaatataccaagataaaaaggagaaggaagctct

SEQ ID NO: 130262 - DNA, 623 bp, Homo sapiens
tttggtagaaactgtgaagggttatttgggagcatatttaggcctatggtgaaaaaggaaatatcttcaggtaaaaactacaaagaagctttctgagaaaatgcttcgtggtgtgtgcattcatctcacacagataaatctttctttggattcagcagtttggaaacactgtttttgtagaatctgctgtggggtatttggaaacccattgaggctgaaggtgaaaaaaacgaatatcccaggttgaaaactagaatgaaactatctgagaaaccgctttgtgmtgtgtgcattcatcttgcacagttaaacatttgtttttcattcagcagtttggaaaccctctttttgtagaatctgagaagggatatttggagctcattgaagacataggcgaaaaagcgagtatcccaggagaaaatctggaaggaagctatctgagaaactgctttgtgatgtgtgcattcatttcacagagttaaaacgtagttttcaaccagctgtttggtaccactctttttgtagtatctggaaaaggacattttgtagcacattgaggactatggtgaaaaaggaaatatattcagataaaaactagaaagaagctttcagagaaactgcct

SEQ ID NO: 130263 - DNA, 285 bp, Homo sapiens
tgtgaagggatatttgacagctcattgaggccaaaggagaaaaagcaactatcccaggataaaacctagaaggaagttatgtgtcaaacagttttgtgaagtgtgcattcaactgcatgarttaaacctttcttttcattcagcagtgtggaaacacagtttttgtagaatctatgaagaaatatttgggaccacattgatgcctaggcaaaaaaaaaaaaaaaagaaatatcttcagagaaaagctagaaagaaattttccgagaaattgctttgtgatgtgtg

SEQ ID NO: 130264 - DNA, 410 bp, Homo sapiens
gacatttgggagctgattgagaccaaaggtgaaaataagaatattccagtataaaaactagaaggaagctctctgagaaactactttgtgatgtgtgcattcatgtaacagagctaaagctttcttttcattcagtaatttgaaaacactgtttttgtccatctgtgaatgggcatttgggagcactttgatgcaatggcaaaaaagcgaatatcccaggatacaaaccagaaggaaactatctgagaatctgttwtgtgatgttcacatttttctaacaaagtaaacctttctttggattaagccatttggaaacactttttttgcccattcagtgaatggacatttgggaagtccttgacgccaatggcgaaaaagagaatatactaggataaaaacaagcaagaagc

SEQ ID NO: 130265 - DNA, 341 bp, Homo sapiens
agaatctgttttgtgatgttcacatttttctaacaaagtaaacctttctttggattaagccatttggaaacactttttttgcccattcagtgaatggacatttgggaagtccttgmcgccaatggcgaaaaagagaatatactaggataaaaacaagcaagaagctatctgtgaaatggctttgtgatgtgtacattagtcttgcagagttaaccctttcttttaatccagcagtttggaaatgctgttttgctagaaactgtgaagggatatttggaagcacattgaggcctgtggtgtaaaaggaaatatcttcagataaaaactagaaataagctttc

SEQ ID NO: 130266 - DNA, 566 bp, Homo sapiens
tacattagtcttgcagagttaaccctttcttttaatccagcagtttggaaatgctgttttgctagaaactgtgaagggatatttggaagcacattgaggcctgtggtgtaaaaggaaatatcttcagataaaaactagaaataagctttctgagacactgttttgtgatgtgtgcattcatctcacagaattaaacattgctttggattcagcattttggaraaacaatttttgtagaatctgcaatgggatatttgatagcccattgaggccataggcaaaaaagaaaatatcaaaggataaaaactggaaggaagctatcttagaaaccactttttgatgcatacattcatatcacagagttaaaccttcttttctttcagcagatttaaacactgttttagtagaatctgtgaaaggatatgtgggagtccattgaggcctatggtgaaaaaggaaatatcagcaggtgaaaactacaaagaagctttctgagaaaatgtgtgcattcatctcacagaggtaaacatttctttggattccgcagtttggaaactgcagttttt

SEQ ID NO: 130267 - DNA, 566 bp, Homo sapiens
tacattagtcttgcagagttaaccctttcttttaatccagcagtttggaaatgctgttttgctagaaactgtgaagggatatttggaagcacattgaggcctgtggtgtaaaaggaaatatcttcagataaaaactagaaataagctttctgagacactgttttgtgatgtgtgcattcatctcacagaattaaacattgctttggattcagcattttggagaaacaatttttgtagaatctgcaatgggrtatttgatagcccattgaggccataggcaaaaaagaaaatatcaaaggataaaaactggaaggaagctatcttagaaaccactttttgatgcatacattcatatcacagagttaaaccttcttttctttcagcagatttaaacactgttttagtagaatctgtgaaaggatatgtgggagtccattgaggcctatggtgaaaaaggaaatatcagcaggtgaaaactacaaagaagctttctgagaaaatgtgtgcattcatctcacagaggtaaacatttctttggattccgcagtttggaaactgcagttttt

SEQ ID NO: 130268 - DNA, 529 bp, Homo sapiens
gaagctatcggtgaaactacttagtcatgtgtgcattcatctcacagagttaaacctttctttgtattcagaaatttgcaaacactgtttttgtccattctgggaatggacatttaggaggtcattgatgccaatggttaaaaagcaaatatgccaagataaaaactagaagggaactatctgagaaatggatttgtgatgtctgcattcatcttgcagacttacttaaacccttctttggattcaacaatttggcaatatggtttttgtctatttgggcaaaggagattttgtaactcattgaggccaaagtcaaaaaagtgaatatcatargataaaaactagaaggacgctatctgagaaactgctttgtgaggtgtgccttcatttagcagatttaaacctttcttttcattttaaagtttggaaactctctttctgtagaaactgagaagggatgtttgaagctcattgatatcagaggcaaaaaagagaatatcccacaataaaaaatagaaagaaactatct

SEQ ID NO: 130269 - DNA, 523 bp, Homo sapiens
atctgacaatctgttttctcatgtttccattcaactcgcagttctaaactttcttttcattcagcagtttggaaacactttttgtagaatctgtgagggggtatttkggaaagcattaaggccaaaggtgaaaaagcaaatatcccaggataaaaactagaaagaagctatcagagaaaccactttgggataagtgaattcatctcacggaattaagcctttctttattcagcagtttggaaacactgttttaatataatatgtgaagggatatttggaagtgcagtgaggcctatagtgtaaaaggaaatgtcttcaaataaaaactagaaagaatctttctcagaaattgttttgtgatgtgtgcattcatctcacagagttaatcttttctttggttttagcagtttggaaacactgcttttgtccattctgcaaatggacgtttgggaactccttgaggcctgtggtgaaaaaatgcatatcttaggataaaaactagaaggaggctatctgagaaact

SEQ ID NO: 130270 - DNA, 639 bp, Homo sapiens
tcagctattcaacccatgtctcataaatctaaggattcactggaaaatgtgaggggctgacatcagactctgcagagcagtccagaagtcctatgtttacgtggccaggactactgccttttgctgtgcccatccctggtgtccatcccaccaccatcaacccatgagaacagaatatagtgacagaattaactctgatcagaatatgagtaatgattaatattgctactttgatctgcctcatctgctccyttccccagccccaagtgcttgggaactccccttcttctcctaccatgccctccttcaaggctaactgttgacaattcaatgtggatttaagcccttatgttccgccactcagagctattgttctgtgaaatgaaagtctgcatatccttccacaggagcttcggggaccaaggcataaatgtgagggatgttctagataagtgccaccttatatccccaacctgcaactctggtaaatcatgaatctggagggcaatgtctatggcagctttggagtgcagaaggtctaggagggaccctggagaggggcagtggagcacttgagaaatgcaggggacactgttggtcgggactcagggacaaggagtagttttcacatttactcag

SEQ ID NO: 130271 - DNA, 617 bp, Homo sapiens
ataaaacctgcagggggactacagacttgcaggtacctggggcaagaaagtacaaatggaggcatacaatacatcacataaggcctctaagagaaattaggtgatactctttggaaaattaagacagtgaaaatcaactatgttgatatggtttggctgtgtctccacccaaatctcatcttgaattgtagctcccataattcccacgtgttgtgggagggatccagtgggagataattgaatcatgggggcggttcctccataccgttctcatggtagcaaataagtgtcacaagatctgatggttttataaggggaaacmcgtttcacttggttctcacttctgtctcttgtctgctgccatgtaagacatgcctttcaccttctgccatgattgtgaggccttcccaaccatgtggaactgtgagtccattaaacctctttttctttataaattacccagtctcgagtatgtcattatcagcagcatgaaaatggactaatacacatatacacagggagactgaaaaagccacacattatgctcagaaaaaacctgagaggacctaagccttcaccttgggctgattccaagggtcaaatcatgcccaggtaat

SEQ ID NO: 130272 - DNA, 473 bp, Homo sapiens
gtggaaggcggaatgagagactgatgactcaagataagataggcaatcagctccgactcgccactgcagacttctagtctacttgtaaaatgagtcttgtcatttatttgacagtccccaggatttcacagagggggagggacaaataaagccaagcccccagcagagtgttcccagtagcctcaagtgtggagtttgctgttcttggggccccaggacttggttgaacctctcaacatcctggctgtctccaggctctctccattcatttcagccagtgtttgttgaatgccttctggaasggatgacatcagggcagatttcctctttagtggccagcaaagtatttctgtttcaaataaattcaacctggttccagaaatttacctcagagcagaaatgtccaatctgtacccctctgaccacctgctgcccttttgtcttctgttcactaagtggtcaggatcacaggc

SEQ ID NO: 130273 - DNA, 585 bp, Homo sapiens
cttcatcattggtgccaactttaactgattgcaagtggcttcccagaggcctgtgcgcagggtctgcagactgtgctgaaactatgcaatgtgataggaagctccctggagatggagttagtgagagacacctgggttcaaatcccaaatcctctactcagtaattttgtgatctttgaaactccatttatggccttttcatctgcaaagtaaaaatcataaggcttttcttcatagaattgatgggtgacttaaatgagatgacatagacaagcctgtcaacccagagccaggcacgcagtaaggatcaacaatgttcattaaatctgaaacctacartccattgggatacacaatgccaggcagaaaggcctttaggtatgtaactaatttctgctgaaggtagcagagcccatgttttaatagtctgtgacattttagaggaactttaaggttgtagtgaatgctgttgacatgatagaatatggaaaatataaaataaatacacttttctcatctgaaaaagtgagaataatacctgcctacaaaagatgcgtaaaagtggacattcaatgaggtaaaatt

SEQ ID NO: 130274 - DNA, 599 bp, Homo sapiens
ggaggagagagtgggaaagggaatggtgctgggagagacgagacgtgggaatggatttgaggaggtaaaacttggaagcagagaagttggttggggactactgtagattaagcaaaagataaggaaatgttagactaagctggtctctgtgctgatgagaagcaagaacagatttgaaggacaattaggagctaaaattgatgggagttggraaatgcttgcatgagtcaggaagaaaggaagactcgagggtgatgtcagaagtcttgtgtgcctgcctggtgactacgtagatggtgccaaaaaggtatctgcaactaccgtccacgaaggtcgagacatgagcggtgggactcgggttcaggtctgggagaaaagtgctgagaacagatgaggactccaagtcgaaggggctagctttgcagcagacactctgaggtgggagcttctgactgttctttgccactagaacacctgtgggaaaatttgaaatatgtaggtcacagtggtggacaggatgtaaggtggccccaggacctccacccccggtgttcatacctgtgtaaccttctccccttgaggagcacctgtgcgtaggc

SEQ ID NO: 130275 - DNA, 572 bp, Homo sapiens
ttaaaaaaaaaaaaaaaaaaaaktaagatgtgagctggcccacccagcagagggcagtgcagtgcacacaaccaaccactgcagctagtggccacaggaggcctggactgatcctgtggctgagcaacggcacaggtgtttttccttgagcgggggagctgggtggcaattgttgtttctttttgtttgattctactttgttttcatcttaaaatcctggttttgttaaagtgaaatttttttcttaaaaattgacaccagcaataaaaatgatgtgtttcttcctccaaacttgaagagtggaagaaaattaaagttcatttggatatggtgcagattctaataacatatatcagtttacagttgggcacgctcatagctgtaatttcagcctttgggaggccaaggcagatggatcacttgagcccgggaagccaagaccagtctgggacacatagtaagaccctgtctcaacaaaaaacatcaaaaaaattagccaggcatggtggtgcacacctgtagtctcagttacttaggtggtggaggcacaagaatcaactgagtctgggaga

SEQ ID NO: 130276 - DNA, 587 bp, Homo sapiens
attaaaaaaaaaaaaaaaaaaaagtaagatgtgagctggcccacccagcagagggcagtgcagtgcacacaaccaaccactgcagctagtggccacaggaggcctggactgatcctgtggctgagcaacggcacaggtgtttttccttgagcgggggagctgggkggcaattgttgtttctttttgtttgattctactttgttttcatcttaaaatcctggttttgttaaagtgaaatttttttcttaaaaattgacaccagcaataaaaatgatgtgtttcttcctccaaacttgaagagtggaagaaaattaaagttcatttggatatggtgcagattctaataacatatatcagtttacagttgggcacgctcatagctgtaatttcagcctttgggaggccaaggcagatggatcacttgagcccgggaagccaagaccagtctgggacacatagtaagaccctgtctcaacaaaaaacatcaaaaaaattagccaggcatggtggtgcacacctgtagtctcagttacttaggtggtggaggcacaagaatcaactgagtctgggagatggaagttgcagtg

SEQ ID NO: 130277 - DNA, 598 bp, Homo sapiens
aattgtcctttagaaagagggagagagaaaaacttcccagaaaaacaaaagccgaggtagttcacctaaaacatgccttacaaatcagttcttcaagttgaaatgaaaggatactaaacagcaacacagaagcataggaaaatataaaacttctgtcaagataaatttatttaaaaaatacagaacactgaaatactgcaatgatggcatgcaaatcacttttaattccagtataaaaattaaaagaaaaatgtttaaaaacaaaagtattgagaataattataactataaarattattaatagtgtgcaataaaaaaagaagtaaactccgtgatcaataacatgaaagtgggagaggaaaagtaaacatgtaaaattttcacatatgattgaacttgttatcagcttgtgatggttaatattgagtgtcaacttgattggattgaagcatgcaaagtttgatccttggtgtgtctgtgaaggtgttgccaaaggatattaacatttgagtcactggacaaactggcaaagcagaaccacccttatctgggtgggcacaatctaatcagctgccaatgcagccagaataaaaagtat

SEQ ID NO: 130278 - DNA, 598 bp, Homo sapiens
aattgtcctttagaaagagggagagagaaaaacttcccagaaaaacaaaagccgaggtagttcacctaaaacatgccttacaaatcagttcttcaagttgaaatgaaaggatactaaacagcaacacagaagcataggaaaatataaaacttctgtcaagataaatttatttaaaaaatacagaacactgaaatactgcaatgatggcatgcaaatcacttttaattccagtataaaaattaaaagaaaaatgtttaaaaacaaaagtattgagaataattataactataaaaattattaatagtgtgcaataaaaaaagaagtaaactccgtgatcaataacatgaaagtgggagaggaaaagtaaacatgtaaaattttcacatrtgattgaacttgttatcagcttgtgatggttaatattgagtgtcaacttgattggattgaagcatgcaaagtttgatccttggtgtgtctgtgaaggtgttgccaaaggatattaacatttgagtcactggacaaactggcaaagcagaaccacccttatctgggtgggcacaatctaatcagctgccaatgcagccagaataaaaagtat

SEQ ID NO: 130279 - DNA, 557 bp, Homo sapiens
tctttaagctcctgtatcgtttgattgaaatgcttagattccctggattgggtttcaactttgtccagaattttgatgatctttgtcgctatccatattctgaattctatgcctttcatttcagccattccagtctggttaaaaactctttcaagggaactagtgtagtcatttgtatgaaaaaaaagacactctgactttttgagttgctagagttcttgcactggttctttctcatctctgtgggctgatgttccttttactataataatttgagtatggttagttggccttttttctagatgttttcagagggctgaggctttgtgcagggtctttatttgtagctgaattcttgtccttggtttcacagggggtaatattagcaaagaaaattaggttatgaagtttgggctgtgatctactagacggtgcttaagcataatggtcagtaggtaggcccttgctcagccacttggctcygctgtatttcctcacaaatgcacccatgctaccccttagcgctctgaaagtgtggactcctctcccccttgagt

SEQ ID NO: 130280 - DNA, 607 bp, Homo sapiens
atggtagctgcagcatgctggaggtgccaatgtagtgaccaggcccttcrttccttccccatttcaagggcggtaatggtagtactggagctacaatggcagagttgctgtggattctctttgggatttcctccccagagaaactcagacctgccaccaactgaagtgttcaggcagggacagggtggttgtgttgagataccaggtcaggaggcccttctcagtgaaaaatagtgacgcagggacctacaaagaaaacggtctggctgcttttctgtaaggcagctactctgtgctgggggcctgtattattagtccctaatcactgcactcccttccgagcctgagggcagcaggagcaggggctgcagagcagcaaaaagtggtggcctgcctgctacctctgggtgctctgttccagggtaattccagagctacaactgactagagagcccaggcagggttcgctgcactcccaggtcaggaggccctgccctgtgaggagtagcgagaatggggacctgcgtggtaaacagtctggccacttttctgtaagacagctgcactgtgctggggcccattgatgtttttaaagaaggttcaatag

SEQ ID NO: 130281 - DNA, 587 bp, Homo sapiens
cccacaagaatggctattattaaaatgtcaaaaagcaatagatgttggcatggatgtggtgaaaagggaacacttatacactgttggtgggaatgtaaattagtacaacttcttcggaaaacagtatggagatttcttaaagagctaaaagtagatctacgatttgatccagcaatcccactacyggatacctatccaaagaaaaataagtcaatatatcaaaaagacacctgtattgaatattttctgccaaatgctatatattatagtttgaagtgtttttgatatgggttggatctgtgcccctctccaaatctcatgtcgaattgtgattcccagtgttgtaggtgggacctggtgggagatgattggatcatgagggtattttctcctggtttaacaccatcttccttggtgctgttgtcacaatagtgagttctcttgtgagatctgcttgtttcaaagtgtatagcacctccccacctctctctctgggttctgctcctgccatgtaagatgacggctcccactttgccttctgtcatgaataaaagctccctgaggcctctccagaagcaggtgctgcc

SEQ ID NO: 130282 - DNA, 627 bp, Homo sapiens
gttctggaagtttggaatttctagtggtgaaatcaatgattaggaaagtttggagttttggaagtgactttattaaattgtcacaaaggatcgtgggattagtcctgatgagggggaaggtggataatcagtcctgattatttctccctcttcttgattggtgtcttatggggctcttcctattaattatgtggtcagtcccattgatggccttggagtttgttagaaatgcagaactattgtcttattgtatcagaatctacaatttaaattctccatgagatgcctatgcacattaaagtttgacttctaggaaagagcagctaatctaatgataaggaaacatccaaactgaaggacattcaaccaaataactggtggtatggtttgactgtgtcctcaccaaatctcaacttgaattgtataccccagaattcccacatgttggtcaggggcaggtaattgaatcatggggacsaatctttcccatgctattcttgtgataagttttgtgagatctgatgggtttatgaggagtttctgcttttgcttcttcttcattttctcttgctgccaccaagttagaagtgccttttgcctcctgccatgatttggaggcctccccag

SEQ ID NO: 130283 - DNA, 550 bp, Homo sapiens
agaactatggagcagaccacatgcctcagggagcacctagtcccaggaggaggaaagacatgtgggacagacttgaactcaacctgcgaggtgaatcctggaaactggagcacagactaggtcacctaagttgcagccaatccacagatgggtgagcaagagaataaacattggttcaagccaatgaaatttgaagagacttattatagctcattaatgaaggaaagttttagctaatgcataagtcaaaaccaagtgtttggaggcaaacctgttaggaaatgctttagttaagtaaatgtaattgattataaataaattacccayttaatacaattccacatttattgagaatccacctacatgccagagactatgtaagatgcttttcaaaaattaagtatggatgttgttaaacagatcctacattaagattaatttcttggaaaattgggctatcctttcttaattgctttgtagacaatatacgcattcatgtacagctaatgatattttgaattgtgctgactttttaaaagtgtaaacagtt

SEQ ID NO: 130284 - DNA, 617 bp, Homo sapiens
taatttcccaaattataccttaaaaaagagatagttatcttaacattggagtccttatagttctcttataaggaaacaatcatcaaattaatttgataaaagtgtactttgagaaggaaagacatatttgcttgaaattayattaatcaatgttagtttagatgcctgaaaaaaataccttataattggttaaaaggccagcaaggaatttaagatgatttaataatcattcctgaatatatgacatcacagcttgaagtgtttgcagtttaaaaagcagcaaaattaacaaaaacactggttttaggtaacagcttttgggaaaatggagaaatcaccatatattcatttgtacttatatggtaagcccatatgacattttattttgcacctcaccgtaaagctaccagcaaagcaaatataattaaacattttatatggatttgcatatgactatacttatgtccacacatacaattatatatgctaataaatgactatatttatgtatgtgtattgtcatatgacttgtagaaaatgaattattctttcctatttgcttagttcttatttttataacttttcttctctttaactagtttttaaaattgattaaa

SEQ ID NO: 130285 - DNA, 558 bp, Homo sapiens
ccataatctctcctgcaggcatgcagtgtatagaatcctctgctcttccaaatcagttaccacgcctgcatctgatttagcttcttccaaaattcattacaagtttatgtgttattttatctgcttatttgtctttgtgattcaataacatttaaaaaaattcatttattcttgtaataaagcagtttgaggagagatgaaatacatgtgataatcttgccatttgtaactacacatcaccccatgtacattaatgtttacctcagtgccataytgattgaattagacagatgttatgtctacttaagttatgctacataaactccaggtacaggaagatgttattactattattatcatgacacacaatgctgtcaccttgttttcactggttttccactgttttttattctgctctacctctggtcaaagtggccttcatggagtggccaagcaacatttctcttatgtcttcctactctttctcttccttggaacccctcttcccagggaaggaaatgttccaccactctctggtagtgtcactatgtaacacta

SEQ ID NO: 130286 - DNA, 558 bp, Homo sapiens
ccataatctctcctgcaggcatgcagtgtatagaatcctctgctcttccaaatcagttaccacgcctgcatctgatttagcttcttccaaaattcattacaagtttatgtgttattttatctgcttatttgtctttgtgattcaataacatttaaaaaaattcatttattcttgtaataaagcagtttgaggagagatgaaatacatgtgataatcttgccatttgtaactacacatcaccccatgtacattaatgtttacctcagtgccatattgattgaattagacagatgttatgtctasttaagttatgctacataaactccaggtacaggaagatgttattactattattatcatgacacacaatgctgtcaccttgttttcactggttttccactgttttttattctgctctacctctggtcaaagtggccttcatggagtggccaagcaacatttctcttatgtcttcctactctttctcttccttggaacccctcttcccagggaaggaaatgttccaccactctctggtagtgtcactatgtaacacta

SEQ ID NO: 130287 - DNA, 587 bp, Homo sapiens
caggtacaggaagatgttattactattattatcatgacacacaatgctgtcaccttgttttcactggttttccactgttttttattctgctctacctctggtcaaagtggccttcatggagtggccargcaacatttctcttatgtcttcctactctttctcttccttggaacccctcttcccagggaaggaaatgttccaccactctctggtagtgtcactatgtaacactactgaatctgagccttggaacctcggagacaggaccatatgtggcaagtcactccaggagagctatccctgcaagagttggccctataaagcaggtgacacacttatctagggaaaggtggcaaggagagtcatcaataaatgtgtgtgtcagattttcttatggcaggaaccttttctagaagttgcagtgaggtagtacaacacagtgaccactgtgagctcggcattcaggatcaatagacctgtcttccaccttttgaacttcatcactttggacagatttactgcgactttctcaacctcagttacctcattctgaaaatggagacaataaatataatagacgccttgcc

SEQ ID NO: 130288 - DNA, 309 bp, Homo sapiens
tgaggaggagatgaaaaatggataaagacagaacatactgatcactaggtgcmggtacaccaacctgcaggctttgtgtcctttgtagacttggagaaaccttgctgggcatctgtttcctgtgcaagctctgaggaagtcataaaattctacattgcggttttctttggaaagtgattaaatgataataactgagttgctttgaagatgaatttccctcaaattatattgttattctgcttcccagcagatcttcttatcaagtgtattttccatggttctgattccttacagttttcaccctttcaa

SEQ ID NO: 130289 - DNA, 645 bp, Homo sapiens
aagtcaataacattataaataatagttgctttgtcatgacaccttattaaggaagaaacaaaagatgcttttttgcagactttgtgaagaaataatatatcctcagattctcctacttaattggarataatgaagctttttataaggccaaacattctctatggctcctaaaattctgtctgggcaaataatgttatgacttgtctattttatcatgaaggtaagattgtcttcttgagtatctttcatattaattgagggtaaagttctttccttgtagtacaaatcatgggtaaaattaatctttcttagaactttatttcagagcccatctttctttcttttgatgtttttctacaatgcttagtgccattttgcagcccccaagctaggaaatcaatgatttgttggccagtctttctgataaattaatttctgctaaagtagttatgactaaaaacagctataaattactgttcccagtaaatatatttgcttgtttacatgtaacaaaaatccaaagtcatgcctaatattagaggctccagacttaaaaatagagttgtacaagaagaatttggggcaaaaataactttatcagtaaaatctaatgtgacccaagtggatggcagtgctatgacctgg

SEQ ID NO: 130290 - DNA, 415 bp, Homo sapiens
cttacagaatcgctagaggacttaatgaactgcaccaaaatagtttccagtcttacttcaagggcatacggttttgaactatttttcagaaaagatttctgtaaagctttatgtataaaagaaaatttgttttaacattttcaagtaattttaagcataactaggtttatcaggacattctcaagcccatcaagtttagaagataatatcaagaaagataaacaagataaccttatatattaataggataggtagaaatctttttcctatgcgtcaaagcaaaaatcaaaacattgactaaaataaattttaagacacatyttgctgttatgtcttatctatctactctcaagaacaaaatgcttatttaaaaacattcttagtctgcagggctgctgcaactaatttcaccctc

SEQ ID NO: 130291 - DNA, 327 bp, Homo sapiens
tcatttaggaatagagataaaaatgcaatcaaatacgtaaaagaagaataaaaaacaagcaagaaccaagccaagtctagaagtagagagagytaaagtagttgaaccagagaacctttgatacctaccacatttgagccaaaaaactgacctctgagcttccaggcaatagaggccaaaaaagaaggcaatgaatatcataagcttttcttataaggctaaagcaaatatatcagatttttgggagagacacatttttgttttctatcagtaaattctaagagtaactttatgccacaaagcacataatggcaatgtttctcattg

SEQ ID NO: 130292 - DNA, 603 bp, Homo sapiens
aattaaatgtgtagtgttgtggcattgttttaaagactaaatgtgttaattattagtgtttagtgcttagactaaaagataatagactcagatgataatagaataatgatagaacagtacctgattaaatatgtgttatatatgattaaatatatatatgattaaatacatgcaaatacatcaggcactgttttatcattattctactatcatttgagttgcctcaaatattcctaattttttatatttttgttaattttactgcaatggccttttgtgtgtgtgtgtgtgtgtgtgtgtgtgtgtgtgtgtcctttttctcttcatagttacaatttgctttgtttgataaaaacttactagatttatgtggaaactatgttagttggtacmtaagaattgccaaggtatacctgtctggggaaataaccatgaaattctataccataatgttgtaaagaactatctatgaagtttccagttaccctttatggatttcatgaggcctttaacctaagagtaatctcttaaggtgcactattccaaccataaaagagttattcttcttttggcttaataagctgtaaattggacaaggagcca

SEQ ID NO: 130293 - DNA, 339 bp, Homo sapiens
cttgtctctttctgttatttcagcacagcctctttgtcccatgccatgcgactggctttgtcctttcagactttgatcttaaaacaattgccctccagctagaatattttactccttcccacttttyctgatcctctccttgtaccaggcccagctcatatttcttctcttctatgaagcctgtctgaacatcccagctgaaacaaactcccacttttactctgaactactgcagacaccggttatttcacccttaaggtctaaataattatatgccaccttgtcatgaaatgaacattctatttgtatctttaactgttgttcactgattcacttggg

SEQ ID NO: 130294 - DNA, 464 bp, Homo sapiens
gaggtgataattgatttttcagctaggtcattctgtgaaacatgacctccattgtacaaaaatcaacaggaaagatgaaggaattacccaaaagtttgcctgttctgtaccagtgatatttccttaggtaacagaaggacaatgtgaaagtactaatttacatttccttggaatcattgccaccatttcagttgaaactggaagcatttcctttctattccacattgtacttaattaggtctcccacattatttaaagagctcaacattgatatcctgactataggttcgattcttcctgcccctaaaatactgcttttctaccatgttttttttcctccagccttctttagcccctaggaacttaccatactgttattcagagctaccaattcaatgtggagagtatagtaatactayagctgtagtattctgaagaataccacagagctggtgttgatgaac

SEQ ID NO: 130295 - DNA, 449 bp, Homo sapiens
tttgtatcctcttaacattttgtttaaaacacactttgggtatttctcttattaaattttgtactgcatttatttggatgctagtttaatctctttaattgagactgtcagttcttcagaaaacctccctcaaatgaaggcattcgatggtgattctaatgagctctgtagtatgctgaagtgggagcaaatgccagaccaacaaacaggagactgggtgtcttgtgcctgagcaatcactaattagctctgtgataccgacagaaggcagggaaatactgggtagaggagggcagtccctggcgagggccacaccctcaagcctaagactgtggcctaaagtgagaaygtgcattcctgttttcccattcaaatgcgctgtttggcccacccctccccaccatcctgtacccataaaaagcccaggctctactggcagaggggcagca

SEQ ID NO: 130296 - DNA, 568 bp, Homo sapiens
tatttctaaagtagtgaagaagaaaaactcaagaggcaataatccaatgtgtcaataaatctcattggctctatttaaaaatctaaaatagaagcacttgtgtgttaccagacgatgcctctgatggattgttgatatctgaatggcctcttaactgctctggctgcttcacccttattccctgtagcagattgactagtgtccctccaaaatccatgcccacccagagtctcctaatgtgactttatttgggattaagtctttacagatgtaattagggtaagaattgagatgagatcctaatggattaggatgggctccaaatccagtggcagtgtccttataagagacagaaaaagagaasatacagaaacacagcaaagaaggagatgtgaagacagagacagagattggagtaatgcgtctacaagccaaggaacaacagaaattggcagcgtaagatagattctccctatgaacctcctcaagaatatccctgttgacctcttgatttcacacttccgataattctgtagttttgttttgttttgttttttagatggagtct

SEQ ID NO: 130297 - DNA, 508 bp, Homo sapiens
tgtgaagacagagacagagattggagtaatgcgtctacaagccaaggaacaacagaaattggcagcgtaagatagattctccctatgaacctcctcaagaatatccctgttgacctcttgatttcacacttccgataattctgtagttttgttttgttttgttttttagatggagtcttgctctgttgcctaggctggagtgcagtggcaccatcttggctcactgcaacctccacctcctgagtgcaagcaattatcctgcctcagcctcctgagtagctgggattacagaagtgtgccaccawgcctggctaatttttgaatttttagtagagacgaggtttcaccgtgttggccaggaaattctgtagctttaagccatccagttggttgtaattttctacggcagccctgggaaatgaatacactcccccatagtctaactttatttcctcctactcccgctcttgttcactctgccacattgtgcactttgcaataagttagg

SEQ ID NO: 130298 - DNA, 472 bp, Homo sapiens
gaattcaccccagcctgcccgacaccaggcctgtgccctttccgtgacactgtcttactagtaacagatggcagggagaacgcagaactaatcaactgctctattgatttcaacttctccattgaggagatcgatcttgccattagaaaggggcagacagacatcgttagtggaaattggagacccagctcagggaggcagttggcagtgcagtggatgctgctccgtctgagctctggttgccttacaggcccggtatgggtcatgcctagtgggcaccagacaggaaagggtggccaaggctctgggacccatagaccatgcagcacctgagaggtgccctctggctggctagggatggaggtgggctctgaacaccagtttccagttcactacagtcatggcaagccttctagcctcagtcatgttgttcatctgtctgtctytccatacatccctccttcatccatcc

SEQ ID NO: 130299 - DNA, 483 bp, Homo sapiens
cctgtgccctttccgtgacactgtcttactagtaacagatggcagggagaacgcagaactaatcaactgctctattgatttcaacttctccattgaggagatcgatcttgccattagaaaggggcagacagacatcgttagtggaaattggagacccagctcagggaggcagttggcagtgcagtggatgctgctccgtctgagctctggttgccttacaggcccggtatgggtcatgcctagtgggcaccagacaggaaagggtggccaaggctctgggacccatagaccatgcagcacctgagaggtgccctctggctggctagggatggaggtgggctctgaacaccagtttccagttcactacagtcatggcaagccttctagcctcagtcatgttgttcatctgtctgtctttscatacatccctccttcatccatccatccttccacctccctagtcatctaacctttcctgaattc

SEQ ID NO: 130300 - DNA, 616 bp, Homo sapiens
ctgaatgcatggttataggtagcactttcactctttaaaatgcttcagattgaggctgggcaaggtggctcacacctgtgatcccagcactttgggaagctgaggtggggggctcacttgagctcaggagttcaagaccagcctaggcaacatggtgaaaccccatctctacaaaaaatttaaaaaaattagctgggcatagtggcatgcatctgtggtcccagctatgaggtgggaggattgcttgagcctgggaggttgaggcagaaaagggattaaaggaaataatctgtgtagcttcaggatgggccagcactcagcggactttgaagtgagctatgatcatgccactgtactcctgccggggtgacagagtgagacmctgtcaaaaaaaaaaagaatgtttcagattggatgataaatatgctttcctcagctctaagcttcaagagtctatttggcatcatagagaattttatgttctttggtgcttttctctattttccaatttttctaataggagcactgcttttaggatctgggcaaaaccatgcatgtgatagaaacaaaccttttcctcctcccagtctgctgggtggtcctgctggccatagca

SEQ ID NO: 130301 - DNA, 580 bp, Homo sapiens
tagtatgaacattttaacaatatttttcattcctatccatgaatgtagtatgtctttttatttatttgtgtcttcttctatttctttcatcaatatcttacagttttaagtgtacatatgtttcagtttcttgattaaatttatycttaagcattttactatttttgatattatacatgaaattattttatttataaaaagatagtttgttgttagcatctagaaatgcaaataattttaggtattaattttgtatcctggtactttactaaatttgtttattacttgtaacagttttttagtggaatcttcagaattttctatgtataagattatgtcatctgaaacagagacaatttaatttctctattttcaatttggatgcctcttctcttcttttcctttttatttttatttttatttttcttgcctaattgctctggccaaaacttccaggactatgttttgaagttcttaaatggggatgattttgccccgggatcatttacaatgtctggaggcatctttgatagtcatgactaagggtatgctatgaacatctagtgaatagagggcaggg

SEQ ID NO: 130302 - DNA, 580 bp, Homo sapiens
tagtatgaacattttaacaatatttttcattcctatccatgaatgtagtatgtctttttatttatttgtgtcttcttctatttctttcatcaatatcttacagttttaagtgtacatatgtttcagtttcttgattaaatttatccttaagcattttactatttttgatattatacatgaaattattttatttataaaaagatagtttgtwgttagcatctagaaatgcaaataattttaggtattaattttgtatcctggtactttactaaatttgtttattacttgtaacagttttttagtggaatcttcagaattttctatgtataagattatgtcatctgaaacagagacaatttaatttctctattttcaatttggatgcctcttctcttcttttcctttttatttttatttttatttttcttgcctaattgctctggccaaaacttccaggactatgttttgaagttcttaaatggggatgattttgccccgggatcatttacaatgtctggaggcatctttgatagtcatgactaagggtatgctatgaacatctagtgaatagagggcaggg

SEQ ID NO: 130303 - DNA, 626 bp, Homo sapiens
tacgtgctttgtacatttgaattcatggtctgaaaatgtttacaaattttctttatagtatattcttaagggtttggtgcatagatctatgcctatagctttataaacacacacatgcatacatatacaaaaataaaaagacatataaataaaagaggaggagaggaaacaaaaagatatgaaaggctgtgagcatagatgtttaaagataaactgaggaagctaatacccaatcttgtttccctgcacagactacattataattgcccaaactaaaagcagcccctgataaatgcagagcctgctcaaacacaaccagtcactcaatgctggaacaaataatgggcaaccaaaaagacaattgatcatatatgttatttgcatcacatcaataaatcctttagagatgttataaacttttcattgcaagtcctgtattacacgtaatagacaaagaagaaagaacatgatcactttttccccctgaagctggaagtcctgatttttatgttcaaaggaagcaattgtttgcagttttctttwttattattattattattatactttaagttttagggtacatgtgcacaatgtgcaggttagttacatatgtatacatgtgccat

SEQ ID NO: 130304 - DNA, 466 bp, Homo sapiens
gaattctgcgttggatgtgaattggctttctcaaggatgtcctcactgctccctcgagctaattaggacattgcattctatacccaaagaaaggttcttcttcccatccctaggaacttcttacaggattcagatactgcatctttctatgtctggcccatcccacgctgagtgatggagagaagtggaagaatctgtagtaacgaaatcagtagaatgtctttcccaggaactttgatacasaacactggctccctttacttcttagacctttgttcagagaaatcttcacatccatcttctctaatttgaccttgcgctccaaaaatgagcacagcttttattcaaatgctattcagaggggagaagttcacacgctggctagtgtcaggtaccaagaccatttccacccgacttgctgcacttctgttttataattggatggtagataaatctgaaagagaaa

SEQ ID NO: 130305 - DNA, 404 bp, Homo sapiens
ttttaagcaaaatgtttgtgctatgctctgaatgtttgtgttcacccaaaattcatacattgaaacctaatcrccaaggtaatggtattagaaggtgaagcctttgggaggtgattaggtcatgaggagtctgccctaatgaatgggattagtgcccttatgaaagaagccccagagagttgccttcctctttcaccacgtgagcataaagcaagaaggtgccatctacgaggaacaggctctcaccagacaccaaaaaaactgctgaatgccttgattgtagacttcccagcctccagaactgtgagcaataaattccattgtttataaattacctagtctaaggtatgttgttatagtagcccaaatgactaaggcagtttgcattttggaaaagtcacaga

SEQ ID NO: 130306 - DNA, 549 bp, Homo sapiens
ttcttgcttatgaatttctcccccttgttccttgcaaagtgtggaactgaacaaggggaacagctatgtggtcagcaagagggcgggaggtcactctctaatcacaggcatggggcaggtataacttgaccctccatccccacaaagctacacaggtcctgtctctgcacagttgctccatcaccgatcttaccacacggccttacgamcacttggctattctcttctccttgccttgacccatgtgtaaatagctgatgctctgaagctaatgttattttaatagctttatagaggtataatcgacatagaatattgcccatatttgaagtgtacaatttggtgagtttggttatgtatatacccatgagaccatcactgcaatcaagatagtgaacatgtttatcacctctgtgtgagcccctccctttctcagcccctcctcctcccagcctcttcacttctcaggcaaccacccatctgctttctattactacaggtgagtttgcattttctagagttttgtataaatggaatgatacagtatgt

SEQ ID NO: 130307 - DNA, 462 bp, Homo sapiens
tactaagaaacaggcaacaggtacatcaggccctggtatttttcatgcaatgagatatatatttaacatcatcaggttatgtctctgaamaatttgcatctgcaaaattgcacacttgaaatgtcaaaataagttactaaattttttagagctgcagaaattttacgctaatggggcagtctaccgcaaaggtagtagtttcacagactgattttatatcctcactaaaagatgttggaatctttctttttagtcacagttatatgatataaaatgtgctattggatacttcactatatgagaaaagctcccttaaagataaaataaggacatatacaatcttctctgagtccttggagtcagagtaaagatacattttagcacagaaaatactacaatctggtcttactttctgaacactttaatagaaataggcacaaaaaaattgtaaaaagcaggcag

SEQ ID NO: 130308 - DNA, 436 bp, Homo sapiens
tgaattggtcatttttttccccattgcactgctctagctccttttgacatgaatcagactgatcatataggtgtgggtgtttttggtctctttcttctgttccactggtcatcttgtgccaataycacactctattaattaccatggtttaacagtatcctcaatatctgataacataagttctccaattgcattcttcttcaagattgccttcactttgcatttcatgtacatcttgaaatcagcttcagagtccccctctgttcccctaaaatggcactgttaagattttgattttttaaaattttttttatttttaagattttgatttttataattatggtgattctatagatttaagaactgccatttttataacatggagacttcaaatccatacacatgatatatccctcagcttattcaggtcttcttt

SEQ ID NO: 130309 - DNA, 436 bp, Homo sapiens
tgaattggtcatttttttccccattgcactgctctagctccttttgacatgaatcagactgatcatataggtgtgggtgtttttggtctctttcttctgttccactggtcatcttgtgccaatatcacactctattaattaccatggtttaacagtatcctcaatatctgataacataagttctccaattgcattcttcttcaagattgccttcactttgcatttcatgtacatcttgaaatcagcttcagagtccccctctgttcccctaaaatggcactgttaagattttgattttttwaaattttttttatttttaagattttgatttttataattatggtgattctatagatttaagaactgccatttttataacatggagacttcaaatccatacacatgatatatccctcagcttattcaggtcttcttt

SEQ ID NO: 130310 - DNA, 544 bp, Homo sapiens
ataatgactgctgattgatttcttttagaatttgagttatatcagattcacatttttttaatcaactgataatctgtaatcaaagacacaatttaccatgtttgacatatatattttaatattttaacatctgttcaaatttgccatgtaagaattacttgatttgcgaataagcctagctataaggattatgttctaaatggggtcccttgttactacactcacaccaaaggtgctttctttatttcagaaacccaactgcacttggcaaaactacatataattgaaaccagtgaagaatatttcttcaacagaagacaaccaaaataatttcctgttcatgggttgctgttactattagttttcgaggagtcygaatctagcacactagacagacagatcaggcctggtgagggctgctcagaaagatgggacataggaatcaggtatgtggggggaatttgaggggatcctagaggcatgcgccaaattgggttcttcgctggatcatttaaccagtccacagcaatgtaataccaagaag

SEQ ID NO: 130311 - DNA, 540 bp, Homo sapiens
atctagtatttgatagcccaacagggtaactacagtcaacaataatttattgtacatttaaaaataacaaagagagtataattgcattgtttgtaacacaaaggataaatgcttgaggtgatggatactccacttaccaaaatgtaattattatacattggatgcctgtakcaaaatatctcacataccttatacatatacatatacacctcctatgtatccataaacatatacacctatgtatacagaaaaattaaaaataaaaatatcatgcaaatgagaaagtctatatcatttaggaaaatgtctatagtttacatttatataatacatcttttttaatgctcacatataatttttcacagctcctccatgaattagcaagtgactgcattagcttttccatttatcagatgagagtgactaaggcaaacaccaattaattaccttgcccatgtgctcagcaaaaccaagtggttactggggctcgtagtcccctagcggaggaactaggtattagttataacagtatgggtgcag

SEQ ID NO: 130312 - DNA, 540 bp, Homo sapiens
atctagtatttgatagcccaacagggtaactacagtcaacaataatttattgtacatttaaaaataacaaagagagtataattgcattgtttgtaacacaaaggataaatgcttgaggtgatggatactccacttaccaaaatgtaattattatacattggatgcctgtagcaaaatatctcacataccttatacatatacatatacacctcctatgtatccataaacatatacacctatgtatacagaaaaattaaaaataaaaatatcatgcaaatgagaaagtctatatcatttaggaaaatgtctatagtttacatttatataatacatcttttttaatgctcacatataatttttcacagctcctccatgaattagcaagtgactgcattagcttttccatttatcagwtgagagtgactaaggcaaacaccaattaattaccttgcccatgtgctcagcaaaaccaagtggttactggggctcgtagtcccctagcggaggaactaggtattagttataacagtatgggtgcag

SEQ ID NO: 130313 - DNA, 423 bp, Homo sapiens
tgaattccaagttgactttaaaagttacacagagcacatggaaaaaattctccaaatgagtatttaccttttcagaaatcagtttaacaagcaccagtttatgaacagggcttgctataggcatgtaatgacattatttgtactccatgttggaagataaagtattgagtaaagcttttaacataaaaattttgcttattaaaatgaacattaagtattgtttcctagactagaaatagagggataagtctgtaagggagtaaatttgatgaaaasaaagtttcatgaagtctgaatactatgttttccttatgtttgtggttgagaatatggtcagattttttcttttaggttcttcacagtctccatttttcattttcactgggagctgaaagtcaaaagacatgaaagaaaagaaacacg

SEQ ID NO: 130314 - DNA, 423 bp, Homo sapiens
tgaattccaagttgactttaaaagttacacagagcacatggaaaaaattctccaaatgagtatttaccttttcagaaatcagtttaacaagcaccagtttatgaacagggcttgctataggcatgtaatgacattatttgtactccatgttggaagataaagtattgagtaaagcttttaacataaaaattttgcttattaaaatgaacattaagtattgtttcctagactagaaatagagggataagtctgtaagggagtaaatttgatgaaaacaaagtttcatkaagtctgaatactatgttttccttatgtttgtggttgagaatatggtcagattttttcttttaggttcttcacagtctccatttttcattttcactgggagctgaaagtcaaaagacatgaaagaaaagaaacacg

SEQ ID NO: 130315 - DNA, 525 bp, Homo sapiens
aagtttcaagtgaattctaatatgcagcttgatgagtatttaattctagagaaaggaaactgcctgtagggtataagtgtgaaacgctcaccctttcatygtggcaatgattttttcatgcatgtgtatgagtttccctgaatcgactggaatgtaatacctacaaggttaattagatgtgctgaaatgtaaacgttcagcactctcaaaatgcctagttaattcaggtctcacctaggcatctatgctatctttttaaccacattgttttccaaggtctgaaattcatttataggtaacatcctctgaaccttttcagtaaaataagaaggtatttgaaatgcatggtcagtcaacatctaacataaaatcttaagcctcaggttttgaaaagaacaatgtcaattaatgaaggttgtttcttatagagctaacacaaagaagagaattactgttagtattctggtcaaaactgtgtgatccatcatgaaaattgaaactactctacagaatggatggattttg

SEQ ID NO: 130316 - DNA, 642 bp, Homo sapiens
aagtcccaaattgaagacagcggttacttttccatttccttttagaatgtacaagaattcccttttatacttttaaattttcaaatatacaacttaccatatagatattaatattctcytatttttaagtctcctattcttgtctagactcaatactgccaaaagcatttcaactgcactttatgcattttaattacatagaatttcctgttttaatgcttatgaaattggaacgtctttctattagccgtggtgcaaactgcttaacagaaatggaataccagctaccccctgccccatcccgttttactcgagggagaagagacaggtaaattcatggagttctgtttctttccttcccagaaaaaaaaaacaaaacaaaacaaaacgataaaacaggaaattcaccttgagaaaaacatcaagcaggtaaggcttttccttcttttcacggccttcacaaatttgtaaataaggcacttaatttgtggtctcaatgtttcgatctaatttcctgtatttgtatctctggcaacccggataccattgcccactgaataacctcagcataaccacactgccacaggctgcctgcagcagactcagctaaatgcaaaagccatccaatgacttctgccacag

SEQ ID NO: 130317 - DNA, 595 bp, Homo sapiens
ttgtctctttctgtgttacaagagcagccactccactgctctttcattcagtgtttccatacaaaccatgttctatgtcattttcataattttcaaatgactgaatcttcagttaagagaattatwtgatctcagagacttaaatccctaatcaatgcagaaaaaaatttaataggaaagcttcagcataactttcatatattgtaaggcacagaatcctgttatttctcttcctgaatgattccaaaatttccctccccctcccgcttctactgcctaaatttaagtctgttatctctcccctgtgtcattacaaaagcctcctaatttgtctccctgcaactggtgcctccttcatctgactcaagctctccctgcagctaaagtttttgttaatgcgactggataagagttctgtctactctcccttagtctcgtttgtgggtccttcgtcctctttctgacctcaaaatctctatcttctatgttagtcttaaccaatttatactccttccctaagggatatcatattgtccaatggcagtagagaccagattaatgttttggactctcttcagtccctgagttgtaacat

SEQ ID NO: 130318 - DNA, 566 bp, Homo sapiens
aaagtttttggttaaatatctgtaacgaaactgttaaagaaatgcagaaattataaaattgcatcaaaagtcagctcaacgacagaaataaatggagatagctcattttcatggaaagaaagaattgacgtcataaagatatctgttcccatcactttgttctgaagatttaataaaatccayatggaaatcaagacagagtttattgtttctttaagtacaaattcattataccaaacaatatattttatttataaatgcttgacacacaccaaaaatgaaatctgaatgatatcttttacaatagcatctcaagtaacaaatatctaagaataaatgtatataagatttctatatatgaaattcagtctttatagagagatttaaataccactacacagatgactataaaacatcctgggaataactaataatgaaaagacaccgttttcatagattgaaagaatccacaatgtagagatacagatttccctctgattgttcatagttttaaagcaattgtaatcaaaacctgtcattcacatatgtgtgtatgtacgtgtatg

SEQ ID NO: 130319 - DNA, 515 bp, Homo sapiens
gataagttcttttttaaaattacctttaatttttttaamgctcccagttattctgatgtctggctaattttggcaaaaactgtccagtttttagacctttagtcagctacaatgactccattcctggaatatgtggcctacagcaaaactccttctgggtggtgtgccttgttcttatttctgttacatccctgatatgggctaagagctatgcgtgtgtatttgtattgggaggcagagggtagtaatccatcaatccattgactcctcccagagagtgacacctattttgagcaacattttctgctaggatccactaacaatgacaaaaataattaaaataaaagtggaatacaaatatcctaagtgaggaacccattaaaacatctagggcttcagaaggaaaaagtgattttcattgcagagatgaaatacattttcacgtgccaaagacattttgcagtgcaactgagaaaggaatggtggagagagagagagagagagagacataagca

SEQ ID NO: 130320 - DNA, 593 bp, Homo sapiens
aagctttagatcattaagaaaagactgaagctacttcgtactggactatgtgctaaagaccagagagctacagctcaggtgttcatggctcagccaggtagctcatcaaggtgggagtctgacacaggatccccaaagacaggacactaagagcctgcactcgaatataggatgatctaatcaaacaaagaactaaacacacacagatgcaagcacacacacatgtataggcatgtacacatgcacacacacacatgtgtgcacacacagcaaggcacacatgtagacacaagtgcatatgcacacaagtgcacacacacatacatgcacacacatgcatacacacacgcatacacagacacacacagtagtgtaggtcaataaggatatctgctgtgtcattactggtattggagaaatgggaaagatatctcccctcagaatctgtaactacagctgccctcccacgtccgcctttgcattacctgcatttcctgagaggcctcaagccctgacttattttagagcaaaccttgcttgataatggcaccgtagtttatcctagarcttttttttttaacactggcctcaaa

SEQ ID NO: 130321 - DNA, 509 bp, Homo sapiens
atgggatgatggcacacgtggatttattttatatatatataatgattctagtttaaaggacagacccgcgggtaggaaacatactgctgaagatttttctacttcatgtgtgggaaaagttatgttttgtgtatggtaaaatattaactctaagtattctgtgaaaagtaagactgtatattgacctctagagtgactacaaaaaaaatacaagaagttatagttaaaaagagaatacataaaacaaaatggaaattttaaaagcattcaaataatacaaaagaattcaggaaggaaaaatgaaatgagaaggagcaatgatttagtatttcagcctgtgacctgarctcctggactgtcccatgagactggcccactgctctttcccttgatttcatggaagacacctgcaggctgtctaaaggactgcttggtttcaagattccggctggaaactgatggcaaactcagcagggtaattgaagagatcctaaggggctttacagaga

SEQ ID NO: 130322 - DNA, 509 bp, Homo sapiens
atgggatgatggcacacgtggatttattttatatatatataatgattctagtttaaaggacagacccgcgggtaggaaacatactgctgaagatttttctacttcatgtgtgggaaaagttatgttttgtgtatggtaaaatattaactctaagtattctgtgaaaagtaagactgtatattgacctctagagtgactacaaaaaaaatacaagaagttatagttaaaaagagaatacataaaacaaaatggaaattttaaaagcattcaaataatacaaaagaattcaggaaggaaaaatgaaatgagaaggagcaatgatttagtatttcagcctgtgacctgaactcctgsactgtcccatgagactggcccactgctctttcccttgatttcatggaagacacctgcaggctgtctaaaggactgcttggtttcaagattccggctggaaactgatggcaaactcagcagggtaattgaagagatcctaaggggctttacagaga

SEQ ID NO: 130323 - DNA, 429 bp, Homo sapiens
tgtcttttgaaactattttatttggtgcattcatatttagaatctttgtctttcttatggcttcacactttcatcattcttatgtctactaattttcctttctctgaaatctactttatctaatattagcacagccatttttgcttttttgattaatgtttgcactgtgtatcctttccctcctttatattcaaactatccatattgttgtacttgatattaatttttaataagcactgtaaagtttgtttcttaaaaaaawtcatgctatctatctctgtcattttggttagcatatttaggttatttaaacataaagtaattattgatatatttgaggtaagcctgccattttattcccatattataataatgatttatttatttatttatttgcttatttcctatttttctcttttcacccttaaa

SEQ ID NO: 130324 - DNA, 491 bp, Homo sapiens
ttattattattatgctcaatttcagattttcttcttcaaaagagatggttttctattatttgttcactattatcactaaaatgattatcagttcttttcttctcttgaatatctatacttcgtrtattgattttcctggatatattgcccaagaatctgtaaattttccaacataaattacatcttcttgtatgtttgctctttgtttcagactcttcctttgatgttctagtccaccattttacatctcaaaagggagtggccttctctccaacttactcatccacttttcagttccagcgcttcttctccgtgtgattcttcgatatccttaagcttttttcttgttataaatttgtcgtttttcaagctttcatctcttctacagtaactccttttcataaagaacatgttctgaattttttaaaaagttattattctctacagattctaggtaatcttagttgggtagttagttatttttattagtg

SEQ ID NO: 130325 - DNA, 491 bp, Homo sapiens
ttattattattatgctcaatttcagattttcttcttcaaaagagatggttttctattatttgttcactattatcactaaaatgattatcagttcttttcttctcttgaatatctatacttcgtgtattgattttcctggatatattgcccaagaatctgtaaattttccaacataaattacatcttcttgtatgtttgctctttgtttcagactcttcctttgatgttctagtccaccattttacatctcaaaagggagtggccttctctccaacttactcatccacttttcagttccagcgcttcttctccgtgtgattcttcgatatccttaagcttttttcttgttayaaatttgtcgtttttcaagctttcatctcttctacagtaactccttttcataaagaacatgttctgaattttttaaaaagttattattctctacagattctaggtaatcttagttgggtagttagttatttttattagtg

SEQ ID NO: 130326 - DNA, 491 bp, Homo sapiens
ttattattattatgctcaatttcagattttcttcttcaaaagagatggttttctattatttgttcactattatcactaaaatgattatcagttcttttcttctcttgaatatctatacttcgtgtattgattttcctggatatattgcccaagaatctgtaaattttccaacataaattacatcttcttgtatgtttgctctttgtttcagactcttcctttgatgttctagtccaccattttacatctcaaaagggagtggccttctctccaacttactcatccacttttcagttccagcgcttcttctccgtgtgattcttcgatatccttaagcttttttcttgttataaatttgtcgtttttcaagctttcatctcttctacagtaactccwtttcataaagaacatgttctgaattttttaaaaagttattattctctacagattctaggtaatcttagttgggtagttagttatttttattagtg

SEQ ID NO: 130327 - DNA, 442 bp, Homo sapiens
ccattaatgcctatgcttataagatggaatgcaacagagggtatttatggaatttaaaaattaactcatttagtagaacccgttccaatggtgcaacttccctttgaaaataaactatacatccatgtggaaggcatttaccctctccgagccacagggacctgtttttagacaytgacgtgtgattcacacaactcatcgtatgtctacagagacctggaatgaaccgccacatgactgtggaaagaggtgtttgtgacttttgcacacttgaatggatgcagtgagcgatatattaaattctcctgttgacatgtgaatgattagaacttagagaaactctcagtttaaaaatccaaaccattagagataatgcaactgcatagatatgaccaatatctagctctgagggaactgatctcaaccttgggaaatggaacgg

SEQ ID NO: 130328 - DNA, 442 bp, Homo sapiens
ccattaatgcctatgcttataagatggaatgcaacagagggtatttatggaatttaaaaattaactcatttagtagaacccgttccaatggtgcaacttccctttgaaaataaactatacatccatgtggaaggcatttaccctctccgagccacagggacctgtttttagacactgacgtgtgattcacacaactcatmgtatgtctacagagacctggaatgaaccgccacatgactgtggaaagaggtgtttgtgacttttgcacacttgaatggatgcagtgagcgatatattaaattctcctgttgacatgtgaatgattagaacttagagaaactctcagtttaaaaatccaaaccattagagataatgcaactgcatagatatgaccaatatctagctctgagggaactgatctcaaccttgggaaatggaacgg

SEQ ID NO: 130329 - DNA, 442 bp, Homo sapiens
ccattaatgcctatgcttataagatggaatgcaacagagggtatttatggaatttaaaaattaactcatttagtagaacccgttccaatggtgcaacttccctttgaaaataaactatacatccatgtggaaggcatttaccctctccgagccacagggacctgtttttagacactgacgtgtgattcacacaactcatcgkatgtctacagagacctggaatgaaccgccacatgactgtggaaagaggtgtttgtgacttttgcacacttgaatggatgcagtgagcgatatattaaattctcctgttgacatgtgaatgattagaacttagagaaactctcagtttaaaaatccaaaccattagagataatgcaactgcatagatatgaccaatatctagctctgagggaactgatctcaaccttgggaaatggaacgg

SEQ ID NO: 130330 - DNA, 401 bp, Homo sapiens
gaattctttacatgaatgattcaaaacttcattcttacatcctcaacccaaggcaatactggttgtattgtgttgctgtcattatccattaattttcaatattggatttcatacccaagaggatagcctgtgttacagatagaactgtgtttcccaaaagatatgytgaagttcttaaacacaccctgggcttgtgaatgtgaaattcacattcacagtatgtggaaatagggtatttgcagatgaaatctgtaacgatgaggttacactggattaaggtgtgaacttgtccagtggctagtgtccttataagaagaaaagcagaacaatgtcagcaggaagttgcaatggaagacctcatcattattcctcccaacaaaagtacaactagcaactaccaa

SEQ ID NO: 130331 - DNA, 401 bp, Homo sapiens
gaattctttacatgaatgattcaaaacttcattcttacatcctcaacccaaggcaatactggttgtattgtgttgctgtcattatccattaattttcaatattggatttcatacccaagaggatagcctgtgttacagatagaactgtgtttcccaaaagatatgttgaagttcttaaacacaccctgggcttgtgaatgtgaaattcacattcacagtatgtggaaatagggtatttgcagatgaaatctgtaacgatgaggttacactggattaaggtgtgaacttgtccagtggctagtgtccttataagaagaaaagcagaacaatstcagcaggaagttgcaatggaagacctcatcattattcctcccaacaaaagtacaactagcaactaccaa

SEQ ID NO: 130332 - DNA, 399 bp, Homo sapiens
attattcctcccaacaaaagtacaactagcaactaccaaaagacaagactgtcacgctgaattcaccagaacatgcagaagaagcaaaaaaaaaaatcctggttctggagaaattggaaaagccataaccagtaagaagaatggwcattttagatcatgccacttcctcctccaagctggccacatccctagatccatggcctctgaggtggaaggagggaatgggaagtgcacttttgatctgcccacccttgtctgggaaacttcacagaaagcgtgttctggtcccattccatgggagcctcagtaaggcctaaaccactgggtgggaagacctggagacgagagtgggtggtacaatcacagcagatggcatgcagatcggggcagctgccctgc

SEQ ID NO: 130333 - DNA, 555 bp, Homo sapiens
aagaattcttaaacattaattgggaaaattagatctagagaccaaaataagtcacatatctccaaggaatgtaagtagtttaatagtctagaatcagcaaaatgtcctttatagcacagcacgtctttatttgcctgttttctggtcagcatactgatttcttcatattttaagacttccttgccacgaacatatggtttcacagctattaatatttatttgcaaactaaaagaatgtagttatagtttccaaaataaatctcatagagttgaattctaattgctttacaatagtctttgtgtataattttctgtttagtctaagcagtttgtaaatatttcttatttgcaagtagataatagttcaacattctcactttatgtaactaagtgtgtcagttcacgattggtttcctctaatatatatctattctactttttarttatcagaggttttgtggaaatatatctcttcaaaaagtttatatattataatctaagcagtttctgaaatgttaagaacaagaatttgtgaagcaaattaaatgacaaact

SEQ ID NO: 130334 - DNA, 577 bp, Homo sapiens
tttttataaacagaggaagaatcagtgctcatatctgaaaataggattgatgactttcattacagtaattcagagcaagcctcaaggaaccagacatacactctcaacggctgcaagaactctccctcagctattccagcacttcatgccatcggcagcttccagctactcaattttgtttggtcaataattgagaacagcagacaatcattattagcaaataagttgatgtccaaaacttgtatttgctcatcttttcaaatcatttttttcctaactatgcattatttaacagaagcaactgagtcccacttggacaaatttccgacattatttatcaagaagttttggctttcaatatcacagatgtatcctgcaccatataaacagtgcttcagaatacaaatgtattatatcaaatgttccccgctaagtaagcctcaggagctgcaacgcaccatgcgaagctgatgacatccttcttcctccccaacttgtgttttacgtgttctccacctaatttctgattggrcagcacaaacatctaacaaatccaattcacaaatctggaagcatt

SEQ ID NO: 130335 - DNA, 608 bp, Homo sapiens
attattatataatataatagtattatttattattattattattatttttagtttattatggaaggtaaccaaagagactgatttagatatgggtttgaatagcasacatgaataaattgcaatcctaatgatgctacacttttatattttcatttagcaatttctcttcttgaagataatacattaagatctagtgtgtgggttttggacaaattcataatgaatttctgaaacgtaagaacatatttctaacatttgtggaatgactatgggccagacgatgttcaatctaagggattaagatacagtagttcacttatctttgagaagaatgagttatcattttcatttttagataaggtaattgaggctaagtgatgttcattaatggatcaaatgttgcagaccacattaatggagaagtcatatgttggacagatccaatttcaaaggcacttttattctgtttcattcattttgcccctggagtccagcacagcacctgcagcatagtaagccttgatacaattagggaatcagcagaaatggcaaaaaagtcaggcatgagtttgagggaaggtcaaagagcagaatgaatgcagaaacac

SEQ ID NO: 130336 - DNA, 608 bp, Homo sapiens
attattatataatataatagtattatttattattattattattatttttagtttattatggaaggtaaccaaagagactgatttagatatgggtttgaatagcagacatgaataaattgcaatcctaatgatgctacacttttatattttcatttagcaatttctcttcttgaagataatacattaagatctagtgtgtgggttttggacaaattcataatgaatttctgaaacgtaagaacatatttctaacatttgtggaakgactatgggccagacgatgttcaatctaagggattaagatacagtagttcacttatctttgagaagaatgagttatcattttcatttttagataaggtaattgaggctaagtgatgttcattaatggatcaaatgttgcagaccacattaatggagaagtcatatgttggacagatccaatttcaaaggcacttttattctgtttcattcattttgcccctggagtccagcacagcacctgcagcatagtaagccttgatacaattagggaatcagcagaaatggcaaaaaagtcaggcatgagtttgagggaaggtcaaagagcagaatgaatgcagaaacac

SEQ ID NO: 130337 - DNA, 588 bp, Homo sapiens
tgggaacgtagagtgggagagattaagctgaaggaagattttgtggtaaggggtgatattgtgggactgttagaagaaacatttgtcatttagawttattggtgatggcctggatacagttttatatgaattgaaaaactaaatggaataagagaaggagaaaaacaggtattaaaagtctaagaattgggaggacccaggacatctaattagagtgcctaaggagattcagcatagtcctgccagcaaagattatttgtttaagagttaagagtggcagtttggggatagcaccaggagatatcagctgtgatggcttggagaaacagtgtaaaccggcagtggaaacaagagcagggcatgtatgagtagttgagaacagtgaataggagtatgactaggcagaagatagtagggatgacaagttttttggggcacagtccgagttggtctggtgtctggaatgagactggggcctaataaaaaggagcgtctatacaggagctcaaatgggctgtaccttatagcattctgaggacaggcctgaattctgagaagggaaattgtctagtcctttttaagttggtg

SEQ ID NO: 130338 - DNA, 596 bp, Homo sapiens
cctgcccgtttgctatgtacttgtaaatttcaacctacaaggcagggttcctattctggtacacagatataattcagtttgtgatcttgaaataaaaaaagaaattacacctttatcttcactgatctactaaataaaatatagtacttttttcaaccataaagataggcataaataatttctgattttgtcattaataaaaatcacatatattttaaggtcatgtttaaacgttatgaatatctcataatattgcttataatcactccttttcaaaattaccagaattaattagccccctgcttacttaattattcagtaatgtgtatatatgtattagtgtatattaatgtacatatatgtatattattatataaaatattttaaaatattttgtaattattttattacaattaagtttctgtgtgcttcattttatacatttaaaaccatctctgaaaargaggccatagacttcaaagaagtcctggatttctctactgactttctctttaattagcttagtgttaatttgctaattgggattacaaagttgttatattccccagataacatatctcattctaataaattct

SEQ ID NO: 130339 - DNA, 575 bp, Homo sapiens
gtgatgacagaaagatatttcttagattttacaacatgtatatcttctcagatcaatattcccttatctccaaagtcatcctaaaaaaaggaagcaagtcaatatttctttcagccaaaattcaaactacacattatacattctttcttagcctcatgtgcttctataattctatagaagagctttttaaaacctcgcttcaactatgcctgyttttaatttatagatattcacagattaatactttgacaggcgatacattctcatttccttttaaaagagagtattatctggttattttactggctcttttagacaatgttttgcccattccccaccccccctcacttgtaagtgaaaaggacaaataagataaatcttgcctattggtctatttccacaatcactcatcaggctccagtatcaagagacagtggggggaagctacatcttctccttaacattcttaaacgcatgggaagtgcaacgagccttttaaggctctttaaaattactttcattaaaattgctcctcacttttgagaagactaaggataaaaggaaaagaaaaatag

SEQ ID NO: 130340 - DNA, 491 bp, Homo sapiens
tattccattggtctacgtgcctagttttataccagtactatgctgttttggtgaatatagccttgtrgtatattttgacactgggtaaagtgctgcctcccaatttgctttttttgcttagtcttgctttggctctgcaggctcatttttggctccatatgaattttatgattgttttatctagttctgtgaagaatgaaggtggtattttgatggtaattgtattgaatttgtagattgattttggcagcatggtcattttcacaatattgattttacccatccatgagcatgggatgtgtttccatttgtttgtgacatctatgatttctttcagtagtgtttcatagttttctttgtagaggtttttttacctcccagtttaggtatattcctaagtattttatttgtttttcagctattgtaaaaagggttgagttcttgatttgattctcagcttggtgtatagcagtgctactgatatgtataca

SEQ ID NO: 130341 - DNA, 581 bp, Homo sapiens
atacttatggtatgtagatttctatcatttatatttgtgtcttacatcttttcctcagtttcaaacatcttcaaggcagaaacgtgttgtatttgcatgctgtttagaaggcagtgtactgaatagtaccagttttttcagagacaaatatggtgtacttatttgaaaagaaaggatgatacacatacataggtaggtaagatggggttgaaattgtttccttgaaacttagttgaagaaacttttcctgtaaaggatatgrgcatgtgttatttttttatcaggcttaagtgtggcatattttattgaatttcatatttttcataaagataaatcatttagagcagtgttttacattaaaattaatatattatggtatatgtataaattctgcatgaagtctaaagataaaacatgagaactcaaaaactatataaactgctattagctttatttgtcagtatctaagtcttcctgctatcctctcagtaggatactttagaaagaaaatgtatgaaaataattggattaagggaagtgccacagaaagggaaaaatttgacattaagcaatctaattaa

SEQ ID NO: 130342 - DNA, 647 bp, Homo sapiens
aatcttgaccctcatacgcactatttaggataattggttccaccggggtcccgttgctagaagagtaggaagtcagtcactgagataacatgtattagctgggaagaaagacttttttgygggtacttcagcctaaccattaagttcctctccccagccctctaaagttaggggtttatacaacagggaggggtaaggaagagtagctggtcaagaggcatcatgaatggctacttttgctcatcttttagtaacaaatacttagtacacctttccataggcaaaatatactcatccttactcaaatgaggcaaagccaaaatatctcatctgttcacagcttcaatctcaaaattcaagatttcagttctatgggaaaattgggccagtttcatatatacatataatttcattttttcaatcatagagtggtcaagaccctactttgtgagggttatagaatcaaagaaaatgcctgcatttggtacatagtagacagctaataaagatggatggtgtcataatgttatgttatgggccggtaaataaaagatggaaaaataggagatttcataaagagatctttgtattaagtatttttgataattttagaacctattaatagtttatacatgtatatacatgcc

SEQ ID NO: 130343 - DNA, 401 bp, Homo sapiens
tcagaatttcaggagcagtaactgctggtgtttcccatcctcttccatcagaatraaacagtttactatggtttatccccatctggccactgaaaattagatagttcccatcctcttctatcagaatgaaaccgtttactatggtttatccccatttggccactgagaattagataggcaaggggcacagaacttcacttttgagttcacaaaacttggtgtcaagagcctctatgttgaaacagatgttgatgctactgaatatcacatagaaatcttgaattttgagattgaagctgtgaatagatgagatattttggctttgcctcacttgagtaaggatgagtatattttgcctatggaaaggtgtggtaaatatttgttactaaaagatgagcaaa

SEQ ID NO: 130344 - DNA, 562 bp, Homo sapiens
atattttgtgtacagatttgcacctgtggttattaatgaaattggcttgtaattttcctgaactgtaatgtcatcgtaaagttgattccaaagttatacttgtcttataaattttcccacctttttatgtagtcttgccttcatttgtttctaaatggctttgtagatatatttctgaaggcatgttcatctcacctttactctctgtaaataattctttgatagttataaattgttcacattatgtttctcttcttgtttcatttttgctaaattatatttttaaagaaacttatctatttcaaataaatcttaatattgaacatgctatccccataacaagataaaattgacacttcctttaatattcaacctatttttgtagttttgaaaataaatttctgttccaaactgcaataaattctttaacattggatactgaatatttaaataatatttttacatttgttttaagttttaaytcatgtttttatcaattatttggactttgttttttgctgttggccatgattctctcaatgtgttcttttaaaacatattg

SEQ ID NO: 130345 - DNA, 545 bp, Homo sapiens
tttttctgatgttgtaaatgttgtcttgatagaacttctgttactaccattttaaacattttcagagcataattgattttactgtcaaaaatgttttcatggcaattgacatatctcagcctcaaaagaatgatatacgctttcaaaaatgagaaggatttggctccaatcataaaggcatttagatgtaagttgtctgattcatgatgggattttaggagttatttagttctcagtttycatgccagtaaaagtgggagggatgaggaaaaggtgatattcattaaaacacacaagctccttatcctaagaatccattagtactggaattaggtttgtatacagtccttccattttaatgtatacataccgcattccagttaaattagaaatgtaaaattttggcaaattccttttgtaatccaagcttaagtttcactgtttaaaaatattaataatgtcctccatctcttaaagggatatgttaaatattaaatgaataatacccataaagaactcaacacaatgcctgacctatggtaaat

SEQ ID NO: 130346 - DNA, 564 bp, Homo sapiens
gcaccaatcagcactctgtaaaaaacgcagcaatcagcgttctgtatctagctaaaggactgtaaatgcaccaatcagcactctgtaagaatgcagcaatcagcactctgtgtctagctaaaggattgtaaatgcaccaatcagcactctgtaaaatggaccaatcagtactctgtaaaatggaccaatcagcaggatgtgggcagggcaaataagggaataataactggccacctgagccagcagcaggaacccgctggggtgtccttctatgctgtggaagctttgttcttttgctcttcacagtaaatcttgctgcagctcactctgtgtcygcactacctttatgagctgtaacactcactgcgagggtctgcggcttcattcctgaagtcagcaagaccacgaacccaccagggggaacaaacaactctggacacgccacctttaagagctgtaaacctcactgcgaaggtctgcggcttcattcctgaagtcagcaagaccatgaacccattggaaggaagaaactctggacacatctgaaggaacaaactccggaaa

SEQ ID NO: 130347 - DNA, 324 bp, Homo sapiens
agtttcgaaggggaccccagcaggttgccactgctggctcaggtggccagcttttagtcccttatttggccccacccatgtcctgccgattggtccattttacagagtgctgattggtgtgtttacaaacctttagctagacacagagcactgattggtgcatttacaaacccttagctagacacagagtgctgattggtgtgattttacagagtgctgaytgctgtgtttacaatccttcagctagacacaaaagttctccaagtccccacctgacccagaagcccagctggcttcacctctcaactcagatatgagaaaaat

SEQ ID NO: 130348 - DNA, 539 bp, Homo sapiens
atataacaagccttatctgcttctcacaaaagttaccacccagaggaaggtttatttgcaagaatactatacaattttgcagcagaatattagagaatgttctgggtgttacttcaataagaatttccarcaaatcattttctcctaatactgttctagttcaaatccacctactgctcagtggggaatgggaggctaaattcttaaggccattcagtctacttggggcgtgagggggtgtgtagaaagccaacaatcaaacgaacaccctctcaaggcctgggtgcttctctgagagccaatgattgcaaaatgaacaatcttattaagatccctaattagcccgaattcaaaagcaaggtaggcatgctccttagctgagctaaggataaaactttccaggaaaaattgaggagaagaaggtggcagggatgatgggggctgggagactgcaaggccacaggcttggtggctggaagatgacaactatcctaaaacattcaaatgccaaggggtggaagagaaacgatgccaagtac

SEQ ID NO: 130349 - DNA, 246 bp, Homo sapiens
ttggaaaaagctcacattggccctcattaaatgaasctgagatgccagagctctcactgcagatgatggacgaaaggatcaacgaagtggtggctgaattgcagttcctatgccaaaggaggtctgtttactacagcagactaacacaacctcagctatgtggtttgcaatttatttctgatctgccaaacgtgttctttccaatactgttgtttgtttcctgggactgccataacaaattaccac

SEQ ID NO: 130350 - DNA, 246 bp, Homo sapiens
ttggaaaaagctcacattggccctcattaaatgaagctgaratgccagagctctcactgcagatgatggacgaaaggatcaacgaagtggtggctgaattgcagttcctatgccaaaggaggtctgtttactacagcagactaacacaacctcagctatgtggtttgcaatttatttctgatctgccaaacgtgttctttccaatactgttgtttgtttcctgggactgccataacaaattaccac

SEQ ID NO: 130351 - DNA, 393 bp, Homo sapiens
ggattctttcttctgaggaggcaagagtggaagttgctgyagatccacgtggatttgccatcggtaacacactttggtgccgtgtggctcagatacattccccagtgctaacaatttcactactagtaaagccacgcacgttgctcctgctgctgtgtcattcccgtattggctagggttagaccgcacaggctaaactaatttcgattggctaatttaaagagaatgatggggtgagtactttggcgggagtcagggcagagcaggtagcacggaatcagaatgagtcagggtggagcaggtgattgaaatgagtcagggtggagcagataatcaaaaaaggttgctttatgaggaagttaactttaaaagtagaaggcacagaattgaaca

SEQ ID NO: 130352 - DNA, 603 bp, Homo sapiens
ccaaagtcagtagctctttctttaaaaggagtgatcttaccttcattgaagcagatgtcaatgaagcaaaatttcaaaatattatgaaggcagttcaaatgtcatctttgtagacttagggagtcagatatatatgctactttaagctctcaggtagctgagcttagcatgtgttttaaagcactggtaaagtcgagttttaaattttagatccaagtctatgtaggcagccctsaattagttgtttcagtttccattttcattcagggtcaaagcagtagtatgagtgaagaagagagaggagtgaactcatgtgtttgtatataggcatatgagctatcaccaatctgagtttcaacttagctctatattaactaataacatatgaaggatgaatcattttttatgaaatggatttcttagacctaaggatttccataccaagtggcagcagatacactcactgttaactcagttcaaaactcaactctccaaatagtttgaactacatgtaactaaatccaatctaagttcagtttactactccaggggtgccagaaacacagggttaaaagtaatgactattaatatcttttaaatata

SEQ ID NO: 130353 - DNA, 596 bp, Homo sapiens
ctatactgctttctgatataatttcccttaaaatagaaaacatattttagtctctcttattatgtggacctgctggcaatgaattatccaaagtgtcttttatttgagtattcactttcatttttcaagggtagttttcctacatgtagattctatattgaccttttaaaaaatttaarcaatttaaatccattgttccatcaacttcttgtttgctttgtatacattgattagttatgtgttactatttttatacttctgcatgtgatatatagttttttttgcagctcttaaaattcttaaggctttttaaagtaattttgctacattatagttaagtataatgtgttttctgttttgatttttttgttttttagtttatttgattttggctttttagaggttctcggatatgtgggttggatttttttttttattaaaatggaaaaatttagctatattacttatgcaaatatttgtatcctttgttctcttttccctctcttccttcctggaactctaattgtgtgtatgttattcattttgatcatgtctcacatgatatcatgtattggttccttttctcctataatttc

SEQ ID NO: 130354 - DNA, 596 bp, Homo sapiens
ctatactgctttctgatataatttcccttaaaatagaaaacatattttagtctctcttattatgtggacctgctggcaatgaattatccaaagtgtcttttatttgagtattcactttcatttttcaagggtagttttcctacatgtagattctatattgaccttttaaaaaatttaaacaatttaaatccattgttccatcaacttcttgtttgctttgtatacattgattagttatgtgttactatttttatacttctgcatgtgatatatagttttttttgcagctcttaaaattcttaaggctttttaaagtaattttgctacattatagytaagtataatgtgttttctgttttgatttttttgttttttagtttatttgattttggctttttagaggttctcggatatgtgggttggatttttttttttattaaaatggaaaaatttagctatattacttatgcaaatatttgtatcctttgttctcttttccctctcttccttcctggaactctaattgtgtgtatgttattcattttgatcatgtctcacatgatatcatgtattggttccttttctcctataatttc

SEQ ID NO: 130355 - DNA, 610 bp, Homo sapiens
gccaaaaatgtatattaactctaaagaataaatatttctgagttaaggaagtgttcttaataaacaagcataccaatgagatgctatttttaagtaaatacaaattcttctctttttcactttattttgcatgacattacattagctagcctgagttatccagctgacacaagttatatgacgttgtgattagggttttwtttttttgagatagagtcttcctctgtcgcccaggctggagtacagcggcacaatctcggctcactgcaacctccccttcctgggtccaagcgattccactgcctcagcctcctgagtagctgggattacaggcatgcgccaccacaccaggctaatttttgtatttttagtagaggcagggtttcaccatattggccaggcttgtcttgaactcctgacctcaagtgatccacctgcctgagcctcccaaattgctgggattccaggcatgagccaccgtgcccagcttgattaggatttttatagcaaaagtaatatggattgaaatattttaagtttttgacattcaaaatagtattagctctcaatgtaacagaatttaaagccagtttcactaagagaagacatg

SEQ ID NO: 130356 - DNA, 657 bp, Homo sapiens
taagtcaattatagcaataattagaccaaattaaatggtacagatttcaaattttaaagacagagcatgtaatatttgatttaaaaatcaagcttcatctctaagctgcctccaagaaatcacctttagctagatatttaactagaggtttaaaaagaatggaaaaatacggatcwtgcagtcattaattaggagacagacaaattggctttattaagatcagaagatgcaggcttcagaacagtagggatgaaaagggtgttcacataagaagtcaattcaccattaatacatagtaatcctaaatgtgtattaacctaatacagagattctatattcataaggcaaaaaccatgtgaaactgaaatgaaacagagaagtatacaattacagttggaaacttcgctattcccttcccagtaattgatagaacagttagccagaatatcatcaagaatatataagatctcagcagtattatcaatcagcttggcctaattgacatctattgaatattccactcaagagcatcagggaaactattcattttagtgtgcaaggaacattaactaaaataaaacatattctgaggcatcaaacaaatgttgacatagttttaaaaagtgaaatcacaccaagtatcagctctaattagat

SEQ ID NO: 130357 - DNA, 657 bp, Homo sapiens
taagtcaattatagcaataattagaccaaattaaatggtacagatttcaaattttaaagacagagcatgtaatatttgatttaaaaatcaagcttcatctctaagctgcctccaagaaatcacctttagctagatatttaactagaggtttaaaaagaatggaaaaatacggatcatgcagtcattaattaggagacagacaaattggctttattaagatcagaagatgcaggcttcagaacagtagggatgaaaagggtgttcacataagaagtcaattcaccattaatacatagtaatcctaaatgtgtattaacctaatacagagattctatattcataaggcaaaaaccatgtgaaactgaaatgaaacagagaagtatacaattacagttggaaacttcrctattcccttcccagtaattgatagaacagttagccagaatatcatcaagaatatataagatctcagcagtattatcaatcagcttggcctaattgacatctattgaatattccactcaagagcatcagggaaactattcattttagtgtgcaaggaacattaactaaaataaaacatattctgaggcatcaaacaaatgttgacatagttttaaaaagtgaaatcacaccaagtatcagctctaattagat

SEQ ID NO: 130358 - DNA, 537 bp, Homo sapiens
cctttcaacttcatattttaattaacttgaaccaacatttggaacttctcacactctgctaaaccctgggttgaataactatacgtgtcatgtttcaaattaatagtagtataaaactcaagagagcagatgcaaaagtactgttgagtatgttaggaagtggttgaactgatgagcaactgagtagatrgcatgattatgtcagccttctgctatcagtttcttggctagttccatagaatactaagctgatattaaagttgaaaattgtttccttttcttactgtcttaaacctaacttaagtgctggtttcctgtggttaccacctggctctccatgaatcatattcagactagaggagcatagattgcaggatttaatttgaagtgtgatgatagtttaaaatatacaaaaatcatcaagttcccagaaaaagtcaaccataaaaaaacttgcattttatttctatcaaacttttaaaaggaagataaagtaaatgtactatatgtgtttaataattttattttattcattct

SEQ ID NO: 130359 - DNA, 602 bp, Homo sapiens
gcatttaagaacttgtgactatgtaaaatctactttccttatctattaatgcatgaatttaaattatattattaaatttccatattattagtacttattttatcattttatttcatgtgtcctatttactgaatttaatatttgaataatagtttttcttgtaagatttcttttggatgatacgtgttttgttctgctaaattgaaayttgtactttgtactttttctttgttcatagtctttaactgtagcgtcataccccacatctctttaccactagtgagttaagattatcagcaactgtattgtcttcctaacattataaaatattttaaaaaggtttcatgtttgtttggctcctcaactcctcattttaccaactggaagcaaacacactccaatatacacttttaattcattacactgaacctgagaaaacaaaaagtttaagtatacttttaaatgaaactacaaattagaagagtaaaccagggtaaatgattttcaaatcagtaaaagaaggtgaactcaatacaaaatgcctctttctattctttaaaaagcttcattaaaatataattgacatacagtccttaagtccc

SEQ ID NO: 130360 - DNA, 602 bp, Homo sapiens
gcatttaagaacttgtgactatgtaaaatctactttccttatctattaatgcatgaatttaaattatattattaaatttccatattattagtacttattttatcattttatttcatgtgtcctatttactgaatttaatatttgaataatagtttttcttgtaagatttcttttggatgatacgtgttttgttctgctaaattgaaatttgtactttgtactttttctttgttcatagtctttaactgtagcgtcataccccacatctctttaccactagtgagttaagattatcagcaactgtattgtcttcctaacattataaaataytttaaaaaggtttcatgtttgtttggctcctcaactcctcattttaccaactggaagcaaacacactccaatatacacttttaattcattacactgaacctgagaaaacaaaaagtttaagtatacttttaaatgaaactacaaattagaagagtaaaccagggtaaatgattttcaaatcagtaaaagaaggtgaactcaatacaaaatgcctctttctattctttaaaaagcttcattaaaatataattgacatacagtccttaagtccc

SEQ ID NO: 130361 - DNA, 602 bp, Homo sapiens
gcatttaagaacttgtgactatgtaaaatctactttccttatctattaatgcatgaatttaaattatattattaaatttccatattattagtacttattttatcattttatttcatgtgtcctatttactgaatttaatatttgaataatagtttttcttgtaagatttcttttggatgatacgtgttttgttctgctaaattgaaatttgtactttgtactttttctttgttcatagtctttaactgtagcgtcataccccacatctctttaccactagtgagttaagattatcagcaactgtattgtcttcctaacattataaaatattttaaaaaggtttcatgtttgtttggctcctcaactcctcattttaccaactggaagcaaacacactccaatatacacttttaattcattacactgaasctgagaaaacaaaaagtttaagtatacttttaaatgaaactacaaattagaagagtaaaccagggtaaatgattttcaaatcagtaaaagaaggtgaactcaatacaaaatgcctctttctattctttaaaaagcttcattaaaatataattgacatacagtccttaagtccc

SEQ ID NO: 130362 - DNA, 602 bp, Homo sapiens
gcatttaagaacttgtgactatgtaaaatctactttccttatctattaatgcatgaatttaaattatattattaaatttccatattattagtacttattttatcattttatttcatgtgtcctatttactgaatttaatatttgaataatagtttttcttgtaagatttcttttggatgatacgtgttttgttctgctaaattgaaatttgtactttgtactttttctttgttcatagtctttaactgtagcgtcataccccacatctctttaccactagtgagttaagattatcagcaactgtattgtcttcctaacattataaaatattttaaaaaggtttcatgtttgtttggctcctcaactcctcattttaccaactggaagcaaacacactccaatatacacttttaattcattacactgaacctgagaaaacaaaaagtttaagtatacttttaaatgaaactacaaattagaagagtaaaccagggtaaatgattttcaaatcagtaaaagaaggtgaactcaatacaaaatgcctctttctattctttaaaaagcttcattaaaatataatygacatacagtccttaagtccc

SEQ ID NO: 130363 - DNA, 489 bp, Homo sapiens
ttctcgctcagaattgtcttgatattatgcccttatatgcatttcaagcacagtgccccattgcagactctcatcatcactcacctggcctccccatgttttcctggtcttacatgtcttccatttatactaactgatactaattcaaaataatagaaataactaatacattcctttcctcaaatatttttattggctctcattttggtatcaagtgcaaaactggtcaactctggatttaaagggcttacaatctaagcacaccctaaaacactggtgcttggtagttcagcccctaccaattacaacgaacattagacattatttttatcaaagttctaaacttttaaaaatttacttagcctatttccaaatattctaaattttcttcaccatttctataattctataaacaaaacactgattcatwttttttgttgtgcttttgcatttctcccatctgccaaatccacattcatttatgtaaac

SEQ ID NO: 130364 - DNA, 590 bp, Homo sapiens
ctattaattacatatacgctcctctttagcatttagttcagaagttattaaatactttaacatttctacagaaagtagttgacaggctcgtgaaatggattgagaaatgcatgagttgaaactgttgaatgaagacataaagttaaccaacaacattgcgcttttcatctgaagacaaatggsgcataaaactgcgtaaagaacatagttctagctatggctgtaactggaaataatgttcaatgcaatgtgaagtcaagtacatatcttagatgtggggaaaaattaatattattataaaaaacctataaaataaaattagtatgttccatacacactgaaaataagatttatatgtattttgtttgtgtctggaaaccagtatagccgaaagtgaagtggcctgtagaaattaaatcaaaatgaatatgtaaataaacaagcaaacatcaaaaagtgatgtaattatgctctatgaaaatattatagtaaaatataatttgtggtttgggtacaaaaataaaaataaagaaattatataatctgacagccaccttataaagatggataagagatataattaaaaaatg

SEQ ID NO: 130365 - DNA, 543 bp, Homo sapiens
atacaccaaggcaaaaagtttcctgcttgccaataaatgcaaaaattactcctaacaccctaaaaccaagaactatgagaaaaatgccatgccaaaacttgaaagcacgagactgacagagaagagagctacagaaataaaagtgagccgagttctaaggaaggaaaggcaccgaggagactctgatatatacattcggaagtctcagatgataccaggctaactttagtttctgtctctaaaaactacaaagtagaaactgttagcctcactcaccctagcccagtacttggttctcaaacaccttaggggctctcaatctttgtatggaaccactatgagctctgatrgctcagaaaattccagttcctaaatgcgtctgctgtgatggcctcaggcaaggctctcgcctggagaaggctggctcccaggctgtgcttgcattttcaaggctctaacttggaaagcgcaggggtatgctcttcagcttatcgcgcctcttattagtttgtcacacagtgtgggataatcatttcaatatta

SEQ ID NO: 130366 - DNA, 535 bp, Homo sapiens
tttttcttgacttgtctttttcttttcttttctttctttctttatttttgtgacaaagttttgctctgtcacccaggctggagtgcagtgccatgatcacagctcactgcaacctctacctcccaggyccaagtgatccttccatctcagcctcctaagtagctgggactacaggtgcatgccaccacacaggctagtttttgtattttgttgtagagacagggtttttccatgttgcctaggctggtatcaagctcctgggctcaagtgattctctgtccttggcctccaaaagtactgggattatgggcctgagccatagcacccaggcgaaagcttcttcttataccgatttaaatttccaagtcctatgcatcatagtatacagtaaatattattaatgcttccaatgagaaaacacatataataagcaagaatattcaaatattttcatttcccccacaaaatgtcaccacccactcaacaagggctacctactcataaaagggaagatatcaaattccccttataggat

SEQ ID NO: 130367 - DNA, 535 bp, Homo sapiens
tttttcttgacttgtctttttcttttcttttctttctttctttatttttgtgacaaagttttgctctgtcacccaggctggagtgcagtgccatgatcacagctcactgcaacctctacctcccaggcccaagtgatccttccatctcagcctcctaagtagctgggactacaggtgcatgccaccacacaggctagtttttgtattttgttgtagagacagggtttttccatgttgcctaggctggtatcaagctcctgggctcaagtgattctctgtccttggcctccaaaagtactgggattaygggcctgagccatagcacccaggcgaaagcttcttcttataccgatttaaatttccaagtcctatgcatcatagtatacagtaaatattattaatgcttccaatgagaaaacacatataataagcaagaatattcaaatattttcatttcccccacaaaatgtcaccacccactcaacaagggctacctactcataaaagggaagatatcaaattccccttataggat

SEQ ID NO: 130368 - DNA, 615 bp, Homo sapiens
cttccagctaccggttctccataaaatactttaataacccaataaattttaaaaaccaatcctttggccaggcacagtggctcatgcctgtaatcccagcactttgggaggccaagatgagaggatcacttgaggccaagactttgagaccagcctgcacaacatggcgagacccccgtccctacaaaaaaattgaaaattagttgggcatgacagcatgcacctgtagtcccaactacttgagagactgagatgggagaatctcttgagcctgggagtttgaggccacagtgacccatgatcatgycactatactccagcctaggtgacagagcaagaccctgtctcaaaaaataatccaaaaccaataatttctaaaataacaaatgaaagaaaaacaagcaaaggaaatatgttatatacaataattccattatgtaaagtgttaatgattaattgttacattgggctaattggaataaaattttgtaaaacagactataacagctcacatgcacagtattaaccttccccccagaatgaacttcattacatagtgaaaagagtaaggaaactacacttagatttataaaaatgcatgcctttgtaaaatta

SEQ ID NO: 130369 - DNA, 569 bp, Homo sapiens
cgcatttcttccacccttggaaaaaagtagataactagttctgtatttctttgctatttgtttcaaattcttaatcccttggagatagattctgtttaaacttaggtcccttgtctgacctttggctttatctagttggaaagaggaaaaagttcagtaaaaatatacttcaaggacccttctgctcagagaagcacttgagctttctatttcacaaaaaaaatggggactttcattacttagtgctagatgacagagaaagcacaaatgtataagcacttatcaatgttctgcttaagtcctgtttgctaataattgcattaggaaaggtaagttgttgggccaagcccagatgaaaggaattgataaatagattatacttcttgatgagaaaaattatgaagcccaacaaaatggaaacatgaatacatggatggaaagaatgtgtatccttctttygcaatttgtcatacatatatcaatacattgttttatggcccatattcattctttcactagatgttttccaacacttatttttgtatcagacactatattgggcaattaag

SEQ ID NO: 130370 - DNA, 559 bp, Homo sapiens
gttataccaccagctccaccatcccccaaccaaaccccatgaaaaaatatattagaggaccatcagagttctgtttcagtaagctttgtttaaacaagtgctttggtgtgtttttycactgtcggagtaggttgcaggaagcatgggtgactgaccacgaaacatcgtgccttgtcttaggactaagattccaccagatggctgggaagatggtctgcaggtccacaggctgtagaaagagcaggatggccctggcagataggtaggttctgcctccttgagatatgtatatatatgtatacgtatgtgtgtatgtgtgtgtatatatatgtgtgtgtgtatatatatatgtgtgtgtgtatatatatgtgtgtgtgtgtatatatatatgtttgtgtgtgcatgtgtgtctgcgtgtgtgtgagtgtgcttgaatcctattttcttctttgagggagcccccaaaaattcatcaccacagtatcaaggattagagcaactgatgaaattttggacttatttcatgttgtttctaattaaagtggccataggaatctcc

SEQ ID NO: 130371 - DNA, 559 bp, Homo sapiens
gttataccaccagctccaccatcccccaaccaaaccccatgaaaaaatatattagaggaccatcagagttctgtttcagtaagctttgtttaaacaagtgctttggtgtgttttttcactgtcggagtaggttgcaggaagcatgggtgactgaccacgaaacatcgtgccttgtcttaggactaagattccaccagatggctgggaagatggtctgcaggtccacaggctgtagaaagagcaggatggccctggcagataggtaggttctgcctccttgagatatgtatatatatgtataygtatgtgtgtatgtgtgtgtatatatatgtgtgtgtgtatatatatatgtgtgtgtgtatatatatgtgtgtgtgtgtatatatatatgtttgtgtgtgcatgtgtgtctgcgtgtgtgtgagtgtgcttgaatcctattttcttctttgagggagcccccaaaaattcatcaccacagtatcaaggattagagcaactgatgaaattttggacttatttcatgttgtttctaattaaagtggccataggaatctcc

SEQ ID NO: 130372 - DNA, 543 bp, Homo sapiens
attttatgctacaaagccgctgcttctctctctgctctggtattttcttttaggggtatatgtatgaatatgtatgcatgtatatgcayttatgagtacacatgaataatggtgtctggatgtctatagacagataaaattgtgtatgtatgtctatagatacagatatatagaagaagaacagaaaatgacaggctccagacaggtgacagaaaagggggcaggtgtctttagcatttgttgaggtgggcttgttactttcaccttcccaaacatgggctttgccagtcaatgtcattgacatttggctttgcctgtggatagcagcagctatccctggctcatctcttggtgtaatgtgctgagggctgagaagggactagcacgtgggtgggcatgctgtctgctcatttctgaagtttgcctcctggttgtcactcttacatctttgagctgcccgtaagctcccagggaggctaagcaatggtagcttaattacagaggctgttatttactagggcctcagctgaatccatcaaacta

SEQ ID NO: 130373 - DNA, 541 bp, Homo sapiens
agagtgcctgcccaagacttcagcttagtttgcacaactgagaacacctcctttcttctccaccatcaggctaacaatctttgaggacaagtaactagagtactgctggctaagttgtaaaagcatgggaagagatcttctctgaagcacagcacaaagaaaagacccaaagctgaggatggagtagacaattgccaaacttctgagaaacctgtcctcaacctaagtgcagggtaccaatagagaaatttgaaacttatgatacactgatggtagtcaaagcaacagtgaacacccaaaccagctaaattcctaactagattgtctcagacttttgcactaagaacctcacagaaaaaatggatgtccatttccatgcaaaaaaaaaaaaaaacaacaatttacctcacttcaatatttactgccctacaagagataccagcctttcaacaaaaatttgtgaaaacccttgcatttgraaaagcaaggaaaaaaatctcaacatattaccaagccaaggcaattaacagaaccaggctca

SEQ ID NO: 130374 - DNA, 519 bp, Homo sapiens
cagaactatcttcttgtagctgcatttttttttctamgtcactaatctgtcagctgttacagtatttttaattatatttttccaatatttcttttcttgtcatcatttttaatttacatgcatatattatttttatgatgaagcataggggtggctgtatgttatatgctatatagttacaaactttatagagattttgcctcttgaatttcacaatgcaatagcaattcttctacgctgcccagatttatgtagagaagaggccattaggaagaacttggacccatgttggtaggctctgaaggttgtatctcaatcaatcattgccacagaaaatctagttctgattttgagcctttgtattttacactgctatcctgggcagcagaatacttccacaaagcatttagaatgtgggtctttggtagcaaactgtcttcaaggtcataactacaacaaaccaaatttctggcatcaagtgccatgggacatgatgaataccctgggttgaggggaggt

SEQ ID NO: 130375 - DNA, 519 bp, Homo sapiens
cagaactatcttcttgtagctgcatttttttttctaagtcactaatctgtcagctgttacagtatttttaattatayttttccaatatttcttttcttgtcatcatttttaatttacatgcatatattatttttatgatgaagcataggggtggctgtatgttatatgctatatagttacaaactttatagagattttgcctcttgaatttcacaatgcaatagcaattcttctacgctgcccagatttatgtagagaagaggccattaggaagaacttggacccatgttggtaggctctgaaggttgtatctcaatcaatcattgccacagaaaatctagttctgattttgagcctttgtattttacactgctatcctgggcagcagaatacttccacaaagcatttagaatgtgggtctttggtagcaaactgtcttcaaggtcataactacaacaaaccaaatttctggcatcaagtgccatgggacatgatgaataccctgggttgaggggaggt

SEQ ID NO: 130376 - DNA, 612 bp, Homo sapiens
aactcttgacatacttgcagctcttccagcaagcactgggacttaatattacagacctagaagagttgatctcccctggtgatagcaatstgcctttcaattttgctgtcttgaatagccagctgtgagtctttatataacatttcacagtcccttaattaccgcatgacaacctcagggttgctaatcctaatactgttctgaagtgagggacttgcgacatatcagcagtttaatacaactctttctgtggttaatcatgtttggtggaaaatatagctcttcccaaacaccgtgaactgctaaccttaaaatgttcagataaacttttgcttttgccctacatcaatggagagaaatagcctcttgtgccctggctgataggtgcatcatggatgctaaatatataacaaaaagctaaataagagagaaatgtagagaaaaaagtggagaaaaactggcaggaaaagattcctcagatgatttgttgtactgctcaagcttagcatgctattcttttcttggtagaaactggatcacagatgcagctttcccaggccatgcaatgatgcaaaaggactaagtaggccttgatggtcttaatatggcagc

SEQ ID NO: 130377 - DNA, 612 bp, Homo sapiens
aactcttgacatacttgcagctcttccagcaagcactgggacttaatattacagacctagaagagttgatctcccctggtgatagcaatckgcctttcaattttgctgtcttgaatagccagctgtgagtctttatataacatttcacagtcccttaattaccgcatgacaacctcagggttgctaatcctaatactgttctgaagtgagggacttgcgacatatcagcagtttaatacaactctttctgtggttaatcatgtttggtggaaaatatagctcttcccaaacaccgtgaactgctaaccttaaaatgttcagataaacttttgcttttgccctacatcaatggagagaaatagcctcttgtgccctggctgataggtgcatcatggatgctaaatatataacaaaaagctaaataagagagaaatgtagagaaaaaagtggagaaaaactggcaggaaaagattcctcagatgatttgttgtactgctcaagcttagcatgctattcttttcttggtagaaactggatcacagatgcagctttcccaggccatgcaatgatgcaaaaggactaagtaggccttgatggtcttaatatggcagc

SEQ ID NO: 130378 - DNA, 531 bp, Homo sapiens
tcttcacaatgcagccagactgatcacaccaaaacacaaatataataatttcaattcccctactaagccttttcagtggcttcccactccccatgctaaactctcacctggacttccgggccttcctactcacctcttcagagtcatctctcaccatcctctgcctggccttctctttcctcactcttcacccttctgtttctgtctccaacttaacatcccctctccctcgcccacaggcctctgctactgtccaggacacctctttgtccctactttctcacatttrtctacctcatactttcggcttcaacttaaaaatatttccttgagggcttttccctgatctgtaaatgagtttaggtttctactatatgttagacttcgccttcataatgcttatcacattttattatttttatttacttatttgtcttcccagccaaaccataaactctgtaaggacaactgtgtctttcttgcttgtcattgcattctctgtgcctaaaatagtgtctgggtgtagagtta

SEQ ID NO: 130379 - DNA, 598 bp, Homo sapiens
tatgtatgtctcctttgctctgcactgcgaaagcccacaacctcacacttcatacatcttaggttcctcataaatattttgggtatgaataaatagctattcttcatttattctctctcaccttttcttatctctatttcctcatattgatggttgagcccccatcctcactgttcctgcttgctttcctcctccattcgaacagtatcaattgaaattattagtgacataaaaaacagacagggaattttaagctgctgactttgtggcattgaatagactgagctcagcagcayggcgccagaagcaatctgcaaccacctttggaatacacccccttccaatcaccgcagattataaacatcatcagctatgttgtctcccaaggttatggcaaaacttaaactattttttgttaatagtaaatgcccctcgttctcttataattagtcactgtggaattttagaaaggtcatttggttgaaatatgaggctgcaatttgtttaaaaaggaaaaaggcagaggaaattatccttccatgatgcattagcccaggtcacagttaccccaggcattccgagtctatgttgtaaacag

SEQ ID NO: 130380 - DNA, 593 bp, Homo sapiens
tggcctggtgttgaatgctgaagcatgtttgcagggaacatacagtattaatgagcacatacattattttaatataattatccaatgtcttagaggaataaataagcatagaactaattggaaggtggaaggtcaaaacgaatgatgtatgatgagtgcatttagaaaagaggccacggttgtatttgttctgtgtcattgctctctaatagagttttctgtagttatagagatattctatgtctgcattgtctagcgttggagccacttgcccatgtgtggctactgagaacttgaaacrtagctagtgtgactaaaaaactatttaatcctaacaatgtgaaatttaaatagccacatgtggctagtggctattacatgggatagaacagttttaaagcatgatagaaacatcaacattttcaccaagagagaaatttctttggttgtgtgtgtgtttaacagggtctcactttgtcacccaggatggaatgcagtggtgaaatcacagctcactgtagcctcaacttcccaggcccaagtgatcctcctgcctcaaccccacaagtagccaggactagaggtatgtgcca

SEQ ID NO: 130381 - DNA, 579 bp, Homo sapiens
cgtttttacaccaatgccatgctgtttgaattacaataagcttgtatatatcttgacatcaggcagtgtcatgtctctagctttgttctttttgttcargattaatttagctgtttgggcattttctttgttccatataaatcttaggatttttcctatttctgtgaaaaatgacattggtgttttgaaagggattgcattgaatctgttgagtcctttgtgtaatatgatcactttaaatatattattcttcctatccatgagcatcaaatgcctttctatttgtttgtgtcctctttagtttctttcatcagtgttttataggtttccttgtatttttcagtattttttgtagctattgtaaatggcagtgttttcttgatttttttcttaactagttcattatttgtgtatagaaatgctactgatttttgtatattgattttgtatcttaaagctactaaatttatttatctaagaggtttttgttatagagattttaggtttttttagatgtaagattatgtcatcttccaaaaaagataatttcattttgtcttgtttgagccattagagaaa

SEQ ID NO: 130382 - DNA, 551 bp, Homo sapiens
tcacactgtattagtcagggttctctagagggacagaactaataggatagatgtatatataaaagggagtttattaaggagtattggctcacatgatcacaagayaaggtcccacaataggttgtctgcaagctgaggagcaaggaagccagtccaagtcccaaaacttcaaaagtagggaagctagcagtgcagccttcagtctgtggttgaaggtccaagagtcccaaagctgaagagcctggagtctgatgttcaaggacaggaagcatccagcatgggagaaagatagaggccagaagcctcagccagtctattccttccatgttcttctgcctgctttttattacggctgcattggcagctgattagattgtgtccacccagattgagggtggctctgtgtctcctagtccactgactcagatgttaacctcctctgccaacaccctcacagacacagccaatagcaatactttgcatctttcaatccaatcaagctgacactcgatattagccatcacacacacacatcatcagaccgtacctct

SEQ ID NO: 130383 - DNA, 561 bp, Homo sapiens
tctggtggtgtgaaagttgagttccttattatttatttttcttcttcagaattggcacattcattgtcacactgtattagtcagggttctctagagggacagaactaataggatagatgtatatataaaagggagtttattaaggagtattggctcacatgatcacaagacaaggtcccacaataggttgtctgcaagctgaggagcaaggaagccagtccaagtcccaaaacttcaaaagtagggaagctrgcagtgcagccttcagtctgtggttgaaggtccaagagtcccaaagctgaagagcctggagtctgatgttcaaggacaggaagcatccagcatgggagaaagatagaggccagaagcctcagccagtctattccttccatgttcttctgcctgctttttattacggctgcattggcagctgattagattgtgtccacccagattgagggtggctctgtgtctcctagtccactgactcagatgttaacctcctctgccaacaccctcacagacacagccaatagcaatactttgcatctttcaatccaa

SEQ ID NO: 130384 - DNA, 565 bp, Homo sapiens
ttgttcttctctatgaccttgaagtcaagaggcatcatttctcattttgcagcatgctctggggacttgaccaaaacccagagtcttgcagaggtcaatgtgytcaccattcttgcctgagcaatgcctggcctgaagaaggatgataaatgggtacaaaatagaaaccatttttaacgttctaatttgttaaataggttattagaaaaaaagaacgatctagcaggagttgacattacaaatatcagattctggtgattctttatatttgatcttttctgctgaacatgcatggaaccgataagtttgttttgtgtgtgtgaaaagttcctctaataaacttttcatctcttattttaagcagcaatttccatttgtaaatttatcttctaagttttcatcatgttgtcagtcatgtaacagtaatttcttaaagtcccttccttggagtttcttgaatgcatttaagtattattttgaaaatatatttaatttgcctaaatgtggtatggatgaaaactgtgatggtcatttattttgaaaatctttaataaattagaaatat

SEQ ID NO: 130385 - DNA, 627 bp, Homo sapiens
aattacagttgtcttctcaacccctaactaaactgatggtaaatggtggacgacaacctgaaatcttatccctgtcttcatgtatcagttatctgttattgcatgattaacttatataaaaacctagtggcttaaaataatatttattcacctaagrcatcagtgagcctcttgcgtagttctcttttattttaaactaaaatcagctgtgtgtcattttagcctccactaattttgtctggcttctgctggggctcattcacatgtctgatgattggctgactgccattcttgggtgactgacatgactaggacacctctcttgcatcatccagtaggccagttttgttttgcattcatagcacagcaggagtacaagagaaaaattggaaggactcagatctcgtagggcctaagcttgcaagtggcacacaacttcatactgcaggccagattaagtcatgtggccggcacagagacgaggatgggaaaagagaatcaccttttgatggaagttgaaaactcacattaaatagggtgtacatacagggagagatgaaacattagaaaaatttctgcaataaatctacaacacataatttgggtaaaactgtgcaattttgttgt

SEQ ID NO: 130386 - DNA, 566 bp, Homo sapiens
gtaaatgattaacattaattgagtaaaacatgtcaccctccataaagtgagtggacctcatccagtcagttgaatgccttaattgaaaagactgaggttcccacaagaggaagaattctgcctctagatcatgtttgatttaatgttgagttgcaacatcaactctttctggaatttccagcctgctgggctgttctgcaaatttcacrcttgccagcaattgagtgaactgatgccttaaaataaatcaatagattagatagatgcatagagagagcaagcgcgcgagggagagatgatagatagatagatagatagatagatagatagatagatagatagatggatgatagatagatagcgataggcagacagatgcttgtcctatttgttctgtttttctggagaacactgactaatatataagaataggagacaaaaatagagtacagggaacatatagagtgagatattttttaaatgtatctttttatttaatttcagtttataataactactggcatcaactattcaaaaatgaattaatgagaaaaaatgtaaaaata

SEQ ID NO: 130387 - DNA, 566 bp, Homo sapiens
gtaaatgattaacattaattgagtaaaacatgtcaccctccataaagtgagtggacctcatccagtcagttgaatgccttaattgaaaagactgaggttcccacaagaggaagaattctgcctctagatcatgtttgatttaatgttgagttgcaacatcaactctttctggaatttccagcctgctgggctgttctgcaaatttcacgcttgccagcaattgagtgaactgatgccttaaaataaatcaatagattagatagatgcatagagagagcamgcgcgcgagggagagatgatagatagatagatagatagatagatagatagatagatagatagatggatgatagatagatagcgataggcagacagatgcttgtcctatttgttctgtttttctggagaacactgactaatatataagaataggagacaaaaatagagtacagggaacatatagagtgagatattttttaaatgtatctttttatttaatttcagtttataataactactggcatcaactattcaaaaatgaattaatgagaaaaaatgtaaaaata

SEQ ID NO: 130388 - DNA, 208 bp, Homo sapiens
tgaatctggagatctaaagcttctatcagctactgccctggcaggtgtaaacagtttggccaagtactctgttgggatagactcactgcacctagttttgcttttctacatcatgccaccttattaaactcatttattagtccttgtagataatcttgttgggttccaccagatcttctaaayagacagttttattttctgaaaataa

SEQ ID NO: 130389 - DNA, 564 bp, Homo sapiens
gggtgggccctaatccaataggattaaagtcattatgagaaaaggaagatcgctttctctttcctttctctcccttatatgaggacatagttagaaggaggctgctatgtgaaagctctcacaagaaactgaatcaactagcacctagatctgggacttctatattacttagggttctccagagagacagaccagtaggatagatatagatacaaatatatatatatataaaaagatgtagctataaatctatgagaggtgattttttagcagaattggttcacaagattatggaggctaagtccaacaataggttgcctgcaagctgaagaacgagggaagctggtagcatggccccatccaagtccaaaagcctcagaacctgggattaagaagctaatggtataactttaatctgagatcaaaggcctgagagcccagggggctgctgagttaagtcctagagttcaaaagccaaaraacctggagttctgatatccaagggcaggagaataagggttttccagctgggccaccagccagttgggatggttcccacctaag

SEQ ID NO: 130390 - DNA, 579 bp, Homo sapiens
aataatcactgtaatatttgcaccataatgattttcaactgtgcacagttcttatgcatcgttatctcattttatttgctgtgtcagcagtagcagtagcaaatcatgggactttacccctgtcctgacagtcgaacgctttttgagatgagagtccacgaataagaacctcaaccctattcagtcactcacaaagataaagaaacgttatttttatcttggtacagaaaaaaaaaaaaamaaaactggtgcactgcagggaccttcacccagtctatagaaactaccacttcttactccagcctgacttctgcatagccacacagccatgcaaataaggcatttcccaggagaaaaaatgcaattttaaaaatagaagagataatagaagacaatggaaaagaatcatgtgtcactcctttcccttattctctttttctgtaacactcagtataaatgctgaaaaaaaagaacccaaacttctacaaggaagaattcacaattctcaggcataaatctctagtcaggcagatactctatctcattctaagcaagagtggcacctttgggagataagaa

SEQ ID NO: 130391 - DNA, 579 bp, Homo sapiens
aataatcactgtaatatttgcaccataatgattttcaactgtgcacagttcttatgcatcgttatctcattttatttgctgtgtcagcagtagcagtagcaaatcatgggactttacccctgtcctgacagtcgaacgctttttgagatgagagtccacgaataagaacctcaaccctattcagtcactcacaaagataaagaaacgttatttttatcttggtacagaaaaaaaaaaaaaaaaaactggtgcactgcagggaccttcacccagtctatagaaactaccacttcttactccagcctgacttctgcatagccacacagccatgcaaataaggcatttcccaggagaaaaratgcaattttaaaaatagaagagataatagaagacaatggaaaagaatcatgtgtcactcctttcccttattctctttttctgtaacactcagtataaatgctgaaaaaaaagaacccaaacttctacaaggaagaattcacaattctcaggcataaatctctagtcaggcagatactctatctcattctaagcaagagtggcacctttgggagataagaa

SEQ ID NO: 130392 - DNA, 610 bp, Homo sapiens
ttttgtgggattttatgtgtgttcgtttaccttttttgcattatcagttcatttaactactactgctttctgtgactctcctgtgctacaggccatgcagggactctgccaggggttttgagaaatagactgggaagatatcatttagggtccagaagatacctcctgtgctttgactgctctcattacttgatcacaaaactccatccttggaatggttctattccttccaactcagtgctctaggcagcctcgctcaatcaatcaatagaatttgacacaagagaagaaacyatttgtcatttgcaatccagattctcttctccagaactacacatttttaaagcatgtatacagaatttacatacaagttagaatttcatcagtcccttcgaaaaagaaacaaagtattagtgagcaggagggttcagaagaagataaaattcagtttcagacatttaaaaatctgggtactgctggtgtcagaggtaacattttctaccacaataatctagctgcaagcaatattatggtctggaaaagaggaggaaataaaaaagttacatattgcaatagcatggccataccttttccaacaagaaatatcgag

SEQ ID NO: 130393 - DNA, 532 bp, Homo sapiens
aggacacattgcttttacacatgggttattgcagcatacatctatttatagtgaacttcatcaatatggatgattgccttaagctaccatattgtcttttaaagccttcaatttaaagccttcatccatttaaagccttcaaagaattcaaatgccaagcatattaaagaagcaagtctggaacgcagactattcaaatataaaagagtcaataggaagagacaaaaatttcctaaataattaattatgaagatcattgctaaagtaacatctctgtgtgtgtgtgtgtgtgtgtgtgtgtcacaatacaaaggatgatgtctttctgatgcacaaaggcaaggtgtcaagmtgaggcagtgcttgcccagtaacactaggtggcagcagtgggtttttagccaatgcactctcctttttccaatgggcagaagttaccatgattaagaatcaatgaattgatgaataactagatttggattacatataaagacatggaattcagtgtatctctttttaaacacatgaaata

SEQ ID NO: 130394 - DNA, 577 bp, Homo sapiens
gtaaactagctgtaatgatgtcatggacagcccagttgtccacccctcacctctgcccgcagaccttaggctagcagttcctgggaaatagtccccaccctaaaagtcatcagaccccagttcccagagaagagagggttgagctaatatcaggccctttctctcaatttatgtttcatagtaattaacctgctccttgttgttcatacttctagcttgagctcctcttgcttgctttccttccctgcaaacacacacaagtacacacatttccagaatctaaggtctctgattccattccagacacctctattcaaagaacagctatgccacartaggtcacttactggacttaatatcagaagacccatatttaaatcctagaccttcctcatacaatcagcacaatcttcatttaatatttatggatgcttactgcatgtcagactctatcttttgctttccaaatgctttaacttatttctttctcacaacatcaatataaggtaagtattattatcatccccattttagttttaaagaacccaagatactgacatgttaggttacttgctta

SEQ ID NO: 130395 - DNA, 595 bp, Homo sapiens
ttgtgaaataatttcaatatttttatttttatcctttaattttatttttccatgaaatttttgaagtccctttgtagaaagttctttaaggtgaataaggacagaggaggataatggaataggtttagtgcatatgacaaaagcataatataaatatatacctatactataaattctaaaataatataaagaaacaacagaaattatcatgagttatgctacagttgtgtaacaagcagaaaatcttgatgtcataagacaatacatacagatttaactcatgagtctgtagcgttcagccaatgtaggctgagctcagcagggttggtcaaatatctgtggattatttccatagtaatgatgtctgrtggttggctagctatcagttggagcactagggacacgtgggccacatgtctttcattctctaccaggctagcctggacgtgttctcatggcaaagtcagggaagcaaaagaagagatggaaatggcaggtactttaacaagcctctatttgcatcacaactgtgaacatatgctggccaaatttagtcgcatggccaaactctaaatcaaggatcagggaaatatat

SEQ ID NO: 130396 - DNA, 596 bp, Homo sapiens
ttacatgtcactgaaagatgcattcaaaataatcaagagctttaagtgtaatgcaaacgcaagtgtcattggaatgacaatgatctcagcatgctatctctgtgggatatctatagtcatttcctcctaagtacacatgcatccgttccagggtcttgaatgatacaaagtcagtgcttcctcaggtaagcaaatgtttccacagtgtttccgtttctatagaattgtcatgctggggatttgtggaatttaaaagagaaattttatttgaacaggaaaacaacttgtgtggctgggaggataggggaaggaaaggcccctagtgtgggagactttaccttttcttctgagaagaggaggagtggggggggtgtgttggcggagatgcagaatctttctccccaagccctgtcatccaatactctcayttacaaggcacttagccatcacttctctctgctgatggctctcctcccgccatttaaaaatattcattcacttccatttttccaaactcttagctcttgctatactttctcattctttcccgactgcttttttttccttcacttttaaagaaaaaatattcatgacaa

SEQ ID NO: 130397 - DNA, 443 bp, Homo sapiens
aagccctgtcatccaatactctcacttacaaggcacttagccatcacttctctctgctgatggctctcctcccgccatttaaaaatattcattcacttccatttttccaaactcttagctcttgctatactttctcattctttcccgactgcttttttttcctycacttttaaagaaaaaatattcatgacaattgctaaagatgggttaagcggactccattcgttaggggcaagggggctattacaacggagttctgaggtaagggagagcgcttgggcttaattcagaaaacagcaaggccaaatggagatttatagccaaggagtagggttggggaatcagaggctaaaaaattactaagaggaaacatcaaggctaggggaattcctgctagacccaccacttaggattcttgctgaaggcaggccagagagtaacat

SEQ ID NO: 130398 - DNA, 418 bp, Homo sapiens
aatactagaagctggagcctgggcaaaaaccagggggtggaaaaattaacgacacagtctagttgagcattgcagacaagaaatgcagcaaattcattgtagctgtctgtgtatgtaagtgatacatgagatcaaaggaggaacatctcacccattttgagaatttcaaagacagagtttcagaaagagacacatctggacttaaagctagcaaagcactstttcagctccaagaacagcttgagctaaagcttcaactgcccaaacagtctccgacatctcgagactctgcaacacgcagatgcctgtctttaaggagaacttgatcctctgttgggcatattaatatcaataatcttcacttcctatttcaatattatttgtgcgtaagagtatggtacgctgctcaatttagaat

SEQ ID NO: 130399 - DNA, 403 bp, Homo sapiens
aaccagggggtggaaaaattaacgacacagtctagttgagcattgcagacaagaaatgcagcaaattcattgtagctgtctgtgtatgtaagtgatacatgagatcaaaggaggaacatctcacccattttgagaatttcaaagacagagtttcagaaagagacacatctggacttaaagctagcaaagcactctttcagctccaagaacagcttgagctaaagcttcaactgcccaaacagtctccgacatctcgagactytgcaacacgcagatgcctgtctttaaggagaacttgatcctctgttgggcatattaatatcaataatcttcacttcctatttcaatattatttgtgcgtaagagtatggtacgctgctcaatttagaatgcagttatttac

SEQ ID NO: 130400 - DNA, 604 bp, Homo sapiens
gccaaagcacgaaacgccttgtatgttgtgcttcgtcatttgacatacatgatagttggggagccatggaaggattttgagtaggtaagtgacaggaccaaatttacattttagcaatataattctggggcaaacatatgtgaagaatttgagaggaatatgatagtggcaggcagacaagtagaagaccattacaattaatagaygagaaatcaagttaggggaagaaggcaaaaggattgatttcatagatatccaggaaattgaatccttagaaactggtacattataagaaaaacaagaagaggtctaggatgatttccgggattctagtttcattcagtcattcagaacgtgtgtgtgtgtatgtgtgtatggcatgtatgtgtgtgtatatatattaatattatgttatatatataacatgttctgtgttagatatataacattttctatgttttagatgtttatatgttaataaaaatatgttatatattttatttatacatatataatgttaataaatacatatactatacaggtataagacaataaaacctgttctatgtccctggctctgataatacaacaataaacaagacac

SEQ ID NO: 130401 - DNA, 604 bp, Homo sapiens
gccaaagcacgaaacgccttgtatgttgtgcttcgtcatttgacatacatgatagttggggagccatggaaggattttgagtaggtaagtgacaggaccaaatttacattttagcaatataattctggggcaaacatatgtgaagaatttgagaggaatatgatagtggcaggcagacaagtagaagaccattacaattaatagatgagaaatcaagttaggggaagaaggcaaaaggattgatttcatagatatccaggaaattgaatccttagaaactggtacattataagaaaaacaagaagaggtctaggatgatttccrggattctagtttcattcagtcattcagaacgtgtgtgtgtgtatgtgtgtatggcatgtatgtgtgtgtatatatattaatattatgttatatatataacatgttctgtgttagatatataacattttctatgttttagatgtttatatgttaataaaaatatgttatatattttatttatacatatataatgttaataaatacatatactatacaggtataagacaataaaacctgttctatgtccctggctctgataatacaacaataaacaagacac

SEQ ID NO: 130402 - DNA, 652 bp, Homo sapiens
agtgtgtatagattacgttgtcaagtcacttgactgtaatgagccagagagagagatgatagcaatgtgagagcaccacgtggggttggaaaaatttgttttttttttttttttgtaaatagggagagacataaacacatttatcagctgaaaggactgagccaagggagagggaaagaaggtaaaagagacacaacaaggacctggaaaaggcaaggaaggataataaatacattgtgtggaggattaaccttggattataaaagacaagttgccctccagagtttgaaggaaggggtcaaggatgggggakgaagaaaataaagtggtagatggggtttcaaagagttgagggaatgacttttctgatgatgaagtcatcttctcagagtggggatgagaacagaaggcacgggaggggctttaccttccagcctcacctttccccttcttcccacatttataaccccagactaaacatggttcagttttgtcaacattccaacccatgtatatggtgaaatgtcagattatcgggaacgctgcaagtaaacataaaataatccctgagactgctgaagctcataatagtttccttgacatgtatcatttaatagactaaatacatgataaatatttacataagaaagaa

SEQ ID NO: 130403 - DNA, 656 bp, Homo sapiens
gacaattgctttaacctgggaggcggaggttacagtgaaccgagatcatgccagtgcactccagcctaggtgacagagcaagactctgtctcaaaaaaaaaaaaaaaaattctgacgacaatgacaagaggaggcagcggatgccatagatagacataaaatatgtgcctctgagaaaggttcttttttttttttttatttttttgcatgcaggcagaagtaaagtgatttttagaaaacactgtagaggcctaagagatcccaagaccatttcatgcccatttatgggttaaatgttcatttaaatggatcattgtctatcatagatgagaagcctccttcaagcttcatggtttcttggtagttctgatrgttatttcagaaaattttttaggtgattatacacagacacatgtataactgtttctggaactacaaaaatgtgaagcacagaatgataagaatcctactggttttaagtgaaaggaaaaaatcctcagtattatattttcattagaaatagtcttataatattttaccatgacatatttttttccttctagggtattacattagcaaatgcccaagacacattagtttttaaactaatttttgtcttttaaactaatttttaagctttattgggatatacttca

SEQ ID NO: 130404 - DNA, 427 bp, Homo sapiens
tttttagtgattcagaggcatttgaaattctcagtgatttatagtcattattatgtatatcaatcttcattgtatgccattgtgaaggcgttctgatgattgagtttactgcaaatgggcctacattgctgttgagataggaatagcactgcgtagtcacaggagggtggaaaaacccaaacaacagctaaaacaagaactagtcaaagaaaccacagggtaacagaaaacccaaaataagagagagagtatggccaaaaccctagtcaaggtgacatrtccatgactcttccaagcaaacccaaatgaaggagaaagagggcagtaatggaggaaggaggatccttgaaatcccctccttttccagaaaacctaatgattattccaccccttaattaaagatacacccataaaatagggatgctgg

SEQ ID NO: 130405 - DNA, 183 bp, Homo sapiens
actttagaccaatggttatcaaagtgtggtccctaaccagcatcattagcaccacctgagaaattgttaacagtacaaattttagggcttcaccccgggccaaaagaatcagaagcactcrggatgggtcccaggaatctgtgtttaaacaagtcctttgggcgataatgcaggttaaaattt

SEQ ID NO: 130406 - DNA, 489 bp, Homo sapiens
aagtaaacaaacacaagaaargtatttgatatggttaggctttgtgtccctacccacatctcctcttggattgtaatcctcataatcaccatgtgtcaagggagagaccaggtggaggtaattgaatcatggggggtggtttcccctatgctgttctcgtgatagtgaatgagttctcatgagatctgatggttttataaggggctctttccccatcgcttggcacttctccttcttgcctccttgtgaagaaggtgccttgcttccccttcaccttctgccgtgactgtaagttttctgagcctcccccgccccaaacatgctgaactgtgagccaattaaacctctttcctttataaattacccaatttcaggcagttctttatagcagtatgaaaatagactagtacagtatcatagaacataagagctataatggaaaccaataggaagctgagacatagaaatatggcggggaatttggtctat

SEQ ID NO: 130407 - DNA, 574 bp, Homo sapiens
aaaaaataagtaaacaaacacaagaaaggtatttgatatggttaggctttgtgtccctacccacatctcctcttggattgtaatcctcataatcaccatgtgtcaagggagagaccaggtggaggtaattgaatcatggggggtggtttcccctatgctgttctcgtgatagtgaatgagttctcatgagatctgatggttttataaggggctctttccccatcgcttggcacttctccttcttgcctccttgtgaagaaggtgccttgcttccccttcaccttctgccgtgactgtaagttttctgagcctcccccgccccaarcatgctgaactgtgagccaattaaacctctttcctttataaattacccaatttcaggcagttctttatagcagtatgaaaatagactagtacagtatcatagaacataagagctataatggaaaccaataggaagctgagacatagaaatatggcggggaatttggtctatactgcttgataggatacacagagccttggatgtgggcacaaccactgtcaggcccaccctcacaccagcatcagtact

SEQ ID NO: 130408 - DNA, 602 bp, Homo sapiens
atcactactccaaactgccctaaattgttgcatttttaaacaagcaggttttgagttatgcccttacctcgtaaattcagcttcacagattggattattgccatgtggatgtagtagcaggaaaaataaatttgtgtcagtctgaattctacttgtgcatttattaaactactcttaaccttttcttaggtcagtgatcatcatacagatttgcttttatatgccttagagaaaaattcctctatgagtattatttatgagttaagtgttacttatccatttacattagtaatcttaaattatttacctgctttggaattcatatgttacaaatttgccagatgaaagctgccagatgagtgaatatatttgtgctacatgtctgttgctcattaaagtagctggtttgggattcacagcaaaaataaaaagtgttacaaggggtagaaaagargggagaagaggtcaggcagtttatagcaaagtctgctgtgctgcagctggcactagctggcgcctttgggcagtttctgctaaaccttgagcaattgctttcactcttccacctcccatgttgtttcattcattcaatcttagatgga

SEQ ID NO: 130409 - DNA, 472 bp, Homo sapiens
gaaagaagcatgtgcttggcatttggaggaactgtgaggggactggtaggattagaacacaatgagtgagaagtgaagggagatgaggtcagagaagtggtgtggaattggggatgaagggtgatcacatcataagccatagcaaagatgtttacattgaattaaaaagctattggaaggtttagcgaagtacaggaaaatgatgtgactttggttttaaagcggtcctgaacaatagcactttctgtgatgatggaagtagtctaaaatctgcagtgccctctaaccctttgtggttattgarcacttgaaatgttgccaatgcacctgaggaactgaatttttaaatttaatagaattttaatttaagcagtaacatatggctagcgtattggtcagaaaaattttatacattttcacaggttgctttatggagaatagtatgtggaagcaaagaggcaaaagcagggag

SEQ ID NO: 130410 - DNA, 472 bp, Homo sapiens
gaaagaagcatgtgcttggcatttggaggaactgtgaggggactggtaggattagaacacaatgagtgagaagtgaagggagatgaggtcagagaagtggtgtggaattggggatgaagggtgatcacatcataagccatagcaaagatgtttacattgaattaaaaagctattggaaggtttagcgaagtacaggaaaatgatgtgactttggttttaaagcggtcctgaacaatagcactttctgtgatgatggaagtagtctaaaatctgcagtgccctctaaccctttgtggttattgaacacttgaaatgttgccaatgcacctgaggaactgaatttttaaatttaatagaattttaatttaagcagtaacatatggctarcgtattggtcagaaaaattttatacattttcacaggttgctttatggagaatagtatgtggaagcaaagaggcaaaagcagggag

SEQ ID NO: 130411 - DNA, 514 bp, Homo sapiens
accctggtttaccaaggtcttcttggctcctagagaaaggatttgcgacaactttactgaattatgtttgcttaaagtgaactacaccttgatagcaatttaagattctcaacatrtaagatgttattagtattccataaaacttggatttatgagaaaccaaaaagtttaaagtattttagaagtatttttaaagctagtttcatatcctgcagcaagaaaaccataaatttctctctgacaaaggaatcagaatctgttaaaagcatttgtcagtgatacattaatattcacgatagctcatgcaatattgcttagtttttggtttgtttttccccccaagttgagactttgaatacagcagcatttaaaagggaacacatgtagctcgaaaggatgtcaccttcattcctgggttgtgcatccccctggagttgttgacctggaagttctaatagaatatgtgttaaaaatacgggaaacatattattttaacatcaaaagaggaacaaag

SEQ ID NO: 130412 - DNA, 527 bp, Homo sapiens
aaaggcttaaaataggtaaccttaaaagtattaccctatagttcatggtaaagtatcaaagaagaagaaaaaatttctcatattacatgttcacttgttttgttttgtttttagaagtggccattccaactcacagcctttatttattttaamtttttgatgtttttcttgttagcttttaatcagtctgagaaaatcctaggtatatttaattttcccctattctgttttacacaaactaaagctcttcctttttgattaggatagttagtttcaagtgacataaagaactttcgttactttgctagttaaatgttaccttaaagccttattgtaggtgaggaaatatccctttttttaattccaaaaattgtagcatgattaatgaactcacagattcctttagtggtttactctgtgttaattatcccagtgccagagtttctacctagtatgctttgactcactgggccacagtgcatttctgcctaaggctgggttacatgtaacttacctgcagatatgcc

SEQ ID NO: 130413 - DNA, 511 bp, Homo sapiens
ccaaatttgtagataacagcacagtgttagagctagacgagacagaaaagatctccaaaagttattaggcaatataagttactgtctgattcaaaaatatataatgatgagtaagtatagagaagaaaataatcaattaaaaartaatcccacattggtgttcccactgatctgtaggatatttaagaggtaccttgaaaaaagaacattttactccaaataagtatgggaagtgttaatttaaataaagttccccttctaagttatttctcagcatccttactacactaatatgctaattaatctctatggggaacatatataatatgcagcagttcccagatttattttatcaggaactctaatcatacattaataatataaatttatatatgtaattaaaacataaaaccaacaaacttgtcaatttcccttgaaaacagaccctacaaacacctaacatgctactcatcactgccaacttattttgatatactttcaatagaaagtg

SEQ ID NO: 130414 - DNA, 209 bp, Homo sapiens
atttggagagaagtgtgaaatctaaccaatcgytagcacatatttgttgtaatacggtggtttatttcatgtttgcatactataaaatctgaattgatgtgaaatatctgtgcctttaaatttcttaaacctttaagctttttgttctgttttgcaacattttgtagtatttcttcccttccctagcacaaaatactggtttctaagtg

SEQ ID NO: 130415 - DNA, 209 bp, Homo sapiens
atttggagagaagtgtgaaatctaaccaatcgctagcacatatttgttgtaatacggtggtttatttcatgtttgcatactataaaatctgaattgatgtgaaatatctgtgcctttaaatttcttaaacctttaagctttttgttctgttttgcarcattttgtagtatttcttcccttccctagcacaaaatactggtttctaagtg

SEQ ID NO: 130416 - DNA, 494 bp, Homo sapiens
ccagccaattttttataaaaagtttttattgagacaggggtcttgctttgttgcccaggcatgtctcgaactcctggctttaagggaccatcccaccctgatctcccaaactgctgggattgcaggcttgagccaacaagcctggcctctgtaatttttaaataagcratgctgcctatggtgttgattaattaattatcttatctttactactttctttcaccaccacacccttgggggaggatgagggtggaaattaagataaaaagatgttatataatattaattatttacagattatcatcttaaatttacttcaaaatgtgggagatgataaaacacctttagccatgagttggtaattcttgaagctgggcaatggagtaatgaaggtttattatgctttcctggttatctctgtccttgtttaatattattctataataaaatgtttctttcccttaaacttatgagtccgtggaggggcacatagc

SEQ ID NO: 130417 - DNA, 557 bp, Homo sapiens
cgcagcccgctccctgcccccacctcacctcgtcacctccccgccctctcggcgggcccctgaggtgcgcggcgcaggcgcggagcgtggcggccagggcagtgcggccgcggagcctaggccaggggccyggcgctcagggcgtggggcgcgcggggagggagaggggtcggcccagcacagcgtccgggagcgctagggccggagcagcgctgcccgccgccgtgcgtccgcgggaaggaccgcgcggcccctccgcctgcgctctcggccgccgccgcctctgcgtgggccggccgggagggcctcgggggactgactggtgagtgtgagggaggagcgggtgggtcgggcgctggactgctccaggggacgcgggcgtgcgggcgcatcttctaacgggagagggcgggagagaccggagctccctttatacggaaactctgccttcgttatatggcgggatggcgttcccctcccccatcccgaaggcagttccaccccctgcgcaggacgccttggccgggctcccctcggccccctgctgccgttgtctt

SEQ ID NO: 130418 - DNA, 513 bp, Homo sapiens
ggtcaagtaacaaaatagctctattctgcttgacatccatagcttccctcaaattaagggagcagcaggcccagggttcatgtgtctacaggcattcctgcaaacagcattcttgtgcaacaggaagcgcctttagaaagtagttaataccaggctgggcaatgtggctcacgccwgtaatcccagcacttcaggaggccaaggtgggaggatcaccggaggtcagaagttcgaggccagcctgcccaacatgatgaaactccatctctactaaaaataaaaaaaattagctcggggtggtggcaggagcctttaatcccagctactcgggaggctgaggcaggagaatcgcttgaacccaggaggcagaggttgcagtgagctgagatcgtgccactgcactccagcctgggtgacaagagcgagactccgtctcaaaaaaaaaaaaaaaaaagaaacaaagtagttaataccaggtgaaagtgagagttcttagcttccaggctagctccc

SEQ ID NO: 130419 - DNA, 441 bp, Homo sapiens
aatagtaaagggaggaagagacatgagctgcaggattagaaagtgggcatctggattaagtcaaggatcaaatctgaacatggctgatccatgtcgacaaagccatgcatttcctttgacctcgtaaacctctttacactctggctcttttttttttttttttttttagacggagtttcgcttttgttgcccaggctggagtgcaatggtgcaatctccgctcactgcaacctctgcctcccaggttcaagcaattctcctgcctcagcctcccaagtagctgggattacaggctcccrccaccacacaggaactcgtgcttcctaaaaccctcctacctttgtttcctcttttggtcctcatgggtatttctcaatcagagaaatgagaaagttgggggagaacttatttcaacatggtcacaggcactttgattggtgc

SEQ ID NO: 130420 - DNA, 590 bp, Homo sapiens
tgctggagttcaaatttctctttaccatgcgtcttctcccttttaaaatttgaagatcatgtcctctgatagagaaaatagtagaaaaataaaagtgtgagagtttgatatttgtccttctcctccctcctccctactgctcctcctcctcttcctcctctttcattatcatctgttcacattgtaccatctggaacaagccttgggattttcctcattctattcattctaagccatctcttttaaaaagtcttttttgtgtttactgtccttggctttttttttttttttttttttttttttttttgagacggggccttgctccatcatccaggctggagtgcaatggcacgatcatgactcactgcagcttcaaacacctgagctcaaaggatcctcccacctcagcttcctaatcagctgggactacttgcatgctaattttacctggttaatttttttattttctgtagagacagggtcccactctgttgcccagggwggtctcaaacatctcagcttcccaaaatgttgggattacagaagtgagacaccgtgcctggcccttgtctctttttaaaattcacaaa

SEQ ID NO: 130421 - DNA, 510 bp, Homo sapiens
gcagctaagaagttatgtggaagtgacttccattggagtggaatttgaatagtaatacattatttatatacctaaaggtagcatacaacaagattacacataaaataatacagtaatccgttctagggaaagtgtaaagacagaaaatcgagacyttggagaagaaaaacacaactgctgaactgtaagggccattaacatcgatataatcgagtcagtttttagtttttgtttcttaaaccctaaagcaaaagggagacattgcttaggtagatagttttagaagaaagcatataaagtgataagcataccaggcccaaagagtgaaatgttactgccttttgattgtaaagaaagggagaattacatggctgcagctgctattgtgagctgggcagaggttgctgtgtctttccatttcagctgcacagagagaaaagatttaggaaaatccaaagaaaaagataaccttgcagctgtctctgaaaagcctgcgttattactgtggtg

SEQ ID NO: 130422 - DNA, 510 bp, Homo sapiens
gcagctaagaagttatgtggaagtgacttccattggagtggaatttgaatagtaatacattatttatatacctaaaggtagcatacaacaagattacacataaaataatacagtaatccgttctagggaaagtgtaaagacagaaaatcgagaccttggagaagaaaaacacaactgctgaactgtaagggccattaacatcgatataatcragtcagtttttagtttttgtttcttaaaccctaaagcaaaagggagacattgcttaggtagatagttttagaagaaagcatataaagtgataagcataccaggcccaaagagtgaaatgttactgccttttgattgtaaagaaagggagaattacatggctgcagctgctattgtgagctgggcagaggttgctgtgtctttccatttcagctgcacagagagaaaagatttaggaaaatccaaagaaaaagataaccttgcagctgtctctgaaaagcctgcgttattactgtggtg

SEQ ID NO: 130423 - DNA, 510 bp, Homo sapiens
gcagctaagaagttatgtggaagtgacttccattggagtggaatttgaatagtaatacattatttatatacctaaaggtagcatacaacaagattacacataaaataatacagtaatccgttctagggaaagtgtaaagacagaaaatcgagaccttggagaagaaaaacacaactgctgaactgtaagggccattaacatcgatataatcgagtcagtttttagtttttgtttcttaaaccctaaagcaaaagggagacattgcttaggtagatagttttagaagaaagcatataaagtgrtaagcataccaggcccaaagagtgaaatgttactgccttttgattgtaaagaaagggagaattacatggctgcagctgctattgtgagctgggcagaggttgctgtgtctttccatttcagctgcacagagagaaaagatttaggaaaatccaaagaaaaagataaccttgcagctgtctctgaaaagcctgcgttattactgtggtg

SEQ ID NO: 130424 - DNA, 594 bp, Homo sapiens
gccctggaccagaaggaagaggtgccccacttagctttagttgctgttcagttctggacagtgatttgcccacatgtgtatgaccgcgttctcacacagacctcctgcgatcatgaaagcagcctgtagcccaaaactcctgcctggcatactttggaaacaattctttctgtactgcctgctgtatccccagccagctggcaataaaactctgctaggcacattgaagtattaagatagattatttccttactgctcccaaaaaaagaaactaattcccctgggcctgactgtactctagatatcaggtaaaaggtgtcgccacttgcctcctgtcacccaggagcagarctcggcaggtctgacctctcaactgcttcctcttggattggccctgtgtcgcccctcctgtcttccttccgcagttccctgattttctccaggccctcatcacagtcccactgggcctcttgtcacaatgtcttggccaggcttcacaccctaccacccctgccccccacacacttacataacaaacatataaggaggcctaatacatgtcggaccctgtgctgacattggggattacaatga

SEQ ID NO: 130425 - DNA, 613 bp, Homo sapiens
ctataaaacttgatctattggaggtaaagaataaacygatagaaaccagaggcttggaatagcgtgcgggtcagaggctactgaagaaagtttagttactggctacaaacatacagttagaagaaataagttcttgcgttcagcaacagagtagggtgattatagttagcaataatattgtatatttcaaaggagtaagaagactggaaatgttcccaacacatagaaatgatataaatgaaatgataaatactcaaggtgatggacaccccaaattccctgacttgatcattacacattctatgcattaacaaatactcacatgtaccccataaatatgtaaaatatcatgtatcaattaaaatggtaagaatagtaaaaagaaatcttaaatacctttttatgctgttctcttgttaatctgtcctttgttatgtggtgtcagccaagaaccttgtaatcggtgaagaaaagatagtactttttcttccctcagttcaataattatgatgaagactgtatggtatacaaggcctaaaatattttttatcttgtcttgtatataaaaaaaatttgccagcccctgttcatgaatattggaagagtgtacata

SEQ ID NO: 130426 - DNA, 529 bp, Homo sapiens
ccagaatctctgtacagaaagagtagacagttcagcctgctgatccaggtgatctggtgctctgaatgtatgaaggcaatttggcacggcatgtttaccattttatttgcagtctaaaacactgcctggtacatacttgatgctcactaaatattagttgaatggagaatttactcataaaatcaagtaacaaaacattttcagaaattaactcagaagaatattacttcttatttcaaaaaaaatcatcctcacaaagtctcttgtttttattttagaattcatttaaaaacaatagactttcaagaaataatggctsttctagcaaggaccacttaaaacatcaagtgcgcaatttactcaatttttctgtatctaatttttctcatttgcaaaatggtcctaataatcccgggtcataaatgaaataatatgttaaatcatttgagttgcttgggaaaagatgctgcagaaattcatcataatagtattacttgtaatataatgcccaatcattttacatactaat

SEQ ID NO: 130427 - DNA, 583 bp, Homo sapiens
taaataaaatctctcatttaccagatggaaagctgtttgttgacatgtacctcaattcttggatctttcaacttatcacagattttgaaatgtacagtagaatgactcactatgaggaaaaataaaatagtacaaacattcttcaatcaccaagctctgagtaataaatgcattgaggaatctgtgttgggcatatggagaagcatatgttccctcagcctttgagctggtggagctgtgaaagtgagattagccttacaaaaaatgacagaaagggaaattttatatatatatatgtatatatatayacacacacacacacacacacacgtatgtatgtatcaaatatgtacatgttgaattccaccgtaatacaaagggggaaaatgttataaatcctatagaactcataaatcttgtactaggagacaggatgaattgatggctgggttgtactcagcttatactgcaataagtgctgtatttctggggcacaaatttgcctaaagaatttttaaattccaggtagtaatggggtccaagcattattggtttatgaaactattaaactatttttataaaa

SEQ ID NO: 130428 - DNA, 568 bp, Homo sapiens
gtttatcaacacagatctactcacttctgagatattctcaaaaacagctgtgtgggggacactgctctggattcctctacaacttgagtatttatatctgccttayagattttcctttcattgttagaccttttgctgcaggttcttgttgttggttgtatggatgactttaccagtaccctcttccacttgtaaaccactgcttctaacattatcatagtatttttgcagacccctttaagaaactaaggaaagtcttctaaagcctcctagaccttctcattgaattcagttcacgtagtcacagtgtgaaggctaaacagaaccacccgaagtccatctttggctctcacagggcagtatggttcaggatcttctgtagcattaaaaatgcaaatttctggatcttctccagaattaatgaatcagcgtctctacgggacgaagcccagaaatattacttttcagcaagtgtcccaagtgagtcttttgtgtgctagagtttgagactcctgtctgaggggttcatgagctttagataaaaacccttgtgggttaaaaatcactc

SEQ ID NO: 130429 - DNA, 421 bp, Homo sapiens
atttgtctaactgaataatgcttgatctactttgaaaacataggtgtccaatgattgttagcaaatttatttyttacagagtgcattggccttagaaacacccacattaggtcactgacttaattatttgttgtacttatagcttttgtagtaatcttaagtgggtattttccttcttgtcatccctccctagcttatgtccagtctaaagagttatgtgttagatagaattctaagtataaaatcagattgtataattcattactgaattcgtatgttcataaaagtagtgtctcaaaaaatttagtctaatagaaaaaaatgagaaataacatggcctaggacagggtccccaacccctagactgcagaccagtacaggttcgtgacctgttaggaactgggccgcacagcaggaggtg

SEQ ID NO: 130430 - DNA, 538 bp, Homo sapiens
gcatgttgttttgaggaaacatgactggagaggtggagaagcatttccctggggcctgaactgtattagccacagaagcagactaggtcatgctgtgccagggctaagcaccagatccacatgatagaggcagctrtgtattctgtcataagtgtattcttatgcatatgtttgtgatttgtagaactctctcaagctgagggcacaggccagaggccttttgtgtcaggtctagggacagcactgggctttttcattctagacatacatacagcaagaccacgtttcctaacctctttgggccatgtgatagagttatggctagtgaatgttggctacttcttgccctgacccatgaaaatcttccacaaaattctttgcactctctttttccccattcactggataaatggaaaagattctaaaaccctagtggagaataggataacagatggaataacttcaatacctgaatgactgcctggagcagagcctcccttcaacttccacctccaattgaattttacccaagcaagag

SEQ ID NO: 130431 - DNA, 619 bp, Homo sapiens
cagccaccgcagtggtctcagagctgtcgggggtcttgcatatctcatacgtgcagcaaagtgggggaacaatgtaacaaattatggacaagctcagagcccagcctgtggaattcttccctttgtgagcctccatcacatgtcagctgggctgctgggccgaaaggagaacgcaggggtgggggacatcccagcagcaggaggccagcccagcgctgggacacttttatrcttttcacaccgaggaatgttaccccttcactccttctctctctctctctctcttttatttacaagggaaaagattattctgactctggtttttttcttggaaatctaaatattctatcttaataccaatactatttcttgctaaataaagacccaagtaaatttttggagtctattttcccaggagccaaatgcaaaaaaagttccagcaatgtggacaatcatcttggtcttaaccctgcccttatcttgacttcctggtgcctctatttcctcatctgtaaagaaagataccattacagtaagactatctatttcatatgattgccataggattaaatgtctataaagggcaatacttgcaacatagacagccttcaaactgtgt

SEQ ID NO: 130432 - DNA, 601 bp, Homo sapiens
agaatttctaacaagtggtttcgaattagcagacagagtgaggcaagggtcctgaagcaaactttgatgagcaagaagtcagtcatcaaaactgataaaaagtaagtgttttggttgattcacaagagcaggtatttcctggagctagcagctaagtgatttctgcttgatcccgatattgtctaacatggactgagagaggcatgctggcctaagcatgctacaactcactacaacaaatatgtagtgagttgaggattcaccatgttacaggcactattctaggtgygtgtgcctgtgcatgcgtgcacgtgcctgttagtgcgtgcgtgtgtgtgtgttcatccttaactccataaagcttgaattccaataggaatgtggggaggacagaaacagaatattcaatatacacatgtgacaaactgaatttgagaaagtgctaagttccaaggagaaagacaaaacaggaaaagaaaatggagatggtgatgggaaaagaagagtgaacgatattaagtgtcgtgggaccaatcgccctgtggccacctaagcttggagagtgtttggtgaaacaaagttaaatagacttcatcacccc

SEQ ID NO: 130433 - DNA, 589 bp, Homo sapiens
gatgacaacgaacaaagatgaaggcaagaggaaagaagaattaagaagtggttcttggtcatacaccacctctttagaaatagcatttttatgagttaaatgcaaatgaataaaaaacatgtggattaaattcccctaaaaacactcacaggcttaaaattttaaaagaaaataggaccagtgccaaatgcattgtggtctgggccaagcccagagggaggtgctctggcctgtgtgcactacacacctgggttcctttgcatgcagtgggctttgggagctgtgggaccctaaggtggctcccatacctcactgtcaggtggccacaattcacgagttctcacaccatggccaaagtgcaagaaggggcagatttggctaggataaactcttggctccccagcatagctaaaaatctgaaaccaatttcttgatctcttcccccgcacttacaaaagacagattctgagcaagggaggcgtcaaacccaggctcagcaatagatgtgctatcttgatatagtctgaagccaggcatctgggtctctggtrtggatatcctacagatgtgtaagagcctactctcacac

SEQ ID NO: 130434 - DNA, 522 bp, Homo sapiens
aatgagagggttgaaacagtgacctctcaggattcatatggtggtgaggttctttgactgactctgctcagagctgggcaagactgactctgctcagagctgggcaagactgaggtctcaagttgatcccttccctctggcttggcacttttccaggctgagggagctggcctctctataatggcaggagggattagaaaacgacagaatgcttccctacacagtctcccatgagccttggcctccccacataggcctgttgctgttttgtctcataaagatgaaacacattcctctgttctgagctctatggtccccacactcttttttttctccctcttatttttaagcttaaactccttctagagtaatctgttcacagcaccagcccccacgtcttagggaggctaagtgacaaaggcacacgtgtagagyaggaagaaaggacttttccttttctacaacctgcaataagtcacaaggtgaataaagccaaggttcaggcctagacctggttagtaa

SEQ ID NO: 130435 - DNA, 574 bp, Homo sapiens
atctacaatgctacaatgctttggtaggagtgggcccttccagatgaaggagaagttcttcaggtttggccagggacaaggccgaggccatggcagatgacagctggcacgtgagttctgtgtatcaggatctgacattcttaacaaatgatgcyaccatgattattatagttctatagcttttatgtttctcaaaagaattccgaggagggtggatcatctgaggtcaggagtttgagactagcctggccaacatggtgaaaccccttctctacaaaaacataaaaattagccaagcatgatggcaggtgcctgtaattccagctactcgggaggctgagcggggagaatcgcttgaacctgggaggcaaagactgcagtgagccaagactgtgccattgcactccaggcctgggcaacagagtgagactccatctcaaaaaagaaaaaaaaaatccagagaagttatctcttttgagaaaacaagatgacaaagaccatgtcaacagatactcatgggtcacagatggtttcatgttacttggcctcacagtctccacttggaaatgtgggg

SEQ ID NO: 130436 - DNA, 574 bp, Homo sapiens
atctacaatgctacaatgctttggtaggagtgggcccttccagatgaaggagaagttcttcaggtttggccagggacaaggccgaggccatggcagatgacagctggcacgtgagttctgtgtatcaggatctgacattcttaacaaatgatgctaccatgattattatagttctatagcttttatgtttctcaaaagaattccgaggagggtggatcatctgaggtcaggagtttgagactagcctggccaacatggtgaaaycccttctctacaaaaacataaaaattagccaagcatgatggcaggtgcctgtaattccagctactcgggaggctgagcggggagaatcgcttgaacctgggaggcaaagactgcagtgagccaagactgtgccattgcactccaggcctgggcaacagagtgagactccatctcaaaaaagaaaaaaaaaatccagagaagttatctcttttgagaaaacaagatgacaaagaccatgtcaacagatactcatgggtcacagatggtttcatgttacttggcctcacagtctccacttggaaatgtgggg

SEQ ID NO: 130437 - DNA, 621 bp, Homo sapiens
tagtggggaagagattctcagttacagcaccacaccattctatagtrtttcctctacataggcccaatagatacaaaaacttcaagaacatatacagtataaccagtaaaaagtagtaaaataatcaagaagagataagttttgagtatcattgcctttgtttttcacatcgttcatgtaatggtaagtttatataaattttaataattgttatgtttaaaaatcagtttgcaaatttcctgtaattttgatccatcagctctcttaagctcgtacagctcgtacaggctggctctagcataccactgactgtaggagcgtacagatttgtatctggaacatttccacggagaatacttcaaggaaggggccaagtagatgctaatcagaattatagaaaacaccgtgtttggctctagaaatataaacagacagattgtgttttcgcagcagcctgacacaagttttggtcgagagcaaggctccctaattcccccaagcaacttgcctgagcaggaaagatagtgaggaatataatttcccttctagtgggaaaaggatttggcttcagaggcctgatattggaatgaaatgcacactatggcgaatactaaaatgtcc

SEQ ID NO: 130438 - DNA, 495 bp, Homo sapiens
tatagtcccagctacttaggaggctgaagtgggaggatcacttgggcctgggagattaaggctgcagtaagctatgattgtaccactgcactctagcctgggtgacagatggagaccccgtctcccccacacctccaaacatacaaaaagaatttcaagataaggtgtcaacaacagggcattaagccaaatgcaaggcccttttgagagcaggacttcataaagcgatgtgggtcacttgcctatgaagccatctgtgatcagagtaaatccctgtcagatggtcactgagatcaggagcactaggagatatggggacttgttcaaaacasaaagagaccctgtagctgttattggaacaactggtaaggaaaagtcaaaatgggcttttataataacaatatgttgatcaataaaagaaaaaaaatctgttgaggggaagaagctctgaatttgggtacttgagcccaatggtttggcttgtaaaaggttata

SEQ ID NO: 130439 - DNA, 564 bp, Homo sapiens
aatagcaatcagtgctgggggcctctctttaggagaatcttacatgattattcatgaaggggcaggaggaggtgtcacttgcaaccatattttgggaggtccctttgggtgcgcgtgctctgtgattatacattgctagtacacatgtctcattggcatgtaaaatctccacccaggggtgtagtttttactattataatgagcaaaaggctgctctagggcgagtttttggaggagtatgcatgcttatcagcggagaaaattcctagcatggttrtctgtggctagggcctgataagtcccctctagagccagaggagcccaaccacaaggccagaagtagccaatgtagccactgtcttttgctgtcagtaggtgggcatcatctccaggacttctgttcccaggggctcccttccctgctcatttctggctctctgcttactctaacattaagagaccttaaaaaatacctgcattcaagatggtgcaataaatgctcctcagatgtagtaaccaatccatgctcagcttctgccaataataacttcccaaatgcagtgg

SEQ ID NO: 130440 - DNA, 567 bp, Homo sapiens
gctggagtgcaatggcatgatctcagttcactrcaacctctgtctcccgggtttaagcgattctcgtgcctcttttgagcctcttttgagcctctcctttgagcctctttttctttagctgtaaatgagggataacaattgcctctactttccacaattgctatgaggattgaataaaagatgcatggtaagtcattggcctagagtatagagtaattatattttcctacaggtttccatttttcctattattattattattacccccacatgattttttttttttttcgggacagagtctcgctctgtctcccaggctggagtgcagtggcgtgatcttggctcactgcaacttctacctccctggttcaagcaattcccctgcctcagccttccgagtagctgggattacaggtgcatgccactatgtccggctaatttttttgtatttttagtagagatggggtttcaccacgttggccagactggtctcgaactcctgatctcaggcaatctgtctgcctcggcctcccaaagtgctgggattacaggcatgagccacagtgc

SEQ ID NO: 130441 - DNA, 567 bp, Homo sapiens
gctggagtgcaatggcatgatctcagttcactacaacctctgtctcccgggtttaagcgattctcgtgcctcttttgagcctcttttgagcctctcctttgagcctctttttctttagctgtaaatgagggataacaattgcctctactttccacaattgctatgaggattgaataaaagatgcatggyaagtcattggcctagagtatagagtaattatattttcctacaggtttccatttttcctattattattattattacccccacatgattttttttttttttcgggacagagtctcgctctgtctcccaggctggagtgcagtggcgtgatcttggctcactgcaacttctacctccctggttcaagcaattcccctgcctcagccttccgagtagctgggattacaggtgcatgccactatgtccggctaatttttttgtatttttagtagagatggggtttcaccacgttggccagactggtctcgaactcctgatctcaggcaatctgtctgcctcggcctcccaaagtgctgggattacaggcatgagccacagtgc

SEQ ID NO: 130442 - DNA, 567 bp, Homo sapiens
gctggagtgcaatggcatgatctcagttcactacaacctctgtctcccgggtttaagcgattctcgtgcctcttttgagcctcttttgagcctctcctttgagcctctttttctttagctgtaaatgagggataacaattgcctctactttccacaattgctatgaggattgaataaaagatgcatggtaagtcattggcctagagtatagagtaattatattttcctacaggtttccatttttcctattattattattattacccccacatgattttttttttttttcgggacagrgtctcgctctgtctcccaggctggagtgcagtggcgtgatcttggctcactgcaacttctacctccctggttcaagcaattcccctgcctcagccttccgagtagctgggattacaggtgcatgccactatgtccggctaatttttttgtatttttagtagagatggggtttcaccacgttggccagactggtctcgaactcctgatctcaggcaatctgtctgcctcggcctcccaaagtgctgggattacaggcatgagccacagtgc

SEQ ID NO: 130443 - DNA, 607 bp, Homo sapiens
tctcatttggggagcagatattgttgtcaaagttggggggccaggctgagggccccacacactcacagctatttctccctggaatcttggtacccccacccaggtcagtgtcaggtagctgagcccaggaatccactgttctaggaccacagacctctcttcttccttcacctctggtggagctttctctctaactggtgtgagaaaccccatagtccccatttttcctaaacactcattrccagcaaatcccaccttcttccttcttctgttccatctgtgagtcctcaaagtcctccactgggcttaggaaaaacccaaaaccagaaaggcacataggtctttctgctttttgctgtgacataaacctccctgaaggttctgtgccctgagctggtttcctgctagaataggaaggaaattagaaaatacaggaaggaaaaaaaaaatcaaagcatgtattcacaggcacatgactgcagaatattgtaaggctgatttttttcctctgtattttctaattgtgagtgtgaagagtgtggggagtgtgcacatgggtctgtatgtgtgtgtgtgtgtatggtcacttcttgtttgtccttgaatt

SEQ ID NO: 130444 - DNA, 607 bp, Homo sapiens
tctcatttggggagcagatattgttgtcaaagttggggggccaggctgagggccccacacactcacagctatttctccctggaatcttggtacccccacccaggtcagtgtcaggtagctgagcccaggaatccactgttctaggaccacagacctctcttcttccttcacctctggtggagctttctctctaactggtgtgagaaaccccatagtccccatttttcctaaacactcattgccagcaaatcccaccttcttccttcttctgttccatctgtgagtcctcaaagtcctccactgggcttaggaaaaacccaaaaccagaaaggcacataggtctttctgctttttgctgtgacataaacctccctgaaggttctgtgccctgagctggtttcctgctagaataggaaggaaattagaaaatacaggaaggaaaaaaaaaatcaaagcatgtattcacaggcacatgactgcagaatattgtaaggctgatttttttcctctgtattttctaattgtgagtgtgaagagtrtggggagtgtgcacatgggtctgtatgtgtgtgtgtgtgtatggtcacttcttgtttgtccttgaatt

SEQ ID NO: 130445 - DNA, 607 bp, Homo sapiens
tctcatttggggagcagatattgttgtcaaagttggggggccaggctgagggccccacacactcacagctatttctccctggaatcttggtacccccacccaggtcagtgtcaggtagctgagcccaggaatccactgttctaggaccacagacctctcttcttccttcacctctggtggagctttctctctaactggtgtgagaaaccccatagtccccatttttcctaaacactcattgccagcaaatcccaccttcttccttcttctgttccatctgtgagtcctcaaagtcctccactgggcttaggaaaaacccaaaaccagaaaggcacataggtctttctgctttttgctgtgacataaacctccctgaaggttctgtgccctgagctggtttcctgctagaataggaaggaaattagaaaatacaggaaggaaaaaaaaaatcaaagcatgtattcacaggcacatgactgcagaatattgtaaggctgatttttttcctctgtattttctaattgtgagtgtgaagagtgtggggagtgtgcacatgggtctgwatgtgtgtgtgtgtgtatggtcacttcttgtttgtccttgaatt

SEQ ID NO: 130446 - DNA, 618 bp, Homo sapiens
ctgtctctgtcctctggttcttcaggccagaaagagagtgggctttctatcagaatattygatgctctgtgctgtgtcatgaccgtagcttccttcaaatcaaaagtcatcaaaaggggaaacccacttcacgctagtcccttcttccaagtttcaaatacgctacacaatctgcctgtctttgttcactactcagagcctttcagatttctatattttatccagggtttatggttattacctgaaggagggtcagtctattaggagtctattagcagtgtactccaccatactggagaagaaccaacacacaatcaatacattgactttagaataatgttcagcattttcagttcatttatacacatatttatttgtagtgcagactcaaataccatcaaaactataatttttatgtattttttgtttactaattgggaaccaagaaataatgacagatgggtagacaagagttacattgagaactttcaacagcagaaagctacagcaatttgagaaattctggaatttccttgtagccaagaaaacaaaggaaattatatggatttcatgtgtttcagagtatagtaatgggaaatctgcaagtccactgaggaa

SEQ ID NO: 130447 - DNA, 618 bp, Homo sapiens
ctgtctctgtcctctggttcttcaggccagaaagagagtgggctttctatcagaatattcgatgctctgtgctgtgtcatgaccgtagcttccttcaaatcaaaagtcatcaaaaggggaaacccacttcacgctagtcccttcttccaagtttcaaatacgctacacaatctgcctgtctttgttcactactcagagcctttcagatttctatattttatccagggtttatggttattacctgaaggagggtcagtctattaggagtctattagcagtgtactccaccatactggagaagaaccaacacacaatcaatacattgactttagaataatgttcagcattttcagttcatttatacacatatttatttgtagtgcagactcaaataycatcaaaactataatttttatgtattttttgtttactaattgggaaccaagaaataatgacagatgggtagacaagagttacattgagaactttcaacagcagaaagctacagcaatttgagaaattctggaatttccttgtagccaagaaaacaaaggaaattatatggatttcatgtgtttcagagtatagtaatgggaaatctgcaagtccactgaggaa

SEQ ID NO: 130448 - DNA, 618 bp, Homo sapiens
ctgtctctgtcctctggttcttcaggccagaaagagagtgggctttctatcagaatattcgatgctctgtgctgtgtcatgaccgtagcttccttcaaatcaaaagtcatcaaaaggggaaacccacttcacgctagtcccttcttccaagtttcaaatacgctacacaatctgcctgtctttgttcactactcagagcctttcagatttctatattttatccagggtttatggttattacctgaaggagggtcagtctattaggagtctattagcagtgtactccaccatactggagaagaaccaacacacaatcaatacattgactttagaataatgttcagcattttcagttcatttatacacatatttatttgtagtgcagactcaaataccatcaaaactataatttttatgtattttttgtttactaattgggaaccaagaaataatgacagatgggtagacaagagttacattgagaactttcaacagcrgaaagctacagcaatttgagaaattctggaatttccttgtagccaagaaaacaaaggaaattatatggatttcatgtgtttcagagtatagtaatgggaaatctgcaagtccactgaggaa

SEQ ID NO: 130449 - DNA, 428 bp, Homo sapiens
ggatccccccaagggggctcaagttgctttttagcctacgtgggagtttcagacaaaggattttcttcctcctcttcctatagggttcactgagatagaatgacatttaataacagtggaataggagttaggatctgaaactatgctcatggcaggcgtgacctactggggctgttcagagcatstttcttctgagcgctcactctccagaccttgctctgttgatctgaattttgctttcaggggcttggtgaggacgatgtgccaagtgaatgaattggatggacccaggaggcgggcactctctcccactccaactggccacctcatccccagcagtcacaaaccaacccttagcaggtcacctccctaaacttctgcatatgcctttagcctgggcactgtgcatgtgaggcattaacgaattc

SEQ ID NO: 130450 - DNA, 518 bp, Homo sapiens
tttggttgagtgattaggtacatcttgctgccatgtaggctgaaatacaggtagtttggggagagaagatgaggtcagtcttaggattacgaagattgagttacccatggggcatctagattatgtccaggagatgtctgggagatgggtgatgggtacctgagggatggggagaaagtgaacctggtgtatattccaggggcmctgcaggcatagaaggggatgagaccacctaaggacagggtgtgcaggattgaaaaagaagagtactagtggcagaaccttggaacagtagcatatgagcccaggcaaatacagaggggcaagaatgcctggccagtagctggagcttgccagttgatctgatgagcagctaaggggttttgttttgttcgtttgtttcttgggcagagaacaggtggagccagaatgggcatcatcaacgggtggtgaattaagacttcctgcatatggagtgcctcattatgcttctggcatacagtatgtatcgcatcatg

SEQ ID NO: 130451 - DNA, 554 bp, Homo sapiens
ttcgttattgcccatcttttaaagaaaagtcattttaacttggttgagattatatctcattgtagttttgattctcatttctctgatgatcagtgatattgagcaccttttcatatatctgtttgccatatgtcttcttttgagaaatgtctattccaatctttagtccattttgattggattattagattttttcctattgagttgtttgagctctttatatagtctagttattaatcccttgtcagataaatagtttgcaaatattttctcccattctgtgggttgtctcttcactttgttgattgtttyctttgttatgcagaaagtttttaacttgatgtgatcccatttgtccatttttgctttggttacctgtgcttataggctatggctcaagaaatctttgcccagaccaatatcctggggattttcccccagtgttttctattagtagttttatagtttgagatttaagtatttcatccatttcgatttaatttttatatatggcaagagttggggtctagttttttcttagcaccatttattga

SEQ ID NO: 130452 - DNA, 595 bp, Homo sapiens
aagtcagtatcttttgctataatagagggaatcataaaaagagagaagacaaaacaatattawtaaattctagctaaattctgttatctgatgaagcttctgtctttctgttgactagagaaaatagcaaattttttttattttactttattattattatactttaagttttagggtacatgtgcacaatgtgcaggttagttacatatgtatacatgtgccatgctggtgtgctgcacccattaactcgtcatttagcattaggtatatctcctaaagctatccctcccccctccccccaccccacaactgtccccagagtgtgatgttccccttcctgtgtccgtgtgttctcattgttcaattcccacctatgagtgagaatatgcagtgtttggttttttgttcttgcgatagtttaccgagaatgatgattttacatttgcacttattagaaggactaaaagagagcttgaaactaaataactcacttcttggttcaaggctgttgagtactcaggctatgagccacccaaattacccccattctagtctacaccctacagtttaggaaaccccaggctagtgacatgga

SEQ ID NO: 130453 - DNA, 548 bp, Homo sapiens
ttcttaatcacttttttaaatcatcagcttcctttatctccagcaccttgtttttctgttgggtcgttccaagcagaagcgagaagtgaaatgctaggccaggatgggtgtatggaggaccacagtgttctgggtgctgcagcagacrctacagagggcacagaagaggctcatgcagttcagcccttgtggcgctgccagggcattgtccggggaagggggtcagagcacagcatcaagccaggccgctgctctacctttatgaatggtgtgactttggggaagttactgaacctctgcccctttgttttctcatctataaaacaaggatgatagcaatgtctaactcataggactattgcaaaaattaaatgagttaatatatttaagagcttagaacagtgcctatgagctttattattatcatcatcattattaccattattattccttagtttataagccatggatcacttcccattgcctaccgaggtaaatacacacaccctgatgtagcattccaggttggaactatcttctccaaccta

SEQ ID NO: 130454 - DNA, 548 bp, Homo sapiens
ttcttaatcacttttttaaatcatcagcttcctttatctccagcaccttgtttttctgttgggtcgttccaagcagaagcgagaagtgaaatgctaggccaggatgggtgtatggaggaccacagtgttctgggtgctgcagcagacactacagagggcacagaagaggctcatgcagttcagcccttgtggcgctgccagggcattgtccggggaagggggtcagagcacagcatcaagccaggccgctgctctacctttatgaatggtgtgactttggrgaagttactgaacctctgcccctttgttttctcatctataaaacaaggatgatagcaatgtctaactcataggactattgcaaaaattaaatgagttaatatatttaagagcttagaacagtgcctatgagctttattattatcatcatcattattaccattattattccttagtttataagccatggatcacttcccattgcctaccgaggtaaatacacacaccctgatgtagcattccaggttggaactatcttctccaaccta

SEQ ID NO: 130455 - DNA, 548 bp, Homo sapiens
ttcttaatcacttttttaaatcatcagcttcctttatctccagcaccttgtttttctgttgggtcgttccaagcagaagcgagaagtgaaatgctaggccaggatgggtgtatggaggaccacagtgttctgggtgctgcagcagacactacagagggcacagaagaggctcatgcagttcagcccttgtggcgctgccagggcattgtccggggaagggggtcagagcacagcatcaagccaggccgctgctctacctttatgaatggtgtgactttggggaagttactgaacctctgcccctttgttttctcatctataaaacaaggatgatagcaatgtctaactcataggactattgcaaaaattaaatgagttaatatatttaagagcttagaacagtgcctatgagctttattattatcrtcatcattattaccattattattccttagtttataagccatggatcacttcccattgcctaccgaggtaaatacacacaccctgatgtagcattccaggttggaactatcttctccaaccta

SEQ ID NO: 130456 - DNA, 490 bp, Homo sapiens
agatgtctaactcaccctgccaattttcatcaccttatccacacagacatcaagaaattttataaaacactttcctaaaaccaagttttcactatctattcccttcccctagtaagaatcttttttaagactaaggggttaatttgcatgacaaacatgtttgtctcctagaaactaccactcttttctaatgctccaaaacaatgtctggatatatttttcatgtaatagaaaaaagaaataggagactgatggggaagattcacaattcagtgacaagaagcagcccagaaatctcaaccgcctgggatatttgttctaatgaatctaagggtcagatgaacttctaaatacaatgcagccactccttagcagtttataactgccaagtaggagcgtacacctcctggaacctttagrctttcgaaggttcgtaatcctgtcccccagttgaccattatatcaggtgagccatgcagcagactaggaa

SEQ ID NO: 130457 - DNA, 543 bp, Homo sapiens
gcactttgaaaaccctagacatataatgctctttaccttgacatttcccatcctctaatgatccatctacccagtatttttaggtcaaaaaaatatatatgatacaatgctgcttcatgggtcaaaccacggtctctgctggtattttaatactgcatcattatcaacagaatacgtaaatcactcgcatcttaagcatttaggcaaatggggaattttgcttagaatttcagactgtgcccaaaagtaaagatgttcaatgcactgatttctgtgccaagcctagtggctggaacattggcttggatgcatacacatagctcagcaagatggttggcaaagacagttggaagagaaggcagcgctttttattcttatttctgtttcatgaacaagaaaatcacatgccagcctgaragacaagccacttctgtgagtttatgtcaatttgggggtagcactatcttctactggataaaaattgaacctagcagaaagacacacctttggaaaccatggagacttcagtttgggcattttaat

SEQ ID NO: 130458 - DNA, 579 bp, Homo sapiens
ttgcattttcactgaaataaatattttatagattccaaaaaaaaaaaagaaatagagggcacctgaaacaacctcttcatttattcttctatayacatatgaaactagactatccaggaaaatatagaatagctcgttgttctttaaatatattagcagatgggttttagcaacttcacttgatctaaggcttccatggtggatttgttgagtaatcttcactcaaatcaacccaaattctgattgtgctagtttcctctcagaggcctatgattcatttgcctgtgtatcctcaaaagattttattaatactaaagagccctgattcctttaggccttccccataggacctcaacttctaaaatttcctttgaacctccaccaagctccacaaatttcctacctctgccttatgttttagagtctcttctgagctccaggacaactgcttctaagacatctcctcctggacatcaaactcaacatgttcctgccatgctatcctcttccagtgtctgtctatgttcataaatgtcaccaccacccactcatctccacagtcaaatgttcaccaagaac

SEQ ID NO: 130459 - DNA, 474 bp, Homo sapiens
tgattgtgctagtttcctctcagaggcctatgattcatttgcctgtgtatcctcaaaagattttattaatactaaagagccctgattcctttaggccttccccataggacctcaacttctaaaatttcctttgaacctccaccaagctccacaaatttcctacctctgccttatgttttagagtctcttctgagctccaggacaactgcttytaagacatctcctcctggacatcaaactcaacatgttcctgccatgctatcctcttccagtgtctgtctatgttcataaatgtcaccaccacccactcatctccacagtcaaatgttcaccaagaactttgtaccctaaatatgttgtgaattcttccacttctttccatttccactatccccagtgcaaagactattctctttggatactataacagctcccagctgatccctcaagatccatgctctgcccagtagccag

SEQ ID NO: 130460 - DNA, 540 bp, Homo sapiens
gcgttcttgtctagctgtaatatttatgctgttttcctgtggaatttagtttgttagctccttctcataccttgctttctaccaagtgtagtcttgaaaaaattaatttccctgagtttgatttttcccatctacagacagcatgcaggatgaggctacaacatttctgcgtttgttttcctagtgttaatactctattaacccagccaagctgggtgcagtcttgcaggcctgtagtcccagcttctgaggaggctgaggccagaggatcacttgagcccaggattttcagactagcctgggcaacatagcgagaccccttctcaataggaatttaattcttaaaaaattctatcagcatttagtaaacaatcagtaaacaaacaaatgaataataaatgaaggcatatgtatctcatgttttatacatacatatatgtcttagatatatamacatacaccgtattttttatgtacatatatatcccatgatgtgtgtgtaaatacatatcatgcctacatatcatgtatagatttata

SEQ ID NO: 130461 - DNA, 593 bp, Homo sapiens
gaagctcatgtgcttggataaaagttacccagtaaaggctggacctaaactgggcattgggcaaggatttaggggaactagagaggagagggcggtggacaccccagagggtagaggagaaggctggaaggaaaggataaacacaacccagttgggcagggtgggcgtgagggcagtaagaggaggtggaggctgtctgtgaaagggtgaggaaaataatgttggccaagtaggctgcagttggctgaggaataatgtgaaagtcagaaaggaagaggccttctggactggaggcagccacatccgtctttaggagttgtggacagcacagtgctgatgcccagatttttgctggtgagccagcawgtttttgtgaacagcagacaccctggaatttttaatctagtgttttgtttgggtttctagtggtgtgtttgggaattatttgggtttgtttctggcagtgtgactctgaagtttgcattgtgagggatgaagagcgagactggttgaagggtaactgctggtcgggggtagaacaaaatctctgagtcacagtcactcagctttctgtgttctctccttctgaaagt

SEQ ID NO: 130462 - DNA, 568 bp, Homo sapiens
atctcaccattttaatttatcaatccaatatgagttctgtgaaagggagcttcmttcactcttagctcttttatttacagtctaattctaaaagaaaaggaaataagatatgaaaataagttggaaaataagataaatctctcggtgaaatcaccagatctcagtcctgtagcaaaacctccataattcatctgtaggtcagctcaagggattagccatgacgtatttggaaattcatttatttttattttattttgctgtttcttatgcataagggtaatgctgtccccaaggcttttcaggtagccctcaaatcttgacaacatttgctgtctctgaggcctaagccaaaattaattttcaaataaacagcataaaaatgtatggagttgtataaatttgaatacaaaatgcatttgttttgtttgcttacatacatacatacatactgtctgttcagccaaaaaccataatatcacattgaaattaatggccatatgcacatcatgaaagtcaaaaaagtttttcttgagttaaaaaaatgcagaacatgcagcattttatttca

SEQ ID NO: 130463 - DNA, 568 bp, Homo sapiens
atctcaccattttaatttatcaatccaatatgagttctgtgaaagggagcttccttcastcttagctcttttatttacagtctaattctaaaagaaaaggaaataagatatgaaaataagttggaaaataagataaatctctcggtgaaatcaccagatctcagtcctgtagcaaaacctccataattcatctgtaggtcagctcaagggattagccatgacgtatttggaaattcatttatttttattttattttgctgtttcttatgcataagggtaatgctgtccccaaggcttttcaggtagccctcaaatcttgacaacatttgctgtctctgaggcctaagccaaaattaattttcaaataaacagcataaaaatgtatggagttgtataaatttgaatacaaaatgcatttgttttgtttgcttacatacatacatacatactgtctgttcagccaaaaaccataatatcacattgaaattaatggccatatgcacatcatgaaagtcaaaaaagtttttcttgagttaaaaaaatgcagaacatgcagcattttatttca

SEQ ID NO: 130464 - DNA, 585 bp, Homo sapiens
ctttacttcaccttcaacaaagtcattcaagtatctttctcagcccaaatccagtagatcagagggtcgtattcaaaacatcactaccaccaccaccatccactggtgggagccccgagtcagcctggggaggaaataaagtcattcagtggaattacatgagattaaggtgctggcttcagttctgttcccacaaaatacatgtccttgttgtaggaataagtagctttaattggccatcaaaggaaagttacaaggggaaaagactattgtacatgacatcctcaatctgagacctggtctctcttttgaaaggagtttaaagaacttgtcatttcactaaccaaaaagaactccacttacaatccacattttctcaactacaaaagatgcttgctgtaagtaaatctagttaaaatatgaaataaaacaaaaagtacataaggtttagaccactgatgttcatgacttagtcccccatttyattttgttttaaaaagctcagttttcagagatcgtttagatgccactgactttaaaatgccagtccgccagggtgaagacacaggctgcgtgttgggagaa

SEQ ID NO: 130465 - DNA, 585 bp, Homo sapiens
ctttacttcaccttcaacaaagtcattcaagtatctttctcagcccaaatccagtagatcagagggtcgtattcaaaacatcactaccaccaccaccatccactggtgggagccccgagtcagcctggggaggaaataaagtcattcagtggaattacatgagattaaggtgctggcttcagttctgttcccacaaaatacatgtccttgttgtaggaataagtagctttaattggccatcaaaggaaagttacaaggggaaaagactattgtacatgacatcctcaatctgagacctggtctctcttttgaaaggagtttaaagaacttgtcatttcactaaccaaaaagaactccacttacaatccacattttctcaactacaaaagatgcttgctgtaagtaaatctagttaaaatatgaaataaaacaaaaagtacataaggtttagaccactgatgttcatgacttagtcccccattttattttgttttaaaaagctcagttttcagagatcgtttagatgccactgactttaaaatgccagtcygccagggtgaagacacaggctgcgtgttgggagaa

SEQ ID NO: 130466 - DNA, 534 bp, Homo sapiens
gtccatctctatggatacttggaggtgtgtgtgtgaggagtaatcttatggatttttgaaaatttcaacatgtagaaaaaggtggacaagtttcactgagttcattataagttttgcaatcaaatgaataaagcaaacattttactactaatatataagtaatctcaatagttcttgtgttaaaaatgctagtagaaataacttttaatttagttctcaaagtatcaaattcatatgttcattcattcagcccatattttatcaagggcyatttctgtgtaagcactgtctcagcccctgtgggtgatactgtgatgaataagacagggttcttgtgttaataactttatagttggctagaggagacatgaacgtggtgggtacaaggtgtcctgagaaagttaagccaatttaacaactatttccaacatctctctagcctgcttttcctttaagtatagggtcatgtatttgtgagcctatgtgttttataaacatgtattagtatttgcacttgtatagtgcttactatgg

SEQ ID NO: 130467 - DNA, 567 bp, Homo sapiens
taagcatagtaacaaaaatcagtgaaatagaaaacagacacaaacagaaaactagcaaatccaaaagttacctttttggaagattaataaacttgatagagcagacagagaacacaaattattattatcatgaaagaaagaaatctatctatctatctatatatatatagacattaaaaagatcataagatggattataccaacaaatttgactttaatttcctcttaaattttggtctttgattttaagtcaagttttgtctatgatgtaaggcatggttcaaacttaatgcttttatatatggatatttcccagcatcatttattgaagtgactgtcttttctccattgaatcaccttggtaactttgttgaaaatcaactggctgtgtatttgaggatttctttctagattctctcttctattctattggcctatatgtctatccttataccattatcacactcttgattactayagcttcctggtgagtcttataattggggaggtgtggatcttccaactttgctcttctttttcaagaccattttggctattcagaatcct

SEQ ID NO: 130468 - DNA, 539 bp, Homo sapiens
tctctaatggtgtcttttgaacagcagaagttctgaattttgatgaagcctaatttatcttttctttttaatggacaatgcttttgcctagtccaagatcaaaacaatttctatgttttcttctagaagtttcatagctttaaatttgatggtatgtttaactttaagtttgactctatgatcctgtaatcccagcattctgggacatcaagatgggaggatcacttgaggccaggtgatcaagacgacttcgagttaatttttgtttacaccgtgagaaatggaatgaagttaattgttttgcatatrgatatccaattgttctggcactattttttgaaaagattatccttcctttactgcattacctttgaaatattgagaaaactaattaatcaaaatatgtgatcccattctggaaattatactcagttcctaatacaaaaattatttgttggtagttaacaattcaattaaaaaaatacaaaaagtaccaacctactttttgttttggggtgtgtgtgtatgtgtgttttgtt

SEQ ID NO: 130469 - DNA, 594 bp, Homo sapiens
tgatttgaaatttcatctgaaatagttaaccaaaccaaggagaataggaaaagaaagaattatgaagggaagttaattttatggcatagaaaaatataaaggtagaataaataaaatatagcaaggtgatctgtgcagaaggagacaggcatatggacagaataaaaagccaagaaatatagtggtttctgggggctacaggttggagagatgttggttttttttaattaaaaggagaaaagaaaagagaagccaagaaatagattctagtattagtaattggtaaaagagcatttcaaaacaggaaatgcataaaaataaaaattatttattttttttaaaatgaggggcctgaaatattgtgatccagttacttcagtaaaaatgtagttagatttttacaccatacacatggatagcttagagagctaaatataaaacaatacaaaaccaacaataagttagaaaaaatctgtagrtgagtgtgtatgtggtattatcaaagatatggcctttctaaactttcagataaagaaaaaaatcatgaaagaaaatttccctatattgcattatataaactgtaaaactttcata

SEQ ID NO: 130470 - DNA, 596 bp, Homo sapiens
ggaagataaaacctaagcagaactcagtaggctctctgagttgagacagagttgaaatgtggggaagaccaaagccacctgagttcgtagaacagagaatcagaccaaaaggtatttagcaaagtactgaggaacacatgtaatgaaacaacctatggtccaggaatgaaccatttgaaaggattagaaggaacattactcagtactctcacaagaccaggaatagtgtctataaccaccagccagtctaaagaaacctcataatttagaggacgatgggcagagtattcataagggtcttgcattgttagtcggaaatattagctctcaattaagcacagatttggtcccacttaacaaattttaaaagttaggtccttgtattagarcatttcacactgctataaagaactgcccaagactgggtgacttataaaggaaagaagtttaattgactcatagttcagcatggctggggaggcctcaggaaccctacaatcatggtggaaggtgaaggggaagcaaagcaccttcttcacaaggtggcaggaagaagaatgaatgcaggaagaactaccaaacatttataaaatgat

SEQ ID NO: 130471 - DNA, 581 bp, Homo sapiens
ggtatataatcatggagcactctcctggcaagtctgaatgagccaaaatcaactgtaagttgtaaaatagtggcaccgtggacttgctttgaagggtaacaagcatatgggggataaatccttgtagggtgtctctctcttctccaaaggcaagttccaagccataccaataaatacataacaccacatgtcacaggtgctatgatagacaggaaccagaagtgattactgggttagtcaagttacctcatggttcaaatggcttctggaacaccagctattgcagtcacattccagccatcagacagataggaggaatgaactcatttcttcgctttcaggacaattcttagaatttgcacatactgccgttatttatatcctactgatagaacctatggcgaccaatagyaataggaccacacctaacttctgggaaggataggatatataatctgccccttcccttctccaaggtaacctctgctcagctataaattggttactttattaatgaaaagaaagagaaccagcagtctttcctgtacagtacaatttcactttattcatcgttgtcatca

SEQ ID NO: 130472 - DNA, 164 bp, Homo sapiens
ctcctagaggtaactttctcttgtcttcctgtgtctaaatgggacggtgagacagaaaatctgcaagtcygtacaacacctctcttcctgaatctgcaggacagtctctgagactccagggcacagccactgtaaaagccagtcttctggagctatagagagtt

SEQ ID NO: 130473 - DNA, 424 bp, Homo sapiens
aaataaatcaaagaacaactaaatgagcgcttacctcatttgtttcccttctctttgggtcacaatcctctgcttcctgttgcctgatatcctaaaacagtttctcctttgttttgtccagttttctcattgtttactgtggcagttacttcatcacagccagggcagcagtcatgaattttactgttttacaaatttgcacatttattttgaagtaaaatacagattattttcaagtttgaatgttttgtaaatatttaaaattaaatacaaatatttgttataaattttctaaatatttttgctggtaggatggtgcggagttttaccaggctggccataactggwttcatagtgttacatgaaaggggactccatccagaccccaagagagggttcttggatctcgcgcaagaaagaattc

SEQ ID NO: 130474 - DNA, 486 bp, Homo sapiens
agtcagcttggactagtagttgtccrgaatatcctgttaatggtagattacagaagtgcaagaggatgggttgaaagaaatccctgcatcctcagcctcatttctgtccacgtcaatgaggcagggaaattacatactaactctagttagaagaccgtgaacatctgtgaacaacgatctaatctgcacatgactagcctctaaaaacttccttagctctatggcagcactttcctggggcatctacctttcggaacccctctttcccattcttgttcccatctcctcttttttgcactgaaataatggtattagttagggcctattttgttttctctatatacactggattgtccctggacaatctcatcccttcatgttaacttccagacaaatgaattttgaattttcatcaccattcaaacttttctcctgagccctcaatccgcatttctgactactactgggcatttccatttggatgga

SEQ ID NO: 130475 - DNA, 588 bp, Homo sapiens
tttttttttttttttttttttttttcagaaaacagaggcaagtgttcaaactgtcacggagaataacatgtggccaaaattacatgtggttctatctctcataacaagtcttagaatgatgcatcataccagctgtctgggaacaaatgtattttgttggcatgggaacaaaagaattagtctgaattttgtaawtaaactgtggttattaaaattactcgaaacaaaccagaataataaccattaaacatgaaaagtcaataaaagtctttgaattacatttctgttgcaattcctgttttcataacgtgctttgggatgaaacatagctttgagttgttagtacttttaaatagacttcactgcagatgagttagccaacagcagctaagactgtgaagttttaaaatcctttatggaaaatggaaattaaaggcttggaaatctgtagaagaccaattctttttaacaattgtcacaattattgcacaattgattttctgtctctatagcatcttcttctttaaggctgtctgtgactccatagatttgttggttacccttgatgatgactgaggtggtttaaag

SEQ ID NO: 130476 - DNA, 561 bp, Homo sapiens
cacggagaataacatgtggccaaaattacatgtggttctatctctcataacaagtcttagaatgatgcatcataccagctgtctgggaacaaatgtattttgttggcatgggaacaaaagaattagtctgaattttgtaaataaactgtggttattaaaattactcgaaacaaaccagaataataaccattaaacatgaaaagtcaataaaagtctttgaattacatttctgttgcaattcctgttttcataacgtgctttgggatgaaacatagctttgagttgttagtacttttaaatagacttcactgcagatgagttagccaacagcagctaagactgtgaagttttaaaatcctttatggaaaatgraaattaaaggcttggaaatctgtagaagaccaattctttttaacaattgtcacaattattgcacaattgattttctgtctctatagcatcttcttctttaaggctgtctgtgactccatagatttgttggttacccttgatgatgactgaggtggtttaaagataagcagtgctatccactgaaagctt

SEQ ID NO: 130477 - DNA, 561 bp, Homo sapiens
cacggagaataacatgtggccaaaattacatgtggttctatctctcataacaagtcttagaatgatgcatcataccagctgtctgggaacaaatgtattttgttggcatgggaacaaaagaattagtctgaattttgtaaataaactgtggttattaaaattactcgaaacaaaccagaataataaccattaaacatgaaaagtcaataaaagtctttgaattacatttctgttgcaattcctgttttcataacgtgctttgggatgaaacatagctttgagttgttagtacttttaaatagacttcactgcagatgagttagccaacagcagctaagactgtgaagttttaaaatcctttatggaaaatggaaattaaaggcttggaaatctgtagaagaccaattctttttaacaattgtcacaattattgcacaattgattttctgtctctatagcatcttcttctttaaggctgyctgtgactccatagatttgttggttacccttgatgatgactgaggtggtttaaagataagcagtgctatccactgaaagctt

SEQ ID NO: 130478 - DNA, 540 bp, Homo sapiens
tgcttggtccttcagacagacgtgatgcctgagctgtgactacagtgaagagacactaattataaaggtgaaataagggtgactctcatttaaaccttaattgccttcttaataatgcccacatttgtttaagcagcattactccaattcagtctattaactgggctgataatatttctgatgagtaggtctccttttgccatgtaaattgacaccgaaacagtaaatgtttttctttctactactgctaaatgaaggctaaggtaaaatacaaataaagcagtaaaatctcactctattttcatgtgagatttacagacttattttttttttaatcatattgtaaacgactaggacaaagcaagaggatcaagccctgtcatccacacaaggagcgataaatgtggggctaccgaaagtgacacagtggcagcrtgacatttttactgggtggtctcacgggctatttacagaggccactatagtttctgttttattattatttttaaataggctaaatctactaacaaaagtaactag

SEQ ID NO: 130479 - DNA, 540 bp, Homo sapiens
tgcttggtccttcagacagacgtgatgcctgagctgtgactacagtgaagagacactaattataaaggtgaaataagggtgactctcatttaaaccttaattgccttcttaataatgcccacatttgtttaagcagcattactccaattcagtctattaactgggctgataatatttctgatgagtaggtctccttttgccatgtaaattgacaccgaaacagtaaatgtttttctttctactactgctaaatgaaggctaaggtaaaatacaaataaagcagtaaaatctcactctattttcatgtgagatttacagacttattttttttttaatcatattgtaaacgactaggacaaagcaagaggatcaagccctgtcatccacacaaggagcgataaatgtggggctaccgaaagtgacacagtggcagcatgacatttttactgggtggtctcacgggctatttacagaggccactatagtttctgttttattatyatttttaaataggctaaatctactaacaaaagtaactag

SEQ ID NO: 130480 - DNA, 502 bp, Homo sapiens
tcaggttttactttttggtctgtggtccattttgagtagatttttgtggatggtgcaatrtatggattaagattcaattgtttctgtattgtttgttgaaaagactatcctttctccattgaattgcctttgcagctttgttgaaaatcatttgaccacatatatgtggcctactagtggactttctgtttttcttctattaatctatatgtctatccttttacaatgccacactatcttgattactgtagcttttatagtcagtcttagagataggtagtataagttgtccaacactgatctttttcaagatcattttgcctatgatggtttctttgtttttcttagaatcagcataatgaattctacacaaaatcctaccgagatatttttaaatttgtgtttaatctacattaaggttgaaatcttaatgaaattgagttttctgatccatgaccatggaagatcttaccatttatttaggttttctttaatttctttc

SEQ ID NO: 130481 - DNA, 520 bp, Homo sapiens
attttgttagatgatattgaatcatgattttatcttcaattcccaattgttctttgctaatatataaatataatagatgttttaatgttgatattatacagtgtgacctttctaaactcatttattaattcyagtcactatttttggtagattccttggaatttttctacatatataattagctgaatacctgtttcttaatagttttccctatgaaggattaattttaattatgccacatatgtcaacatattttatttttcacagtggtatatgttattaataaactggtgaattttggaaaatgactcctcaaaacaaatctaacctatgaagaatcaaatgtaccagggaaaatacatgagcatttgtaatttttcagtttataatctgtcttctgtgtctgtaggttctgtactcatgggttcaaccaaccgtggatcaaaaatgtttttaaaaatataaaaataacaatataacaataaaaagtaatacaaatgtaaaaacaatacagtataac

SEQ ID NO: 130482 - DNA, 494 bp, Homo sapiens
ggtggagtcaaggagctctcatctcttgaatgtgggaagacctttacaagtgccttcaccaaatgaatgtgacagaaatgacaccacttgaaatctaaggctaagtctaaaaggtgatatgaattccacctggctttctgtcccaggacatgagccatggagtactgagctaacatgtgagatatccaggtaccctgaagctgtcatgtrgacagactacatagagatagagatgccagaggagctccagctatatgtatcttctctctccaagtaccaggagcgtaagtgaagaagacttcaatatgacctcagttccagttactgtctgactgaaaccacatgagacactcaaggccagaaccattcagttaacgagcctccaaattccagaaacagtaagagataatattgctgtttgaagccactacacattttgtggtgattttgttatacaacattagataactaaaacaataaatgaagaaatgaag

SEQ ID NO: 130483 - DNA, 388 bp, Homo sapiens
ttttaaaaactttttgttaaaataacaaagccctcgttgcagaacaccaaaagccacatattttaagatatcaaaatcttcaatatttttagctctttagaaatagaaaactagcaaaagatagcaccatcagcaaataatatctcagccccttccttactactmccccaccatccttcctcaggattcagttccagtgaatgatcatcagaagcaaaacctgaagcaaaaatctttcaaaaattacaacaaataaggtacattcttggcaagtctcaattttgtgataactttctcctcaagtttattattataaaactatcttgtaataaggttatttggggacccccttagatggtctgagactaaatgatttctacttcagaaa

SEQ ID NO: 130484 - DNA, 326 bp, Homo sapiens
tcaagaaaatatttaaaaaaaaagaataattcacatttaaaaaatgggtaaagaacttgaataggcatttytcaaaacaagatacacagaaggctaaaagcacctgaaagttatttaacatcattagtcattaaataaatgcaaatcaaacacattgaggtactgctacatacccagtagaatggcaatagtaataataataatgatgatgatgagaataacaagtgttgatgagaatgtgtcaaaatttgaactctcctagattgttgacaaaaatgtaaaatgtttcagctgttgtagaaaacagtttggaagtttttcaaaaa

SEQ ID NO: 130485 - DNA, 326 bp, Homo sapiens
tcaagaaaatatttaaaaaaaaagaataattcacatttaaaaaatgggtaaagaacttgaataggcatttctcaaamcaagatacacagaaggctaaaagcacctgaaagttatttaacatcattagtcattaaataaatgcaaatcaaacacattgaggtactgctacatacccagtagaatggcaatagtaataataataatgatgatgatgagaataacaagtgttgatgagaatgtgtcaaaatttgaactctcctagattgttgacaaaaatgtaaaatgtttcagctgttgtagaaaacagtttggaagtttttcaaaaa

SEQ ID NO: 130486 - DNA, 636 bp, Homo sapiens
tcatctttccactttaaacccaaaagaactatttgcctcagcttctttactggggaagcaattttcttcctggcatgtccccaagactggggtgctctgctactttttctttttgtttgagacggaacctcactctgtcgcccaggctggagtgcagtggtgtgatcttggctggctgcaacctctgcctcccgggttcacgccattctcctgccttagcctcctgagtagctgggrctatgggcgcatgccaccatgcctggcaaatttttgtatttttagtagagacggggtttcaccatattgaccaggctggtcttgaactcctgacctcatgatccgcctgcctcggcctcctaaagtgctgggattgcagagtgagccaccatacccagccagattttctatttttaataacagctgtagtaagatataattcacatatcataaagttcataatttaaaactgcaccattcagtggtttttagtatattcatagatctgtacatttatcaccacgacaaaattctagaatattttcatcacctcaaaaaaacaaaaaacaacaaaaaaagaacccatccctattaacagtcacttcccattctcccatcctttgagccactggcaaccac

SEQ ID NO: 130487 - DNA, 546 bp, Homo sapiens
tgtgtgggtgttggaggatataagccattcacaattataactagtatgttaggtcttacttcttctttcctgagttactttaaaataaaagtcccactacttttcttgagacttaatcctttttcccccaaaactacatttcaatctgcttctatcagcctcacagtcaatgaaaatcttttcaaaagaccaatgaatgtcactccgagtttggggggttgtaagctgttttcatcttattctatgttttgttagatattttattagaaagtcagaagacattgtatcagggttgctagctagaaaccagtttctactccttaagatccaactcaaggtacmtggtatgcaaaaccacttctgaattaccatgaaaactatgctagtaatggaatgggggttggcagtggtaaaaactgtacagcacaccatagtgtaacagagtaatatacaggtgttcagaaagaactgacatcaatcatatcccagattcctaaaccctcctgctcccaaatgaaggataaagaaggcttctccgaaatactt

SEQ ID NO: 130488 - DNA, 590 bp, Homo sapiens
tggaaatatagccaaagtattttaccatgttttgtaagatctcttggtttagcaaatacattcaaagaaatttttccaccaaacgtgccacaagaattgtgttttcatttctcctgtgcaagtacagaatggagagaaagtaggcaatcagggagagatgcaaagagtctagcaaattatttctagcataatcacacatttaacttcagactcagccttgttttataattccaaaaaaaaaaaaaatgaaggtcaaagaatactgctttaccagtattctacgtatttacatattggcagccaggcttaaaatagagccttacctwttttacttaccactgccggcttggatactagttggtatcaacaaaagaaaatccccttggacagagcaatgtaaattagccaagtattattaaatgccttgtatagtcttagcattccactaggtgttaacaggcacctaagagaactaaagctcatagtcctgaccttgaaaaactttatgatctagtttggatgaattcaaaatgttttcattgttttttattttgctttaaaactactgaatcttgtcttcaaacaagctt

SEQ ID NO: 130489 - DNA, 373 bp, Homo sapiens
aattttggcaaattcgcctgtgacaaagtacagagaatgtcatgaggtttgagaacacggatcctgagtcaagagaatcartattctcttgatccagtactggaaacatccttgcagccattctttacgaggacccatgtcagcctggccttggtttctcttttgttaacagctattcattttgctgctttcaagtgcctgctggggcagctttagaactgagggcaaacccgtacctctaaaatccaccagcagtcttctgcaactgcagacattccagacaaggggctcagaccactcgcaatgcctcaccttttaattctcgggctctggtgtccaacattttcttttcttcctcattctcactaggaat

SEQ ID NO: 130490 - DNA, 616 bp, Homo sapiens
ctaaccataacaccctccccacccccaccagcaggtcaatgcccctgacctccacctgctgccctgatagtcctgaaggaggaagacaggtgtatgaacagcagggtaggcctgcagacgtagttaagaagaaaaccactttaagagcaataaggaaatattaaaatcacraagaaatgtatattgaacgtgaagaagttctgaaagcgttttcttttctgaaagtctaattctccagtgttactcaagaagaagattgatcgcttaagagaaaaaatattttttagttataatttgttctcaaagttggtaccaaatgattaaaataaacaaaatccaccacaacctcaactctcccaactcccgaggattttgctggtttaaacccttttattttaagccttgttttagccagaaagtcttaccttcattttgacctttgcacaggaggctagactttctcggcagcctttgtggacaaaagcactgcaatctgaaaagaaagcaaacccaaggtcacatggacaaagcaaacagatcccagattctgagtttccactgctgccacaagtggcctctgaatttcaaagtgaagtcactcacatgtgagaatgtg

SEQ ID NO: 130491 - DNA, 575 bp, Homo sapiens
gaagtgcatacagtatctatgcatggctgtggatgctgtgatgatcaggtctgagaaacgttttgctgaattataaactggatttaaaagttttaaatacttttgccatttgtatcacttatcactggaaggtataagccaattcaaattgttttgattaattattttacttttctttttcctttgttttaattaaaaatgttttcattctcaatgtgtgtaatcaaatgatttacaaatattttaccatggaaaatttcaaacacatacaaagcaagcagaatggtgacatggaccttgacacaccatctctcagcttcagcaatgacgagccttctgccattcttgtccccctcatacctctggttactgcctgcctcactccacagttatcattatttacagctctttttaaagtgacacttacacacattgaaatgcacacattttaactstacagttgtgacagatttatccatctgtgtcatcacctgatgcaatattgaatatttcagtctcttccctcccagtgaattcctgcaccacccccatccctgcccaagtcaccacccttt

SEQ ID NO: 130492 - DNA, 590 bp, Homo sapiens
tgtcaaacaaaactcatgaacaattcgtgaattttatgaaatgtatggctgatttatacctaagtatatatgtgtgtgtgtgcgtgtgtatgtataaacatgggactctatgccttacacccgcaggagacattgattcgcttttgcctatgttgcatgtactttgtttagtgtaactgtttttactgcagtgaccacaattacacagcacacatccctgcctcccattctctcacctgtgttctactccaggtgccctctggagggcaggatttgacatcttcctgaacaacttggaaactgttgcagccaagctctatggggaatatgacaagatgatctagttctttctctggtgagtctatttaggaagtgttaacatatgaatagcttggaagttcagaaagcagctcaaaatggcccctgtttcccaamcccagcccccacctattaagcctgctcatgtcaaggtccagttccactgtcaccttctccttaaagccttctttagtcattccatctcatggtgatctgctcttgcatgtctgaactctgatgcagaagtgatggagaaaatttattccaccaga

SEQ ID NO: 130493 - DNA, 418 bp, Homo sapiens
aataatgaactcaattctcccctctgttcagggaatgcacattcccagggcagagtagtggggagctttttaaatttagttaagtatcagctgagtccagcactgcactgggcactaaaaccccctccccagctctgtgttctgggtaaacagaaatgtgacaggtccaaggttttctcccagaatgcccccagctgatgtgctctggtccacatcctatgtccaggatccaactccgatgctcttctttttccttgctttttataaaaaacaaaaatgtgatgatattatacatggcattttctgacctgcttttagaaaatgtcaaacattttaactgcaatagtgattcactcttatttggaaaatttacacattacytaagtatataaagttaagtcttcgcaggaagagctac

SEQ ID NO: 130494 - DNA, 470 bp, Homo sapiens
tgtctcaaaaaaaaaaaaaaagatcctgctcaccctaaataaagctcagtgactgttatctttcactgggctctccaaaaccaaacagtagtgtacagccatctaggacttctcactgaaggagtttaaaaacgacacttcatctttttgctcattgaggtctaaggggaagcgctcagcttttctccaggattaccgatatctctggccttgggttatttcattggaatcctcttccacaatgttcaacaaccactacgtctctgcccacctggaaactgggtctgtttgttctgggaggctctcttccaggctttaatggacagataagcatggttatggaccaaaatatttcagatcaattggccattttagtaacttgratgaaagcccccatctgtgagagttaagacaggcatgcccaggcatttgcatgggacctgagctgtgtgcactgtctgagacaggcc

SEQ ID NO: 130495 - DNA, 341 bp, Homo sapiens
tttacatctcaagacacctccagtaatacagtcacataagtcagaaaacatctttgacactttttcccatagtaatgatcaatacgtcctgatgacttgatttttgttttcattcattcattggatagctccaaaatctgtcygcttcctgttggggaggccagatatctaatatggaaaattgctattaataaaatgcagttttcatttatatgttcaataaatatttgtcaaagttttatttattggtacatattgccctaggttttccaatagagaagaaaactaaacagaaactctgtctttgggaagctcatagactaaagaaggagagaagaaga

SEQ ID NO: 130496 - DNA, 580 bp, Homo sapiens
tttccaagtaagaagcaatcccacccagctgcaacttccaaagtcctactgttggcaccactggtcgcctgtctcaaacctgctttgcactctcatgctctagctaggcaataaagacaagttgagagcacccttgccaataccagatccaatttcatttctgtctggattctaatttgtagccacatttcctgtgtacaacctcacttttgccctttacatttgatgttcgagatgacaacattccagacataagtctttccctcaaaaaccatgactcaaggttttgcctccagcttttccagtttggtctaccttagggatgttttcagtgtggtttcttccaaatcagactccgagtcatgaatttgggtacaagatcatctcagaaggcactgtaagtggaggaagaaaatccaataagaaagcatatgttaataaataagttagcgttgtcagcagcttgtagtcagtcccataggcatcatccaagagatgctgtggaggcaacttagcgttgtttcacgaatgagtgaaaaatycggggagttgacctacaagcccccatctctcctcagta

SEQ ID NO: 130497 - DNA, 557 bp, Homo sapiens
gcacagaactttccataggttattgtgtttaattttcacaatgacattgtaaagtagatctttgcattctcattttacagaggaaactgtcaaagtttggacaagctaactattttaccaaaagttatcagtaagtcatgaaactggggctgtgacaaacacccacaaagcccycccctatttgcaaggccacagccttcttgctccccctaaagcaggattggcctactggggagatggaaccaatagtctgcactgtctgcagggatctgggggactttgggtaaaacacccccacccccaccactaccaccacacatgtgaaatatcttcattcctggaccgtaaccgatgtctgaaattccacagtcatcaattcattcttctggggcaagcataaaaagaccacataaccctcttgggaggtacagcaaataaatccattagactctgagctaatctagggcaaggaccttatgattcatcattttgtcttcagtacctagcacagagcttggtacgttaaaaggttcttagtatttgcctgttgaataaat

SEQ ID NO: 130498 - DNA, 581 bp, Homo sapiens
cccgtggaggtaccttaagcactcaaggagacaggctgctcatctgcaaatggggataagagcaagtctgtggagctgagaagtgctgctgtgaaaaggactacagagtctgacacagtgtgtgatgcttagcaggctccagacagatgtgactggcatcagcagcaggcacaaaactccatcttctctatgcactcaggcaaaatcttcatccatgtaaaacaaggaaaggatacaaatgtgccctgaatgttctttctgtgcctctttgggtccacttttctttcaaaagctctgtttaaaagtaaagactggcaccctatgcaggacaaaatacaacatagaataataatgacagtaactgacagctaaggagcacttctgagatgccaggtgtgtcataccatgagacttaccatgttgacatttaaacttcataacaaccatataagataaaaagcatcatcattcctagaacagggtgactgaggggaagctgagtctcaaatagggtaacttgccyggcatcaacccagcagtgagtggtagaactgggattcaaactgagattggtgtaactc

SEQ ID NO: 130499 - DNA, 382 bp, Homo sapiens
taagttgcatggtattaagcaaagaggctgctgccatcccaaaagtcattctagaacattctctactgcctggtcctctaacagtttctgtaactagatcagacagcaaagttaatggatgttctgtctgttgccctgtctcatatactccctctcacttttccccccttttggactcatatttaaatacrcgtattaactgtggcatcagctacattttgtataacttttcaggcccattttcgttagtgtgattcagaaaacctagaccatggtgggacactgtttaggacaatcacacttaaagatctctcagaagatatcctaagggtcccccaaggtaatcggaaaacagcaaaagaccccaagtagcaaaaagtca

SEQ ID NO: 130500 - DNA, 382 bp, Homo sapiens
taagttgcatggtattaagcaaagaggctgctgccatcccaaaagtcattctagaacattctctactgcctggtcctctaacagtttctgtaactagatcagacagcaaagttaatggatgttctgtctgttgccctgtctcatatactccctctcacttttccccccttttggactcatatttaaatacgcgtattaactgtggcatcagctacattttgtataacttttcaggcccattttcgttagtgtgattcagaaaacytagaccatggtgggacactgtttaggacaatcacacttaaagatctctcagaagatatcctaagggtcccccaaggtaatcggaaaacagcaaaagaccccaagtagcaaaaagtca

SEQ ID NO: 130501 - DNA, 538 bp, Homo sapiens
gaggtaggtgcttgctatggctaatttctgggttgtctcttgtcccagattgtcttgttggtttttccacaaccaagtccctggtttattttccctttgtttcaaatacttctcagtggttccttttttttccccctttttcctcctaattaaaaccttacattataatgctccaagtatagggctcagtactatttatgctrtgtaagttggaggtattacaattaagtctattataataagctgctgcttattcccaggggcctcctgctgttgtactcagtatgagtacactggggcaagatggctgaccacagccaaatctgtttgagcagctttcccaagcttgaaatagtaatgatagtcaacatttacataatgcttactttgtgctaggcatggttctaattgcttcatttaaatgaactcacttaatcttcaccataaccctatgaggtagacactattactattgggaatgaggcaacaacaaaaaaatacagtgacttgcccaaggtcatagagctagtaggtgata

SEQ ID NO: 130502 - DNA, 483 bp, Homo sapiens
tacctggtgggagcagtgctgcatgtggctaggaaggccaagagaaatccaggagcagtgtggagcccctgcaccagtgggctgaaaaaaaaagctgtcaatgtccattttccaaggaggcttggacacagctggcagaggccaggcagtcagcttaccattcagaggcaggaaagtgttcacagtggggtggctgagtgagtctmggcaaagaaacacagagataggaacaaaggctcaggaggtatgagatcaagtccatattaatattaacaatggctgacattcatgtagcacttactacataaagggtttatggcaccctttaaactgtttgcctggatcatctcaccaaatcctcagaacaaccctgtaaactaggtactaacatgatctccatttaatagatgagaaatgagaggctcaaggtcatacagtaatatggagatggagctgggaatatagtcgaggtggagctgggaa

SEQ ID NO: 130503 - DNA, 615 bp, Homo sapiens
aaagaaaaaaccttcaactaagtctcacgtattatataaaaattacggatcatggacttatatgtaaactataaaactataaaatgataaaactttaggaaaaaaaatttcaagatttagggcaatgagttaacactaaaaaaagcacaatccataaaagcaaaaattggtaaattagacctcttcataattaaaaacttccactatgagaaagcccatgtgaagaggatcaaaagacaagttatagactgggagaaaatatttgcaaaccacaaatgtgacagaacactagtatctgtaatatagagagaattatcaaagctcaagttaaaaactaaagcaaacaatctagttagaaaatgggcaaaagacaygagacatttctatgaagaggatgtccccatggtagataatcaaacagatgttcattcaacaccattaaccatcaggtcaaattgacacctcagtgagatatcactatagccctataagaatgactaaaaacgaaattagttacagcaattgttggcaaagttgcagagaaatcggatcactcataccttgctgtggaagaatgtaagatagtaccatcattctggaaaatactttggcagt

SEQ ID NO: 130504 - DNA, 615 bp, Homo sapiens
aaagaaaaaaccttcaactaagtctcacgtattatataaaaattacggatcatggacttatatgtaaactataaaactataaaatgataaaactttaggaaaaaaaatttcaagatttagggcaatgagttaacactaaaaaaagcacaatccataaaagcaaaaattggtaaattagacctcttcataattaaaaacttccactatgagaaagcccatgtgaagaggatcaaaagacaagttatagactgggagaaaatatttgcaaaccacaaatgtgacagaacactagtatctgtaatatagagagaattatcaaagctcaagttaaaaactaaagcaaacaatctagttagaaaatgggcaaaagacacgagacatttctatgaagaggatgtccccatggtarataatcaaacagatgttcattcaacaccattaaccatcaggtcaaattgacacctcagtgagatatcactatagccctataagaatgactaaaaacgaaattagttacagcaattgttggcaaagttgcagagaaatcggatcactcataccttgctgtggaagaatgtaagatagtaccatcattctggaaaatactttggcagt

SEQ ID NO: 130505 - DNA, 617 bp, Homo sapiens
catggctttcttctttcatgcagttgctccctgactcttaattaacaagtcacagatccagttttactgacactccaagaatctgccctggcaagcagtctggtctgggatgttcacatccattggtgttagttacatctataaagaaaaaaatctttcttttgttaatgtaagtcatctctcatcagataactttgatgtattattatgcccaaaagaacccctgaccaccttgactggaggaggagygggagaaagggaatgctctgccctgccacacacacaaacctggaatcgggtctggaactgccactaccattcatgtgcctacaggcaacacacttctctctgggcctcagtctccccatctgcaaaataatggcttaatctcagatcgccagattcccttccagccctactgttctctaaatcttgtccctgtatcgatcttgctcttctgcccttggccgactccacgctctccagcccctgagagtgctattctcaggctgttcattacatctgagggcagaaatagatctcagccaagttctaatcagcctcagaaagaaggaataaccagacaaaactcaaagttgttataatctgtactctcc

SEQ ID NO: 130506 - DNA, 403 bp, Homo sapiens
tctagaaatgacaccaaccatccatactccacttttccatttcaaaagaatcttagaaaatagactggaagtgtagaatgttttaatctcaagactggataggtattaagtatacttttttattgttattgtattttatttagagatagggtctccctctgtcgctcaagttggagtgcagtcgtacaatgatagctcattgaaacctcaaaagagggctcaagaaatcctcccacctcagcctcctgagtagcaagaactatgggtgcatgccactaaawctggccaattaaaatttgtgtgtgtgtgtgtgtgtgtgtgtgcgtgtgtgtgtgtggagttgtggtctcactgtgttgctcaggctgtttttgaactcctggcttcaagtgatcctcctgcc

SEQ ID NO: 130507 - DNA, 466 bp, Homo sapiens
aagaatttcctcactttaaaaatgtttgaaaatctttggattcattgatcagctctagtatacggttattagcagaggtttgcaaattctttgaggcctgtagttcatctgaatgtttagtcttttctccatttgcctcatgtgcttttctgcttacacttaccactagctccaaccccaggctgatgaaatgaacaagtagccaacgaataccatgggaagattctgactcattatccagttcaatagcttgtattggggaattttcttttttgttttggtgaacatatatgttcttatttctgatattatattgttcataggaatgtagtcatatttgctactaaaaaacgttcatatggtttgataccacatttcagcatttcacaatgatctgcaacttccaaatgctctgccactagaacaagtctgaaaatcactcaactrgccttaaaaaaattagcta

SEQ ID NO: 130508 - DNA, 516 bp, Homo sapiens
cccaaacaccctttttagaatggctgaaattaagaagaaagatggatcacaccaatgctggtgagcataccaggtttccagagtctaaaacattgctaatgggaatggaaatagaaacagctacacaggaaaataattcttagtttcttgtaaaattatatatgcccttaacacattacctaaaaatccccctcctgaatatttgcttcagagaaatataattttatattcaaacaaaacctctatgcaaatattcaacatagtgtgtgtgtgtgtgtgtgtgtgtgtgtgtgtgtgtgtgtgcatgtgttagaaactaaaaataacatgaatgtatgaaaattcgaatgggcaaagaaggtaggccccatctatacattgaataccatcagcataaaaactaacaaatgacygatacacaaactattacaagtgaactccagacattacgctaattgagagaagccagtctcaacgaccaaagggacatagttgtaagaaacactgccattctca

SEQ ID NO: 130509 - DNA, 516 bp, Homo sapiens
cccaaacaccctttttagaatggctgaaattaagaagaaagatggatcacaccaatgctggtgagcataccaggtttccagagtctaaaacattgctaatgggaatggaaatagaaacagctacacaggaaaataattcttagtttcttgtaaaattatatatgcccttaacacattacctaaaaatccccctcctgaatatttgcttcagagaaatataattttatattcaaacaaaacctctatgcaaatattcaacatagtgtgtgtgtgtgtgtgtgtgtgtgtgtgtgtgtgtgtgtgcatgtgttagaaactaaaaataacatgaatgtatgaaaattcgaatgggcaaagaaggtaggccccatctatacattgaataccatcagcataaaaactaacaaatgaccgatacacaaactattacaagtgaactccagacattacrctaattgagagaagccagtctcaacgaccaaagggacatagttgtaagaaacactgccattctca

SEQ ID NO: 130510 - DNA, 490 bp, Homo sapiens
gcttaggatgtgctttagaaggcattaccaaacctcgggcaaagttactttagtgtcttagtcttactaggtttgaaaagccagagaaaagactcaagaccaccatataagagcaaaacaaaaggacagggagagaatgtgaagayactgaaacattttacataaagttgtataaaacatcctttaaagaaaatataaactttaggatatacatcaaaatcagcagagccactatataaataaataggcattgtaaaataacaagagaaaatttaaatggatttctaaaaaatattgacacctatgatttttaaaatatgtttaagaaatcccgtatttcacagggcagcctttcacaacacagatatgttaggacataaaggtccttctgtttttaatttactagtgtttatagggttacaaatgtcttctacacttgtcttttgtctgatggtgcaaaaaattttcataagcatgtatttctgaatgc

SEQ ID NO: 130511 - DNA, 490 bp, Homo sapiens
gcttaggatgtgctttagaaggcattaccaaacctcgggcaaagttactttagtgtcttagtcttactaggtttgaaaagccagagaaaagactcaagaccaccatataagagcaaaacaaaaggacagggagagaatgtgaagatactgaaacattttacataaagttgtataaaacatcctttaaagaaaatataaactttaggatatacatcaaaatcagcagagccactawataaataaataggcattgtaaaataacaagagaaaatttaaatggatttctaaaaaatattgacacctatgatttttaaaatatgtttaagaaatcccgtatttcacagggcagcctttcacaacacagatatgttaggacataaaggtccttctgtttttaatttactagtgtttatagggttacaaatgtcttctacacttgtcttttgtctgatggtgcaaaaaattttcataagcatgtatttctgaatgc

SEQ ID NO: 130512 - DNA, 490 bp, Homo sapiens
gcttaggatgtgctttagaaggcattaccaaacctcgggcaaagttactttagtgtcttagtcttactaggtttgaaaagccagagaaaagactcaagaccaccatataagagcaaaacaaaaggacagggagagaatgtgaagatactgaaacattttacataaagttgtataaaacatcctttaaagaaaatataaactttaggatatacatcaaaatcagcagagccactatataaataaataggcattgtaaaataacaagagaaaatttaaatggatttctaaaaaatattgacaccyatgatttttaaaatatgtttaagaaatcccgtatttcacagggcagcctttcacaacacagatatgttaggacataaaggtccttctgtttttaatttactagtgtttatagggttacaaatgtcttctacacttgtcttttgtctgatggtgcaaaaaattttcataagcatgtatttctgaatgc

SEQ ID NO: 130513 - DNA, 490 bp, Homo sapiens
gcttaggatgtgctttagaaggcattaccaaacctcgggcaaagttactttagtgtcttagtcttactaggtttgaaaagccagagaaaagactcaagaccaccatataagagcaaaacaaaaggacagggagagaatgtgaagatactgaaacattttacataaagttgtataaaacatcctttaaagaaaatataaactttaggatatacatcaaaatcagcagagccactatataaataaataggcattgtaaaataacaagagaaaatttaaatggatttctaaaaaatattgacacctatgatttttaaaatatgtttaagaaatcccgtatttcacagggcagcctttcacaacacaratatgttaggacataaaggtccttctgtttttaatttactagtgtttatagggttacaaatgtcttctacacttgtcttttgtctgatggtgcaaaaaattttcataagcatgtatttctgaatgc

SEQ ID NO: 130514 - DNA, 619 bp, Homo sapiens
cttttctcgtactactacctgccagtgtggggtcatgtcctagtctatcttgagggaatccccctgttcattattgtcagagtgagactgttaagtcttgatttccctggacaacttcactgcatgacttttaatatgattttttaatataccctttactggamaataaattctatagttatctgagtaagagatatggtcaggaagaggcattgcctcattcagcttttctctttggtgaactcgcatatgttctcctcacccgccagtcacctctaaaccgtattgttccaagacaacaaacagaactcgagtgtgtatctttcaccactggatttgtgtttgctccataaagcttcatgcttaacagagtttccgttagcattttctctatttattttcccataaaatatcacaggccttcttcatatggaattatgggtgatttccttcaatctgcatcatatcaagttgaggttcatgttgatgaaaagtaaaacatacattgaaaatatcagtaaggatgttttcccctcctttttagcacctgtgcttgtgatacaagcacattttaatacaactgtactctcatgctttgatcattcctatgatgaaaata

SEQ ID NO: 130515 - DNA, 619 bp, Homo sapiens
cttttctcgtactactacctgccagtgtggggtcatgtcctagtctatcttgagggaatccccctgttcattattgtcagagtgagactgttaagtcttgatttccctggacaacttcactgcatgacttttaatatgattttttaatataccctttactggaaaataaattctatagttatctgagtaagagatatggtcaggaagaggcattgcctcattcagcttttctctttggtgaactcrcatatgttctcctcacccgccagtcacctctaaaccgtattgttccaagacaacaaacagaactcgagtgtgtatctttcaccactggatttgtgtttgctccataaagcttcatgcttaacagagtttccgttagcattttctctatttattttcccataaaatatcacaggccttcttcatatggaattatgggtgatttccttcaatctgcatcatatcaagttgaggttcatgttgatgaaaagtaaaacatacattgaaaatatcagtaaggatgttttcccctcctttttagcacctgtgcttgtgatacaagcacattttaatacaactgtactctcatgctttgatcattcctatgatgaaaata

SEQ ID NO: 130516 - DNA, 617 bp, Homo sapiens
atatgttaaatttagtaattaatacatggttttaaaactatgctataaatataagtgaacttatctctatactaatatatgttggaacaggctagcttggcatacgaagttaagttgtggttcatattaatagccacagggcccagcactgtttctgggaaccaaagaataatttttaaggaatggaatggtgaataattaatgatacattctaggtcccaaaaataaaaagaaacccttctccagctacagctctgaccaggacatcataagtcaagttcatgaaccatcactggggccgtatttctaacaaccgcccgtccctccctccggatgctcaggtacrgaggtacaagactgtggattcctttgctacatgctatgattctattcagctaacctcagaatcacagaaaacactgcaccttgggtgatttaattgcaatgggtctcttgtccacatttattggactatgaggcaaaatgcaggcttcttctaaatcactctcttcgtttccaattttttcttcatcagccgtagattctggcttcttaggaactgtgttttaaaacatcattcactataaaaaatcatacacttaaacattaattttaaa

SEQ ID NO: 130517 - DNA, 617 bp, Homo sapiens
atatgttaaatttagtaattaatacatggttttaaaactatgctataaatataagtgaacttatctctatactaatatatgttggaacaggctagcttggcatacgaagttaagttgtggttcatattaatagccacagggcccagcactgtttctgggaaccaaagaataatttttaaggaatggaatggtgaataattaatgatacattctaggtcccaaaaataaaaagaaacccttctccagctacagctctgaccaggacatcataagtcaagttcatgaaccatcactggggccgtatttctaacaaccgcccgtccctccctccggatgctcaggtacggaggtacaagactgtggattcctttgctacatgctatgattctattcrgctaacctcagaatcacagaaaacactgcaccttgggtgatttaattgcaatgggtctcttgtccacatttattggactatgaggcaaaatgcaggcttcttctaaatcactctcttcgtttccaattttttcttcatcagccgtagattctggcttcttaggaactgtgttttaaaacatcattcactataaaaaatcatacacttaaacattaattttaaa

SEQ ID NO: 130518 - DNA, 560 bp, Homo sapiens
agaatcacagaaaacactgcaccttgggtgatttaattgcaatgggtctcttgtccacatttattggactatgaggcaaaatgcaggcttcttctaaatcactctcttcgtttccaattttttcttcatcagccgtagattctggcttcttaggaactgtgttttaaaacatcattcactataaaaaatcatacacttaaacattaattttaaattaggaaatacttagacttacatgaaagacaaatatttcattcaaataaacatctgaacaacattataaattgcaaggctcaaacaacaagagtgaaatgatcaccatggcagaacaaaatgacaaagtgagagygtgacaaggggagaagccccgaagcaggggaagcccagcagccagcaagctcttcctcaagtgccagagagtgaacatttgagtctttcaggccacgcagtctgttggaaatactcaactctgctgctgtagcacaaaaagtaaccacagataaagcaacaggtgtggctgtgctcccgtaaaactttatggtgctacaattttagcttca

SEQ ID NO: 130519 - DNA, 615 bp, Homo sapiens
aaggatctttatattatccctaatgccccccaaaagacccagatatcagtacttctagatccaaatattcctatcacaaacacacagagggtgtcccctgccatcctctgcatcactcaaggcatacagcctcacctccaaatattggccaacacaaaatgcgtgcatggattcccgggtgacttcaaactcgaaagcagcttccaaagctaccactgggttttcccctgcaaactgagctgaaagaaaaagggaaaaagcaacaggagttcaattcagcttgcctgaagagctataggagaaacagtgagtaggaaataagttaggcgcttaactcaaaagtgagggttaccagagtataatgacctcccactgtctcccagggttgcctgggccaactcagaacttgaaatgagttccaagtattaaaacaaaaaatgcataatgaaaggaaattcttcaaatgtgctgaatttgttgataagacagacaccaaagccacagatacattaaaatatgcgggggctggcrcaaaactaaagaaatcatttataagccaaatactctgcttaaaatgatacaggctgtaacttttaaccaggaaataagaagggt

SEQ ID NO: 130520 - DNA, 559 bp, Homo sapiens
aataagacaaataacatttaaactttatttttaaatttgcaggatagcagttttcagcagatggtttcttttagcaaattccatcttcacattgtgctatgcttttatgagttccagctgttaacggatcatattttactgctgaaacyatcatgtgtgatataattgctcattatgtgccttaaaacacaagcaatataattattttcaacttggagcaaattaaaatcttatcagcaatttaaaatctctagagtcgtcttcttctggttaattattttaaacttgtatttttctctttatgtttttagtgagttctcttatcaaggagaagaactcaaggtgattattctttttttctcttccatgcacctcacaggtgtgttaataatttcgtttctcagaaaatgttctttcatatctatcttacatgatgagagaccttttaacatcttccattcggatgtgataccagtaatggaaaatattccagcttcatgaatatggtgatacaaatagttatccgtctaacctctttcagtgccaaatgtttactata

SEQ ID NO: 130521 - DNA, 559 bp, Homo sapiens
aataagacaaataacatttaaactttatttttaaatttgcaggatagcagttttcagcagatggtttcttttagcaaattccatcttcacattgtgctatgcttttatgagttccagctgttaacggatcatattttactgctgaaactatcatgtgtgatataattgctcattatgtgccttaaaacacaagcaatataattattttcaacttggagcaaattaaaatcttatcagcaatttaaaatctctagagtcgtcttcttctggttaattattttaaacttgtatttttctctttatgtttttagtgagttctcttatcaaggagaagaactcaaggtgattattctttttttctcttccatgcacctcacaggtgtgttaataatttcrtttctcagaaaatgttctttcatatctatcttacatgatgagagaccttttaacatcttccattcggatgtgataccagtaatggaaaatattccagcttcatgaatatggtgatacaaatagttatccgtctaacctctttcagtgccaaatgtttactata

SEQ ID NO: 130522 - DNA, 571 bp, Homo sapiens
gatgccaacagcatttgtgggggattggctgtgggtgtgaaacagcagcagcggaacaattccgtcattctggcctggaacagtggcaggtgaactctgcccagttgtggaggggtctgtcaggaagatggggcttctggtttcagaggagcccagagatgtgctcaggcagatgagggtcctcatgggataggcatgggagaggcagctgcaacttggggaccactggtggtgggctgagcccctgagacctctggagtgagcaggaaagaaagtgaggaggagccagccagggagccagaggcagagggaagagaggaaagtagaccccgggaggagcagacaggaaaggatgaaaatttcccctcacctgcctcarcagcctctgcccctgcccacacacccttgtgcactccccctgagtccctgctcacctctgcctacccagccatcccaggatggtgtgggctcaagctctgggggtaactgaagagccactttaagaaggcacagtctagaagtgagcagcattgagtcactgttgtctcccagtcctgggaacatcctgtgc

SEQ ID NO: 130523 - DNA, 336 bp, Homo sapiens
  misc_feature (1)...(336): n = A,T,C or G
nnnnnnnnnnnnnnnnnnnnnnnnnnnnnnnnnnnnnnnnnnnnnnnnnntacttatctacttatttttacttttatttgtaacttaattccatcaaggagagagagtgcattttctgttatkctaaatttttgaagaatgtattgattttttatgacctgatatatggatgatatgtagatattacatgtttgtattatcaaatttcagggtgataataaaataaatacttataatatttatattgtcactgtatattagttattttctttcttcactacaggagtttttcaacctataggctatttttcaattctaggttatccagtagatttt

SEQ ID NO: 130524 - DNA, 523 bp, Homo sapiens
agatttccttttaaaatcatatttcattgtatgtatatatcatatttacttatttatctgtcaagggacattcaagtagcttctaccttttggatttttagaataattctgtcataaacrtgggtatgtaaatgtttctttcaggtcccgctttgcacatttagatagatatctagaaatggtattgccagaccacatcataattccaattttaataatctgaggaaactctgtactatttttcataatggctgcatgattattttttccaccacccagtgcacaaatataccaatttctctacatccttgaaaacacttgttattttctcttatttgatagtggccatcctaatgaatgtgaggtaatatctcactggggttttgcttttcatttctctaaagattcatgatttgcagcatcttttaaaattcctcttggccgtttgtatatctcctttgtagaaacatgtgggtgtgaaggattacctaggtgccgaggcaagagactgaaggtaaaaact

SEQ ID NO: 130525 - DNA, 573 bp, Homo sapiens
aacactctgctccaccagcttcttgtgggaggctggatattatccaggcctgcccgtagtcatccggaggcataaacccctccttgtggtgctgtgcttcagtggtcacgctccttgtccactttcacgttcctcccattctcctggttcctctttgaagttcttagtagatagcggtagaaggaatagtgaaagtcttaaagtctttgatctttcttataaatgcatagaagaaaacactgatgtatgctgccttccctctctgctttggctgcctaaaagggaagggcctcctgtcccatgatcacatgacttgcttgactttatcaatcacctggacgactcaccctccttaccctgcccccttgtcttgtatgcaataaatatcagcgtgcccagccattcggggccactactggtctctgcgtcttggtggtagtggtcccccaggcccagctgttttctctttatcagaaagcttaytacatttgaggtagtcccattttcctgcttttttcttgttacttctgcttttaatgtcatgttaaaaaaattatcaagacaaatgtcatg

SEQ ID NO: 130526 - DNA, 290 bp, Homo sapiens
taggttatccagtagattttgaaatgttatgattaaatatctacttctcaagcattcatctttgcaaatgaaacaatcccaagctcttataatgcacatcctataaagggcagattagtcaatatatggttcagaaataattatgtaatatttataagaaaattaaaaatttagatcyttaactcagataacaataatccaaattaaaatgtgatttcattacgtaatttaaaatgacaccagaatactagtaaaaattatattaaaaagtttatgtaatcttttttagc

SEQ ID NO: 130527 - DNA, 290 bp, Homo sapiens
taggttatccagtagattttgaaatgttatgattaaatatctacttctcaagcattcatctttgcaaatgaaacaatcccaagctcttataatgcacatcctataaagggcagattagtcaatatatggttcagaaataattatgtaatatttataagaaaattaaaaatttagatctttaactcagataacaataatccaaattaaaatgtgatttcattacgtaatttwaaatgacaccagaatactagtaaaaattatattaaaaagtttatgtaatcttttttagc

SEQ ID NO: 130528 - DNA, 604 bp, Homo sapiens
ataatctttaggtagatatttggaggcctgcacacttaaatgggttggtgaaatgtcataccagacacatggctgggaattgggtttttctcctccgctcttagcagcacctttgtaacccagtgattacccccctcatggctccacggccacatccgcaaaaagggtactggtgaacgtgacattttcacgaagccacagcccatggtcactccctgcaaagctctgaacttgcgcattcccaggccaggccgtggttgtctttccaaggcggctcagcttgtgctttgcttggagagagcggagggcagcagcacagtgacagcgtctgggacctcagaccagtttccacagccacttatgaaagcagacggctccatgggctggaggaggtgggacgctctggaaagaactcgggtgcragtgggaaagaaaatcgagctgagcagcgggaagtcgaagtcgcgtgagtgaggaccagacactctcgatttaggcaaaggcggggtgcacttcccaacaacacatcctcctcactggcgagaccaggcctgcccttcaagttcctctcctgatttaatccccttggcgagggtttggcatg

SEQ ID NO: 130529 - DNA, 604 bp, Homo sapiens
ataatctttaggtagatatttggaggcctgcacacttaaatgggttggtgaaatgtcataccagacacatggctgggaattgggtttttctcctccgctcttagcagcacctttgtaacccagtgattacccccctcatggctccacggccacatccgcaaaaagggtactggtgaacgtgacattttcacgaagccacagcccatggtcactccctgcaaagctctgaacttgcgcattcccaggccaggccgtggttgtctttccaaggcggctcagcttgtgctttgcttggagagagcggagggcagcagcacagtgacagcgtctgggacctcagaccagtttccacagccacttatgaaagcagacggctccatgggctggaggaggtgggacgctctggaaagaactcgggtgcaagtgggaaagaaaatcgagctgagcagckggaagtcgaagtcgcgtgagtgaggaccagacactctcgatttaggcaaaggcggggtgcacttcccaacaacacatcctcctcactggcgagaccaggcctgcccttcaagttcctctcctgatttaatccccttggcgagggtttggcatg

SEQ ID NO: 130530 - DNA, 595 bp, Homo sapiens
tcatcatttttctgtgtgagagtgttagttcagttagctacttcatcattagtggaagccagaacctcagttttgatttttgagtgtaatataaaaaattacacagtatggatacttttacatcaatttttaatgcaatattatatttgtgatatttatgctgttacagatatctacagtttgttcatttaaaaaagtccttttttacattgtggtaaaatatacataaaattaaccattttaacaatttttaaaagtgcaggacagaggaattaatcatactcacattgttctacaaccatcatccacattcatagggaaatttgttcattttgcaaaactcaaactctgttcccgttaccttccttttggcctctaggaactactcttctactttgagtttctatgaatggaactactgtaagtacctcatatgagtggaatcatacaatgtagtaaagaartcacgaggaagaataatacacactgtataacatgcttattaatttaaataaacagagatcagtagtacatggtgattatagagaaagacagataaaaaagaaaaagcagttagaagggtgtgtaaaattta

SEQ ID NO: 130531 - DNA, 480 bp, Homo sapiens
tgggcatgcagccaggccttcctgaaactgttttwtcatctaggaagtgtgatgagaacaacaccttcctcacagtacctcctgaggactcagttgcatgtggctatcaccattgttctcaccatcatccctctcaggaagaggtgggcacaagaattctgaagtttccttcatcctttgccccttatcatgaccctgtgaggcctgcacaacaggctttctgcattttccagttgaggagacaggcccaaagagggtgttgacttgcccaggagcccacaggagaggctgtcttctcctcccacctgaagagtctgccctacctggcttcacaccacacaccagcaccatcactgaccagggtcccatcctctggactctgggatagatgttcacatcccaatccaggcccagctgtggtggaaagaaacctggtatcttgggaggcctggttgagcagtgccagcttgtcccagcttc

SEQ ID NO: 130532 - DNA, 599 bp, Homo sapiens
catctgctctcaatgacaattattcagttttaatggggtcctgggggtgggaacagataaatttgagaccacaaagtaccttagaataagaattcaccctttagtcagctttagtgtgagttgcacatctattataatattggcttcatgcactactgaatataacaagaagggaaaatgtgtatcttttaaaaatctagatgacaaatggactttccacagattctttgtgtgttcctgatttagaatttgttcattccactgtagtttgttttcattgaaatcaccaactgatgaggaagcctaggctggcaagcaggacackgtggattatttgcaggaaagatgtttttgtggggaccctaaagggtcaggcactgcagcccacaggaaagcctcagccatgattctctgtggcgctgctctggtggggtaaggcagccatgcaaagctctgattccctgtcctgaagggtgacattggccgggcaagccccagccttcaggaaaaaaggacagacaagggagtgcttcacgttccggccttgttccggccttgtcatgagctccaccggcagcctgcagtggggcacagcttct

SEQ ID NO: 130533 - DNA, 671 bp, Homo sapiens
ggtcctgggggtgggaacagataaatttgagaccacaaagtaccttagaataagaattcaccctttagtcagctttagtgtgagttgcacatctattataatattggcttcatgcactactgaatataacaagaagggaaaatgtgtatcttttaaaaatctagatgacaaatggactttccacagattctttgtgtgttcctgatttagaatttgttcattccactgtagtttgttttcattgaaatcaccaactgatgaggaagcctaggctggcaagcaggacacggtggattatttgcaggaaagatgtttttgtggggaccctaaagggtcaggcactgcagcccacaggaaagcctcagccatgattctctgtggcgytgctctggtggggtaaggcagccatgcaaagctctgattccctgtcctgaagggtgacattggccgggcaagccccagccttcaggaaaaaaggacagacaagggagtgcttcacgttccggccttgttccggccttgtcatgagctccaccggcagcctgcagtggggcacagcttctaggtgcctggtcagctctggtccttcaggaggtgaaaatgacttttctcctggattctctgccctgttggctgggcctgggaaggactcaaggtctgcatggcagttt

SEQ ID NO: 130534 - DNA, 479 bp, Homo sapiens
gattttactctctctgggctctcagttgtayttcgttgatctaaatgactttccttgtgtcgttactacaccatcttgattaaggttgctttgaggcaaattttgaagttgtaatttgtgagtcctcttatttggcatctttttaaagatttttaaagatattcttagtcccttttaattttatatgaatttcagcatcaatgcttcagtttttacatggtagtcaccttgaattctaattgtactgaatctaattgtactggatgtagactgtttggggagttattgtcatcataatgtattaaacctactgattcataaacatggaatggtttctcatttatttagatcttcaacctctttcgataaggtttgtagttttcagattacaagtttctttcacatttttaaaaatttatttctatgtatttattatttaattgctattgtaaatggatttgtttttgcctcaactgcat

SEQ ID NO: 130535 - DNA, 479 bp, Homo sapiens
gattttactctctctgggctctcagttgtacttcrttgatctaaatgactttccttgtgtcgttactacaccatcttgattaaggttgctttgaggcaaattttgaagttgtaatttgtgagtcctcttatttggcatctttttaaagatttttaaagatattcttagtcccttttaattttatatgaatttcagcatcaatgcttcagtttttacatggtagtcaccttgaattctaattgtactgaatctaattgtactggatgtagactgtttggggagttattgtcatcataatgtattaaacctactgattcataaacatggaatggtttctcatttatttagatcttcaacctctttcgataaggtttgtagttttcagattacaagtttctttcacatttttaaaaatttatttctatgtatttattatttaattgctattgtaaatggatttgtttttgcctcaactgcat

SEQ ID NO: 130536 - DNA, 479 bp, Homo sapiens
gattttactctctctgggctctcagttgtacttcgttgatctaaatgactttccttgtgtcgttactacaccatcttgattaaggttgctttgaggcaaattttgaagttgtaatttgtgagtcctyttatttggcatctttttaaagatttttaaagatattcttagtcccttttaattttatatgaatttcagcatcaatgcttcagtttttacatggtagtcaccttgaattctaattgtactgaatctaattgtactggatgtagactgtttggggagttattgtcatcataatgtattaaacctactgattcataaacatggaatggtttctcatttatttagatcttcaacctctttcgataaggtttgtagttttcagattacaagtttctttcacatttttaaaaatttatttctatgtatttattatttaattgctattgtaaatggatttgtttttgcctcaactgcat

SEQ ID NO: 130537 - DNA, 479 bp, Homo sapiens
gattttactctctctgggctctcagttgtacttcgttgatctaaatgactttccttgtgtcgttactacaccatcttgattaaggttgctttgaggcaaattttgaagttgtaatttgtgagtcctcttatttggcatctttttaaagatttttaaagatattcttagtcccttttaattttatatgaatttcagcatcaatgcttcagtttttacatggtagtcaccttgaattctaattgtactgaatctaattgtactggatgtagactgtttggggagttattgtcatcataatgtattaaacctactgattcataaacatggaatggtttctcatttatttagatcttcaacctctttcgataaggtttgtagttttcagattacaagttyctttcacatttttaaaaatttatttctatgtatttattatttaattgctattgtaaatggatttgtttttgcctcaactgcat

SEQ ID NO: 130538 - DNA, 619 bp, Homo sapiens
cttaccaaaatttctaagatgcagccaaagcagtgttaagagraaactttatagccctaaatgcctttatcaagaagttagaaatgtctcaaattaacgatgtaactttgcacctaaaggaacttgaaaaaaagaaccaaccaaccccaaagctagcatgagagaagacataacagcaattagagaagaatttaatgaagttgagatgcaaaaatgtatacaacagtccaagaaaacaaaaaattggttcttcaaaaaaaattgataagctcctagccaaattaacaaatataaaaaagaaagagaagatccaaataagcacaataaaaatgacaggttatattagaatggatcagatagagatacaaaagatcctcagcgagtactatgaacagctctgcacgcaaattagaaaatctggagaaaatgaataaattccaggaagcacacagtctcccaagatggaatcagaaagagatcaaaactctaagtagactaatatcaacttctgacattgagtcagtactaaagaacctaccaacaacaacaacaacaacaaaaaggcctgaaacaggtagattggctgctgagttttaccagacatactaagaagaaatga

SEQ ID NO: 130539 - DNA, 619 bp, Homo sapiens
cttaccaaaatttctaagatgcagccaaagcagtgttaagagaaaactttatagccctaaatgcctttatcaagaagttagaaatgtctcaaattaacgatgtaactttgcacctaaaggaacttgaaaaaaagaaccaaccaaccccaaagctagcatgagagaagacataacagcaattagagaagaatttaatgaagttgagatgcaaaaatgtatacaacagtccaagaaaacaaaaaattggttcttcaaaaaaaattgataagctcctagccaaattaacaaatataaaaaagaaagagaagatccaaataagcrcaataaaaatgacaggttatattagaatggatcagatagagatacaaaagatcctcagcgagtactatgaacagctctgcacgcaaattagaaaatctggagaaaatgaataaattccaggaagcacacagtctcccaagatggaatcagaaagagatcaaaactctaagtagactaatatcaacttctgacattgagtcagtactaaagaacctaccaacaacaacaacaacaacaaaaaggcctgaaacaggtagattggctgctgagttttaccagacatactaagaagaaatga

SEQ ID NO: 130540 - DNA, 619 bp, Homo sapiens
cttaccaaaatttctaagatgcagccaaagcagtgttaagagaaaactttatagccctaaatgcctttatcaagaagttagaaatgtctcaaattaacgatgtaactttgcacctaaaggaacttgaaaaaaagaaccaaccaaccccaaagctagcatgagagaagacataacagcaattagagaagaatttaatgaagttgagatgcaaaaatgtatacaacagtccaagaaaacaaaaaattggttcttcaaaaaaaattgataagctcctagccaaattaacaaatataaaaaagaaagagaagatccaaataagcacaataaaaatgacaggttatattaraatggatcagatagagatacaaaagatcctcagcgagtactatgaacagctctgcacgcaaattagaaaatctggagaaaatgaataaattccaggaagcacacagtctcccaagatggaatcagaaagagatcaaaactctaagtagactaatatcaacttctgacattgagtcagtactaaagaacctaccaacaacaacaacaacaacaaaaaggcctgaaacaggtagattggctgctgagttttaccagacatactaagaagaaatga

SEQ ID NO: 130541 - DNA, 525 bp, Homo sapiens
atatactacattgtcataaaaataagaacgttttacaaactaaagcaaaagcaaccctaggaataaaatgcacaaataaaatatataaacatacgtttagatgtaccacgtacccttgtaatttatttagacttttaattttagtacaattttaattaaagtctgtgttttatctgtcatcgtcttagtattttttatataacaaattgtgtaaatcaaaaagtctcaatgtcattataaactatcttggcaggggttgatctccaaagaataatttctatcctaaaatatacccaatccaaatttcactctaccgtaattcttttaatcagtttcagaggaataataaatttcaaaattgttcaaggtacttcttttagttcaagtaccttttgacaggtgtaaaactgtagacagactgatacawacatattctaattgactcaaaattatatgggacctattttaaaatctagattttaaaatgtgtcaacatacacatgttctccttgtgaaataattgct

SEQ ID NO: 130542 - DNA, 286 bp, Homo sapiens
tcctcaaactcttgcatattcaaaatcacatttttgaaccttgatgcttgaagtgtagcttgggtaacrgatgggctttaagccaattttggcatgcaaggggctgagtttattaggcatcagcaccgctgaaaatcgtggggatgcaggcttaatttcaacactattctaaatacttgaaagatattatataagtctttaataaactcctgtgtctacaaatggttcacattaactcaatatccatgattaaacatctataaaatcaaggcactgttatttagtg

SEQ ID NO: 130543 - DNA, 286 bp, Homo sapiens
tcctcaaactcttgcatattcaaaatcacatttttgaaccttgatgcttgaagtgtagcttgggtaacagrtgggctttaagccaattttggcatgcaaggggctgagtttattaggcatcagcaccgctgaaaatcgtggggatgcaggcttaatttcaacactattctaaatacttgaaagatattatataagtctttaataaactcctgtgtctacaaatggttcacattaactcaatatccatgattaaacatctataaaatcaaggcactgttatttagtg

SEQ ID NO: 130544 - DNA, 408 bp, Homo sapiens
gaattcctcaaactcttgcatattcaaaatcacatttttgaaccttgatgcttgaagtgtagcttgggtaacagatgrgctttaagccaattttggcatgcaaggggctgagtttattaggcatcagcaccgctgaaaatcgtggggatgcaggcttaatttcaacactattctaaatacttgaaagatattatataagtctttaataaactcctgtgtctacaaatggttcacattaactcaatatccatgattaaacatctataaaatcaaggcactgttatttagtggagacttgctggctattctatgagaggaggtattgttattgtaatctcgtcatctcataaaattgtatcatattactcataaccagcccttcatatcctattcctattttggtatttt

SEQ ID NO: 130545 - DNA, 409 bp, Homo sapiens
gaattcctcaaactcttgcatattcaaaatcacatttttgaaccttgatgcttgaagtgtagcttgggtaacagatgggctttaagccaattttggcatgcaaggggytgagtttattaggcatcagcaccgctgaaaatcgtggggatgcaggcttaatttcaacactattctaaatacttgaaagatattatataagtctttaataaactcctgtgtctacaaatggttcacattaactcaatatccatgattaaacatctataaaatcaaggcactgttatttagtggagacttgctggctattctatgagaggaggtattgttattgtaatctcgtcatctcataaaattgtatcatattactcataaccagcccttcatatcctattcctattttggtatttta

SEQ ID NO: 130546 - DNA, 411 bp, Homo sapiens
tgaattcctcaaactcttgcatattcaaaatcacatttttgaaccttgatgcttgaagtgtagcttgggtaacagatgggctttaagccaattttggcatgcaaggggctgagtttattaggcatcagcacygctgaaaatcgtggggatgcaggcttaatttcaacactattctaaatacttgaaagatattatataagtctttaataaactcctgtgtctacaaatggttcacattaactcaatatccatgattaaacatctataaaatcaaggcactgttatttagtggagacttgctggctattctatgagaggaggtattgttattgtaatctcgtcatctcataaaattgtatcatattactcataaccagcccttcatatcctattcctattttggtattttaa

SEQ ID NO: 130547 - DNA, 286 bp, Homo sapiens
tcctcaaactcttgcatattcaaaatcacatttttgaaccttgatgcttgaagtgtagcttgggtaacagatgggctttaagccaattttggcatgcaaggggctgagtttattaggcatcagcacckctgaaaatcgtggggatgcaggcttaatttcaacactattctaaatacttgaaagatattatataagtctttaataaactcctgtgtctacaaatggttcacattaactcaatatccatgattaaacatctataaaatcaaggcactgttatttagtg

SEQ ID NO: 130548 - DNA, 379 bp, Homo sapiens
gtagcttgggtaacagatgggctttaagccaattttggcatgcaaggggctgagtttattaggcatcagcaccgctgaaaatcgtggggatgcaggcttaatttcaacactattctaaatacttgaaagatattatataastctttaataaactcctgtgtctacaaatggttcacattaactcaatatccatgattaaacatctataaaatcaaggcactgttatttagtggagacttgctggctattctatgagaggaggtattgttattgtaatctcgtcatctcataaaattgtatcatattactcataaccagcccttcatatcctattcctattttggtattttaaaataagatatctttgaaactcttgaat

SEQ ID NO: 130549 - DNA, 501 bp, Homo sapiens
gggctgagtttattaggcatcagcaccgctgaaaatcgtggggatgcaggcttaatttcaacactattctaaatacttgaaagatattatataagtctttaataaactcctgtgtctacaaatggttcacattaaytcaatatccatgattaaacatctataaaatcaaggcactgttatttagtggagacttgctggctattctatgagaggaggtattgttattgtaatctcgtcatctcataaaattgtatcatattactcataaccagcccttcatatcctattcctattttggtattttaaaataagatatctttgaaactcttgaattcaaagagggaatctgaataatttttaaaatgtcaatgaaatgccatttcttcatgcttcaacaactaaaaattgactaaagtgcttctcttcaatctttctggaacattttttatctaaattctaagaacaatcactataggttttaaccacaaatgtgaaaatatt

SEQ ID NO: 130550 - DNA, 409 bp, Homo sapiens
gaattcctcaaactcttgcatattcaaaatcacatttttgaaccttgatgcttgaagtgtagcttgggtaacagatgggctttaagccaattttggcatgcaaggggctgagtttattaggcatcagcaccgctgaaaatcgtggggatgcaggcttaatttcaacactattctaaatacttgaaagatattatataagtctttaataaactcctgtgtctacaaatggttcacattaactcaatatccatgatkaaacatctataaaatcaaggcactgttatttagtggagacttgctggctattctatgagaggaggtattgttattgtaatctcgtcatctcataaaattgtatcatattactcataaccagcccttcatatcctattcctattttggtatttta

SEQ ID NO: 130551 - DNA, 409 bp, Homo sapiens
gaattcctcaaactcttgcatattcaaaatcacatttttgaaccttgatgcttgaagtgtagcttgggtaacagatgggctttaagccaattttggcatgcaaggggctgagtttattaggcatcagcaccgctgaaaatcgtggggatgcaggcttaatttcaacactattctaaatacttgaaagatattatataagtctttaataaactcctgtgtctacaaatggttcacattaactcaatatccatgattaaacatctayaaaatcaaggcactgttatttagtggagacttgctggctattctatgagaggaggtattgttattgtaatctcgtcatctcataaaattgtatcatattactcataaccagcccttcatatcctattcctattttggtatttta

SEQ ID NO: 130552 - DNA, 379 bp, Homo sapiens
gtagcttgggtaacagatgggctttaagccaattttggcatgcaaggggctgagtttattaggcatcagcaccgctgaaaatcgtggggatgcaggcttaatttcaacactattctaaatacttgaaagatattatataagtctttaataaactcctgtgtctacaaatggttcacattaactcaatatccatgattaaacatctataaaatcaaggcactgttatttagtggagacttgctggytattctatgagaggaggtattgttattgtaatctcgtcatctcataaaattgtatcatattactcataaccagcccttcatatcctattcctattttggtattttaaaataagatatctttgaaactcttgaat

SEQ ID NO: 130553 - DNA, 407 bp, Homo sapiens
catttttgaaccttgatgcttgaagtgtagcttgggtaacagatgggctttaagccaattttggcatgcaaggggctgagtttattaggcatcagcaccgctgaaaatcgtggggatgcaggcttaatttcaacactattctaaatacttgaaagatattatataagtctttaataaactcctgtgtctacaaatggttcacattaactcaatatccatgattaaacatctataaaatcaaggcactgttatttagtggagacttgctggctattctatgagaggaggtattgttattgtaatctcrtcatctcataaaattgtatcatattactcataaccagcccttcatatcctattcctattttggtattttaaaataagatatctttgaaactcttgaattc

SEQ ID NO: 130554 - DNA, 410 bp, Homo sapiens
gaattcctcaaactcttgcatattcaaaatcacatttttgaaccttgatgcttgaagtgtagcttgggtaacagatgggctttaagccaattttggcatgcaaggggctgagtttattaggcatcagcaccgctgaaaatcgtggggatgcaggcttaatttcaacactattctaaatacttgaaagatattatataagtctttaataaactcctgtgtctacaaatggttcacattaactcaatatccatgattaaacatctataaaatcaaggcactgttatttagtggagacttgctggctattctatgagaggaggtattgttattgtaatctcgtcmtctcataaaattgtatcatattactcataaccagcccttcatatcctattcctattttggtattttaa

SEQ ID NO: 130555 - DNA, 407 bp, Homo sapiens
catttttgaaccttgatgcttgaagtgtagcttgggtaacagatgggctttaagccaattttggcatgcaaggggctgagtttattaggcatcagcaccgctgaaaatcgtggggatgcaggcttaatttcaacactattctaaatacttgaaagatattatataagtctttaataaactcctgtgtctacaaatggttcacattaactcaatatccatgattaaacatctataaaatcaaggcactgttatttagtggagacttgctggctattctatgagaggaggtattgttattgtaatctcgtcatctcataaaaktgtatcatattactcataaccagcccttcatatcctattcctattttggtattttaaaataagatatctttgaaactcttgaattc

SEQ ID NO: 130556 - DNA, 409 bp, Homo sapiens
gaattcctcaaactcttgcatattcaaaatcacatttttgaaccttgatgcttgaagtgtagcttgggtaacagatgggctttaagccaattttggcatgcaaggggctgagtttattaggcatcagcaccgctgaaaatcgtggggatgcaggcttaatttcaacactattctaaatacttgaaagatattatataagtctttaataaactcctgtgtctacaaatggttcacattaactcaatatccatgattaaacatctataaaatcaaggcactgttatttagtggagacttgctggctattctatgagaggaggtattgttattgtaatctcgtcatctcataaaattgtatcatattactcataaccagcccttcatatyctattcctattttggtatttta

SEQ ID NO: 130557 - DNA, 546 bp, Homo sapiens
ttacgtgcaatgtgtgtcataggttaatgatagaggagtttattctgactgacattgaactttatgggagcaacccacaaactttggtgtggttgagccactgagaattcaagcttagtatcttcttgttgctgttgctgtttaccaacactgtggtatttctacagggctcaagcgggcagagaaattccatgtgaacaagaatgtctcatgttgggcttctgtataaattgtgctgttgaaaaatgttaagcagataaaaattttagaaattcattgctccacactgtatcgatactatttttgtctcagtcgaagccatcctaaagttatatatacttagatcatataatcttcaatagaattgtttttaycaagttgctttttgatgttatagatgagccttaagtaattcacaactgaattcatacacaaatgttattgagtctatttcccaccatgttagagaggtttatgagagctcaatgcagaaatgcctctgaagtgggaaaatctatagtttctccaaagaaactattatagttg

SEQ ID NO: 130558 - DNA, 294 bp, Homo sapiens
tttgaaatgcaaacacaatcatwttattctctggtgaaattatctcatatattcctatcgcatttaaaattaattcagaatcatcccatgattatcaaaaccctacatgctcttccacaacatggtttacttccaagatatctcttcaacatttttttcactgtactgaattggtgactaatagtcgtattttttttttttgctcaaaaagtcttgacttgtaagtttttcagtttctcctttatccacaggtaactctttcctcataaggcgaattgcttgcttccttgagtt

SEQ ID NO: 130559 - DNA, 294 bp, Homo sapiens
tttgaaatgcaaacacaatcatattattctctggtgaaattatctcatatattcctatcgcatttaaaattaattcagaatcatcccatgattatcaaaaccctacatgctcttccacaacatggtttacttccaagatatctcttcaacatttttttcactgtactgaattggtgactaatagtcgtattttttktttttgctcaaaaagtcttgacttgtaagtttttcagtttctcctttatccacaggtaactctttcctcataaggcgaattgcttgcttccttgagtt

SEQ ID NO: 130560 - DNA, 294 bp, Homo sapiens
tttgaaatgcaaacacaatcatattattctctggtgaaattatctcatatattcctatcgcatttaaaattaattcagaatcatcccatgattatcaaaaccctacatgctcttccacaacatggtttacttccaagatatctcttcaacatttttttcactgtactgaattggtgactaatagtcgtattttttttttttgctcaaaaagtcttgacttgtaartttttcagtttctcctttatccacaggtaactctttcctcataaggcgaattgcttgcttccttgagtt

SEQ ID NO: 130561 - DNA, 553 bp, Homo sapiens
aggctcatctgattgtatcttaacttgatcagctgcaaagaacctatttcctaatgaggtcatattcagtggttagaatttcagcatctatatagaggaaacaatttagctcctatctgtgcatacatgattgtaatagctatgtcttcctaaagcgtwgtcccccttttcactagaatataaacttttaaaatcctattcatatttttaatagtctatattgtgtgttatgagtataatgatttcagtgttcttatgattgctctttgcatgatattttttgtcatctttttactttcaatccattagtatccttgcatctcagcgtatattgggatcacttgttttaatccagtctgacaatctctgcttctggaatggattttaatctgctcacatttaagattataattggtataattctatttatgtctgccattttaccgtttgttttatatatttctcaaatatttttctttatcgctttattttgcaatgaaagaatattttctaaaatagggaactttagattactaatgaattattttattat

SEQ ID NO: 130562 - DNA, 553 bp, Homo sapiens
aggctcatctgattgtatcttaacttgatcagctgcaaagaacctatttcctaatgaggtcatattcagtggttagaatttcagcatctatatagaggaaacaatttagctcctatctgtgcatacatgattgtaatagctatgtcttcctaaagcgttgtcccccttttcactagaatataaayttttaaaatcctattcatatttttaatagtctatattgtgtgttatgagtataatgatttcagtgttcttatgattgctctttgcatgatattttttgtcatctttttactttcaatccattagtatccttgcatctcagcgtatattgggatcacttgttttaatccagtctgacaatctctgcttctggaatggattttaatctgctcacatttaagattataattggtataattctatttatgtctgccattttaccgtttgttttatatatttctcaaatatttttctttatcgctttattttgcaatgaaagaatattttctaaaatagggaactttagattactaatgaattattttattat

SEQ ID NO: 130563 - DNA, 580 bp, Homo sapiens
acacgttatttaataaacaatttatgataaagagaaaaaatgcatttttactgtcttttwtaatgtcaatattacctataccagtgctttttaaaaaatgtggattcaagtgactgtcttctgtaacttgcttttagccttaggaatttattttagagtatttttttatatagtaggtctgccagcaacaacttcagttaatatttctgtttatctgggtaagtctttgtgttatcttcatttttgaaaaataattgctggataaggaattcgtggctgagagttttttttcctttgcatcttttgaatatattattctactgcctcttgcttccattgtttctcttaagtcagctgttaatcttacaaaacataggtgctcaaaaaataaacatgtgcatgaatatttacagcagtaatattcatacagtcaaaaagtggaaacaatccatatgcttgttgactcataaatggacacccaattttcagctataacaaagaatgaagtacttatatatggtataatattggtgaaatttgaaagcattctgttaagtgcacaaaaggacaaatattactt

SEQ ID NO: 130564 - DNA, 580 bp, Homo sapiens
acacgttatttaataaacaatttatgataaagagaaaaaatgcatttttactgtcttttataatgtcaatattacctataccagtgctttttwaaaaatgtggattcaagtgactgtcttctgtaacttgcttttagccttaggaatttattttagagtatttttttatatagtaggtctgccagcaacaacttcagttaatatttctgtttatctgggtaagtctttgtgttatcttcatttttgaaaaataattgctggataaggaattcgtggctgagagttttttttcctttgcatcttttgaatatattattctactgcctcttgcttccattgtttctcttaagtcagctgttaatcttacaaaacataggtgctcaaaaaataaacatgtgcatgaatatttacagcagtaatattcatacagtcaaaaagtggaaacaatccatatgcttgttgactcataaatggacacccaattttcagctataacaaagaatgaagtacttatatatggtataatattggtgaaatttgaaagcattctgttaagtgcacaaaaggacaaatattactt

SEQ ID NO: 130565 - DNA, 580 bp, Homo sapiens
acacgttatttaataaacaatttatgataaagagaaaaaatgcatttttactgtcttttataatgtcaatattacctataccagtgctttttaaaaaatgtggattcaagtgactgtcttctgtaacttgcttttagccttaggaatttattttagagtatttttttatatagtaggtctgcyagcaacaacttcagttaatatttctgtttatctgggtaagtctttgtgttatcttcatttttgaaaaataattgctggataaggaattcgtggctgagagttttttttcctttgcatcttttgaatatattattctactgcctcttgcttccattgtttctcttaagtcagctgttaatcttacaaaacataggtgctcaaaaaataaacatgtgcatgaatatttacagcagtaatattcatacagtcaaaaagtggaaacaatccatatgcttgttgactcataaatggacacccaattttcagctataacaaagaatgaagtacttatatatggtataatattggtgaaatttgaaagcattctgttaagtgcacaaaaggacaaatattactt

SEQ ID NO: 130566 - DNA, 580 bp, Homo sapiens
acacgttatttaataaacaatttatgataaagagaaaaaatgcatttttactgtcttttataatgtcaatattacctataccagtgctttttaaaaaatgtggattcaagtgactgtcttctgtaacttgcttttagccttaggaatttattttagagtatttttttatatagtaggtctgccagcaacaacttcagttaatatttctgtttatctgggtaagtctttstgttatcttcatttttgaaaaataattgctggataaggaattcgtggctgagagttttttttcctttgcatcttttgaatatattattctactgcctcttgcttccattgtttctcttaagtcagctgttaatcttacaaaacataggtgctcaaaaaataaacatgtgcatgaatatttacagcagtaatattcatacagtcaaaaagtggaaacaatccatatgcttgttgactcataaatggacacccaattttcagctataacaaagaatgaagtacttatatatggtataatattggtgaaatttgaaagcattctgttaagtgcacaaaaggacaaatattactt

SEQ ID NO: 130567 - DNA, 627 bp, Homo sapiens
  misc_feature (1)...(627): n = A,T,C or G
aatatattattctactgcctcttgcttccattgtttctcttaagtcagctgttaatcttacaaaacataggtgctcaaaaaataaacatgtgcatgaatatttacagcagtaatattcatacagtcaaaaagtggaaacaatccatatgcttgttgactcataaatggacacccaattttcagctataacaaagaatgaagtacttatatatggtataatattggtgaaatttgaaagcattctgttaagtgcacaaaaggacaaatattacttgattttattcacatgaaacattaggaattggcaaatcaattgggatataaatcagattagtggtcattagggctcagggaagcagattagggtgtaacaacyttatgtataatgggtttttggaagggacatgatgaaattgccctggaacattgtgaatatgctaaaagcaagtgcattgtatgctttaaaatggtgggtgttaattntatattatgtgatttttaccttaaaaaacaaaaaagaaaaaatagccctactctatacataataaactcaagatatgttacaaatttacatgtgaaatcctaaatactaatatatttaagggaatagctaagtagaataacact

SEQ ID NO: 130568 - DNA, 627 bp, Homo sapiens
  misc_feature (1)...(627): n = A,T,C or G
aatatattattctactgcctcttgcttccattgtttctcttaagtcagctgttaatcttacaaaacataggtgctcaaaaaataaacatgtgcatgaatatttacagcagtaatattcatacagtcaaaaagtggaaacaatccatatgcttgttgactcataaatggacacccaattttcagctataacaaagaatgaagtacttatatatggtataatattggtgaaatttgaaagcattctgttaagtgcacaaaaggacaaatattacttgattttattcacatgaaacattaggaattggcaaatcaattgggatataaatcagattagtggtcattagggctcagggaagcagattagggtgtaacaactttakgtataatgggtttttggaagggacatgatgaaattgccctggaacattgtgaatatgctaaaagcaagtgcattgtatgctttaaaatggtgggtgttaattntatattatgtgatttttaccttaaaaaacaaaaaagaaaaaatagccctactctatacataataaactcaagatatgttacaaatttacatgtgaaatcctaaatactaatatatttaagggaatagctaagtagaataacact

SEQ ID NO: 130569 - DNA, 607 bp, Homo sapiens
ttctagtgagtgaaatgtatacaacgtgcaaaagattcagaactctgaagggyaacattattctataattaagaattaagaattaattcacatcatttattggggagaaataatttttaagaattaatgactgagaaaatgtttttattttttacttagaaaattattttgtgcatgagcattaccgcaagttttgcaagaaacataaatttaaagaaacaattatgtgcacaagatgaatttaataacatcttgatatattccatgattgcggttttatttggtaaatctttaaatgcacaccatttaacgataataaatgaatcttggaaaccttgtaggtaagggtaaatattaggatgcatccagttacatttacacacacatacatgcatacagactgattcacgtgtgtatatatatatatgactttaccaattgatgttaactaatatttataagagccagctggattgatatatattgttgaacctgaaaaatatttattatatacatgtttaaaatacacacagaaataaattgcaattgcactaagtatttgaaactggactaaaatataagctggggaacaattttgtgatcatta

SEQ ID NO: 130570 - DNA, 607 bp, Homo sapiens
ttctagtgagtgaaatgtatacaacgtgcaaaagattcagaactctgaagggtaacattattctataattaagaattaagaattaattcacatcakttattggggagaaataatttttaagaattaatgactgagaaaatgtttttattttttacttagaaaattattttgtgcatgagcattaccgcaagttttgcaagaaacataaatttaaagaaacaattatgtgcacaagatgaatttaataacatcttgatatattccatgattgcggttttatttggtaaatctttaaatgcacaccatttaacgataataaatgaatcttggaaaccttgtaggtaagggtaaatattaggatgcatccagttacatttacacacacatacatgcatacagactgattcacgtgtgtatatatatatatgactttaccaattgatgttaactaatatttataagagccagctggattgatatatattgttgaacctgaaaaatatttattatatacatgtttaaaatacacacagaaataaattgcaattgcactaagtatttgaaactggactaaaatataagctggggaacaattttgtgatcatta

SEQ ID NO: 130571 - DNA, 607 bp, Homo sapiens
ttctagtgagtgaaatgtatacaacgtgcaaaagattcagaactctgaagggtaacattattctataattaagaattaagaattaattcacatcatttattggggagaaataatttttaagaattaatgactgagaaaatgtttttattttttacttagaaaattattttgtgcatgagcattaccgcaagttttgcaagaaacataaatttaaagaaacaattatgtgcacaagatgaatttaataacatcttgatatattccatgattgcggttttatttggtaaatctttaaatgcacaccatttaaygataataaatgaatcttggaaaccttgtaggtaagggtaaatattaggatgcatccagttacatttacacacacatacatgcatacagactgattcacgtgtgtatatatatatatgactttaccaattgatgttaactaatatttataagagccagctggattgatatatattgttgaacctgaaaaatatttattatatacatgtttaaaatacacacagaaataaattgcaattgcactaagtatttgaaactggactaaaatataagctggggaacaattttgtgatcatta

SEQ ID NO: 130572 - DNA, 607 bp, Homo sapiens
ttctagtgagtgaaatgtatacaacgtgcaaaagattcagaactctgaagggtaacattattctataattaagaattaagaattaattcacatcatttattggggagaaataatttttaagaattaatgactgagaaaatgtttttattttttacttagaaaattattttgtgcatgagcattaccgcaagttttgcaagaaacataaatttaaagaaacaattatgtgcacaagatgaatttaataacatcttgatatattccatgattgcggttttatttggtaaatctttaaatgcacaccatttaacgataataaatgaatcttggaaaycttgtaggtaagggtaaatattaggatgcatccagttacatttacacacacatacatgcatacagactgattcacgtgtgtatatatatatatgactttaccaattgatgttaactaatatttataagagccagctggattgatatatattgttgaacctgaaaaatatttattatatacatgtttaaaatacacacagaaataaattgcaattgcactaagtatttgaaactggactaaaatataagctggggaacaattttgtgatcatta

SEQ ID NO: 130573 - DNA, 500 bp, Homo sapiens
acctcttaccactgtgctcttattgcctgcagtattcagtagagtaatgtagtacacagatttgtagcctaggagaaagaggctataccatataacctaaacgtggtaggctgtacaatctaggtgtttgtaatattctctgtgatgtttgcaaaatgatgaaattgcctatgaatacatctgttaaaacgtatccctatcattcagtgatgtgtgactgtactaaaatgctcaatgtaagtttcaatgccctccataaaattgttgtactgtgaaatrcaaatctctcacccatggcctgaatatgtttgcaaactaagcagatcatgggaaggagaatgtgctggcatcgctgggatgattttctcacactacatgaataatatctacagacttcgtgaatatgagccacttgcatagagttaaagtagacatctctttgctgggaaatttatcaaatgggagtatgaagtgtttttacaagatacttgtttgtttgt

SEQ ID NO: 130574 - DNA, 410 bp, Homo sapiens
atgcaaaattagctaccaattaatctttaggaagtgagctgcatttctagccagamtgagcttacgttttagcaggaagcatttttgggaaatgtttatgttagagttggcccttcttgacaaggtgagacataaatgtctactttatagacatgaattaagatgggaagatatttgggggaatcatttactcaaacgctaaataataaaggtacacaaagggcaaattatactagatttctttcccacttgttttctatgtctcatgcaattcaccttgattcccttcagtttctgtttaatgtagaaagtggcattttcattattttaagcttctagcacaatgaaagaatttctctttttcatgaacaggatcatacatgaaaaggaggaagagtgtcctatatcat

SEQ ID NO: 130575 - DNA, 410 bp, Homo sapiens
atgcaaaattagctaccaattaatctttaggaagtgagctgcatttctagccagactgagcttacgttttagcaggaagcatttttgggaaatgtttatgttagagttggcccttcttgacaaggtgagacataaatgtctactttatagacatgaattaagatgggaagatatttkggggaatcatttactcaaacgctaaataataaaggtacacaaagggcaaattatactagatttctttcccacttgttttctatgtctcatgcaattcaccttgattcccttcagtttctgtttaatgtagaaagtggcattttcattattttaagcttctagcacaatgaaagaatttctctttttcatgaacaggatcatacatgaaaaggaggaagagtgtcctatatcat

SEQ ID NO: 130576 - DNA, 456 bp, Homo sapiens
ggtgtaagtataaaaatgttgtattgaagagaatcccacaagcttggtataaggcagaaaataaattgatgtgacatgaataagtagtttattacatttgtatgctacctgcggactagaggaagcaagaaamacagccactatgcttgattagcattatagggatggtacaatgattgttgccagaagctggggggaggaagaaatggggaagtattgtttaatgggtatagagtttcagttttacaagatgaaacgaattatggagatggatggtagggatggctgcacaatgttatgactatatttagtaccactgaactgtacacttaaaatggttaaccgagtacattttatgttatgtgtattttaccacaataaaaaaataaaataccttaggaacattttcatgaaaaagcccacataaaattcattttaatgcacgtgtttatgcat

SEQ ID NO: 130577 - DNA, 456 bp, Homo sapiens
ggtgtaagtataaaaatgttgtattgaagagaatcccacaagcttggtataaggcagaaaataaattgatgtgacatgaataagtagtttattacatttgtatgctacctgcggactagaggaagcaagaaacacagccactatgcttgattagcattatagrgatggtacaatgattgttgccagaagctggggggaggaagaaatggggaagtattgtttaatgggtatagagtttcagttttacaagatgaaacgaattatggagatggatggtagggatggctgcacaatgttatgactatatttagtaccactgaactgtacacttaaaatggttaaccgagtacattttatgttatgtgtattttaccacaataaaaaaataaaataccttaggaacattttcatgaaaaagcccacataaaattcattttaatgcacgtgtttatgcat

SEQ ID NO: 130578 - DNA, 456 bp, Homo sapiens
ggtgtaagtataaaaatgttgtattgaagagaatcccacaagcttggtataaggcagaaaataaattgatgtgacatgaataagtagtttattacatttgtatgctacctgcggactagaggaagcaagaaacacagccactatgcttgattagcattatagggatggtacaatgatkgttgccagaagctggggggaggaagaaatggggaagtattgtttaatgggtatagagtttcagttttacaagatgaaacgaattatggagatggatggtagggatggctgcacaatgttatgactatatttagtaccactgaactgtacacttaaaatggttaaccgagtacattttatgttatgtgtattttaccacaataaaaaaataaaataccttaggaacattttcatgaaaaagcccacataaaattcattttaatgcacgtgtttatgcat

SEQ ID NO: 130579 - DNA, 489 bp, Homo sapiens
aataagtagtttattacatttgtatgctacctgcggactagaggaagcaagaaacacagccactatgcttgattagcattatagggatggtacaatgattgttgccagaagctggggggaggaagaaatggggaagtattgtttaatgggtatagagtttcagttttacaagatgaaacgaattatggagatggatggtagggayggctgcacaatgttatgactatatttagtaccactgaactgtacacttaaaatggttaaccgagtacattttatgttatgtgtattttaccacaataaaaaaataaaataccttaggaacattttcatgaaaaagcccacataaaattcattttaatgcacgtgtttatgcatagctttctatttttctcttttccctttacattcctaattctaatcagagaagggaatcccctctgtacctccaggatattcagtaaagaccactggaggttcatgccctag

SEQ ID NO: 130580 - DNA, 438 bp, Homo sapiens
agtaggcttgactcattgaagctaagaacccagatgttatcttgagggtattaaytaataagcagtttaaatcagaatggcacattctgatttgttgtttgtatgttcacatttggcaggcatagatactgtttgaagagagaaaagtcagtagagagaggtaacaaacttaaatatgtgccaagtctagaaacaagagaccagggggatagggacctttcaaaataaaatgcaagatgtgaaaactggctgggggatgaggaaaaggcaggtctttaaggtccatccctgttttgctttaagttgttagggggtggttttatcacatgttgtagaatatgtcatttcagttttgaacatcttgagttaaattgtcctaacatatcttatgaatttgattttcttccctgggaagctaatatttcaaacacttaaaga

SEQ ID NO: 130581 - DNA, 438 bp, Homo sapiens
agtaggcttgactcattgaagctaagaacccagatgttatcttgagggtattaactaataagcagtttaaatcagaatggcacattctgatttgttktttgtatgttcacatttggcaggcatagatactgtttgaagagagaaaagtcagtagagagaggtaacaaacttaaatatgtgccaagtctagaaacaagagaccagggggatagggacctttcaaaataaaatgcaagatgtgaaaactggctgggggatgaggaaaaggcaggtctttaaggtccatccctgttttgctttaagttgttagggggtggttttatcacatgttgtagaatatgtcatttcagttttgaacatcttgagttaaattgtcctaacatatcttatgaatttgattttcttccctgggaagctaatatttcaaacacttaaaga

SEQ ID NO: 130582 - DNA, 458 bp, Homo sapiens
ggaggctcatgagtattctctttgcagagaatatatcaggagttaacaacagcttcaatatttgtggacgaccagttaactaagccasctcttagtgtctttagttgggaaatcttagctgaagatattcaataatgaaccaagagtgactaaaaaattcaatatttaagtatatttcattgtaattaatttgaattgaaatagccatatacagctagtatttactatattgaacaatgcaaataagaggagaaaattaataaccatctctaataccacatgccaaaatcctcatcaatttattctagctaaaggagttgatcagaagcagcagttgaaagcaccaactaaaccagctggggttagttcactgtcattctctcagaaccatctcttctctgaacaaaacaagtacaagagttcattgtgaatctgcattctccttgcctattttaagg

SEQ ID NO: 130583 - DNA, 458 bp, Homo sapiens
aaccaagagtgactaaaaaattcaatatttaagtatatttcattgtaattaatttgaattgaaatagccatatacagctagtatttactayattgaacaatgcaaataagaggagaaaattaataaccatctctaataccacatgccaaaatcctcatcaatttattctagctaaaggagttgatcagaagcagcagttgaaagcaccaactaaaccagctggggttagttcactgtcattctctcagaaccatctcttctctgaacaaaacaagtacaagagttcattgtgaatctgcattctccttgcctattttaaggttttgatgttgacacaaatttgtgaaatccctcctgtggtgtgatatttcgttttccttgctttctgttaggacaagaatgcttcagctcttaatttaaaattatgtttctccctcctaggttgagtgaacttagaa

SEQ ID NO: 130584 - DNA, 532 bp, Homo sapiens
taatttgaattgaaatagccatatacagctagtatttactatattgaacaatgcraataagaggagaaaattaataaccatctctaataccacatgccaaaatcctcatcaatttattctagctaaaggagttgatcagaagcagcagttgaaagcaccaactaaaccagctggggttagttcactgtcattctctcagaaccatctcttctctgaacaaaacaagtacaagagttcattgtgaatctgcattctccttgcctattttaaggttttgatgttgacacaaatttgtgaaatccctcctgtggtgtgatatttcgttttccttgctttctgttaggacaagaatgcttcagctcttaatttaaaattatgtttctccctcctaggttgagtgaacttagaatgcattctctgacatatccaagattttgttaatatgattttcgggaaaaaagcatacttaattagctaagacgtcttattctaagcttgaccctatgttcgacatcttttgaatttctagttg

SEQ ID NO: 130585 - DNA, 532 bp, Homo sapiens
taatttgaattgaaatagccatatacagctagtatttactatattgaacaatgcaaataagaggaraaaattaataaccatctctaataccacatgccaaaatcctcatcaatttattctagctaaaggagttgatcagaagcagcagttgaaagcaccaactaaaccagctggggttagttcactgtcattctctcagaaccatctcttctctgaacaaaacaagtacaagagttcattgtgaatctgcattctccttgcctattttaaggttttgatgttgacacaaatttgtgaaatccctcctgtggtgtgatatttcgttttccttgctttctgttaggacaagaatgcttcagctcttaatttaaaattatgtttctccctcctaggttgagtgaacttagaatgcattctctgacatatccaagattttgttaatatgattttcgggaaaaaagcatacttaattagctaagacgtcttattctaagcttgaccctatgttcgacatcttttgaatttctagttg

SEQ ID NO: 130586 - DNA, 458 bp, Homo sapiens
ggaggctcatgagtattctctttgcagagaatatatcaggagttaacaacagcttcaatatttgtggacgaccagttaactaagccagctcttagtgtctttagttgggaaatcttagctgaagatattcaataatgaaccaagagtgactaaaaaattcaatatttaagtatatttcattgtaattaatttgaattgaaatagccatatacagctagtatttactatattgaacaatgcaaataagaggagaaaattaataaccatctctaataccacatgccaaaatcctcatcaatttattctagctaaaggagttgatcagaagcagyagttgaaagcaccaactaaaccagctggggttagttcactgtcattctctcagaaccatctcttctctgaacaaaacaagtacaagagttcattgtgaatctgcattctccttgcctattttaagg

SEQ ID NO: 130587 - DNA, 458 bp, Homo sapiens
ggaggctcatgagtattctctttgcagagaatatatcaggagttaacaacagcttcaatatttgtggacgaccagttaactaagccagctcttagtgtctttagttgggaaatcttagctgaagatattcaataatgaaccaagagtgactaaaaaattcaatatttaagtatatttcattgtaattaatttgaattgaaatagccatatacagctagtatttactatattgaacaatgcaaataagaggagaaaattaataaccatctctaataccacatgccaaaatcctcatcaatttattctagctaaaggagttgatcagaagcagcagttgaaagcaycaactaaaccagctggggttagttcactgtcattctctcagaaccatctcttctctgaacaaaacaagtacaagagttcattgtgaatctgcattctccttgcctattttaagg

SEQ ID NO: 130588 - DNA, 532 bp, Homo sapiens
taatttgaattgaaatagccatatacagctagtatttactatattgaacaatgcaaataagaggagaaaattaataaccatctctaataccacatgccaaaatcctcatcaatttattctagctaaaggagttgatcagaagcagcagttgaaagcaccaactaaaccagctggggttagttcactgtcattctctcagaaccatctcttctctgaacaaaacaagtacaagagttcattgtgaatctgcattctccttgcctattttaaggttttgatgttgacacwaatttgtgaaatccctcctgtggtgtgatatttcgttttccttgctttctgttaggacaagaatgcttcagctcttaatttaaaattatgtttctccctcctaggttgagtgaacttagaatgcattctctgacatatccaagattttgttaatatgattttcgggaaaaaagcatacttaattagctaagacgtcttattctaagcttgaccctatgttcgacatcttttgaatttctagttg

SEQ ID NO: 130589 - DNA, 532 bp, Homo sapiens
taatttgaattgaaatagccatatacagctagtatttactatattgaacaatgcaaataagaggagaaaattaataaccatctctaataccacatgccaaaatcctcatcaatttattctagctaaaggagttgatcagaagcagcagttgaaagcaccaactaaaccagctggggttagttcactgtcattctctcagaaccatctcttctctgaacaaaacaagtacaagagttcattgtgaatctgcattctccttgcctattttaaggttttgatgttgacacaaatttgtgaaatccctcctgtggtgtgatatttcgttttccttgctttctgttaggacaagaatgcttcagctcttaatttaaaattatgtttctccctcctaggttgagtgaacttagaatgcattctctgacatatccaagattttgttaatatgawtttcgggaaaaaagcatacttaattagctaagacgtcttattctaagcttgaccctatgttcgacatcttttgaatttctagttg

SEQ ID NO: 130590 - DNA, 486 bp, Homo sapiens
aataaccatctctaataccacatgccaaaatcctcatcaatttattctagctaaaggagttgatcagaagcagcagttgaaagcaccaactaaaccagctggggttagttcactgtcattctctcagaaccatctcttctctgaacaaaacaagtacaagagttcattgtgaatctgcattctccttgcctattttaaggttttgatgttgacacaaatttgtgaaatccctcctgtggtgtgatatttcgttttccttgctttctgttaggacaagaatgcttcagctcttaatttaaaattatgtttctccctcctaggttgagtgaacttagaatgcattctctgacatatccaagattttgttaatatgattttcgggaaaaaagcatacttaattagctaagacktcttattctaagcttgaccctatgttcgacatcttttgaatttctagttgcatgggctgctctctgacactggtta

SEQ ID NO: 130591 - DNA, 486 bp, Homo sapiens
aataaccatctctaataccacatgccaaaatcctcatcaatttattctagctaaaggagttgatcagaagcagcagttgaaagcaccaactaaaccagctggggttagttcactgtcattctctcagaaccatctcttctctgaacaaaacaagtacaagagttcattgtgaatctgcattctccttgcctattttaaggttttgatgttgacacaaatttgtgaaatccctcctgtggtgtgatatttcgttttccttgctttctgttaggacaagaatgcttcagctcttaatttaaaattatgtttctccctcctaggttgagtgaacttagaatgcattctctgacatatccaagattttgttaatatgattttcgggaaaaaagcatacttaattagctaagacgtcttattctargcttgaccctatgttcgacatcttttgaatttctagttgcatgggctgctctctgacactggtta

SEQ ID NO: 130592 - DNA, 586 bp, Homo sapiens
ccagatagcaggatatttaatgccatggtaaaatatttgttttgtgtggtcaggtgagcagttcagatcataaaatcaaacgtgccctacggtcttatttttttaagtaaagtattgatgtatttatatgtataattaagtatagaaaaaaagcctagatggcttctcttataagtcttttcattgttttataaatgtatcaatatttatttttcactttttccatcagatttcctagaataataaaattcaattccctctgatgagcattcattattcttttattttttgagacggagtctcactctatctcctgcagctagagtgcagtggcctgatctcagctcactgcagcctccgcctcctgggtcattattcttacagtaagaaaaaatgaatgttactaagtatcttctctgtcctagatcaactaagtatatacaaggtgccaaatacaattaataaaatgttttatccattcataggtttttgcagtacaatttttttttttatgattccattgtcttatagtctccactaatagttttggtgtgaatttatactstaaaggaaaggtgacagcctt

SEQ ID NO: 130593 - DNA, 520 bp, Homo sapiens
catcaataagtgtcaatcctgaaaccaactaataaaaggtaaagatacaattagcttggtgcaaaaatgttatttttttctctaattacattttctaaggcttcactgggtgtagttaagaagggatgaatgattttcatcaaaactctcctcaacaagctgggtttggtggcatgcacctgtagtcccagctactcaggaagcagaggcagggsgatcatgtgagcccaggagattaaggctgcagtgagctgtgattacatctcattgaccatgtgactatgagtataaaactcatagacctcaagcctgggcaacagagcaagactctgccttaaaaagtaaaactaagcaaaacaaaacaatcctcctcaacaaatggttgcatataaccagctaaacagtaatataacagttgttggcagggtgagaagaaactagcagactgtaggtttgtcatactgtttttctgttcctgcagaaacacagatataatataggcaatgaaaactgagactca

SEQ ID NO: 130594 - DNA, 594 bp, Homo sapiens
aataatgcaaatgcaaatcttacactcatttctatgtaggtttcatttaatctttgaaattaaaatgaaattaaaagattgtgatcttttgatgaaattagactaaaatgaacaataacaaaataagaacttacttacattctttatatggtcaataaagaagtgatagtggaaaaaaacaagatcaaatgaaggtgatgatttaggaagttggaaagatagctgaaactacaaaatggtatataaccagtgaacccttagacacactgattaatgaacttcagcttttggcttggtgagagcataaaatgagagcagctgagctttgccaatttgtaatctccttgtggaaaaacaggggaaaacacatctcagcctaataagatttatctactaaagagtctagacttgatccatttgtccttgtaattcaaaagctaattcaaatactgatttgatgtattgtgtgaacaaccattgctgattatcatcgcatacctggcattctcttgtatctgatatctaaaakatttggtaattcctggactttctcttttcaaacgcagtacggtttaatttgagtcttagaacagt

SEQ ID NO: 130595 - DNA, 594 bp, Homo sapiens
aataatgcaaatgcaaatcttacactcatttctatgtaggtttcatttaatctttgaaattaaaatgaaattaaaagattgtgatcttttgatgaaattagactaaaatgaacaataacaaaataagaacttacttacattctttatatggtcaataaagaagtgatagtggaaaaaaacaagatcaaatgaaggtgatgatttaggaagttggaaagatagctgaaactacaaaatggtatataaccagtgaacccttagacacactgattaatgaacttcagcttttggcttggtgagagcataaaatgagagcagctgagctttgccaatttgtaatctccttgtggaaaaacaggggaaaacacatctcagcctaataagatttatctactaaagagtctagacttgatccatttgtccttgtaattcaaaagctaattcaaatactgatttgatgtattgtgtgaacaaccattgctgattatcatcgcatacctggcattctcttgtatctgatatctaaaagatttggtaattcctggactttctcttttcaaacscagtacggtttaatttgagtcttagaacagt

SEQ ID NO: 130596 - DNA, 532 bp, Homo sapiens
tatttcaaaatggctattgagaagggctggaaatgcaaagttagctgcaaagctgtcttggggagatttgcatcggtagagaatatgccttgatgcagccaggctttctctgaggtctgcccccttgtctggatctaggaaagtttaactgagagtctcaggtctccaaaggtctgaaagaaacattttctgtctattctctctgaggactgctcccagtgaagttccacctaggtaataagtccactgttgctagccagggtcgttttctcacataacctttttctttcttttccctgtgatccaagaccycattctttttgtacacttcatgtggtagataagcttctgcacgcatcgtgtgtctgggtcttcgttctaagggctccagtgtacacacattgcagaaacctgtatgccttttctactatttatctgcctcctattagtgattttcagggaaaattcattaggcaaaagggacattctcctttagctcattctcagacaaaatctcccaacatttaactga

SEQ ID NO: 130597 - DNA, 532 bp, Homo sapiens
tatttcaaaatggctattgagaagggctggaaatgcaaagttagctgcaaagctgtcttggggagatttgcatcggtagagaatatgccttgatgcagccaggctttctctgaggtctgcccccttgtctggatctaggaaagtttaactgagagtctcaggtctccaaaggtctgaaagaaacattttctgtctattctctctgaggactgctcccagtgaagttccacctaggtaataagtccactgttgctagccagggtcgttttctcacataacctttttctttcttttccctgtgatccaagaccccattctttttgtacacttcatgtggtagataagcttctgcacgcatcgtgtgtctgggtcttcgttctaagggctccagtgtacacacattgcagaaasctgtatgccttttctactatttatctgcctcctattagtgattttcagggaaaattcattaggcaaaagggacattctcctttagctcattctcagacaaaatctcccaacatttaactga

SEQ ID NO: 130598 - DNA, 416 bp, Homo sapiens
taaacttgtatttttctctttawgtttttagtgagttgtcttatcaaggagaagaactcaagctgattattcttttttttctcttccatccacctcgcaggtgtgttaataatttcatttctcagaaaatgttctttcatatccatcttacaagatgagagacctttcaacatcttccattcggatgtcatacgagtaatggaacatattccagcttcatgaatatggtgatacaaatagttatccgtctaacctctttcagtccaaatgtttactttactcagtgaattactcagttgactggtaatttcttctgaaatcactaatgagaggatcagaggtctggctgtggtctgtacctcatatgactcccagtgcagacaattgtttctatggagcacagacagttgaaagga

SEQ ID NO: 130599 - DNA, 424 bp, Homo sapiens
ttcttctggttaattattttaaacttgtatttttctctttatgtttttagtgagttgtcttatcaaggagaagaactcaagctgattattcttttttttctcttccatccacctcgcaggtgtgttaataatttcatttctcagaaaatgttctttcatatccatcttacaagatgagagacctttcaacatcttccattcggatgtcatacgagtaatggaacatattccagcttcatgaatatggtgatacaaatagttatccgtctaacctctttcagtccaaatgtttactttactcagtgaattactcagttgactggtaatktcttctgaaatcactaatgagaggatcagaggtctggctgtggtctgtacctcatatgactcccagtgcagacaattgtttctatggagcacagac

SEQ ID NO: 130600 - DNA, 424 bp, Homo sapiens
ttcttctggttaattattttaaacttgtatttttctctttatgtttttagtgagttgtcttatcaaggagaagaactcaagctgattattcttttttttctcttccatccacctcgcaggtgtgttaataatttcatttctcagaaaatgttctttcatatccatcttacaagatgagagacctttcaacatcttccattcggatgtcatacgagtaatggaacatattccagcttcatgaatatggtgatacaaatagttatccgtctaacctctttcagtccaaatgtttactttactcagtgaattactcagttgactggtaatttcttctgaaatcactaatgagaggatcagaggtctggctgtggtctgtacctcatrtgactcccagtgcagacaattgtttctatggagcacagac

SEQ ID NO: 130601 - DNA, 471 bp, Homo sapiens
aactaattccaaagactgaaaaggccctctgaggagaggtgatacacaggaactgtctcacttttggcagagcataaaaagaagaggtaaccacaagagaagcaagtaagatgaaaataagtaaaattttaacaaattcttaaaggccaaacgtgggctaggatatatttaggataactgaaaaccctagccataaggagagtytgcactcatgcacaagttttacttcacggcctccaggaggtactcagaagaaacaggaggatcaaagggagaagatcatatagatccactcccagtagcacaggtattcaggaggtgattagttgccacaaggaaatagaaacaaatgccatcatccatttcccccaaaccctattctcatacaaagtaaaaggcctaagtcactgagaaggggcaccaaactctcaccactggggtcacggtgtgaagccaggaacaaaacatgcc

SEQ ID NO: 130602 - DNA, 604 bp, Homo sapiens
gttggtgggaatgtaaactagtatagtcactatgtagaactatatgaaggttcttttgaaaactataaacacaattatcacatgatccagcaattccaatactggcatttatccaaaggaaagaaaataagtatataaaagagacatccrcacccttctgtttattgcagcattattcacagtagccacatggataaataaataatgtattttttctttttaaagaaaataatgtatgtacacaatggaatactattaagccataaaaaagaacaaaatcttgtcatttgtggccacatagatggaactggaggatattatgttaagtgaaataagccagaaagagaaagctaaacaccgcatgttttctcttatatgtggaagctaaaaaaaaaactgatctcatagatgtaaaaagtagaacagaggatactagaggttgggaagggtaggggaaagacaatacaataaaggccatatatgacaaaaccacagccaacatcatactgaatgggaaagagcatactgaaagggatatttgttaaaagatacaacattacaactacataggaggaataagttctagtgctctataacattgtag

SEQ ID NO: 130603 - DNA, 460 bp, Homo sapiens
tgatgactggaaaatgtacactaaaatattaacattatgatatctatttcacttgtgtttttggattatattagaaaaggtttgttaggttagagatttttatctcttttattcactgctttagactcaatgccacartagagcctggtacactgcaggtgcctaagaagtatttgtcaaagatgaaaataggctgggtgcagtggctcctggctgcaatcccagcactttgggaggccaaggcaggtggatcatttgaggtcaggagtttgaaaacagcctggccagcatggtgaaacctgtttctactaaaaatacaaaaattagctgtgcatggtggcaagcacctgtaattccagctacttgagaggctgaggcagaagaatcctttgaagccaggaggtggaggttgctgttagacaagactgcaccactgcactcctgcctgggtgacagagtg

SEQ ID NO: 130604 - DNA, 476 bp, Homo sapiens
tactgtagtgagttccataggtttccaaaaaggcaaaatattctcccttttcataggtagttggcaaagcttttatatcatccacaaaagttgttgtgagcacaacatcgcgatttctcattacaaatcttcccagatgaatttctcctttcacatgcagaaacattttttcctgtgttgtagagcagatgaagaagakaaacatgtgttttatccaccatttcaaatgaaaatttatgaaatttagaacttccataggcactaaatgttttagcagtgaccatgagataccactctaatccaccagaagggctaaatgtaaaatactatcaacaccaactactgatgagaatgtgcagtgactaaaactctcctacattactggtaaaattagacagccactttgaagaactgtgtggcactttcccatagtgttaagcacacatttgcttatgaccagccagcaattccactcc

SEQ ID NO: 130605 - DNA, 533 bp, Homo sapiens
ctgtataagaatttcatggcagcattagtcagaatagcttaaaattgaaaacatctcaaatgtccatcaagagagaaatcaataaacaaccatagcatattaatacaatggaatactaatcatcaataaaaaggaaaataaaactactgatacatgtaacaacataaataaatctcaaaaatattatactgagtaaaagaagtcagacatagaggagtatatcctatataattccatttatatgaagttctagactaggcaaaactaagctgtggtcagataaatctggtcagtggtcacctcttaggtrgtagggaacggaaaagggcataaggaatttttcttggggtaagaagcctgagtgtctcttcatgatggaattttcttggtgtgatgttctttaactcaatgtattttaaacatagatcttaaataatttccatctaaatatgctgctgtgtcttctatgttaaaacatttaaaatattctcttgctaaaggagatggctactctaatgtacataattatcaaa

SEQ ID NO: 130606 - DNA, 603 bp, Homo sapiens
aagcttcaaggagaatgatcagatttattatttttacactgaaatgtggggaatgaattgaagttgagaaaagctagaggctgtaaactaagaacactattttgagtcattcctacatgagaagtgatgggagcttaaggcagtggcagtgggaatggggaataagaaacagatttaaaggagattataataatagaacttgaagattgattggatattgtgggttttgagggaaatgagtctgtaaagaatgtcttaaggagggatttcaggttttgagtttgatgactaggttgatattatttccacttaccaagacagagaattcaagagcaagaagcaggaaattgggagtaagattggttatcagctgtaggtatgttgactctgtgacaatggcagacaactggatatacaagcatctagttcagagagagatgtgggctggaaatataggatttgcatgcaatcagaatagagtgaaaactgaagccataggagaagaggaaaaggaaatcactcaagaagaatayatagagagaaatcagtgaagcaatgtaggaactctggaaagagttcaatactatttaaggattctccaaa

SEQ ID NO: 130607 - DNA, 496 bp, Homo sapiens
actctctaattcagtttccagaaggcatccagaggggtcttttaaaaatgcaaatttgatcttatcattcagttacgagaaaccttcagtagcttcccaccactcttgtgrtgaagtctaagtttttttgttttttttttttttaacataatgcaataggcagaataacgactctcaaagatatccctgttccaattgctggtacctgtgaatatgttgccttacacagcaaagggggctttggaaatgtgattatggggagatcatcctgtattattttgttgggcccactctgattacacgggctctttaaaggagaagagtgggtgagagagatgtgaagacagaaaaggcaggagaaattcaaagcatgaaaagggattccacctgctgttgctggctctgaagatggaagaagagggcaatgagccaagaagcacaggcagctgtagaatctgggaatagcaaggacatgatttttctttagagcctccag

SEQ ID NO: 130608 - DNA, 504 bp, Homo sapiens
tatgatgtagttaattaagataatccattggactctctgagtcacagatttgatcttttcatttggcaactggctcacgtctggagtcttatggaaaccagcaatcacacatgtgcacaagacctcaacatgcttgcatcctgaagaaaccatttcaaagtttcttcactttttattgctgccaagactgatacagctatatacataaagggaagataaagtttggccaatgccaagatagttttagacgtttatatataaaaatggaagaaaggatgttatcctaggaagactgtttcaaataaaagtgcttcctgycatgtgccatttgctaaaccttgccagaagttagaacagagaatttaaaagaggagagaggacaatgggaaacaaaaatctttcaaggtaactaatggcctgtgttggggcatctgatctttgtggtgaatggctccatctcctacgaccttgctatgtcatcaggaattcgttaaatcgccagaa

SEQ ID NO: 130609 - DNA, 408 bp, Homo sapiens
ctctagaaaaccccacagatagcctcattcctccacccccacttcactccatgtagacaataagctttcagtttctaacatcatgttgagtgtagaaaagaaatttaccacccaggagcgtgtgtctgtgtctgtctatgttttcgtgtttgttgggagtgacacgaaggctgagggaaaaaataaagcataacatttctatttttcgcttgacaaacagtatctttcccagacatcaargatttttatttcagacttcaaatgtccttagcaaaataaagtttttgttggggtgtacatgaaaatagaacaaccataagaaataggccgggcgcagtggctcacgcttataatcccagcactttgggaggccgaggcaggcggatcaagaggtcaggagatctaaac

SEQ ID NO: 130610 - DNA, 610 bp, Homo sapiens
aatgcttttaatattttagaggttatataattttgatcaaattaggtaaatcatctcacaatgcatctcatactttatttgagggtaatgtatttcaaattttatttatttcagcaactgtaaaaacatttatttatattacaagtggtcatatcttcttgtaggctactaaagttgatacaatgccagttgaatgggcaatattttcttattttttgagatgcttaaacatatatcagttttatcctcttgattgcaggaasagttcttataacaagggcaaatcatggcatattgccctaagctatgctatttggaaacttcctttcacataactaagaaaagcgacagttcctcttaaagcagggtgaggataactatattaagggaactcttccctgtaaactaaatgataagtatggactattgttgagctaaagttaatattaaaagaatagctggtgcctgagcagaaagaatcttgaaggtcaaattgagtgtgcagcagggaaccaggaccctaaatgtgccaagggaacttttcaatggcaaagtctctgaagttgaggaatctacctttctcataggccagctccaggggccttcccct

SEQ ID NO: 130611 - DNA, 421 bp, Homo sapiens
tggcttttctctactttcctctccctaaatccttctaacttcaacctctttcctctaacctgctcattcttcctgctttcttcmaagtaggaaactacttggttaacatcagagatttttccacctccaagcttctaaaattctagaaatgcatttatattacggaaagttataagggacttgaataccttccagaggtttttgctacatggggttttattagtggacaaaaccttataaaagatgtcagcaatctttaagaagcagaggtatgagaacagtgtctgcttccccacttcgcatcctttagtctctttctgattttctgccatgcagaagagtggtcactgaagatttttggttttgtatagctagcagtaaaatatatttgagtaagcactgcaaaaatgtgaatatttat

SEQ ID NO: 130612 - DNA, 571 bp, Homo sapiens
acatggaagcagatggcaggaaggccagtgtcagagtgatgcagctgagaaagacttgatcagctattgttggctttcaagctgaaataaggccatgagccgaggaatgcaggcagcctttggaagctggaagaggcaaagaaatggagcctccgccagaacctccagaagaagcacaactctgcccacacctcagaggctcattgcagacttctgacctccagaactataagacaataaatttctgttgctttaggccatgaaattcatggtaatttgtcacagcrtatatatatgtatatatgtataatatgtgtatatatatttctgtatatgtgtgtgtgtatatatgtatacatattcttccacatccctgcagcttctcttctgtcttaaacatgcttacagtcacttttttaaaaagtcctatcactgtgtaaaaatgtattattacttcagtgaattggccttacctagacacccgttcaaaggcattatccacaaggctgatgctggcatcacggtctaatgactgaaacccagctggacagggtacagctgagaattgctg

SEQ ID NO: 130613 - DNA, 571 bp, Homo sapiens
acatggaagcagatggcaggaaggccagtgtcagagtgatgcagctgagaaagacttgatcagctattgttggctttcaagctgaaataaggccatgagccgaggaatgcaggcagcctttggaagctggaagaggcaaagaaatggagcctccgccagaacctccagaagaagcacaactctgcccacacctcagaggctcattgcagacttctgacctccagaactataagacaataaatttctgttgctttaggccatgaaattcatggtaatttgtcacagcgtatatatatgtatatatgtataatatgtgtatatatatttctgtatatgtgtgtgtgtatatatgtatacatattcttccacatccctgcagcttctcttctgtcttaaacatgcttacagtcacttttttaaaaagtcctatcactgtgtaaaaatgtattattacttcagtgaattggccttacctagacacccgttcaaaggcattatccacaaggctgatgctggcatcacggtctaatgactgaaacccarctggacagggtacagctgagaattgctg

SEQ ID NO: 130614 - DNA, 415 bp, Homo sapiens
aacagcccagtcataagaaattattacacattggagtgctcctgaaatgctactcgaagaatgggtaggatttcgtgggctgagagaccaggagattagtgcaaacaatgggagaaagagtgctaataaggaggtgctcagacactaattatttctcaaaattcttatgtggctgggaggtgaacagaggtgcagagagctatttctctttcacagaggggagaactgagacagggaagtctaagttcccacagaatcagcaattctcagctgcaccctgtctagttgggtttcagtcattagaccacagtgccaacttcagccttgtggatgatgcctttgaaggggtttctaggtaagactgactcactgaagtaatamtacatttttacatagtgaagagacttaaaaaaaa

SEQ ID NO: 130615 - DNA, 617 bp, Homo sapiens
aactcaggagaaagtgataatgaaaaagacaagttaacatagtagtattattgtgtaggtagttttgacattgtgcgttgcctgaaagggacttgatgactcccaggcatctttggatgacattttgagaaccactgctctggcctttctctagcttagatggggtttactgttatctgtggctaactctttaagtaaactgactgtgaacgccacatgcatgatatccaggctcatttctaggtctttaaacagcatcttccacttagttccatattcactgccccatcaccacagcacatatgtcaggaaggctgatttctcatggaaacataaagagtatgagaaaaggtcattcatcaaggctgtttttgtttttaattgtatttgtgtttttattaaaatattactgatccttaaaatgcttaaatccaggcakggagacacaattgtgaatcttagttaatttataaatataaaagtatttatgattgtttcctatggagcccatgtcctaggcaatgtgattataagatttaatcaaatggtcctattgtgtcaaggagctcagtctttgaaatacaaagaggcaattaaaaattacatagttgtggaaa

SEQ ID NO: 130616 - DNA, 528 bp, Homo sapiens
aatcttaagcataaagaacagagctgtagccatmacattactcaatttcaaactatactataaggctacagtaaccaaaatggcatggtactttctgcctttgagtctgtacaaaaacagacacatagaccaatggaatgggatataaagccctgaagtaaagctgcacacctacaaccatctaatctttagcaaagtcaatataacaagcaatgaggaaaggactccatattcataaatggtgctgggataactggctagccacatgcagaagattgaagctgaacccctcctgataccatatacaaaagttaaggcagtatgtattaaaaacttaaatgtaaaacctaaaaccataaaaaccctggaagataacctaggaaatacaattctggacataggccctggcaaagatttcatgacaaagatgccaaaagcaactgcaataaaaccaaaaattgacaaatggaacctaattaaactaaagaacttctgtgcaggaaaagaaaatctcaacagagtacacag

SEQ ID NO: 130617 - DNA, 528 bp, Homo sapiens
aatcttaagcataaagaacagagctgtagccataacattactcaatttcaaactatactataaggctacagtaaccaaaatggcatggtactttctgcctttgagtctgtacaaaaacagacacatagaccaatggaatgggatataaagccctgaagtaaagctgcacacctacaaccatctaatctttagcaaagtcaatataacaagcaatgaggaarggactccatattcataaatggtgctgggataactggctagccacatgcagaagattgaagctgaacccctcctgataccatatacaaaagttaaggcagtatgtattaaaaacttaaatgtaaaacctaaaaccataaaaaccctggaagataacctaggaaatacaattctggacataggccctggcaaagatttcatgacaaagatgccaaaagcaactgcaataaaaccaaaaattgacaaatggaacctaattaaactaaagaacttctgtgcaggaaaagaaaatctcaacagagtacacag

SEQ ID NO: 130618 - DNA, 528 bp, Homo sapiens
aatcttaagcataaagaacagagctgtagccataacattactcaatttcaaactatactataaggctacagtaaccaaaatggcatggtactttctgcctttgagtctgtacaaaaacagacacatagaccaatggaatgggatataaagccctgaagtaaagctgcacacctacaaccatctaatctttagcaaagtcaatataacaagcaatgaggaaaggactccatattcataaatggtgctgggataactggctagccacatgcagaagattgaagctgaacccctcctgataccatatacaaaagttaaggcagtatgtattaaaaacttaaatgtaaaacctaaaaccataaaaaccctggaagataacctaggaaatacaattctggacataggccckggcaaagatttcatgacaaagatgccaaaagcaactgcaataaaaccaaaaattgacaaatggaacctaattaaactaaagaacttctgtgcaggaaaagaaaatctcaacagagtacacag

SEQ ID NO: 130619 - DNA, 528 bp, Homo sapiens
aatcttaagcataaagaacagagctgtagccataacattactcaatttcaaactatactataaggctacagtaaccaaaatggcatggtactttctgcctttgagtctgtacaaaaacagacacatagaccaatggaatgggatataaagccctgaagtaaagctgcacacctacaaccatctaatctttagcaaagtcaatataacaagcaatgaggaaaggactccatattcataaatggtgctgggataactggctagccacatgcagaagattgaagctgaacccctcctgataccatatacaaaagttaaggcagtatgtattaaaaacttaaatgtaaaacctaaaaccataaaaaccctggaagataacctaggaaatacaattctggacataggccctggcaaagatttcatgacaaagatgccaaaagcaactgyaataaaaccaaaaattgacaaatggaacctaattaaactaaagaacttctgtgcaggaaaagaaaatctcaacagagtacacag

SEQ ID NO: 130620 - DNA, 525 bp, Homo sapiens
aggcttttgtacagcttggtgagcagtattattgtccattatagatctttctttaaagcagtcttcattataagacagaagggatgtctacttctactttgtttttatttagaaattttgcagcaactctgttgtkccaagaggaaaaagaaagtctgcttttttctttctgttttgttttgtccatacctaatctagagagaataagtgaagtaggtacctctgtttggggtggaccagtggcatgaggatgaaaagtgagaaaaccctaaggaagtaggggaagcttagagcccaccagataggggaccctgtggcaaagagagaccctaacctcagagttgttctatgacttcatccatctgtccactaacccataaaattgtagatgtttaaagctcaagtgtaagatctatgttttctcttgtatgctaaccaacaaacatgatgggtttatattatataatgaatataatactgtatggtgtcaattcagcttggagttattgccaaccaattctgctc

SEQ ID NO: 130621 - DNA, 525 bp, Homo sapiens
aggcttttgtacagcttggtgagcagtattattgtccattatagatctttctttaaagcagtcttcattataagacagaagggatgtctacttctactttgtttttatttagaaattttgcagcaactctgttgtgccaagaggaaaaagaaagtctgcttttttctttctgytttgttttgtccatacctaatctagagagaataagtgaagtaggtacctctgtttggggtggaccagtggcatgaggatgaaaagtgagaaaaccctaaggaagtaggggaagcttagagcccaccagataggggaccctgtggcaaagagagaccctaacctcagagttgttctatgacttcatccatctgtccactaacccataaaattgtagatgtttaaagctcaagtgtaagatctatgttttctcttgtatgctaaccaacaaacatgatgggtttatattatataatgaatataatactgtatggtgtcaattcagcttggagttattgccaaccaattctgctc

SEQ ID NO: 130622 - DNA, 334 bp, Homo sapiens
ataagacagaagggatgtctacttctactttgtttttatttagaaattttgcagcaactctgttgtgccaagaggaaaaagaaagtctgcttttttctttctgttttgttttgtccatrcctaatctagagagaataagtgaagtaggtacctctgtttggggtggaccagtggcatgaggatgaaaagtgagaaaaccctaaggaagtaggggaagcttagagcccaccagataggggaccctgtggcaaagagagaccctaacctcagagttgttctatgacttcatccatctgtccactaacccataaaattgtagatgtttaaagctcaa

SEQ ID NO: 130623 - DNA, 458 bp, Homo sapiens
agcagtcttcattataagacagaagggatgtctacttctactttgtttttatttagaaattttgcagcaactctgttgtgccaagaggaaaaagaaagtctgcttttttctttctgttttgttttgtccatacctaatctagagagaataagtgaagtaggtacctctgtttggggtggaccagtggcatgaggatgaaaagtgagaaaaccctaaggaagtaggggaagcttagagcccaccagataggggaccctgtggcaaagagagaccctaacctcagagttgttctatgacttcatccatctgtccactaacccataaaattgtagatgtttaaagctcaagtgtaagatctatgttttctcttgtatgctaaccaacaaacatgatgggyttatattatataatgaatataatactgtatggtgtcaattcagcttggagttattgccaac

SEQ ID NO: 130624 - DNA, 458 bp, Homo sapiens
agcagtcttcattataagacagaagggatgtctacttctactttgtttttatttagaaattttgcagcaactctgttgtgccaagaggaaaaagaaagtctgcttttttctttctgttttgttttgtccatacctaatctagagagaataagtgaagtaggtacctctgtttggggtggaccagtggcatgaggatgaaaagtgagaaaaccctaaggaagtaggggaagcttagagcccaccagataggggaccctgtggcaaagagagaccctaacctcagagttgttctatgacttcatccatctgtccactaacccataaaattgtagatgtttaaagctcaagtgtaagatctatgttttctcttgtatgctaaccaacaaacatgatgggtwtatattatataatgaatataatactgtatggtgtcaattcagcttggagttattgccaac

SEQ ID NO: 130625 - DNA, 411 bp, Homo sapiens
tgtgttgcaataattaaaaggattatgaagagtgtgtaagaatgtgagctaatgtttatgaattaaacttaagtgaaaaaataatatgataattatgcaaaatgcatatacttgtagataaagactgaatggtcacataatataagggaaatagctatggctgtggaattttttwaaattttctttaatatatttttgatcacacacacaaacacacaaacaatctgttatgcaaggaaggagaaatcaattggtataaattcttcccaattctttttaaaaaggtcaaagcatatgtcttaagagaagggctcacagtatcattagcacagttaactaacaatctggtaccaacctagtaacacacatacagagagagacatgcaaactcatactaagtttatgaaacag

SEQ ID NO: 130626 - DNA, 390 bp, Homo sapiens
tacttattaagttagaagcatggttttgccttaatcagaacaggtttttgtaaaattgcaagcctygtggaaaacatattggcaacttgaggcatgcaaaataatatggtggaatgcaaaataattgggaagaaaatgcatctgaaaactaaaggtgcttgatgagaatttcaaggcattgacaagagaaatgctgaagacaggacacaccaaatcaagagggattagtgctggagagagtgcaaagtggaagttttcatgaaaaaagaaagttggaaccaaacattaaaggaagtgccagacctgatctggcagaggggaaagtgaaggagaagcagcaaaagcacagctgtaaaaggcagaaatggaaaggccttatactttgtgtag

SEQ ID NO: 130627 - DNA, 390 bp, Homo sapiens
tacttattaagttagaagcatggttttgccttaatcagaacaggtttttgtaaaattgcaagccttgtggaaaacatattggcaacttgaggcatgcaaaataatatggtggaatgcaaaataattgggaagaaaatgcatctgaaaactaaaggtgcttgatgagaatttcaaggcattgacaagagaaatgctgaagacaggacacaccaaatcaagagggattagtgctggagagagtgcaaagtggaagttttcatgaaaaaagaaagttggaaccaaacattaaaggaagtgccagacctgatckggcagaggggaaagtgaaggagaagcagcaaaagcacagctgtaaaaggcagaaatggaaaggccttatactttgtgtag

SEQ ID NO: 130628 - DNA, 560 bp, Homo sapiens
ctcaatagatctgcaagatagaccctctcttataacatttattttgtgtccaagctccattcagttgagtacaagtctactggcaggggttatctattgtgttaaaacaattgctaagctatagagtattaaaatctaatactgaacaaaatctgggagtaaataaattctagttaaawataattctttcttttttttttttttttttttgagatagggttcgctttgtcacccaggctggagtgcagtggtgcaatctcggctcactgcaacctccacctcctgggttcaaatgattctcctgccccagcctcctgagtagctgggaggtgcgcaccactatgcctggctaatttttgtatttttggggtttcgccatgttggccaggctggtcttgaactcctgatctcaggtgttcagcccacctcggcctcccaaagtgctgggattacaggcatgagccaccgcacccggtctggttaaatagaattctgtgaaagaataaacttgagaagctaacaaaaatttatattacttttgtactccaaatgagagaatg

SEQ ID NO: 130629 - DNA, 457 bp, Homo sapiens
acaacatcaagaaaaataaaatagttagaaataagcttgatgaggaatgcaaaacttctacactaaaaactatgaaacattattgaaaaaaattaaagacctaaataagtagaaagatctcccatgatcatgtattggaagrtgtaatattattaagatggcaataccactcaaactgatctatagattgaacaaaatctctattgaaatcctagctggctttttttgcaaaaatgtaaaagctgattctaaaatccatatgcaaatgcaagtaacccagaataaccaaacaatctttaagaaacaaggacaaagttggagaacacacccttctcagtttcaaacctactacaaagttacaataccaagacagtttggtaatagcataagactaaatatagcataagtctagatatataaataaatggaatagcattaagagtccataaataaaccc

SEQ ID NO: 130630 - DNA, 457 bp, Homo sapiens
acaacatcaagaaaaataaaatagttagaaataagcttgatgaggaatgcaaaacttctacactaaaaactatgaaacattattgaaaaaaattaaagacctaaataagtagaaagatctcccatgatcatgtattggaaggtgtaatattattaagatggcaataccactcaaactgatctatagattgaacaaaatctctattgaaatcctagctggctttttttgcaaaaatgtaaaagctgattctaaaatccatatgcaaatgcaagtaacccagaataaccaaacaatctttaagaaacaaggasaaagttggagaacacacccttctcagtttcaaacctactacaaagttacaataccaagacagtttggtaatagcataagactaaatatagcataagtctagatatataaataaatggaatagcattaagagtccataaataaaccc

SEQ ID NO: 130631 - DNA, 582 bp, Homo sapiens
tgaattcagactatgatacttactagttggatttcctgccatgagttacttagccccttatgcatctgtttcctcgcttataaaactgtgataaaaaatagtacctatttgatggcattattgtgggaattaaactaaatcatacatataaagtaaatggaagagtaccctgcagaaagtaaatattcaataaatgctaactattattaaagacaaagataagtggaagccttctgctttttgccatgataaaatacctgatttcaggccagtttcctactggaaacagctataaagctggacaaaagatgtgaggcaactatttccaggcagtggacaataagcggcataagactttgtttcctcagaaaatgaaaactttatgagatgagcccawaatcatcctggctttttggcctagagacaatttcctgacagagagctagagtcaaagcataacacagtggctgcactgtgctgaggaggcagaggtcatagtttgtggcagctaaaaaggctagaatctgcagggtggattatcagagacacatgtgcaaagagggccccatgagtccaagatga

SEQ ID NO: 130632 - DNA, 558 bp, Homo sapiens
ggggactagcaaatgcagggccctgccaactttctgtgaggggggtcggggatgggggggagagagagagagatagaagaaagatgtattatatgcaattggctcacatgattatgaaggctgagaagccccaagatctgcagttggcgggctagagaccaaggagagccaattttgtaaattttagtctcaatccaagtctagaggcagagaagaccaaagtcccagctcaaagacaatcaaacaaaatgagagaattctctttcacttaacctttttcttctwtgcaggctttcaatggattggttgaggcccactcgtattaggaaggagaatctgcttttctcaatctactggctcaaatgttaatctcatccagaaaccctcattatccagaataatgtttaaccaaatatctggccactctgtggcccagtcaagttgggcataaaataaaccattgcactgctatatatacatttgttttttctacagtaatcctgtgtttagtaactctgctacacttatttattaattcaataatttacctgtaagtta

SEQ ID NO: 130633 - DNA, 552 bp, Homo sapiens
gttggttgtctttttattttcttaactgtgtccttttgaaacccaaacattcawaattgtgataaagtctcatctacctatattttcttctgtcacttgtgatgttggtattataggtaagaaatcattgcctaactcaaaggcatgaagatttcctctttttgggttttatagttttagcagttatatttagaactatgatccattttgtgttaatgtttgtacagttgtatgtcatttactgatgggaatatgttctgagaaatgtgttgttaggggattttgctatgcaaacatcatagaatgaatttacacaaacctaaatagtataatggtatagcctactatatacttagattttatggtatagcttattgctcttaggctataaacctgtataatatgttattctactaaatactgtaggcaattgtaacacaatagtaactatttgtatatctaaacacatctgaacatagaagaggtaccataaaatacagtataaaggattaaaaaatggtgcacttgtatagggcacttaccatgaatgga

SEQ ID NO: 130634 - DNA, 615 bp, Homo sapiens
tccattctcagtggacaagttctaccttgttccctgtgacccaaaggttcacactggcttcctgctttgctgatctggggttgcacatggggttggccatgccccatttagctttcagctcttcttatccctttgtmcctgattcccagcattaaattctcccttttgaattacctagtatgggctgttttcttcactgaataataatatacacagactagggataaaaacccccaaatgttttactcatcaaaatgtgggatttgaaaagcatgtagactattgacatagtttcaaaaccttggaatgggagtcaggctgcctgagttctggccctggaccaggcatagctacgtactttggtatttgcttagcccatcggccttagtgtcctcagccacacaatgagttgtcctctttggtgctaacattctgtgattctatctttcagatataatctgcctactaggtctgggcctaacccacaatggcattgattctgaacgtctcacctcagcactaaaaaatatctcagcacaaacaaacgtaatttgctacatgattcaacaaagggtgctggccaggttagagatactagagccatctccactgcaa

SEQ ID NO: 130635 - DNA, 644 bp, Homo sapiens
aattataaaataataataataataatakattacaattaaaatatgctacttttgcaaatttcaccaaaacatttgggcacattttaggacttctcccaacaccttagaaagggcccaagtgagagtctatgaattcgaagctgtattagtttcaaagtcagtctgcctctcagttcattacctaatgtaaaacaggcttgctggtttctagataaaatatttgaatgatttttatctttgaaaaggtaatcattaaaggctcagttgacaacacgcatattaatgttttctgcttaatccaatccatcttcttttgcttgcaattcctggagtgtacaggaaacacaggcagagcattcaattttaataatttgcacaagcatactaagatcctgcctctaccatcattactcttttaaaagaatctctattttgttcttatcataataatattaattattcaactcagacagtctttttcaaaggaagagttaaacaaccctcatccccttgtctgaagacctgcttatcctccaacaatgaaaaaattattcattatgcagggcattttattgagcctgttgtatacactgtaacaatacacttttagacatttacattgtgttctcatggaaacatttctt

SEQ ID NO: 130636 - DNA, 336 bp, Homo sapiens
caagcttaacttcactccactcaggacagggtaaaagaaaatggacttaaagttgcacaagaaaaagatgtattgtgtatgcataattacatgcatagacatatattggacacacacatatacatacacataaatacatgcagtcttcataaagccttagcgtatgttattttctttgtctgatatatcttaaagcktaataacttagtttgggcttacagtagaaataacctatgcagaagttcagaagtgaatttattagactccagaacaaccgtattatatagttataacaacagatactcattgcaggtcctgtgacaaataacacaaatg

SEQ ID NO: 130637 - DNA, 541 bp, Homo sapiens
caagaaaaaaaaatcccattaaaaagtgggctaaggacatgaatagacaattctcaaaagaatatacacaattggccaacaagcatatgaaaaaatgctcaacatcactaatgatcagggaaatgcaaatcaaaaccacaatgygataccaccttactcccgcaagaatggtcataatcaaaaaatcaaaaaacagtagatgttgatgtggatgcgatgaaaaggaaacacttgtacattgctggtgggaatgtaaactagtacaactactatggaaaacagtgtggagattccttaaagagctaaaagtagaactaccatttgatccagcaatcctactacttggtatctatgcagaggaaaaaagtcatacgaaaaagatacttgcacacacatttacagcaacacaatttgcagttgcaaaattgtggaaccaacccaaatgcccatcaatcaacgagtggataaacaaactgtggtatttttatacgatggaatactactcagccataaaaaggaatgaattaacagcattcgcagc

SEQ ID NO: 130638 - DNA, 389 bp, Homo sapiens
tgaacaattttgaaactcttgatatatagccaaatttcttgcaaaggttttgttttattttggtttggtttttgagacagggtctcaaaaaccctgttgcccaggctggagtacaggggcgtgatcttggcccaagcaatcctcccacctcagcctcccacgttaactgggactgtaggtgcgagccaccatgcccggcataatttttgtatttttttgtagtgacagggttctgccatgttgcccaggctggcctcaaactcctgagttcaagtgatctgccmaccttggcctcccaaagtgttaggatttacaggtgtgagcccaaatgtttttaaaaccaatttatgctcctgtaagcagtgaattaagagtatttcttttactac

SEQ ID NO: 130639 - DNA, 578 bp, Homo sapiens
accttactaatagcaccagggatattgatgcctcgtgcagcccctgtagctttgttcakaagcagggttttttttgttgttatttggcctagtggtaaaatgctgcctaaacttagctgttctggttgaagtcaccaggtgctagaatcctacttgcatggtctccccttcactctgtccagttgccccaaatctgggagtttgaggacattgtgaaacacagtgatggttttccagattcccttctgttcttccatttcactccctgaattgttagtaatctcactcagtgcctactcactcatatggctctaccattaaagtcactgggaaattttatgtgcaattttatacatgggttatttcattctccttttttaaaactcatatttatacatgtctgtctatgtatctaattatgcttccaaaaaataacagattttgaatgtgaagaatgtcatggtggtagtatcacgctggtatggagggattctgctaggaccagatcgctttaaacatatcaacaactgtgccagaaacatactagtggaaaagaactacacaaattcacctgtaag

SEQ ID NO: 130640 - DNA, 609 bp, Homo sapiens
aatgtcagctgatgatactattttacaggagtttctagtataatttaatctggcatattcagattatttttgtctataactacataaagcttacatttatgttaaagtgaaataaacacacaaaatacttagttcattccctggaatacagttgttactcaacaaatgttagttctcttttttttttttttttaatttctctgcagatatgggtcaaccccaatctaggtcacaaatgttagtatagtatctagcctgtataatactgctaggtatgcaagcactattaggtaatcaagggatctatagaagattagrttagtctcttccagtaagtttttgatgtagaagagtggacaagagatgttcagaaatgactatagcagtatagagtaacacgagaccccacgaagacctaagaagtgctatggtcacttggaggagggataaagcacgtttagttagcgaatagaggcatttaacatgaactttgaaagatggatagaatttccatagtcagagatagggcgaaggattctttgctccaagaatgagcaaaggcatgctggtagaaaatcattgtgcttatcttcctaagggtgagtgagc

SEQ ID NO: 130641 - DNA, 568 bp, Homo sapiens
atggtgatgtcaacagagagccacaactggtttcacaaaccactagtaaaacgttcaagttccagaaattgaaggaacacacaataaaacaataagtcctccctcttcacctatcaaaagagtaaagaatttttaaatgctggtgagggtgtgctggaattagtgctcattcactgctgttgggaattattgcattgctaatgtggtttgaaaagcaatacggtggctgggtgctgtggctcacgccggtaatcccaacactttgggaggctgaggtgggtggatcacctgaggtcatgagtttgagaccagcctggccaacatggtgaaaccccacctgtactaaaatacaaaattagccagacgtggtgrtgcatgcctgtaatcccagctacttgggaggctgaggcaggagaatagcttgaacctgggagctggaggttgcagtgagccaagatcgtgccattgcactccagcctgggtgacagagtgagactccatctcaaaaaagaaaagcagcatggtgctatatatgccgattgttttaagatattcatatcattttgta

SEQ ID NO: 130642 - DNA, 568 bp, Homo sapiens
atggtgatgtcaacagagagccacaactggtttcacaaaccactagtaaaacgttcaagttccagaaattgaaggaacacacaataaaacaataagtcctccctcttcacctatcaaaagagtaaagaatttttaaatgctggtgagggtgtgctggaattagtgctcattcactgctgttgggaattattgcattgctaatgtggtttgaaaagcaatacggtggctgggtgctgtggctcacgccggtaatcccaacactttgggaggctgaggtgggtggatcacctgaggtcatgagtttgagaccagcctggccaacatggtgaaaccccacctgtactaaaatacaaaattagccagacgtggtgatgcatgcctgtaatcccagctacttgggaggctgaggcaggagaatagcttgaacctgggagctggaggttgcagtgagccaagwtcgtgccattgcactccagcctgggtgacagagtgagactccatctcaaaaaagaaaagcagcatggtgctatatatgccgattgttttaagatattcatatcattttgta

SEQ ID NO: 130643 - DNA, 541 bp, Homo sapiens
tattggtttgttgctgctttaatttgcgttttcttaataatgatgttaaacatcttttcacatgcttaatagccatttgaatatattctctcgtatttaatttttttcgatttttttctgttatactttgttgtaaagttttaaaatatatattctgggcctggcacggtggctcatgcctctaatcctagcactttgggaggctgaggtgggtggatcacctgaggtcaggagtttgagatcagcctggccaacatggtgaaaccctgtctctactaaaaatacaaaattagccgggagtggtggcacatgcctgtaatctcagctacttgggaggctgaggcaggagagtcacttgaatctgggagttggaggttgtggtaagccgagattgtgccattgcactccagcctgggcaacaagagcaaaacgctgtctcaaaaaataaaaaaattaaataaaaaattwaaaaaatatatatatatgttctgaatacaagtcctttatcagatatttgatttgtaaaagttttcttagtacg

SEQ ID NO: 130644 - DNA, 489 bp, Homo sapiens
ttttgacactcagcttcacaggattattttacaggaatacacatgtgtcgagctgaatcaacacgctattttgtattcaatggaatattttctactttttaaaaaattcggatcaccacccactaaagtgacttcatgaccctataactcaggacctacagtttgaaacactagtttggcgctcttaacactcggtaattcccatatgagtagttattatactatcttagctattraaagtacacaatgtcttgtgtgctgctctctaaaccaagatatgtctagttaatgataacaggaataaaatgaccttaagatataaacgtttgagactaacttgtttaatacttatttcttcactgtgtaaaactgaacgcagttacacattttcgttttagaaatggttttgtttcactccacttttcacacttgcaagattcttaagtgtctcaagttcaacagagcttcaatttaagtgaggggaaccca

SEQ ID NO: 130645 - DNA, 610 bp, Homo sapiens
tgaggctgagacctactgggctgcattcccaggaggttaaggcattctaagtcacaggatgagataggaggtagtcacaaaatataggtcataaagaccttgctgataaaacaggctgcagtaaagaagctggctaaaacaccaaatcaagatggcaacaagagtgatctctggtcaccctcactgctacactcccaccaacaccatgacagtttacaaatgccatggcaatgtcagaaagttactctatatggtctaaaaaggggaggcatgaataatccaccccttgtttagcatatcatcaagaaataatcataaaaatgggcaacmagtagccctcaggactgctctgcctatagagtagccattcttttattccattactttcttaataaacttgctttcactttatgcactgacctcgaattctttcttgcgagagatccaagaaccctttcttggggtctggatcaggatccctttccaataacaattccactcctaggcatttacccaaaagaaaaaaaatacatatatccctacaaagacttgtacatgagtgttcacagcagctttatgtggaatagccaaaaactggaaataacacaaa

SEQ ID NO: 130646 - DNA, 634 bp, Homo sapiens
atgagcattttttgagatggggtctcaaaaaatggctcactgcagcttcaaccttgcaggctcaatcgatcctccgactataggcacgcaccaccaagcatggctaattttctttgtattttttgtggagacagcatttatgccatgttgccaggctggtctccaatcatgggctcaagtggttcacctgcctcagtctcccaaagtgttgggatttcaggtgtgagccactgtgcccagcctaaaattaaaaattcctttgtatggcataaaagactctttattatctgtccattattatctcttgtagtccttttctttactgcccatgayacttcatacttcagaaattctgaaatattctagttactgaatctcaatcataagatgttctttcatatttgtttctccctttgtttttcctgttgcactgcctagaactcttttctgctaatttgctcgacaaatacctataactcctccaaatatcatctcaagatgtttctcctccatgctgtcatccttgactttttaaaatagattttatttccctgaaatgccattacattggtatgatagagatgctaactctatcacagcaattctcctctttatttttatttttctggctccc

SEQ ID NO: 130647 - DNA, 547 bp, Homo sapiens
tggccgccctccctcatctgcctgcctgaggcttgcccaactgctccacaggaagtgactgatgcctgttactaaatatgaggaaatcatcagtatagcattcygcttcatcactgtctgcaattgtctgcactttgcagcagaaaaaagatgtcctaaagaaccaaagcttcaaattttcatgaaaccatgatgaccatgtagctattgcatctcatgattccaacagtgaaacattctacttaaactgacttcaacagctttaaatataaattttgtgtcttccttaatcattcttttcctattggccttataatttctttatatccagtcttaagccaccattaaaaattcatccatttctaatatttatacatcgtaagttatgcagtccaaatcaagcttctctccttgcctctgccttgactagattttcttcttccaatgaaaccagagagaatacagtcaagatttttcccagtaaggatatgagaccaggactaatcatcctgtgggaagtacctatttctgacatgcatatataatt

SEQ ID NO: 130648 - DNA, 547 bp, Homo sapiens
tggccgccctccctcatctgcctgcctgaggcttgcccaactgctccacaggaagtgactgatgcctgttactaaatatgaggaaatcatcagtatagcattccgcttcatcactgtctgcaattgtctgcactttgcagcagaaaaaagatgtcctaaagaaccaaagcytcaaattttcatgaaaccatgatgaccatgtagctattgcatctcatgattccaacagtgaaacattctacttaaactgacttcaacagctttaaatataaattttgtgtcttccttaatcattcttttcctattggccttataatttctttatatccagtcttaagccaccattaaaaattcatccatttctaatatttatacatcgtaagttatgcagtccaaatcaagcttctctccttgcctctgccttgactagattttcttcttccaatgaaaccagagagaatacagtcaagatttttcccagtaaggatatgagaccaggactaatcatcctgtgggaagtacctatttctgacatgcatatataatt

SEQ ID NO: 130649 - DNA, 547 bp, Homo sapiens
tggccgccctccctcatctgcctgcctgaggcttgcccaactgctccacaggaagtgactgatgcctgttactaaatatgaggaaatcatcagtatagcattccgcttcatcactgtctgcaattgtctgcactttgcagcagaaaaaagatgtcctaaagaaccaaagcttcaaattttcatgaaaccatgatgaccatgtagctattgcatctcatgattccaacagtgaaacattctacttaaactgacttcaacagctttaaatataaattttgtgtcttccttaatcattcttttcctattggccttataatttctttatatccagtcttaagccaccattaaaaattcatccatttctaatatttatacatcgtaagttatgcagtccaaatcaagcttctctccttgcctctgccttgactagattttcttcttccaatgaaaccagagagaatacagtcaakatttttcccagtaaggatatgagaccaggactaatcatcctgtgggaagtacctatttctgacatgcatatataatt

SEQ ID NO: 130650 - DNA, 514 bp, Homo sapiens
actaaacatagtaattttagaccctgtgttgtatagctcattatctgggtcccctgtggctctgtcccatcatctgtcgcttctttcggattttcatcatgttgycttgtttcctcagataccttaaataactttccaacactaaacatgaaaagttataaaaataactcaaaagatcagtccagagaggatttacatttgctctgggtagcggctgcagcaaagggtcacctgaatccagttttgggaagtgagaagatcctaactgcatctggtttttcttcacccttacaatttggatatggtccttggggtcacaacccaatgtatggtcagttaactaggattcctttcccctcccctacttccttggagagtcttggtctccagtttttgtccctctaactcagcagcaaggctgttataagtgttacttagcgtctcagactctcaaccaccttatcctgaattggcatgtctcctataagaaaagcagcccaaatgctgagctcag

SEQ ID NO: 130651 - DNA, 533 bp, Homo sapiens
aaattttcttttagattcaacaccaattattttcaggactagaacaaaatcaagccattatttcttttaactagctgttcaggagactcaagtacagaaaacttctgaagtttatcagtcaaatgtgtttgtctttgtcttagttgctactggcctttctttttaacagcaaataaggaggaaataaatgaaatctaaagttcttttaaaccaaaacattttgggggtttagtttcagamggaaatttgacagcattccagattagtgatgggaagaaactcccataaaggaattcgttagggaatttaggactgaccagctttagtaaaaggaccaataccttagcattcattataaagcagcattcttggtaacacttactgaagtatgaggttaaataggtaattttagataaacagaaaaggcctccatctctaaataagctgaatcatatgttcagaattcacacgtataaacaaggtcagtcttaacaacagcagagaaggcataaatttctaggggaagcaagagt

SEQ ID NO: 130652 - DNA, 533 bp, Homo sapiens
aaattttcttttagattcaacaccaattattttcaggactagaacaaaatcaagccattatttcttttaactagctgttcaggagactcaagtacagaaaacttctgaagtttatcagtcaaatgtgtttgtctttgtcttagttgctactggcctttctttttaacagcaaataaggaggaaataaatgaaatctaaagttcttttaaaccaaaacattttgggggtttagtttcagacggaaatttgacagcattccagattagtgatgggaagaaactcccataaaggaattcgttagggaatttaggactgascagctttagtaaaaggaccaataccttagcattcattataaagcagcattcttggtaacacttactgaagtatgaggttaaataggtaattttagataaacagaaaaggcctccatctctaaataagctgaatcatatgttcagaattcacacgtataaacaaggtcagtcttaacaacagcagagaaggcataaatttctaggggaagcaagagt

SEQ ID NO: 130653 - DNA, 519 bp, Homo sapiens
gagtgacatctttttgagttaatttttgaggtaattgttccaatgctcaccaataccaaatgtctgtgcatagtgggagcatggaaggtccattaagtatcttgattgttagcccactgagtggcttttgccataaaaggcacagcagcactagattgcaaatggtccagaaactcaaaggcatgatgcaaattagtttcaaggaccacaacagtgtggctaaagtcagctgattggactgaaccagttacataataacatgaaaaagtgtcaacaacagttaggcaccaccaatatccatgagagggggtcaaaagtccagtgaaattaatatgtcaggagcatggtctcattcactgtgagacaaatgtgtcaacttttgtcaggagtcacaggtttggcatgcaatggtagcctttgcatcaggtatatarattactctgccctgtctatgatgatgagtgtgtaccatgtctagtacaatgatgcacagaggcaacaatggtgtcagggcagtcc

SEQ ID NO: 130654 - DNA, 519 bp, Homo sapiens
gagtgacatctttttgagttaatttttgaggtaattgttccaatgctcaccaataccaaatgtctgtgcatagtgggagcatggaaggtccattaagtatcttgattgttagcccactgagtggcttttgccataaaaggcacagcagcactagattgcaaatggtccagaaactcaaaggcatgatgcaaattagtttcaaggaccacaacagtgtggctaaagtcagctgattggactgaaccagttacataataacatgaaaaagtgtcaacaacagttaggcaccaccaatatccatgagagggggtcaaaagtccagtgaaattaatatgtcaggagcatggtctcattcactgtgagacaaatgtgtcaacttttgtcaggagtcacaggtttggcatgcaatggtagcctttgcatcaggtatataaattactctgccctgtctatgatgatgagtgtgtacyatgtctagtacaatgatgcacagaggcaacaatggtgtcagggcagtcc

SEQ ID NO: 130655 - DNA, 541 bp, Homo sapiens
gtagggagctggaacttttgtgcccataggcagcaatgagcccccagctgccatgcttcacaatgaccgtataaaccatgtggggggcttggtcttccactcccaccaagtaataatgagatgtcctccctccctactgtggtggtgtagaggaggctaggtggagagacaggactttcactactgcccagcagtaatgagaccacactctttcatccctctatgatgtcagtagaaacatacaaagagagtgttgagacactcctactcctctaagccaaggaggtctagtgtraagccagaacacatagcctttcccagaaagaacaaggagtccctgacctgagctgtcaatgaaggctgagtactgaactcctacccctacctggtaataatgaggtaatgttctaccaccccactttccctgctagagtggtatcagagaaatccagctaaaacaaagtttaaataagattcagtctcgtaacataatgcttcaaaaatccccatttcaatagtaaatcacttgtcatgccaagaa

SEQ ID NO: 130656 - DNA, 601 bp, Homo sapiens
tgtttaaatatttaaatttcttcctgtttttcagcttatagaattttatttttttaatttaattatttttatttttatttttattttttttgagacagagtctcgctctgtcacccacgctggagtgcagtggcgcaatctcggctcactgcaacctccacctctcaggttcaagtagttctctgcctcagcctctcaagtggctgggattacaggcacctgccaccctgctcagctaatttttttatttttagtagagacagggtttcaccatcttggccaggctggtcttgaactcttgaccttgtgatccacctgyctcggcctctcaaagtgctgggttacaggtgtgaaccactgcacccggccaataactttttaatatacttttaatcatgttataatatctaatttttttatttttttcccctaagatctcataagcagtcttctatgttaatatatatttttaataagcattttttttgtcggcacataacatactataaagtagatcttctgcggttaaagtaagcatctcccctactttatattttgtgatcaaaaagcatatttctataaatatctgaattttccccca

SEQ ID NO: 130657 - DNA, 408 bp, Homo sapiens
ctttttctgaactgtttgtgagttactttacagacattactcccctctactcctttggtgtatatgctttgtaaaaccaaggacattctcttagataagtatagataatcatcaaaattaggaaattaactttggtaccaactattttatctaatccacagatcttattccgatttcacaaatttktcccaataaagtttttttttttttcttttcagagacaaggtcttgctctgttgtccaggctggagtgcagtggcacaatcatagctcgcagcagcctcaagctcctggcctcaagtgatccttccacctcagcctcccaaagtgctgggtgtacaggtgtgggccactgtgcctggccccagtaaagttctttaaagcaaaagaaagtccaagattagacac

SEQ ID NO: 130658 - DNA, 393 bp, Homo sapiens
gtgagttactttacagacattactcccctctactcctttggtgtatatgctttgtaaaaccaaggacattctcttagataagtatagataatcatcaaaattaggaaattaactttggtaccaactattttatctaatccacagatcttattccgatttcacaaatttttcccaataaagtttttttttttttcttttcagagrcaaggtcttgctctgttgtccaggctggagtgcagtggcacaatcatagctcgcagcagcctcaagctcctggcctcaagtgatccttccacctcagcctcccaaagtgctgggtgtacaggtgtgggccactgtgcctggccccagtaaagttctttaaagcaaaagaaagtccaagattagacacca

SEQ ID NO: 130659 - DNA, 408 bp, Homo sapiens
ctttttctgaactgtttgtgagttactttacagacattactcccctctactcctttggtgtatatgctttgtaaaaccaaggacattctcttagataagtatagataatcatcaaaattaggaaattaactttggtaccaactattttatctaatccacagatcttattccgatttcacaaatttttcccaataaagtttttttttttttcttttcagagacaaggtcttgctctgttgtccaggctggagtgcagtggcacaatcatagctcrcagcagcctcaagctcctggcctcaagtgatccttccacctcagcctcccaaagtgctgggtgtacaggtgtgggccactgtgcctggccccagtaaagttctttaaagcaaaagaaagtccaagattagacac

SEQ ID NO: 130660 - DNA, 618 bp, Homo sapiens
gtgaagatgaataatttgcctaagaacacttgactggtaagtagcagatccagactcaaatccagatctgtctgccacttcccataacactaattccctggaactaatacacctagtcaacatcatgcaatgctttgaatgaatatttttttttaatgaaacagaaaaatctaacaccaagatgaccaagaaacttaacacctttctatatcagcaaggattcattttttccttcctttttattcatttatcccttcaacaaatatttatggtgggcttactatgcaccagatggtgttatagataacagggctataatagtgaataaacagcttacattctaaatactagaaaacccagctaaggtcatttcaacaagaaaaaggctagcattagagtagcttcaaggttggttaatttagtgactcaaaggtgtcatggctaaggtttgggttcactgagacwcttttagtcttctcctttggtcaacaaggtgtttgctttagttttaagcaagacatcctcaaaggaaacacaggggatgttcctgtcattgtccctttatatgagcaaagaaagtcttgctagaatcctccaggctgacttcccttccacctc

SEQ ID NO: 130661 - DNA, 455 bp, Homo sapiens
tagctaagaagaaaaaagtatttaaattgtctatatagttgtcatttctggtgctctttatcctttaggtagatccatgtttccatctggtatcatttttcttctgcttgtgagacttccgataacatttcttgcagagttaagtctgctgctgaggaattctttcagcctttgtagatctgaaaaagtatttcacctctgtttttgaaagacactttctttgagtgtggawctctcatttgacagggctttttgttttgttttctgtttagtacattaaagatgtcattccactgtctgctagcttgctctgctttcatgagaaatcttctgtcatccttaccttcatttctctgtatataaatgtgtcttttttctcagctgcttttgattaagtgtgatgtgccttggggttgttttttttcatgtttctgtgcttgggtctgttaagtttc

SEQ ID NO: 130662 - DNA, 282 bp, Homo sapiens
caagctataacctgcagacttaagcctgcgaggcttaaatccaacttagcacctgtttwtgtaaataatgttttattggaacaacaacgatgcctattcacttggatattgtcatggctgctttgacgctatgacagcagttagatagttgctacagaaactatgtagcctgaaaagcctaaaatatttactactggtcctttatagtcaaagtttgttaaaccttgctctaaagagagacaccatgtttttcctgtggctttgcatccctgttgacacact

SEQ ID NO: 130663 - DNA, 410 bp, Homo sapiens
tttctctgttggatgcaagctgaaattccagaacagagttacctgccctccatctggctttttgtttctgcgcgctacrtattgtgtatattgtaccaacagtgatggctgctaaatcaatgcttgtctttattaataagaaatgtacggtattacagaaatggtattttccctaggagagatcatattatagttcattctgaagtatgagtcttacatatttcatgcccatacgtttaagaaaattacttctttccgatgaatcatgtgttccttgccagtgaagctcaggctgtcgcacagtggagttcttcacagctgttgttatatagacttcagggctacttcagtagctagctacttctgcaccactcggagaagcagaacgagtctgtagatgttttagagct

SEQ ID NO: 130664 - DNA, 658 bp, Homo sapiens
cccgactttgtatgacattactgcttccccaaatctgacctcaaatatttcgtcttatacctggtgaaacttttcaacatttacattgttttgtaatgataattgtcttgtttatttatagtttgattttaaaagttgaaggtcaatagacattactagatttttaaaattgaraaagatctcattacccatttccctagcgtgctaagtaacaaccccttgtctatttcaatacaaaggttcctaataccaagttaaaatcgattatccccatgaattgctcaaaattatgtcacatttcagattacttcacacttgagttaacacactttttattgagttataaattgtcaatattttcggaatttttttagtgaagcacatgcatacttaaaaagcacaaattatatctgcatagcttaataagttttcaccataaataaaacaataccagcacctcccaaaatctcatatgtactacctcagtcaccacttgttctttcccaaaggtcaccattattctgacttcaaacactacatatttgttttacctggctatgaactttatataaattgagagatacaatattagtcttttggtctggattcttttacttaacattaggttagtgaaagacattcatatagttgcattcag

SEQ ID NO: 130665 - DNA, 478 bp, Homo sapiens
cccatgcttatgcttatgacttcattagccttaatgatctcgtaaagaccctatttccagctggccacattagggtctagggcttcaacacatggattttggcaggacccaatcagtccacagcatgtgtggccatgcatgtgcgtgcacacacacacacacacacacacacacacacacacacacggagtacactaagccaagagctaatgctgtggtgggagccctggttatgaaatatttacattgaggataacctgagtcaggcgttgtggtgccaaccgtctgctaccaggaggagagatcagcaacacctcttttcakttagctagaaaaggctttctaaaggaattgggatttccagagatctttgcagggcaaaaaagaaagatctgagtgacagcagataggatgggaggagcagagcggagcagcagcatgatcacagtcagaagggggaaagagagagagagagaga

SEQ ID NO: 130666 - DNA, 478 bp, Homo sapiens
cccatgcttatgcttatgacttcattagccttaatgatctcgtaaagaccctatttccagctggccacattagggtctagggcttcaacacatggattttggcaggacccaatcagtccacagcatgtgtggccatgcatgtgcgtgcacacacacacacacacacacacacacacacacacacacggagtacactaagccaagagctaatgctgtggtgggagccctggttatgaaatatttacattgaggataacctgagtcaggcgttgtggtgccaaccgtctgctaccaggaggagagatcagcaacacctcttttcagttagctagaaaaggctttctaraggaattgggatttccagagatctttgcagggcaaaaaagaaagatctgagtgacagcagataggatgggaggagcagagcggagcagcagcatgatcacagtcagaagggggaaagagagagagagagaga

SEQ ID NO: 130667 - DNA, 574 bp, Homo sapiens
ctctgggtgctatggagctcttccagaggcttagagagaaaatgagacccagtcggtgacaagcttagaggacttcccaaatgactgttggaacccccatcctgtgagcgcatgcacacacacacacacacacacacacacacacwctctctctctctctctctctctctctctctctccccctctccctcaaataaaatgttgaaggaggtacaaggtacaagaacctagcatggcactggcagattttatttacctggggtgttgcaatcattatctgtaaacaaacagtccttcataattaaacattaacttccacatccacttaacagtggtggtcaagtaaatttatgtttctgaagcttctgtgagtgaatgggaacagactatttggcactatttgcaagaacataaaaattcagaattcaaaaataatcagaatttacctctagaacagctgctggagtctatctgatcatcccatggcagtcatttcattgatcacatgtatcaccctggctcaaaattgctggtgcttcagagaagaaggtgggggaagaaaccaattcctgtg

SEQ ID NO: 130668 - DNA, 620 bp, Homo sapiens
ttctgggctaataagaagatagcaataaaccaataatgtctgtaaaaattactttattacaattgaactaatggaattttggctcaaatatttagtcactacaacagaaacattaaagcaaggaacatgaagtcattgtagggttttaaaatggctactgactgacgtgaattcaaagtttcaaacagtctaaattctaaaaacttacctttacatgcttttcctcctaaataaccactcttataattcatgcattcatgtctttaggtaaagaaaactgaattttaaacacttgaggctgggtgtagtggctcatgcctataatcaaatataagaacttgagtataaaatttgaaaactacagggggaaatgtctttatcatgcatctcttgatagtctactggtctactgaaaactctctattaagtaaaactgtggctaaaaaaaaaaaaaccatggtgatacttaccttgtgtaatgtaaacaattttttaagctctttaaagtacrtctagatttactggtaatgtatagaagtcaattttatctccaagcatttctacttcctaaaccattagcaagagactcaaaacaacttcaccaaactattggacctcca

SEQ ID NO: 130669 - DNA, 362 bp, Homo sapiens
gtacaagaggcatggaattttggtcaccatcagtgcagtagctgtactttcatatctgccttcaaggaatttagagcctracgggaaagacatatatagtaacatacgtaaatccttagttatcttttctttaattgaacttgggagcatagcttcttcacctgttaaccttaaatcaccgctaaaaattacagtttgaatttcctgacaaatgaggcaactgtcctaatcataataataacttttgttcaaaataccaacagtgcttttcttactaattaatggtagattcacccaatcaaacagcaatcgccactttccctgacatcatttctgattgcaagttgcaaggcctttataaa

SEQ ID NO: 130670 - DNA, 578 bp, Homo sapiens
tgaggcctgaactgagaatgagaggttgaataggaaacagcctgggagcaaaaagcgagaacattcaggagaggaaatgaaagcccagcagagtatcataggttcaggggacaggacgcagtctggcctgactgtatgtactggggacagggctgcaagaggaawaatggtgagaactaaggcaaggccaggtcttcacaagccttagatggcctgacaaagagaaacctcagaatttcaacagatgacatgatctaatgtactttttgaagcatctctgtggtggcagagtggagggtgaatttgatgagggtgagggaggaggcagggatacatccagaagaaagtaatcctctccattccaggacttgaatcgaaacagtaagagtagagctggtgaagagggaacacagtttaaaagtatgtgtaggctaatgtgccaggcatttaaaaaataagatgaatttttaaattcaatctccatatagagagaacacttcattttcctttggcatcttttggtaatgcaatagctggactgtacataagaaactttaagttttaacagtaaattcatc

SEQ ID NO: 130671 - DNA, 521 bp, Homo sapiens
ttatggtagccaccagctatgtgtggctatagagcacttggaatgtggctaatccaaaataaggtatgctgtaagtataaaatatgcaccagacattttaaaattgttttattaagaaaatgaatgcaaaataactcattaatttttaactgattacctattgaagcaataatattttggacgtatcggattaactaaaatatgatagtaaaattaattttactttttttactttttaatgtgactactagaaaatataaattacatgtatggctcacatatttctactgggcagctttgttttcaaaaaagattagagggtgastcttctcaaacagtttaattaatgttatttgaagctcattagagtatgtatttatatctacagcatgtgaaataaagataataatgtcatttcataccagttcattttataataagccctactgatgcctctaaaatatgaaataatttcagaataattttgatttatgtctaaaaggaccttgtcataacacagt

SEQ ID NO: 130672 - DNA, 411 bp, Homo sapiens
ggagctttattgagtgttagaaaagctcagaggagacccatagtggatagctcctctctacaggcaggttatcctgtcagtgttcagctctcagcagagaggaggcctggagtgggtggctcctctctgtaggcaggtaatcccatcatctctgcagctctcagcagagaggaagccctggagtgagtggcccctctctgcagctggtcatcctgttgagtgttcagctctcagcaaagaggaggcctggagtgggtggttcctctctgcagatagcttgtcctgacaaatgttcagctctcakcagggaaggtagctcctttgtgctgctggttgtcaaattgttcacatctctcagtagagagggggccctggagcagggagctcctctctgtagctgctggtccagat

SEQ ID NO: 130673 - DNA, 558 bp, Homo sapiens
tgaaaattacaatagggcagcagcacttataaatctacaatatgttattattgtcactatgtggttactttccacaagaattatgttatgactaagcaattatatattcttagcatatgagaaaaatgtgcaaacaatgttcacaaggtcacttaccttctatggcaaagagaagtggatatgagtgagatasagcaaactacctcactggtgggtaaatctttagaacgaatctatcagggttccaatgttgtaaggtggattaactgtgttaatctattcatagcacttagaaagggactgccacaagtgttcactaaatgttagctattataaatgttatgatttttgttacctatagagattttaaagcatactcctgatgctgatacccaagtatctcatttaagaagtccagactcaggcagccataacttgtagaagctcctttgttggctctaaagccagtctttgatttacacctctatgccccagtgggcctggaggactgacagagtgagaaaaggcatggctgaggaaccctgagcctgtttccta

SEQ ID NO: 130674 - DNA, 580 bp, Homo sapiens
ctagaaaaaatgttatgtatataaataaaatgcaatccagccacaaaaaattagttcgtgatgtatttgaaatgttatcaaattcatcaaataaatttagaagaataccaccatctccctttatatttgaaaacattggtcttatttacccttgttattgttgcatgctgtattagcagacttatttagggaagaaaatttatgtgagtttccctaggcagttcagtgacaattcagatgagttatgttataattttttgtaattagcatttgtaaaaacagaaacagcctttacatacagwcgaagtataaaactccttcctagatttcaaaccactaaataaatcacctctagtttgtaccttatagttgaatgcccattgtgagttactaattctaattcatgtcagtctgggtacaaataatagtttgcagaaattttagctttgtcatccaacttaaatatcactgagtggagtttactgaagtcagatctgattattttgcaataacacaatttcacttattcttagtagtgcttgccaaagtatttcacaattattggatctgatataaaata

SEQ ID NO: 130675 - DNA, 601 bp, Homo sapiens
agactcttcttcaggagaaaagggaaacatacttgccctgaatttatgggttaatataaacttgaacttgccccatagcatacctcaccttctcaggtagcaagcgggtttgaggggcatctctgagaggtctcctacttgcctagtggcctgaaatagcaggaaatcttcctacctactttgtggatcacgcttcattagaatacctactggttttggtgattggttccctctcttttctcttttctgaaatacctgtcagatatacataaaaaagtgaatacatctggcatttagaaagcctaaattgagatcctttaaattaaaaaggccactctctgctaaaggaaggaagttacattacaagtaacactccttgaggaaaaaaaaagaggcatgcatgcagaatttaatgccagagtctaattagttttagactagtgctataaaacttaragaggagcaaagataaatatttcagctaatttccctatgtactgtgaataaaagagcgaaaatgattctcaaatttgaatgttatgaagttatttgcaaagtatattaagtcagatcttctatgtaatgaagtgtctttacagtt

SEQ ID NO: 130676 - DNA, 418 bp, Homo sapiens
catcaattcattaaaaccatacattttgctaaggactctgcagagtgttggagaccatggagatggcaaagataaacatggatcctcagacagttcttacttagctggagaagcaaccaactgcagcacaatgtccatgtgaaggcagatgccaaacaacacacatcctggctaagcaagaaggtagcggacaaactggacggaggagggcagcaagggcaatggaacagcagaggctgggtctggtggaaggacagccctataagtgtttttgtcctgtgacggtraagtcttcaggatacctggaacccttcaaaattctcaatattttaatgttacttctatgatactacataggctggtttgatctgattggagccatataaaaaatttttgtaagtaaaatagaattcaacaa

SEQ ID NO: 130677 - DNA, 594 bp, Homo sapiens
gagcgtgttataggcagggtccaagactgactttaggagggaaagaaagctgtcttctggagtcagaaatgttatgttctagctatagattgtgtgggtccctttctgcttagggccaactgaagccttatggttttgaaatgtctgtccttcccacatctggcactcactatttggggttaagcgttgaaggtccttgctaaaacatacataatatttgggaggaataactcattaaacttgtggttcttgcccytctcccctttttttcttagtaaagggccctcgagaatctaatgaaagttgacctcatacagcacaccctcaccccactcacaggcattttgcttacaatctccagctgttcttgactcttcaaatctcaactatggatcaatgctaagttaggaatccctgctcagttgtcatcctcacccatcaacactattgcccacttaagctgattaagccccttctagcagagaggttggaggaatcagggcttaggctggtcaagggaatgggaaaagtgagggaagcaaagcttcagtggcctactttggggccacagtgacatagggggcctgaaaatca

SEQ ID NO: 130678 - DNA, 594 bp, Homo sapiens
gagcgtgttataggcagggtccaagactgactttaggagggaaagaaagctgtcttctggagtcagaaatgttatgttctagctatagattgtgtgggtccctttctgcttagggccaactgaagccttatggttttgaaatgtctgtccttcccacatctggcactcactatttggggttaagcgttgaaggtccttgctaaaacatacataatatttgggaggaataactcattaaacttgtggttcttgcccttctcccctttttttcttagtaargggccctcgagaatctaatgaaagttgacctcatacagcacaccctcaccccactcacaggcattttgcttacaatctccagctgttcttgactcttcaaatctcaactatggatcaatgctaagttaggaatccctgctcagttgtcatcctcacccatcaacactattgcccacttaagctgattaagccccttctagcagagaggttggaggaatcagggcttaggctggtcaagggaatgggaaaagtgagggaagcaaagcttcagtggcctactttggggccacagtgacatagggggcctgaaaatca

SEQ ID NO: 130679 - DNA, 594 bp, Homo sapiens
gagcgtgttataggcagggtccaagactgactttaggagggaaagaaagctgtcttctggagtcagaaatgttatgttctagctatagattgtgtgggtccctttctgcttagggccaactgaagccttatggttttgaaatgtctgtccttcccacatctggcactcactatttggggttaagcgttgaaggtccttgctaaaacatacataatatttgggaggaataactcattaaacttgtggttcttgcccttctcccctttttttcttagtaaagggccctcgagaatctaatgaaagttgacctcatacagcacaccctcaccccactcacaggcattttgcttacaatctccagctgttcttgactcttcaaatctcaactatggatcaatgctaagttaggaatccctgctcagttgtcatcctyacccatcaacactattgcccacttaagctgattaagccccttctagcagagaggttggaggaatcagggcttaggctggtcaagggaatgggaaaagtgagggaagcaaagcttcagtggcctactttggggccacagtgacatagggggcctgaaaatca

SEQ ID NO: 130680 - DNA, 536 bp, Homo sapiens
ctggacttggactgacaagtcctgctttctactctgctgctagaattgagatcctagaagtcaacaaatgcatctgagtctccaggttctcattcttaaaatgtagacataatctactgcaaggagctgttatgagtactaagcaagatattttagatgagagcaagagagtgtgatgtatgtgtgagctactattcttgtttttattattttcaccmtgggccactgaaaattggttctgggggacatgtcaatgcctacggctactccgtcatctctctaccttccttcccttcttctctgcctaccgtaatcttcattcttgagtctgtatttttctaaatataaagcaagatatttattagcaaaccttttggtatccataattcttcactccccaaagtattattaaacccttttataactttgatagtgaaaataaaacagaaaaccgtaaagtttcacaagacgacatttcccctctcaaaatcaacccaaccactgagcctcctggggagctttcctcctacccaccc

SEQ ID NO: 130681 - DNA, 536 bp, Homo sapiens
ctggacttggactgacaagtcctgctttctactctgctgctagaattgagatcctagaagtcaacaaatgcatctgagtctccaggttctcattcttaaaatgtagacataatctactgcaaggagctgttatgagtactaagcaagatattttagatgagagcaagagagtgtgatgtatgtgtgagctactattcttgtttttattattttcaccctgggccactgaaaattggttctgggggacatgtcaatgcctacggctactccgtcatctctctaccttccttcccttcttctctgcctaccgtaatcttcattcttgagtctgtatttttytaaatataaagcaagatatttattagcaaaccttttggtatccataattcttcactccccaaagtattattaaacccttttataactttgatagtgaaaataaaacagaaaaccgtaaagtttcacaagacgacatttcccctctcaaaatcaacccaaccactgagcctcctggggagctttcctcctacccaccc

SEQ ID NO: 130682 - DNA, 402 bp, Homo sapiens
gttaagatgtggtcattagggtggagcccctatgatgggattagtgtccttataagaagagaaaaagaccagagctctctctttccaccacataagaacmcagtgagaaagtagctgtctgcaagccaggaagaaagccctcaccaaagacccaacaatgctggcacccttgtcttagacttccagccaccagaactgtgagagaaactgtcttttgtttaagtcatccaattgatgatatttgttatagctgcccaagctgaccaatacaaacatgaaaagcagatctatctatcaatactatttggagtagtatcagcgttattgaaatagcttcagctcccaaaatgtccactttaaaggacacaactcatcttcttgcagccctttccccacctcgca

SEQ ID NO: 130683 - DNA, 388 bp, Homo sapiens
agtgttgtaaaataatcacagactatgtttatctgcaaaacaagactgagtatggctcaagtgtgttaatagattatccatgatcattgctgtgttatcagcatacctcagcaatgagtgtatgactggcacacccacctgcttctattctaggcaaaaagggtgccttggctttttatttttgttratttgtatatgttgatttagaagcaaaataaaggggatttcttggttcaagcttacatcccttcccaaaatctaccatgttgcttgcagcttaaacagctaatccaacattgtgaccttagaatttctgaaaggctgctgaaagcattgtcaagaattaagatgcttatataattcatttctcaaaccatgacagtttgta

SEQ ID NO: 130684 - DNA, 616 bp, Homo sapiens
aagcaaaataaaggggatttcttggttcaagcttacatcccttcccaaaatctaccatgttgcttgcagcttaaacagctaatccaacattgtgaccttagaatttctgaaaggctgctgaaagcattgtcaagaattaagatgcttatataattcatttctcaaaccatgacagtttgtacaatgaaagaaggttwattaataatatgtaaactgggagagctctaggtaaaccagaaattagcatggactttttccagaagttatcatggcctttagatgggttgttttcagtaatgaaaacacatgaaatgatttgagaaagaaatgacatgagaatcagcttctactaactgccactccacatgcagaattttagataaaacctagagctctgccttccctcaatttcaagtcctgttgctctgcgcagactcttccccaaaaaacctgcccttgtccctccatccagaagtgacagctcctccctctaactcccacctcattgcttactcttctctgggtgcatatctcactggcttgcagcatcttcattcatgtatttatttttaactccactccatgaagagactgcaaattctttgaggaaagagac

SEQ ID NO: 130685 - DNA, 616 bp, Homo sapiens
aagcaaaataaaggggatttcttggttcaagcttacatcccttcccaaaatctaccatgttgcttgcagcttaaacagctaatccaacattgtgaccttagaatttctgaaaggctgctgaaagcattgtcaagaattaagatgcttatataattcatttctcaaaccatgacagtttgtacaatgaaagaaggtttattaataatatgtaaactgggagagctctaggtaaaccagaaattagcatggactttttccagaagttatcatggcctttagatgggttgttttcagtaatgaaaacacatgaaatgatttgagraagaaatgacatgagaatcagcttctactaactgccactccacatgcagaattttagataaaacctagagctctgccttccctcaatttcaagtcctgttgctctgcgcagactcttccccaaaaaacctgcccttgtccctccatccagaagtgacagctcctccctctaactcccacctcattgcttactcttctctgggtgcatatctcactggcttgcagcatcttcattcatgtatttatttttaactccactccatgaagagactgcaaattctttgaggaaagagac

SEQ ID NO: 130686 - DNA, 385 bp, Homo sapiens
aaacataaagatctgaactcaggtaaaaagaaaactgcacaactggaatatggataaactgatttgctagaagttaaatgaaaaaaagattaagaatgattcatttgaccaaaaaggttttatactccagttgtgggatatgctagccaaacaccatatattcccttaagccctgcaattagtagtatagtgttcaggcaaagatgaagaccattgcattgatttgatcacacctgaaacgatgtgttcagtgctaagagtccttcccaaagaagggcctgaacaaaccagtgtttatatgggtgagggcagagagaatasttagggtgaaaagaaatctgaaaggcacatccctcatgacctgttgttgaggtggccaaacccc

SEQ ID NO: 130687 - DNA, 473 bp, Homo sapiens
cacttcgagtttcaaagaaagctacaaatttcatatatatttaatttgttgtgaagcctgatggctggattcagagtctgtctattttcaatttacatacgattttaaggagcatgattctgtgatttcctgcaccctaacagattatataaaggcaattaaaagggtataaggatgtccaaagtagtgaactgatgacaattcaaagtgactgctgacagcttgatatacaagagaagaaygagaaaaacatagaggtgaggattgaaagaagttaattttgcaaacaattgattggtcccatgtaatacttggactaacgaaagtatcattgcatcacagtacagcaaagtaatcaatgttcataatatttctggtttctttaagagggcaaataaaatcctgagttgccctaagagggcaaacctgaatgaattcagaccatctgaaggacagagtggagaggggttagg

SEQ ID NO: 130688 - DNA, 476 bp, Homo sapiens
ctcctggtgcccccaacactaacttaacccccactggttaatcttgaagctgagtgagctccttggagccaaygcttgtacttctcccatctttacttatagcatcagatacaatgtctttcacgtggcagaaatcaatgaacaggagaaacctacaatgctggagtgggaaagtgctgcccagatcaactaggccagtgggtttctaatttttttcctattaagcagcaaaaagaaccctgtgttcttttcaaatgaatgattatggaatctcctcccctgcatataaaaggtaagaagtttgcttctttgggttgaggagtgtacagagattcagaaagcccatctcttatctttctctcccactctcgtccctggggcagcacttgaaaaatcacagatctgtctaggaccttccttttacaaatgagaaagctgaaggccagagaaatagagtgacttggccaggttcacac

SEQ ID NO: 130689 - DNA, 476 bp, Homo sapiens
ctcctggtgcccccaacactaacttaacccccactggttaatcttgaagctgagtgagctccttggagccaatgcttgtacttctcccatctttacttatagcatcagatacaatgtctttcacgtggcagaaatcaatgaacaggagaaacctacaatgctggagtgggaaagtgctgcccagatcaactaggccagtgggtttctaatttttttcctattaagcagcaaaaagaamcctgtgttcttttcaaatgaatgattatggaatctcctcccctgcatataaaaggtaagaagtttgcttctttgggttgaggagtgtacagagattcagaaagcccatctcttatctttctctcccactctcgtccctggggcagcacttgaaaaatcacagatctgtctaggaccttccttttacaaatgagaaagctgaaggccagagaaatagagtgacttggccaggttcacac

SEQ ID NO: 130690 - DNA, 542 bp, Homo sapiens
gggagtcgggctgagcttccctgcctatgaagtggaaaaatacttatccgacttcaaagagatcgaaagaagaaaatcaatgcatgataacctggacaatgccaataagttataattttatctgcctaatttaagaaaaccctaaatcagattgagagctcagaatcagagagatataaattaagagaaaagctgttcttccaccaagagatgtgaaaacagtatactttaaaacagagcagatggtctgaagttgaggcaggtttgtttttgcttaggcgcccatctgctgtgtggccttcaggaaggcactgtaactgttgagkgtcgacttctccccaaatgatggagatatcaaattctatgtcctccgaaagataaagtggtggttgttgttttaatttaccaactagagacatgaaccaggcaaaatgtcacttaccagatggggaataatatcctttaaaatgtttatatattctccagtgacaaaaaaaaccatggtgttgtatcccattgactcgtaggaaatactgtagaaa

SEQ ID NO: 130691 - DNA, 546 bp, Homo sapiens
ctgactccagcacctgatgaccttgttggggttggagagatttccctctcagcatcatctgtgtgtgctcatatataacgttaggctaagaagatagcccccccyttttttatatagagctttgccatttgcttccacaatgcaatctagattatttctttggtgtcctcatatgtgttttccattttaaaggtggataaaatgtggaaatagtacgttaccctaagaaaaataactagaattaatcataaaagcaactgtcttgtatttatactggaaggacagaattaaaaacaaccaactaacaaaagaaaaccaaaattgttgctcagataggcaaagagaggggaaatgtaactgtaatgacagattcaatttctttaaaaataaatgttaccaatattatccctaatgctattttatttgcttagaagagaatgctgcattaagcttcacctttatatgccactattataggtctagatttgttatcaaatcacttcctggaaaacagacaaagcaatacctaacaatcacttgaaatga

SEQ ID NO: 130692 - DNA, 575 bp, Homo sapiens
attttagagcttaaagatagtctctcatttaaagggatatcgtccaatgtttaagtcttgtcctcgtgtctaatctcaagtgtgtcctrgcagtcctccctttactaaggcagttccctgtctcgtattcctcaaagcccgtcttcccttcccattctcagctgatttcactgagaaaacagaagcagttggaagagaacttatacatcctttcacccgccaaactcccagccactttacctttgctcctatctgaagccaccacctccacctgtgctttgatcccaggtggagatacacctatcccatctcttgcccaaatcactaacttcttatttgatcttttcaggattatttccatcagcatgtaaacatgtgatcatatcttcttaccgtccctcaagtgtatcaaaaacactgttgttggaactttctcctagctagcctatgattttctctctcacaaattcagattatgttagcagagggatcttccctgtatagcccatttaaaatatcaactcccattattgctctgtcctaccctactttattttctttataccaattcccca

SEQ ID NO: 130693 - DNA, 497 bp, Homo sapiens
cttaataataatataatcaataatgataatgctgacactcaattagtgcctactctgcctgttattgttttaaacactcaccatctagtaacttcatcgggaagtttatataggatagatacctactaaattgatattttgtcacgatatgctcaaatcaaggaaaccctaactgtgaaacttctactaacaaaatatcttgtgttacttagacaacaaattatggtgatgtgtaaccaaatgtcattcagaccaactgagggaaagagagtcaaactgtgtagtaaatattaatgaaattttgtttctttcttacctattttggataaaaataatatataaagagatattacattattgtaaaccaaaaagtatctgagacaggactcaatcaatttagaagtttattttgccaaggttaaagacacacccagaagaaaatgacacagaatcacagaaacagtctgtggtgtgtgyctttctccaaagttgaattc

SEQ ID NO: 130694 - DNA, 599 bp, Homo sapiens
actatacttttactacaaggctaatctgaatttggaaggtaggggtgccaactgtcccattgattcactttctaaactcaacacagccacctctatctttgactttcagagttcgcaaaaagctgacctcccttccacaagttcccttcacttgtcagggcaagtcccagagcygctctcaggcatgtgtctcctcctcaaaaagccgcagtggaaggagctcaaggccggcagagcaaggctctctggaggctgctcaatgcgggctgcagcctccgcagcctatcagctctgcagctatttgacacaaatatatccagatgctgaaaatttactgcaggcttcagctatgccacagccacaaggagatgcgaataattatgttttgaaggcttttctctctgttttcaacagtcaatcaagatgatgggatttctggggacatgagggaaatgtcagcctgtgcttttcggcacagtgatggggactcttatgcaagtgggtcttgttctgcttctgctgatccattagaaggaacgcccagaatcctcagccagaataaatctttcaatcttgggaatcaaagttgaaaaaacaca

SEQ ID NO: 130695 - DNA, 618 bp, Homo sapiens
tggaccaggtgtgccatttgcatagcacatgaagaagctggcygcctcaccctaatcttttattatgtagatgggttttctacctggcctgcatctccttgcctccttctttactgcacacgtggcaacaaagaaaagggaggagggagcctccatgttgaatatacctggctatctatgtttgcagcttgatttttcaggctgctttgtgttagaaaagaaataatttgggggctgctttttattaaaagggaaatcttaccgaggactctcttacctcacagcctaaataatttctttttagctcctgtatcactttgattatcatacagcagtgtgcttgaacaaggctcttaattttttcagcagtttctggactaggtagtgtataaaccaagagcacatctcactttttcatcaactgtttactctatcacgttgcaaggactctgagggatagttaagatttaaatattcccagcagggagggaagaagtttggataaaagaatatctttccctctctctctttctctcaggattttatcattagaaaagatcattttgctcgatcattaaaactgccattagtgcttaagcacaagagacacattcgttt

SEQ ID NO: 130696 - DNA, 258 bp, Homo sapiens
atctggcctcctacactgtcagcgcttttaagtaccacagatttcaccaccaatcacttcctctctatgccaactagcagtccagtgtgacccatgcttaaatggccttagaatcaggaataaggactctgatgatgtactaagctatctctcggaagtgtctctccaaktactgctttctgagctctctaaattggtttgagatctgaggtgtttttctgaataaacagacttgctactcatatcatgtaacattct

SEQ ID NO: 130697 - DNA, 353 bp, Homo sapiens
tacatgcactgggaagccaagaaatgtgtgtgatttgctttattgggatagtcactttattgtggtggtctggaattgagccctgactatctccagggtatgcctgtacatactggggttgaacaataagtaaatagatgatggatgatgtttccctgtgagtgagggaagttatagatcagcaaggggtaggagggaaagctagaattaatamgtgccactggattagagttggagacatcagtatgaagtcatgttttgtttaatatttataaatatataagaatgtataatactacttacatatgcctatataatgagttatatgtatttatatatacacacacatgctt

SEQ ID NO: 130698 - DNA, 479 bp, Homo sapiens
gaagttgcagtgagcctagatcctgccactgcactccagcctgggcgacagagtgagactctgtccccaaaaaaataaataaataaaagatgttcacaatatattgttaagtgaaaaaagcaggctacataacttgcataatatgagtgcattttaataaaaatatacatatttagcaaaataaaaggacaaatggtatttattaaaatatttacgttgattatttcaacacagaggatgatagttgattttgcttaatttcttccctccttcttttcaatttgaattttctataatgaagattgtttctttttctttctttcttttttttttttgagatggagtttcgytcttgttgcccaggctggggtgcgatggcgccatctcggttcaccacaacctctgcgtcccaggtttaagtgattcttctgcctcagcctccctagtagctgggattataggcgtgtgccaccacaccc

SEQ ID NO: 130699 - DNA, 479 bp, Homo sapiens
gaagttgcagtgagcctagatcctgccactgcactccagcctgggcgacagagtgagactctgtccccaaaaaaataaataaataaaagatgttcacaatatattgttaagtgaaaaaagcaggctacataacttgcataatatgagtgcattttaataaaaatatacatatttagcaaaataaaaggacaaatggtatttattaaaatatttacgttgattatttcaacacagaggatgatagttgattttgcttaatttcttccctccttcttttcaatttgaattttctataatgaagattgtttctttttctttctttcttttttttttttgagatggagtttcgctcttgttgcccaggctggggtgcratggcgccatctcggttcaccacaacctctgcgtcccaggtttaagtgattcttctgcctcagcctccctagtagctgggattataggcgtgtgccaccacaccc

SEQ ID NO: 130700 - DNA, 479 bp, Homo sapiens
gaagttgcagtgagcctagatcctgccactgcactccagcctgggcgacagagtgagactctgtccccaaaaaaataaataaataaaagatgttcacaatatattgttaagtgaaaaaagcaggctacataacttgcataatatgagtgcattttaataaaaatatacatatttagcaaaataaaaggacaaatggtatttattaaaatatttacgttgattatttcaacacagaggatgatagttgattttgcttaatttcttccctccttcttttcaatttgaattttctataatgaagattgtttctttttctttctttcttttttttttttgagatggagtttcgctcttgttgcccaggctggggtgcgatggcgccatctcggytcaccacaacctctgcgtcccaggtttaagtgattcttctgcctcagcctccctagtagctgggattataggcgtgtgccaccacaccc

SEQ ID NO: 130701 - DNA, 479 bp, Homo sapiens
gaagttgcagtgagcctagatcctgccactgcactccagcctgggcgacagagtgagactctgtccccaaaaaaataaataaataaaagatgttcacaatatattgttaagtgaaaaaagcaggctacataacttgcataatatgagtgcattttaataaaaatatacatatttagcaaaataaaaggacaaatggtatttattaaaatatttacgttgattatttcaacacagaggatgatagttgattttgcttaatttcttccctccttcttttcaatttgaattttctataatgaagattgtttctttttctttctttcttttttttttttgagatggagtttcgctcttgttgcccaggctggggtgcgatggcgccatctcggttcaccacaacctctgcgtcccaggtttaagtgattcttctgcctcagcctccckagtagctgggattataggcgtgtgccaccacaccc

SEQ ID NO: 130702 - DNA, 339 bp, Homo sapiens
ttttttttaatgttttttgtacactctgaaggctgatttttgttaattgtatgtgttgcattttttatggtttgtcttatgccttttgaaagtaaaagttcttaatttaaatatagccaacctgtaaatcatttgtgaaagtctgtggtttaagaggtcttgaataagaaattatcccatcatcataagtcataaatacttttttgttgttgttgagacagaatctcrttttgttgtccaggctggagtgcagtgggttgatctcagctcactgcaacctctgcctcctgggttcagcaattctcctgcctcagcctcccaagtagctgtgataataag

SEQ ID NO: 130703 - DNA, 637 bp, Homo sapiens
cctctgaagccacacacaccctgctcgctgatctccctgcagtagaaggttaagtctgcagcatcagccagccccggaaccctttgaaataccatgtcggaaacttcttggcaaagcctaacaatagaaaccataagcagattctaaattaccattatcattaatcggggttgacatgtaactggcccctcctaagtactgctcaatcaytgcccccctttattcctttctccaaggttcccacaggcctccttagactaaagggtacctgagccgtgccccagtgtgtggtcctcggcagaacaatggaagcaaagtaatccctgacagagccgggctgggaccttcgacataaagcagatatggggcaatgtgagaaagggccatggggagaagctcagacagggaagaagaccgggagagcagccaggtattaagaggccgggtaggggcaaggagagccaataatacagggtgggtgaaatggaatgaacacggtttgtgttcagagttggcatttgtcactttaatggattccaaagaaggaggcaggcatgctttccaactagcctgggaaaccagctacatatgggagaagagtttttaaaaagcccttcattcaagaaacctatgtgta

SEQ ID NO: 130704 - DNA, 260 bp, Homo sapiens
agcacaatgcattactcacacaaatttatggtgagaaaaataaatcaccatggatatattcctgaaaagagtgatmccttctcaaggagagcctcaggaaggtccttcagaagggattccacaggaaggcactgttgtcacaggagatgacaactccaggcatgttactctccctgaagactttccagtgggacaagatgtggaggtggaagacaatgataccgatgatcctgaccctttttttgctaaggtgtgtattt

SEQ ID NO: 130705 - DNA, 457 bp, Homo sapiens
acatcaacagggtgttagaccttatagtccacatggccttcaaggagtaagaactccctggaccaccagccccagtgacagcatgtgtggaggagaggggccttcagtggcagggaagtccctgccacagtcattcacctccacactgagaatctccccttgacacagttttcatgccagaaaccctgaagaatgagaggggcctagggagccccaccttgccatgtactgtaccatcataaagtccccgtactcagccaaaaataaaataaaacaaaataaaaaagtaaccacattggttagtacatgacttaaaaaagttgcttacawctctttataagataatttactgcttaaacaaaaataataacaatgtcacgtagggtacataatatatgtagaagtaaaataaactacaacattagcacaaaggctagaaagagagaaatagaagtaa

SEQ ID NO: 130706 - DNA, 457 bp, Homo sapiens
acatcaacagggtgttagaccttatagtccacatggccttcaaggagtaagaactccctggaccaccagccccagtgacagcatgtgtggaggagaggggccttcagtggcagggaagtccctgccacagtcattcacctccacactgagaatctccccttgacacagttttcatgccagaaaccctgaagaatgagaggggcctagggagccccaccttgccatgtactgtaccatcataaagtccccgtactcagccaaaaataaaataaaacaaaataaaaaagtaaccacattggttagtacatgacttaaaaaagttgcttacatctctttataagataatttactgcttaaacaaaaataataacamtgtcacgtagggtacataatatatgtagaagtaaaataaactacaacattagcacaaaggctagaaagagagaaatagaagtaa

SEQ ID NO: 130707 - DNA, 396 bp, Homo sapiens
caaaggaaggccgtggaaagctggcccggacatacaaatgtggtgcctggagttccctccactggagtcattccttcaattagggcattatctgtaacagaaatatgttatctaagtaatccattagcagtcaggccacattagcaggaagggattttaaattttttgcttttccagaatagaaggaacgggacatggcacagctaaattttgatgtttcaagttcacacacttgtggtgttgagastgtaaggaggaaccgacttagaaaatgccgttgtgtgtgggtctgccatacacaagagtgatagcatatgaaaacacacacctgcaggaggatgaagggaaggagaaggtagatgggctttcatgcccccatcacagctgatgcaccaa

SEQ ID NO: 130708 - DNA, 537 bp, Homo sapiens
tactttattcccagcaggcagtttgatcttctctggaactcaaaccactgaatttcccaagacactagagagaaataatcacaactttctgatgtacaaatcattctggcaataaattttccaaagagcaaaggatccaggattcttttttgctgaagcaaatctaagtgaygacacagagaagcaccaggacatttgtgtgtctgtcatggaagaggattacgtttctacatcttccggttcaaggttttcaggtgcaatcattgctctcagtttgactatttcgtctccacatacagggggctattcagagactcctttggcatctggcaacatgggtttcatgaccacaaagtaaaaacgaaataatgcacataccaaaacataaacacattgtaaagtgcactcagcctcagattccaaactcagcgaccctgcatgatttaacaaagggggaagccagactcctgtcccgcggggggagaaacaaggcctccaaactgacagctactatcattccaaaacaagtcattgttt

SEQ ID NO: 130709 - DNA, 605 bp, Homo sapiens
cacattggaaggattctctctgctaggtacatttttatgcactttatatgtatgaacatatttaactccagtgaaaaccctatgaaacagatattattgtctccatgaaggagcactagatgatataacacttgcccaagtcacagtaagttgactggttgtactgtaagcttccctagagctggacatttggtttcttcttctatgacttgacaacatggagatgaattattaatgtgatctgatgtgtaataattctgaagtgtctagattcaaaatgagctattttacgaagtttcttgcatagaataatatgttagggaaagttcttatagttatttattattacctgttaggtacaagtcactgtctaggtaattcttcagatattgattaatatttaatcctcatatagattaaataactttctcaagttcactgagacagcagatggcacagccakgccttgagcaggaaattctgaccctcacatccctgacatatctcctggaaatgaatatttaggccttctataaaggtataacaataggtacaaaacccaagattacttttcccaggcaaacacttggttttgcaacagggga

SEQ ID NO: 130710 - DNA, 524 bp, Homo sapiens
caggtccaaaccatatcaggaggatagataaaccaggtgcctattaggagactgtcttttccagtattatgtttgagttatttgtgggagtaagatgttagaaacttctcccactggtttcattaacatcctgataaaaagaacattctaagaaataaagagtctgtcacagctatgtgcaatccaacatactggaatctgagagaaaaagtctaaaaaaagtattttagaacctacctgaaatttagaaataattgaattaagttgtcaaatacaagcataactgtattcaaaactacataggttttaaatattttccaactctggctttagcatgtccttcattcatatactagatccttgatatggagtgtataaaaggccactgtctgaaagataaggactgcagattcatgcataccctttcttcttccaggacctgcayagattagaaatcaccagagagagacatcaagtgtaatcacactgaaactaagaaaagttttaaaggaaaataaataata

SEQ ID NO: 130711 - DNA, 561 bp, Homo sapiens
caaacattttcacttcttagtggttatgttcatgttacacagccacaataataaatttactcaacaattaaattctcttacatttattaagaaggtaaaccaaaaagtttataaaaccttaatacgacttccaaatcattccaatactaaaaccagacctttcttctaaatcctaaataggattatgccagtaagtttctaactacagaatatctcaacagcactctcacatgcaagatcaagtttaaactccctaatgtgaaacttcctgtttacctttccagcactcctcctcttcatcaccttctaccaatatcttcagcacttattctgctctccagtggtacccayttgagggatgcttcctcccacaaacccgcatgtatccactacttcccccatcaccaccatcaaggctgagattatttgtccagtatatgtttttctctagtcagtccaaaataactccatacaacttactatactatattactgttagctgtttacttatttctctccccactatacttttaagaaatttcaggacagaaattctttctt

SEQ ID NO: 130712 - DNA, 547 bp, Homo sapiens
agatttgtattgtgtcatgttagctaagttgggactatatttctcagaattcccttccatatgtggttggagttcgtgtgagtcacaaagactttcccaccagaatgagaaggcggcagtaaaagcagctatattctttttacgcttgggaggtcagctcagggcctgacactgttgcagatcatgcctgttgtcacttacgtactgctcctgattgacatgggggcagtaactagggcaacgctcctcccggttctgaagatcctctgcttcagcttttccaggcctgtgtccagtagaagtttagcttcgtgatgaaggacaccaatgcaggccaccctgtcatggatctagattctattccatctatatggattaccactcagcctcacaggtgttagattttccgtgttttcaccattttatatctttcttgccttttttacagcctggcctgtgaacttcagcatagagcagctaacagaaatatcagccttcaaatagataatttaatcagyccccacaattatataagtccaaatcctaa

SEQ ID NO: 130713 - DNA, 566 bp, Homo sapiens
caaatgtctgttcagatagttggtgtggtccagaaattaaatgagagacctcttattctatgtgctgggtaacaagtttgggtatgacaattgtgttttcctgaataaaaatagaagcaattaactaagaacacttcccactgatttccatctcttagaattttataccatttactgtctaaatttaaatttgtgcttggttaaaaaaaaatagttctccactgatctaattttccctaatttatatatgacacacacacccacagacacacatatgtaaaacacctctaactagactctctttttatttttactaactcatatttacttcttgacaatatctatttctcttcgtatccatgacctgcttgatatggtttgtatgtgtcctcttctaaattcagatgataaaacttaattagcaatgtgatggtattaagaggtgggacctttaagagatgacaaggccaaaattgctccttccttttcaatrggattaagtcccttataaaagagacttcacagggtgttctgcttacttacccttctgctttcagccatctgag

SEQ ID NO: 130714 - DNA, 623 bp, Homo sapiens
taattacataaacaaacaagaaacactcatgtgagagtagtggcattgtcaaattaaatggttagtatatgttagaggttacaaaattaaaaataagaagctgcatcataaatcatagaatctgtgaagcaaaaagtaccttagagaatgtaactcaacactctcattttacagatgtgaaataaagaagcrgagcagataaatgatttgctcaagccaaaataataggtaatgtctagatcgagaaacccagatgctattctttctgtttctgatgtatatttgtaatatccaggaattacacaaaagcatacatagacatgtagaattaatataatgtttctatggtgaaagatatttagctagttggttttctggagtttcatttctattttcccagaagtagaattttatttataaaaggtagacctccagagaaatccacaaaagttttcatgtcaaaaaatatattttccattgcagttgaaaaaaggagtggtggaaaattttggttcgtgtaactttgagaagaaaaaatggaaatctaaaatgttttattataaatttaaatagtcacagtaaaaaacatttcttatatggtttctaggttgacattctatagt

SEQ ID NO: 130715 - DNA, 623 bp, Homo sapiens
taattacataaacaaacaagaaacactcatgtgagagtagtggcattgtcaaattaaatggttagtatatgttagaggttacaaaattaaaaataagaagctgcatcataaatcatagaatctgtgaagcaaaaagtaccttagagaatgtaactcaacactctcattttacagatgtgaaataaagaagcggagcagataaatgatttgctcaagccaaaataataggtaatgtctagatcgagaaacccagatgctattctttctgtttctgatgtatatttgtaatatccaggaattacacaaaagcatacatagacatgtagaattaatataatgtttctatggtgaaagatatttagctagttggttttctggagtttcatttctattttcccagaagtagaattttatttatamaaggtagacctccagagaaatccacaaaagttttcatgtcaaaaaatatattttccattgcagttgaaaaaaggagtggtggaaaattttggttcgtgtaactttgagaagaaaaaatggaaatctaaaatgttttattataaatttaaatagtcacagtaaaaaacatttcttatatggtttctaggttgacattctatagt

SEQ ID NO: 130716 - DNA, 596 bp, Homo sapiens
tgtggccttcttaaaggcctcacctctcaatattgtcatattggcaatacctgaattttggaggggacacattcaaaccatagcaatggagatcatgaaaaatagaaagctttgaacttctatatgctttttttttttgtgataggaacacctccccaagtttaattctttgcctctcccttttcttgcaaaatctctgtttcatagagtggcatttcaccacagtattctgaaagggcactatctaataacttacaatatcaccagaaagggcgccagatggtgttatctattaacatattttaraaggtagctgcttgttgaatatttccactctagaaagaacagttattatacaagattatcctaagtggtattactcttgggatgaggcccagcagtggtgggtatctgttttgtattcctaccaactcttggaggagtctctgttactttggaggagacaaccattcctagacactgtcctgtggctatgttgtatttctgcttcatgtgtccattcactccctgggctacaacatgatcatctctccttcagtgaaaggaataactacttatgcctgcaagactattga

SEQ ID NO: 130717 - DNA, 522 bp, Homo sapiens
gcaatcatcaaaatatataaaaacaaacatcaactaagcaagggtagaaaaatagaatggaatagaactgaatggaattgagataggagatcagcaggacttcttttctgatcacaatcctgctgatcaaaacagaacctagtagaaaaacctgccaccaaaaccagtagatagaggaaagtgacctctagttgccttcactgctcrctagcataaagacacccccaccagggccatgacagtttacaaatgccatggcaataacccggaagttacaatcacttccttgccccttttctagaaaattctgaataatctgcttcttaattagcatataaatacaactaagtataaatatacctagccagcacgctgctgctgccctagatgattctgcctatgggatagccctgctctgtctgtggagcagccactctgctgtaactgctgccaccagtgctgctctgggtgactctacctaagagacagtcctgctatgtctgtggagcagccattttgctg

SEQ ID NO: 130718 - DNA, 552 bp, Homo sapiens
catgtctttgaaatttactcacttttaacaactgcatttctgtttattgaggataggtggggtatctggtaaagaatgcttcagtgtgtgaggtgaacagtatttctaggctgaaattgttctatgcattgaaattcatgagaaagaaaacaaaaagagggtgaacaagagataataaacttcatgaatttactggctgaatgctagtttcagtaggcaatagatttgtggaaaattatttgagaaaattattaaaataatttctgataaacctacatttgggggtaaaaagacagaagacacatttcaatctgtaatatcaatatagccttgaaatactaataaaatttgttttttcttggctatttgtttcttatgaacaaaagtgaaaattactctactgtcttcactgaaaccagacatgctacctttttacagttatatttggtytttatactatttttagctaaaagtgctaataccatgtaatgttcatatatttttattttttgagaatttcaacagcatttcttaaatactcctttttgtcat

SEQ ID NO: 130719 - DNA, 438 bp, Homo sapiens
caaacatcacatgttctcacttatttgtgtgatctaaaaataaaaaccactgaacctgtgaacacagagagtagarggatggttaccagaggctgggaagggttatgggggtatagaggggaggtgtggatggttaatgagtacaaaaaaaatagaaagaataaataacacccattatttgatagcacaatagagtgaccataatcaataataacttaattgtatattttaaaataataaaacgagtttaattggattgtttgtaactcaaaggataaatgcttgatgagaaagagaccccattccttatcatgtgcttatttcaaatacatgcctgaatcaaaacatcttgtgtactccataaatatatatacctactatgtactcacgcaaattttatacattttaaatatcttttaaaaattatttttctcagcc

SEQ ID NO: 130720 - DNA, 571 bp, Homo sapiens
tgattaggtcatgagggtgaagcctcatgtatgggattagtgcccttataaaagggatcccagrgagctcttactcctttctgtcgtgtgaggacactgcaagaagaaagccaggtatgagccagaaaccaggccccgtcagacactgaatctggtagtgcctctgtcttggacttccagtcttcaaaattatgagaaataaatattttctagtcaagccattcagtctatgggtatttttattatagtagcctgaacagactaaacacacacacacacatacacacacacacacacacacacacacacacacacaccccagaccctttattcaagttactatattggcaaataacaatgatcattgtaaaaccatctgttctttcacttccagaaaaagtaaatggaaacattaacccaacaggttgtttctttccaactgctaacatgtcttttgaaggacatattccaagtctttacttattatataaatttagaattcaattcttaaagtaaattttatttatgttaagtgtgtacaaaactctttctcaactagaattcagcccac

SEQ ID NO: 130721 - DNA, 562 bp, Homo sapiens
atgtactcatcaaatactcatatctgtgcatcatataaaacatttatatacaattacatttgtcaccaatgcaggcggttgatagctcagtaactcattctatgtcattgattcagaacaatgatctttaaatattacctacatggtagctctgcaggggttttaaatgartaacgttattataacttctaagtgtttatggggaacatgcaatgtaattcaacatcatagtgaaatgttgtctttttaaaaagacaaagtaaaccaaagcagtgtgttttctttttcaaaactcagtgaacatttttctaaatgccatttcgtatcttacttacataaaagagagaaaagataaattcctacttaaaagtcaactgacaccctgatgctatacaattaccaccccattacgctagtgtttcagacgaggaaatagaatcctaaagatagtttaatgtgcgctcaatactacaaagttatttacagtgttagaactagaaataagaacacctggattctagctcaatctattactctttgtattacgcagtttatggcccat

SEQ ID NO: 130722 - DNA, 643 bp, Homo sapiens
aataattagttctgtaattctttaatattcacatatgtaattattactttgcattcattgagctgtgaaaatttctgtcttctgctttagagatatcggattggcaaaaataaatgaatttcatctgaagagaattaacacaagcatacacatatacacaggagtgcacataaaaattaatcttcaagaggatagaaacaggggatggtgtagttcctgccatgaagtacagatcaactggtaccagagattcaaaattgtggaatggatcatggggatttctctcttccctgtcataaagagtaattcaatcaggaaaactgacatgcattgttgtattgtgggtgcaasagctgagaagatgaaaaagacatagagaaaggggatattggaaataaaaggatgttaaaatgatataatttttaagaaggttgagaaggaatatgggatatttatattcctctaaatttgatagataatgatgtccacaaagaagagtttgctgaaataattttaaattttggtgagcacagactatcaatgccaaacgcaatgggtaattttctgtgtcagcttggctaggctgtgatctccaagtgtttgttcaaacagcaatcgtagatgtccttgtgaaggtattttt

SEQ ID NO: 130723 - DNA, 587 bp, Homo sapiens
ctcaacctcccaggtaactgtgattacaggcatctgccatcacacccgtctaatttttgtatttttagtagacacagggtttcaccatattgactaggctggtctcaaactcctgacctcaagtgatccgcccatatcagcctcccaaagtgctggaattataggcatgagcatcgcaccctgccaatgcatttacttttatatttagcagtcctagcttttaaattttatctagtaatattgatcatctttaaaaaacataatrcacacacacacacacacacacacacacacacagaggcatgcatagaaataaaccaggattgcaatgtcaatgtgctgacaggcaaactgcacaagaatgctttattttacgtgaagtttggatgcaaattgatctagctctgttaaagtagttgttcaatgtctacatttttatatctccttcaattcatttgacactttagatatcactactgcaaaggttacagttggataaaactctttacaaagtctgaaatatgctccacacagtcttctctgtgattcatttaatgtaacctttatatagtttattagagatggaa

SEQ ID NO: 130724 - DNA, 600 bp, Homo sapiens
caaatatggctcaacctcctgggcttaagcagtcctccggcctcaacctcccacgtagctgggaccacaggtgcatgccaccatgtctggctaatttttaaaaactttttttagagacagggtctctctttgttgcccacgcctgtttaaaactcctgggctcaagcaatcctcctgcctcagccttccaaagtactaggattgcaagcgtgagtcaccacgcctggcccgtttaatgaatcttgataaccagtagagcaagtcttatcacctacattctcctttcaagagtgtctttgctcttcttaactctgtatttccatataaatgttagtattcatttttcaatttccataaaaagtgtttcaatttttattgggattacattaagtctacaagttaatttgggaaaaattgccatttttacaatattaggttacgataggttacaattaagktataatcagtccatgaatatggaattcactccagttatttaggtcttctttaatgtgtttcagtaaattttttttactggtttctcaataattttatccataaatattgttttataggctctgttcatttttttaattgtgt

SEQ ID NO: 130725 - DNA, 606 bp, Homo sapiens
cctgcgttccttatttcagctgtctagtctcttccacacttgggaatttctgtttcctgtgtgccgtttgtctccacttaatcttcacgctcctctgtttttcaagtctccaagcctcactatcctcctctaacctttcagtctstctctcttagccttatctcctgacttgatctttttgttaattatttactgttttcctcttcgctgaaggcagttgctaaccctatatgaactggatctttactccttaaggcatgaagttttagaaaagtcttaaatgacacttgctgttatctctgcctgcgtgtgagtgatgctaacccatgttggtaattcaggcttttctttcattggacacgtttcactgaggcttagaaataacgatttttctaagtaccatgacaaataccacatgggagaagctgcttttattggaaaactttcatttattaggggcatactgaatttttatgtcatgtctttggttaacacaggaggcccccagcttatcttcagccccttcttgtcaagactcctgtgttctgcttttaggctaacattggctgtgacctgacttggcttgttcatttcagaaatagccac

SEQ ID NO: 130726 - DNA, 606 bp, Homo sapiens
cctgcgttccttatttcagctgtctagtctcttccacacttgggaatttctgtttcctgtgtgccgtttgtctccacttaatcttcacgctcctctgtttttcaagtctccaagcctcactatcctcctctaacctttcagtctctctctcttagccttatctcctgacttgatctttttgttaattatttactgttttcctcttcgctgaaggcagttgctaaccctatatgaactggatctttactccttaaggcatgaagttttagaaaagtcttaaatgacacttgctgttatctctgcctgcgtgtgagtgatgctaacccatgttggtaattcaggcttttctttcattggacacgtttcactgaggcttagaaataacsatttttctaagtaccatgacaaataccacatgggagaagctgcttttattggaaaactttcatttattaggggcatactgaatttttatgtcatgtctttggttaacacaggaggcccccagcttatcttcagccccttcttgtcaagactcctgtgttctgcttttaggctaacattggctgtgacctgacttggcttgttcatttcagaaatagccac

SEQ ID NO: 130727 - DNA, 492 bp, Homo sapiens
aatctttgcctggcaaaggataagactgtaaaccaaaaaaataacctactgtttgcttcaagaaattctcacagaccaatttatcagagacaacagtccatacaacttggataaacagcttactttaagactcttgcctcagtgtccaacaaacctaaactgttccatcacagaatttgcctaatccacataagctgcctgtcttaaaaagcccaccttaaaccatttcagcacagatcccaaagccctataaatatccttcttctacttcttccttcygaaacactgcaaagtttttcttactgcagttaaattctaatacatttggctttgttttattaacagattgatgacattgtgggtaattcaacatctctatgcatctacttctataatgaaccatcaaacaacccccaaacccaaaacagctactatatcgactacaaaattaacttccttcctgaaacactattctggtaatattattctatg

SEQ ID NO: 130728 - DNA, 551 bp, Homo sapiens
tcttgcttcagacaatagaggcacttcctctttttttattcacagaaaagtttacctaagatgagtattattccgtctcaattgtttaraagagttagtcatcatggaatgaaagttttagcaatgttggattcaattgtttcagcaatggattcaatccatactggagtatgaagactttctcattcttcttgtgttggttttgtttgctggtttaaagttgttcaacttccttgatattgtcaaccttaatagtgatgtgttatcaccctaatctaattggggaatgtactgagccatggctggatatggccctggcaaagctctgtctacatttgatctcaaccactgaaggttttccaataagagtccagtgggtcccaaattgtaacttctaattcacaagattgcaaaatactctactctgctttttagaagctttccacttgggaaacttatccatttaccaccagcatacatcccgagactcgagacttgtgaagtttctaaccaaaaactctgcttatttttttgtttctccagagaaccag

SEQ ID NO: 130729 - DNA, 567 bp, Homo sapiens
gaggcttattggcttgccacagctccagaagatgcagtccataccaaatgacaccccctggagttgtcaggttgttcttcatagttgaaggtgtgtggaaaaatagttagttattccccaaactcgagctctaaagctaactatcatggctgggcgtggtacctcaggcctcacgcctagcacattgggaggctgaggcaggagaatttcctgaggccaagaatttgagaccagtctgagcaagatggtgtctctacaaaaaatttaaaaaattagcctggcatggtggcacacgcctgtagtcccagctactggggaagctgaggtggaaatatcactcgascccaggagtttgaggctgcaagtgagctatgattgtgccactgcactccagcctgtgccacagactgagaatctgtctctaaaaaaactcgttcttaaaaaagaggtatcgcagttccaattctaagctgggtgataacaagtgaaaaacagaatatataaattaagcttacagtggacacagaaagtggcttccattgtcttaaaacgaaactgatagtttct

SEQ ID NO: 130730 - DNA, 533 bp, Homo sapiens
gtgttagtttatcctacaaactaagaatggcttctacagttctaaatcattggggggtgggacgtcaacaaagaatattttgtgacatgaaaattatgaaattcagatatcagtgcctatgaataaagtttcattgaaacgcagccaggtttgttttatgtgttggctscttttgcactacgacagttcagctgagtggtttcagcaaagacccatggcccacaaagtttaaaatacttaaccttctggctctttacagaaaatgtgctaactcccggtttagccatgctgaacacagcactgaatatgttcccatactttcatacctttcctcatccagtttctttggtcgaggctgctgtccctgcatcttgcttgttctcagagttttgctttttcagttcttgtaacaccgtcatcatctcaaatatgtcactgtatcatacttaatcacacccaggtctttcctttagctaaaagaaatataagggccatgactttcagtcatttcattttctgcaacatgcttctat

SEQ ID NO: 130731 - DNA, 533 bp, Homo sapiens
gtgttagtttatcctacaaactaagaatggcttctacagttctaaatcattggggggtgggacgtcaacaaagaatattttgtgacatgaaaattatgaaattcagatatcagtgcctatgaataaagtttcattgaaacgcagccaggtttgttttatgtgttggctccttttgcactacgacagttcagctgagtggtttcagcaaagacccatggcccacaaagtttaaaatacttaaccttctggctctttacagaaaatgtgctaactcccggtttagccatgctgaacacagcactgaatatgttcccatactttcatacctttcctcatccagtttctttggtcgaggctgctgtccctgcatcttrcttgttctcagagttttgctttttcagttcttgtaacaccgtcatcatctcaaatatgtcactgtatcatacttaatcacacccaggtctttcctttagctaaaagaaatataagggccatgactttcagtcatttcattttctgcaacatgcttctat

SEQ ID NO: 130732 - DNA, 432 bp, Homo sapiens
gaggtcatactggaataagaatgctcctaatccagtattactggtgcccttgtaagaaggaagccatgtatggacagatacagggagaaaaccatataaagatggatgattcgcctgactacaagccagcaagtgccacagattgccagcaaaccaatagctaggaagaggcaaggaaggattcccacaaaggtctcacaagtagcatgactttgccaagaccttgattttttacttttagtctccagaacattaagatcgtaaatttctgttcttttaacccatccattttgtggtacttygttacagcagctctaggaaactaatacaatgagccaaggtcttgagtaaacatcagagtaaaatatacaaatgtcaacaatcacataaggtgctcaatgtcatcagttactccgaaaatgcaaatcaaaa

SEQ ID NO: 130733 - DNA, 518 bp, Homo sapiens
tgtatacaccccaaaaaatataaattgttctaccataaagacacacagacgtgtatgtgcatcatagcactattcacaggagcaaaraaatggaattaacctaaatgtccatcaatggtagaacagatatagaaaatgtggcatgcatatatatatatatatttatacacacacacacacacacacacacacacacacacacacacacaccatggactattaagcagccataaaaaagaatgagatcatgtgctttgcagaaacatgaatggagttggatgccattatcctaagcaaactaacacaggaagagaaaaccaaatagagccatgttctcacttacaagtgggtggtaaacactgagtacatatagacacaaagaaaggaacaacatctcccagacactaccacagccacgattgccaggcatggtgttggtgggttggtgtctgtgtcgttaaattgcacgacatggctgagcaagatcccttcggtgtccctgctggcacccctgggga

SEQ ID NO: 130734 - DNA, 525 bp, Homo sapiens
gctgtttacaacaaaactgaagaaaatcagatcctcatccagactgcctaccccggggctgatggaaacataaaggaagagtactatcaggtgaaaggttaatttctctctgcagccttttatttmatcagtctcttagttcaaacagaatgtgccaagaatgctgtaggttctcaggaaacagggcttaatggcactgagagatgctaacatcctcatcatttcacactaagtaggtaagttgcaaagccactctcttagtaatgagggcgaggggcttgaaagaagttatggctggtgtttctgcaattctcagacatttggggtacaagatgagtctcattggcaggtgttagattattaggaaaattaagcagatggcattggcaagctacgcctcccctttcctcagctgccagcaattcttaccctcaggcttagcttcacatatgcttgtttaaaagctcttgccatttcaaggaaacagaatccgtgtcgtcattcaagcatgcccatgactatgaa

SEQ ID NO: 130735 - DNA, 525 bp, Homo sapiens
gctgtttacaacaaaactgaagaaaatcagatcctcatccagactgcctaccccggggctgatggaaacataaaggaagagtactatcaggtgaaaggttaatttctctctgcagccttttatttaatcagtctcttagttcaaacagaatgtgccaagaatgctgtaggttctcaggaaacagggcttaatggcactgagagatgctaacatcctcatcatttcacactaagtaggtaagttgcaaagccactctcttagtaatgagggcgaggggcttgaaagaagttatkgctggtgtttctgcaattctcagacatttggggtacaagatgagtctcattggcaggtgttagattattaggaaaattaagcagatggcattggcaagctacgcctcccctttcctcagctgccagcaattcttaccctcaggcttagcttcacatatgcttgtttaaaagctcttgccatttcaaggaaacagaatccgtgtcgtcattcaagcatgcccatgactatgaa

SEQ ID NO: 130736 - DNA, 594 bp, Homo sapiens
gtatctttattttatgacagaagcagaaaatctgactctgcttacttgyctctcctgtgccatgttttgtgtagaaaaacgtgattcgtatattcctataagtagaaaattatcccagaatcaaagttgaaaataacatgaggtcaaatgtataatgacctcaataatctgatagccaaagcctctaagaaaaatgttgacaattagataaatgttcagcaccaagataataacttactttggcctcttcaattcttgtgagctccagaagttcaagagatgacgattttactcaaggaaaaacttccttattcttgaacttggtacaaatatatgcaatgaaacaaaaggaaatctacataaaaactaagggacactgacaaaatctacttattaaacaaatttaagtaatttttatatcttattctttactaatgaaagctgctatagtttacatagatgtgattccctttttatgttttttctaatcctataatgttctcttcatgtatcctcagatcatttctgagatttgttctttcttatctgaatttcatgacttagttatccagctattctactgtccaatttaaa

SEQ ID NO: 130737 - DNA, 599 bp, Homo sapiens
acttcatggacaaataatgtcatgtatttttcttataattaacatacaatttaccattttggtgacctctttaattttcataaacttagatatataacttaygttgattttatttgaagttcatatatcctcagttgaacttaaatggtctatatttgtattactacaaatactcaaatatgtgtttactgtgaatttggacattaaaataactaaatctttactatacatcctatcagttttaatgttgttgccttttgtataaaaacacacagtaaacaagaaatcttgtcgttcttccttcaaatatgtacatatatatgtatatattttttcctttaaaatatattcaggatcagatcacttcttaccacctgctccaggataagatcacttcttaccacctgctgtcaaactgctttacgtcatcagcctcttttgtctggattactgtagttaaccttccctggtctccttgcttctatgcttgcttcgttatagtctgttcttggcatagttcatgtcactcttcttacagtcttgcttttatgactcaccatgtaattcagaataacatctaagtcttcaccagcacattg

SEQ ID NO: 130738 - DNA, 409 bp, Homo sapiens
ctacctctgattgtaactctcaccaaactaggcagaagggaactaataaagggcaactacagaaacgctatagtctgtgtcatrcttaatggtgaaagccttaatgcttgcgttcctgctaagatcagaaacaaaacgagcggtctttctcaccatttatattcaacactgtactgaagattctggaaagtgaaacataatttgaattctgttttcttcatcctcttgccttacaccaaactagcaatgtgttatgccattcagaaaatgaataatatggtgatgtcagcaacatggtaaaataggaggctcctgacttcactcacacagatgcaccaaataaacatatgttcatgagtcagttccctttcagagaaaatcaggaattcaaagattctgatgaactggg

SEQ ID NO: 130739 - DNA, 480 bp, Homo sapiens
aaacaataatttgattaatctcaatagatgtactaaaaccatttgacagaattcaacatcctgtcatgataaaaactctcatcaaattacttacagaaagaatgttcctcaacaaaataaaagccatgtatgacaagccaaaagctaacatctgaatggtgaaaagttcaaagctttttctctaagaaacaagaccaagatgtctactctcaccacgtgtattcaacataatcctggaagttctagccagagtaatgagtcaaaataaacaaaagatgttcaaattgaaaaggaagagcgaattgtgtctctggtaacatgatgtgataaaaaaaatactaaagactccaccaaaaaaaccrttataactaataaattttgtgaagttgtaggatatatatcaatatacaaaaatcaccatttccatacactaacaatgaactatctgaaaaagattaagagaacaattccacttacaat

SEQ ID NO: 130740 - DNA, 526 bp, Homo sapiens
cagttattaggagcctgctgagggtctggcgctgggtctttggggacaaaatataaggtcctggatcttggccccaaggagatctcagtggagcactttctatatgtatttatttttatgaagactatatggttcaatatcacaatggaacacaaattatgtctcaaaatgtagatatgtatttatatataagatataaagaaagaagtaaaatggcaagcttcagagaaaactaagtaagcasatgcatgaaatatattgagttcagcctggaaacatgacaaagtgggatcaaactggtgaagatataaacatgcatacactgtaatgagcataatgcatctatagaagcacatcatgattccactacattacagtgattaaacctcacaattcattttaaagactattcatatctaaccaatgatttagagaatgaaaagttgaattaagtaagggagcaccaatcattgcctctggcagagcttttaaagaattaacttgcaaacaaagttataaaaagaat

SEQ ID NO: 130741 - DNA, 588 bp, Homo sapiens
taatgccttttgcatcttaactaagcagttatcacacactgtggtcataacttctgcagtttyaggtgcaacggcaaaactaacctgaatttttctttcttcacaattgcacaggtcgaagatcattcttaccttagatcttagcagtctcagcctattttttttctttccttattaaattgagaactttcttttttttttttcacttaaaggaagcacttcacagcttctcattggcatatctgaattgccagcatcactactcttgcactttggggccatgtattaagtgaaacaaagttcactggaacacacagtgtaataccacaacagtcaatctgatagccaagaaggccactaactggctaactaatgagcgtggaatgcctacagtgtgggtattctggataaagggatgattcacatgctgggatgtgagggcaaagcaggaaggtgccagatttaatcctgctactcagaatgctgcacaatttaaaacttatgaattatttatttctaggattttttacctaataattttggaccgtggttgacagttggtaaatgaaatcatggaaaatgaaactg

SEQ ID NO: 130742 - DNA, 588 bp, Homo sapiens
taatgccttttgcatcttaactaagcagttatcacacactgtggtcataacttctgcagtttcaggtgcaacggcaaaactaacctgaatttttctttcttcacaattgcacaggtcgaagatcattcttaccttagatcttagcagtctcagcctattttttttctttccttattaaattgagaactttcttttttttttttcacttaaaggaagcacttcacagcttctcattggcatatctgaattgccagcatcactactcttgcactttggggccatktattaagtgaaacaaagttcactggaacacacagtgtaataccacaacagtcaatctgatagccaagaaggccactaactggctaactaatgagcgtggaatgcctacagtgtgggtattctggataaagggatgattcacatgctgggatgtgagggcaaagcaggaaggtgccagatttaatcctgctactcagaatgctgcacaatttaaaacttatgaattatttatttctaggattttttacctaataattttggaccgtggttgacagttggtaaatgaaatcatggaaaatgaaactg

SEQ ID NO: 130743 - DNA, 588 bp, Homo sapiens
taatgccttttgcatcttaactaagcagttatcacacactgtggtcataacttctgcagtttcaggtgcaacggcaaaactaacctgaatttttctttcttcacaattgcacaggtcgaagatcattcttaccttagatcttagcagtctcagcctattttttttctttccttattaaattgagaactttcttttttttttttcacttaaaggaagcacttcacagcttctcattggcatatctgaattgccagcatcactactcttgcactttggggccatgtattaagtgaaacaaagttcactggaacacacagtgtaataccacaacagtcaatctgatagccaagaaggccactaactggctaactaatgagcgtggaatgcctacagtgtgggtattctggataaagggatgattcacatgctgggatgkgagggcaaagcaggaaggtgccagatttaatcctgctactcagaatgctgcacaatttaaaacttatgaattatttatttctaggattttttacctaataattttggaccgtggttgacagttggtaaatgaaatcatggaaaatgaaactg

SEQ ID NO: 130744 - DNA, 356 bp, Homo sapiens
ctttactttgggattatatacagaggcctgatgtttctttaaaaaaatcagtatgtaatacttgatacttaggaataaatgtaagttacaaagcagtatgataaaatgagcacaatactgttaaaactgagaagctatcctgaatttttcttgaagtctgactgttttctaaatattttatagcaggaaatagacatttgggggaagaattgggtatttccatycttttaattgaagagataccttttgaatgattatattttttcagctgtcatcaggtattactttatataacaactgcattttaaagtattttctttagctttgataatctcacatcaagcatagttataaat

SEQ ID NO: 130745 - DNA, 542 bp, Homo sapiens
cttttgaatgattatattttttcagctgtcatcaggtattactttatataacaactgcattttaaagtattttctttagctttgataatctcacatcaagcatagttataaatatcaagcatgattatttatgagttgtaataacatggcatattctatgaattttttaaggaagagattttctttctcagatgggaaaacaaagtgctgttggtaagtaaaaatgcataagtcaatagataaaacaatataattcatagttgctaaagaaaacagtatcatatgctgggcacagtggctcacgcctgtaatcccaacrgtttgggaggccaaggtaggtagattgtttgagcccacaagttcaagaccagcctgggcaacatggtaagaccccatctctacaaaattattagccaggcaccacacctgtagccccgtctacttgggaggctgaagtggagagccagttgagcacaggaggttgaggctgcagtgagccatgattgtgccactgcattccagcctgggtgacagagcaagac

SEQ ID NO: 130746 - DNA, 515 bp, Homo sapiens
tgcccattgacatctttaaaacagtattaaagttttgtccagacataatattttttaaagttgcaggccaaatatgaacctaaagaatctggaagaagatatgttgttacatcatgcatgtttattgaatatatttctggaatacttaagatttccagcccatgtctgttttaaaaatagttaatcagaacaatgcacttgttaaaatttgcttcataagtgtaaaataacacttaattggaagttatggttttatattgttccttacaataagratttatcctactcaattctattgagtgctttctgcatgccagctgcttttatgtgtattatttcatttaataatcaaaattgatctttggataaagaattcactcaattttgcagaagaggagaccgaagctcagaacatccaaataatttaaccaaagccacacagttaaatgcattgcagaattagaattgaaacccaagattcttagtcctgtaattggaaaaagtttatatttgta

SEQ ID NO: 130747 - DNA, 421 bp, Homo sapiens
ttaccttgtaatatttttttgtgacaaatattatttaattgatagcagatccttggagagttgacagaaaaacagtcrctctgtggtagattgatgggtgggagaaggtgggactttgagtatctgaaggaggtcataccttgctcagtgagcaaggcagcagcatgagcatgtttggaggacagtgggtagctgtgtgaatggtttttatggtagatttatatgaaatgtagtatatacctttatcttaagatagtatcttggatagtatctaaaggaggatacaaaccataagaaatgtactcatttccaccagaaggctcatttttattttgtttttctttacctgttctgtaaatcatagtgttgctttatattcttatttggatgatactttatattttatttcttttccattaag

SEQ ID NO: 130748 - DNA, 421 bp, Homo sapiens
ttaccttgtaatatttttttgtgacaaatattatttaattgatagcagatccttggagagttgacagaaaaacagtcgctctgtggtagattgatgggtgggaraaggtgggactttgagtatctgaaggaggtcataccttgctcagtgagcaaggcagcagcatgagcatgtttggaggacagtgggtagctgtgtgaatggtttttatggtagatttatatgaaatgtagtatatacctttatcttaagatagtatcttggatagtatctaaaggaggatacaaaccataagaaatgtactcatttccaccagaaggctcatttttattttgtttttctttacctgttctgtaaatcatagtgttgctttatattcttatttggatgatactttatattttatttcttttccattaag

SEQ ID NO: 130749 - DNA, 421 bp, Homo sapiens
ttaccttgtaatatttttttgtgacaaatattatttaattgatagcagatccttggagagttgacagaaaaacagtcgctctgtggtagattgatgggtgggagaaggtgggactttgagtatctgaaggaggtcataccttgctcagtgagcaaggcagcagcatgagcatgtttggaggacagtgggtagctgtgtgaatggtttttatggtagatttatatgaaatgtagtatatacctttatcttaagatagtatcttggatagtatctaaaggaggatacaaaccataagaaatgtacwcatttccaccagaaggctcatttttattttgtttttctttacctgttctgtaaatcatagtgttgctttatattcttatttggatgatactttatattttatttcttttccattaag

SEQ ID NO: 130750 - DNA, 564 bp, Homo sapiens
tgaattccactaaggtgtggatataaacattacaaaccattattccagagccacaggatatgcaccttccccagttactcctgtggataacatcactattgtagaaccttagagaggccttgtgagatatcgtttcaggcttttttttttgcatgtctgatgactgaaggctccacctggacccaccaactgctcctgtggccccacccagaagcgactcatggtgcatgaagaccatttcccactgccctgtgttgcacccccaaccagtcagcagcaagcacccattgcctagccacccccaccattcttcccccaaactgtccttgaaaaacgctagcctccaaatttttggagaggccgattcaagtaataaaactccrgtcttccatttagctggctctactcgtgtaaatcgctttctctactgcagttcccctgccttgatagatgggctctgtctgggcaccaaacaaggagaacccatggggtggttacaagtcctcccctgatgctaggtggggctccatcaagtgctgcaatggtgtctttcagcaagtgaca

SEQ ID NO: 130751 - DNA, 625 bp, Homo sapiens
acaatcaaactttttggtgactatctcctgcttttctgagtcacttaatttttggaggggggcatttccccctccctttaaaattgaagatatgctcggtcctggctctttcttcatagtgcttcctattgcgcastgtaacaacttgcatttgcttttcaagtgaggaaaggaatagttttctggtgtactcttgttctctagttaatcctgaagaagacacataaaatagtaataccttagattcccgtgggtcacaagtagctccatcatggagcttccttcaccactctttgtcctcaggtctatctctcagcatcttcattatgtggatatctgttaaactaaattggaaacagagagtatgagctattgttattttctggaactcacatgagttgatttttttaaaaagaggccctcaaagtaaaagccatgcaagccagctgcagacctaagatcacagctcaattcgcgttcttatcactaaccatgtatagtatgaacttctctaatagcctcatatgattacatttcatgccacagcaggtcatatgtgaggcttacaatctagttctactaagctgtgggtgtattggttggcaaccacattgtctgagaattc

SEQ ID NO: 130752 - DNA, 638 bp, Homo sapiens
gggtaaattagctgaaaacaaatttctttattttttcttactcaaagtttttgtggagaatgcatctcaaataaaatgaacaagagggtggctgacccctggaacggctaggaggatggcgtgagtgaggaggctggggtctgggagaaacacaaggagttagtttggttttggtcctgttgactttaagaggttggagggatcttcaggcattgcgagaactgcatgcgtttctgcctccactgtctgccaacatgtggttctgggaacaagcaaggccacttagcctttcactggattgtgtctgacctctgggcacctcccgattcgacctcttatggacgtgtttttccatttgccgtctttattatttgctttgactttctgtgaccatctcttgcttattgcatgtcctggtcattggcttccyagcccccggcaaagcctctgggagcctctctctgggttctatctgagactctagccaggattccttgcaggtgacttcctgtgctcctggggttatatctccaataagctcactcgctcagagctcttcagcacactgccctgccaggtagtttgttatgaggctagtctgtttgtctgaaacgtacttttaaaacagaaatgagtgc

SEQ ID NO: 130753 - DNA, 553 bp, Homo sapiens
taggccttgacttactcactgctgaaaaaggaagactctgtatatttttaaatgaagactgttgtttttacctaaatcagtctggcctggtatatgacaacataaaaaaattcaaggatagaggccaaaaactcaccagccaagcaaataatcatgctgaasccccttaggcactctctaatttgaagtcctgggtcctcccaattcttagtcctttaatacttgtttttctccttttcttattcggaccttatgtcttctgtttagtttctcagttcatacaaaaccatatccaggccatcaccaatcatcctatatgacaaatgctccttctaacaaccccagaatatcaccccttaccacaaaatcttccttcctcttaatctctcccactctaggttcccatgccacccctaatcctgctcgaagcagccctgagaaacatcacccattatctctccataccaccccccaaaattttccccaccccaacacttcaccactgtttgtttttcttattaatataagaagacaagaatgtcaggactctgag

SEQ ID NO: 130754 - DNA, 553 bp, Homo sapiens
taggccttgacttactcactgctgaaaaaggaagactctgtatatttttaaatgaagactgttgtttttacctaaatcagtctggcctggtatatgacaacataaaaaaattcaaggatagaggccaaaaactcaccagccaagcaaataatcatgctgaacccccttaggcactctctaatttgaagtcctgggtcctcccaattcttagtcctttaatacttgtttttctccttytcttattcggaccttatgtcttctgtttagtttctcagttcatacaaaaccatatccaggccatcaccaatcatcctatatgacaaatgctccttctaacaaccccagaatatcaccccttaccacaaaatcttccttcctcttaatctctcccactctaggttcccatgccacccctaatcctgctcgaagcagccctgagaaacatcacccattatctctccataccaccccccaaaattttccccaccccaacacttcaccactgtttgtttttcttattaatataagaagacaagaatgtcaggactctgag

SEQ ID NO: 130755 - DNA, 615 bp, Homo sapiens
taagcttaactatctttaagcgtgcagtttagtggcagtaagcacattcccattgttgtatcttcaccaccattcatccacagaactctttttgtcttgtaaaactgaaattatgtacctattaaactcatttattcattttgaactgagacataattcacataccataaaatttaccctttataagtgtacaattcagtggttttttttttaaaccactgatatttgtttttttccaatttgggctgaatggagaaaactttgtgaatggttkcacaaagttatgcaaccattatctaattccagagatgttcaactctccaaaaataaacccgttctcattagcagtcactcccaattcccctctcccctcctcccttctttatttttatcctgtttatctttgtatctgttcttacaccagcactgcactgtcttggctcatttgaaattgagaagcgtgagtcctctgaacttgcttttctttttcaagattgttttggttattctgcagcccttatattttccatataaatttaggatcagttttcaatgtcttcaaaaaagacaactggaatttggtagagattgcattgaatctgtagatcaatttgg

SEQ ID NO: 130756 - DNA, 542 bp, Homo sapiens
cactcactatcaggagaacagcaccaagtggatggtgataattcattcatgaaggatccacctccatgatccaatcacctcccaccaggctccacctccaacactggggattatgattagatgtgagatttgggcagggacacagatccaaaccatatcaatgggcttttaaaagttaaatatgaaagcaaaaaaatggaagattttgaatggtaatataagagaatatcttcatgatctctgcrtagggaagggcttaaataaaattccaaaaacattaacttaaaaaaaggttgatggccgggtgtggtggcttatgcctgtaatcccagcactttgggaagaagaggcaggcagatcacttgaagtcagcagtttgagaccagcctggtcagcatggtgaaaccctgtctctactaaaaataaaaaaattagccaggtgtggtgccacatgcctgtaattccagctacttgggaggctgaggcatgagaatcacttgaacccgggaggtggaggttgcactccagcctggacgacagag

SEQ ID NO: 130757 - DNA, 536 bp, Homo sapiens
actttaggaattcaagagtagtttaacatttgaaaataaatcaagataataccttgtagtaacagaataaaggagtaaaaatatacatacaatctacatagatgtagaaaaggatttgataaaattcagtgttgatttatgatttttaaaaagcctaagcaaaggaaatttgttaatctgataatgagtgcctaaaaatatcttaaacatcattcttgatggtgaaatgttgaaartcttctccttgagatatctgctagcatcactttaatttagcattgcattagagatcctagccattgtagcaaggcaagagaaagaaatagaaagtatatggtttggaaagtaagaaataaaactgtcattatcaataggcaacatgactgtatatatagaaaacccaaaagaatctatagataaactattagaattaataagtaaatttaagcaggggtactggataccaggtcaatatataaaaaccaattatacttacatatactagcaataaaaatagaaaatgaaatttaaaaaac

SEQ ID NO: 130758 - DNA, 615 bp, Homo sapiens
tgacaatttactaaactgatataacaggtagttcaatttagcagctgtatggaatcaatcgtttagcacagtttgatatttaacactgcagcttaaccataaaaatacaatttatgctaatatgttctattcaggcctgtttccaacaaagcctacaatttagccccttcgagttctcacaactgctgtttactaataatgcttgatttcaacagaaaaaaattccttcaattcaaacagcatgggaaacttgtattttgagggaagttaatcatttggtgattctttaatccttatgctcaaagttggatgtaattttcacatcttctctgttttctttcttcatgttatatggtgttttggtccttagagaattagaacaagtacagcatattcacattttatgcagaggatgcattcctaaaaaactcacataatttaaaacttgcacaattcgagtctagttttcagttaggaataaatataaagtaagattttcttggcttcaactgtgcataaagagaaggtttattaattttgtatgtgatactatttaaaatttacaygaagtgcaactgcatggcgtatcttttgccccctttcaatgtctgctgg

SEQ ID NO: 130759 - DNA, 701 bp, Homo sapiens
ggacagtaagtttgaatgtcttatgtgtggcgcttcttatactttatgtaaattrcagagaagcttccttttaccatcaagggcctttgcacccattttacaaaatatttataagaatccatatgttttaaaattaagaaggagtcaggagacctggattctgaagatttgctgaataaatgcatctgccatgaactgatgatgttactctgagtcatttgattcgattgtcctagatattttcatctgtgagacaaatgtttttaattcagttacctgtagcctctctttcacctccagagttctattgcttttataatgatgctactatttcaaattactctagaagttaaattcagtgcttcagaggataagtatatgggtaaaaaaattaatgcccttcagtaaaaacaaactggctgaacatcttcacatgagttgtttctggcctcacctggatcctgagcctcaaaatcttatccacatcatccacctaccccaccccatccctgtttataatgatatttttttccctgtgttatatacaacttgtcagttttatgtttcattcaatatcaagtcgttagttaatgacacaacttccatttcaacatcatttctttggaaaatatacttacagaggtctgggaaaactgtgataaacagagaagacaatttatatatgtatctattgtttattt

SEQ ID NO: 130760 - DNA, 613 bp, Homo sapiens
ttcaacttttcttctacatcatcacgcttgaggtcagcacagactcccattagtaacaatgatggtactttgagatgggtggtgggaggtgcccaaggagaaatatgttagcattgtaggcaggtaaaggcagggtgagtgaagtctgaaaaattcctctccacttttgatctacttctctgggaaggatgcactttccccctggtctttctatttaaaaattactgtcctctagtatcactttaaaacagaatttcagctctaaaactcctctttatatataatgtaaaactgaatatctactcctaaactagatattctattgtgtgttcaattttgttagtcaccgttagtatatacatgacctcttagactaaattcactttttaaatgttcccaacattttttaactctttgattttggagaaattcctttgctttattaaaaggaaataataagcttacctaagtgaaaaaatcagcatcgactttactgaaagtttctggagataatataaaccgtaagatcaaaagatgaatggctgggggaagatccaaaattcagtaggcacgacctggaaakctcaattaaaatcacaaaataaatactctt

SEQ ID NO: 130761 - DNA, 558 bp, Homo sapiens
atacagtcgttccttatgaccaccccacatcgcttcctcactgcttggcactagccttatgattggttgtgtgttccaggtgggagttaaccagaatgaaaaatttctaacagctcgggttatcatttatttatttactgaaaggcatcatggaattgtgrgaagtcaggcacacctgagctcaaatcccaggtttgaatggtctttgaaatcagtcacacctgagctcagatcctagcgttgtcatttatgaactatcagcccttgggaaggttgcttttccttcctgacccttggtttccttttccgtacaaaggaatgttaacatgttttttggatatcactgtaaggcttaaatgagttaacgaatacacatctcatattacaaatgcctagtacatagtagattctcactaaatgacaactgtttttattattggcagttcctacaattttgcctgaactccttgcatccaggagagaaaccatgtggaacatgtcagtacagaataccaacagacacatgtttagtgctatcaattctcacatcatcatgca

SEQ ID NO: 130762 - DNA, 498 bp, Homo sapiens
actattaggcttggaggggcaaaaggaaaagatgtacaaccagagtctggttagatgtgtagccatggtggcctggggaaggagtgcttctcatcaggagctgtagtcttagaggcttgcagccacagcagcgggaagttaggaagcagcaggagacaaactacctgaacgttcctctcctgctcaccacctcccgtccatgcttctcattggctgaactcaatgggaagccagagagaagggagcctaagtgacrtcattcacagtcagccttcaagggcacaaggcagggcacagtaagccagagaactgagggaaggagttagcaaccgagaatagccaccatggtgctgaagatagaacacgagtaataaaaggggctcacagattaacccggtagttagatatgtaagttaatacaggcaaaaaattccaatactgtgagagagtgctatatgagaagaaatttcttagtaatacccaaggcaggcaggaatt

SEQ ID NO: 130763 - DNA, 558 bp, Homo sapiens
atacagtcgttccttatgaccaccccacatcgcttcctcactgcttggcactagccttatgattggttgtgtgttccaggtgggagttaaccagaatgaaaaatttctaacagctcgggttatcatttatttatttactgaaaggcatcatggaattgtgggaagtcaggcacacctgagctcaaatcccaggtttgaatggtctttgaaatcagtcacacctgagctcagatcctagcgttgtcatttatgaactatyagcccttgggaaggttgcttttccttcctgacccttggtttccttttccgtacaaaggaatgttaacatgttttttggatatcactgtaaggcttaaatgagttaacgaatacacatctcatattacaaatgcctagtacatagtagattctcactaaatgacaactgtttttattattggcagttcctacaattttgcctgaactccttgcatccaggagagaaaccatgtggaacatgtcagtacagaataccaacagacacatgtttagtgctatcaattctcacatcatcatgca

SEQ ID NO: 130764 - DNA, 488 bp, Homo sapiens
  misc_feature (1)...(488): n = A,T,C or G
tttggcttcacatattttagtgccttttattgtttatagttggagsgctctagtttgctgaattctgttaaagataatgcaggtatcgtgtctatttttctaactgcaaaatatctttggtatgcaatatttattttagccttttgtattggcatttatcattcactatttacattaaacattttaaagtaaattatgtcacttttttgcctttaaaatagtaaacatcataggggtttattaccacattttttccttgttcatttttgaatggctcttaagttttttcatttccttccaaattgacatttcattaaataaatttctagatttttcagagatcaacatgcctaaaaaagagttgtcacaaacaatttcttatactttgctgatgaaaaatattggctaacttaaaaatcanatccatgcatccaatggagtagtaaagagaaattaaactataatcatggacaaatcaagtcatactc

SEQ ID NO: 130765 - DNA, 602 bp, Homo sapiens
agatctctcttacagtttctgctttcaagatataatacataccagtccatgtgctgagagaattctttaaagcaaaaggtaaagtaaggataaatgaatgtaaactttggatctagattcaaagcatattattcttcttgtaacatccatattagtgggacacacacacacacacacacacacacacactcaactgcatagatcttcctgtaccttgagaggcaccattgtatggtagaaaaatcataagctttggaaccaagttgttttggatttgaaactcttctcagcctctagttgtacctgtggaggtgygtggaacctctttgagactcaggtttttcttttttaccataaaattgatactattaatggatattcataacatgtgggtaagatacttgattcatagtggcacttggtaaattttaatttttatattataattaccatttctaccttaaaatttcactttatatactctgcttgaagatttccttttccctctttcaaatatctaaacttcaaatataatgttgaggcgtaacatttagaaaaaccaagcataccctctacctcccaaatgtgcaggacttgacaca

SEQ ID NO: 130766 - DNA, 523 bp, Homo sapiens
ccacagaagaagaaacatgaatggatctcaaatatgaaaaaaagattcccaagctcattaggaaaaagggaaagtgcaaattaaaatcacaaaatgatgccattttatatcctcctgattggcataaatcatgacaacaccaacttctcataatacacggctaatataaatgtaaattactttaaccaattttggaaactagttttctgttgccaactaaggttggttatatatatatatcctgtgactcagcaatttgactcttacctaaaaacactaacaaatcctttacacaggttatatgtatgggaatattcatggcattattgtctgtaatagcaaataattagaaacaataatgctagccaacactaaaatggagaaataaatatttatttttattgtattgcartgaaagcaaatcatgacatctataaatatcaccataccagttaaacatgatgagtgaaaacaaaaccaaacaaacataaacaaagaatcactaatgagtgactaacactga

SEQ ID NO: 130767 - DNA, 665 bp, Homo sapiens
  misc_feature (1)...(665): n = A,T,C or G
attatcattattcagtaactaaaaaataaataaacaaataaagatcattagaagactaccggaattttgataatagagaaaagataacaggtaaaatttgatcatgagaatgagacacactctccttcatgttttatgtattaacattacaaataatgcacaaagcaaccctgtatagacagtcatgtgtgtttaagaaacatagatntaacagatatcttactatttcattcaggttttatgacagattgaaagtatttgctcccctgtcctataggaagatcacacctcccaccctgatgacatcaggcttgaccatgtgacctgcattggccaaggaaatgtgagcagaaaggatgtctattactttaagaaccatcatatractcctacttttttctagggaaacttcagtgtcacaaagaggggactccttccacctggatccaaaagggtaaaagacacaaagatcacagtcagtggaccagtggagaacttttcatgggagtgagaaatacgcatctgctgttaagagtcactgacagatgaagatactttgtgtaaacccatggaaatatattttacttgaaaattatttcattaatcctgatattacttaaacttcccccttcttttaaattttacactaaagaggcctacagaaa

SEQ ID NO: 130768 - DNA, 472 bp, Homo sapiens
catctccaatagagatctctagtacctagtataggtcagtttttaaaactcggattgaggtttcaatatctggggaggaaatagtgggagaaaattatttatgtattctattgggctattagaggagggctaattattgcgttacttrgagcctcaaggcttctttagtaatattttatgagtgcttaaatcatgatattcaaaaggagggttgagttatatgaaacagcaagaatgtagacatgacataatgagtgtgagaatttgcacaaaatattcaaatgacctgaatagctatcctagttcattcctttaaatattaaaagctagatgtcaagttgtctcaatttaaaaaccacttaaaaagctgtatcagccatttcaaaaataggacctattatacatataaagcagtgtagttctatattggttcatgtaaacttcctaattaataaaatcaacaacagccgtg

SEQ ID NO: 130769 - DNA, 561 bp, Homo sapiens
ctatttgataaataagaagacagaattaaaggagatattcttttggagatgatttctcttgcagcattaaatctttgacactaagaccattttctatgcatacattccaaatctaacatccagagaaagacgaacgtaggtgatattgttttagtgtcaatttttatgtttctttactccttgagtatttttttttgtaaaagaatggtaacaatgactttaatgagagtatgaattcaatacctggttaattttactgtttggtgaaaaaacaaaggagtctcagaatgttattcctctacaaaggcaaaagaatgtttagcaccacgtttagttgggctctgaggagggactctacaagtaagctaataaaaaatattatgtctggataaaatttagctaactycttataggatgagtctggcagtatcaccacttactaactgttaaaagcggcttttcagttttatattcagttgaaggaaaaaagaaaatgataaagcgtcagtagggacccaacacctaccaagagttccaggacctcccgtgccaagagcacat

SEQ ID NO: 130770 - DNA, 561 bp, Homo sapiens
ctatttgataaataagaagacagaattaaaggagatattcttttggagatgatttctcttgcagcattaaatctttgacactaagaccattttctatgcatacattccaaatctaacatccagagaaagacgaacgtaggtgatattgttttagtgtcaatttttatgtttctttactccttgagtatttttttttgtaaaagaatggtaacaatgactttaatgagagtatgaattcaatacctggttaattttactgtttggtgaaaaaacaaaggagtctcagaatgttattcctctacaaaggcaaaagaatgtttagcaccacgtttagttgggctctgaggagggactctacaagtaagctaataaaaaatattatgtctggataaaatttagctaacttcttataggatgagtctggcagtatcaccacttactaactgttaaaagcggcttttcagttttatattcagttgaaggaaaaaagaaaatgataaagmgtcagtagggacccaacacctaccaagagttccaggacctcccgtgccaagagcacat

SEQ ID NO: 130771 - DNA, 534 bp, Homo sapiens
taggagagaaagtaagaatatgtttctgtaatgaacatattccctttaccatcccttacatagctgaaccaaataaatgcacaagccaagaatgtcctccattatatgataaacaccatagaaacgggagcatgtttattttctccactaccctatccttcacgggtgtctggcaccatgtagataatcccagtagatatttttttaagtaaacttgagagagaaagtagggaatgtggacaattaatatctgttcaagaatagaaaattgaataccagcagcaggatagaaaagttttgtgttgactttatttccagatcctgttacaaaatcttgaatgcatattttatctatatgtatgttcttaaatagaattcttagagaatgatagtttttaaaatccctggcaatttattggctataataaaatgatgataatcaccatgtcattttggaatctgtrttttttataagaggccttatgcatgatacgttatattttcctatttctttttcacttgaacattctgctg

SEQ ID NO: 130772 - DNA, 543 bp, Homo sapiens
agtgaacagatgctttgaatgtgggagactagaataaatgcatttttataaagatttttgattaaggcattagtaaatagcttcagtagaactgtttacttctttctactgcaaagatatcccaagggtttctagccttcatcctcagttgctttcttaatagttaccatgaatatacgtaaggccatccataatttcacacctatacttatcatctcaaggcaagccttgttagacaggcataagctcataataaattacctgatccagataaggcttttttttttgtttccccaattacactcatcaaccacaaattaagattaattacatagattacttggtctgtaaacatttaactaccatcaatggtatgaatgaccatgttaarggaatttcctaagtgcaatagcagagtactaccattccttgagtatggatagtcaatattttgtaaagctataaatacgggaatctgtaaagaatatattctgtatgtggagtccataccaaatctgttcaaaatgcctatgttaaatgtaa

SEQ ID NO: 130773 - DNA, 534 bp, Homo sapiens
acatcttctaagaagaaaattctgattgatttccacataatcactctgattgtggagtcagcctgagccacacatgagccagctcttccactgctgttgactgcgcctgcaaacaaccaagaaaacataaatcagggagaggaaatgactaaagtatggatttaaatgttcctatttttacaaggctgtaggctccacatttttgttgactattttaatgataccagcaacaatttggggcagccatcctggtaatgtctgttaaccttttctgycatttatgggaagcagtttgcaggtacttcatgatcagagaaagaacttgaccaatttattctttagtatttagttcaaaagagagctataaaaactgtttttttttctagtttaaagggatgctattttgagaaaaaaatattctcaataaaatttgctactaaggtagacaaaatatatacaaaatttaaacacatataataacatatacaaaagttacacagctcaattaaacaatctcaatatggagaaaggcaa

SEQ ID NO: 130774 - DNA, 437 bp, Homo sapiens
ttgtgtatctcaaaacagatgatattttaggatatctaaaagacagttttatggtaggtaattccctaattccaaactgaagccaactcattatttttsaaaacccttccccatcactgtcaaaacaagaacaaaggttttattactctcagttgttcattttcttttaaaactaactgggactttcatattaaaaaaattgttgttttaaacttactcatacacattgtacacatttattgtgtgtgtaagcataatgaccttttgtttgccatttgtaacaataaacagacacttaaaaaaattctctaacttcattgtaggaccacgtcttggactcttctggctgctataaccaagtatcataaattgcatagcttcattaaaaacagaaatttatttctcatagttctggaggctaaaaggtttgagatcaa

SEQ ID NO: 130775 - DNA, 437 bp, Homo sapiens
ttgtgtatctcaaaacagatgatattttaggatatctaaaagacagttttatggtaggtaattccctaattccaaactgaagccaactcattatttttgaaaacccttccccatcactgtcaaaacaagaacaaaggttttattactctcagttgttcattttcttttaaaactaactgggactttcatattaaaaaaattgttgttttaaacttactcatacacattgtacacatttattgtgtgtgtaagcataatgaccttttgtttgccatttgtaacaataaacagacacttaaaaaaattctctaacttcattgtaggaccacgtcttggactcttctggctgctataaccaagtatcataaattgcayagcttcattaaaaacagaaatttatttctcatagttctggaggctaaaaggtttgagatcaa

SEQ ID NO: 130776 - DNA, 437 bp, Homo sapiens
ttgtgtatctcaaaacagatgatattttaggatatctaaaagacagttttatggtaggtaattccctaattccaaactgaagccaactcattatttttgaaaacccttccccatcactgtcaaaacaagaacaaaggttttattactctcagttgttcattttcttttaaaactaactgggactttcatattaaaaaaattgttgttttaaacttactcatacacattgtacacatttattgtgtgtgtaagcataatgaccttttgtttgccatttgtaacaataaacagacacttaaaaaaattctctaacttcattgtaggaccacgtcttggactcttctggctgctataaccaagtatcataaattgcatagcttcattaaaaacagaaatttatttctyatagttctggaggctaaaaggtttgagatcaa

SEQ ID NO: 130777 - DNA, 620 bp, Homo sapiens
cttacttctgaataattgtcagcttcatgaatgtaatttcactgaacagttaaatagagcagttctggaaatatcatcatttaaaargatggcaatggaaaaagaagaaatgataatctaattaaatgactctgtaattagtaaacaagttaggaaaatataattttactgaccagaaaacctaaatttggtaatcttttcatactctagaagagtaatgctcttatttgcatttccccaacctgttcttcagaagtaactcaagaattacattttcatcttcaagaaaatgaaagaaggcttgactaagcaaaagttgtgttattcaacagctaagcagtaagataaaaaggtgaacttttggaaatttggtatgcatcagttcaaacgtatttcctacctgaatccaaacagctttcacattgtaaagattcaggctcatgcagaaacttgtttgtgaaataaattaaaacaaaataaaacaaaacaaaagcagctgctctttattgggatatatctcagcacattgcattgctgaatttaggttgagcaaaaagtcaaatattggaactgttaataagcattatgtttatttgaaattacctgtgagctaagttgat

SEQ ID NO: 130778 - DNA, 517 bp, Homo sapiens
ctggaccagggcagggcacagatgccctcctctcaaaaggcagggacaggccaggtgaagtggctcacgcttgtaatcccaacactttgggaagccgaggtgggaggattgcttgaggccaggagttcaagaccagcctggacaacatagtaagaccccatccctataaaaatacaaaagtagctgggtgtggtgatgcatgcctatagtcccagctactggggaggctgaagcaggaggaccacttgagcccaggagttggagactgcagtgagccatgattgcaccactgcactttagcctgggtgacagagcaagacctccttggcttccctcagtgacaaatgtgtgatttcatggcatgagatttatggagacccttcccgacctgtctctctctgattcctgcctgcatcatacrtatcttgagttaacaagatccgtacatgtataagctgctgcaaatttgtcctaaaatcgccttgaagaagagagctgctctctggcagagagagcg

SEQ ID NO: 130779 - DNA, 575 bp, Homo sapiens
aacacccactcagccactcgggcataccttttatttgggcaaggggcactgcagttctctgggcaggrgtcagctaggagagaccaatagatgcccccaccccaggctcctagacccatctccaggaccaaacagccaaagcccctcttcttttcttcaaaatacacacatttctagaaattctctgcaaaatacataggctactagataagcacccagtttccctctggggtcatttgttcccgaatgaggcttattaaaagaggaaactatttttaagctaaatcatcaatcaaaagtattcttcattctggtatatggctgctttccacagatgataaaatcccgtcaacttgatccaaagaaaaaatgacctacataacaatgacagcatgaataacaattaatcctccattgaaatgttcaaaagctagaattgtggtaaagccaagattcccagggagtgtcaggaactgctctcttgattctaagcttgaagcaggtaaagaaaaggttgtctgggactagggctttcggggataggacccaaatcccaaggcaaagggagtcagaag

SEQ ID NO: 130780 - DNA, 575 bp, Homo sapiens
aacacccactcagccactcgggcataccttttatttgggcaaggggcactgcagttctctgggcaggggtcagctaggagagaccaatagatgcccccaccccaggctcctagacccatctccaggaccaaacagccaaagcccctcttcttttcttcaaaatacacacatttctagaaattctctgcaaaatacataggctactagataagcacccagtttccctctggggtcatttgttcccgaatgaggcttattaaaagaggaaactatttttaagctaaatcatcaatcaaaagtattcttcattctggtatatggctgctttccacagatgataaaatcccgtcaacttgatccaaagaaaaaatgacctacataacaatgacagcatgaataacaattaatcctccaytgaaatgttcaaaagctagaattgtggtaaagccaagattcccagggagtgtcaggaactgctctcttgattctaagcttgaagcaggtaaagaaaaggttgtctgggactagggctttcggggataggacccaaatcccaaggcaaagggagtcagaag

SEQ ID NO: 130781 - DNA, 508 bp, Homo sapiens
aaggaaatagtcacattcaagagcacaaaatcttaactgtaaygtttaaattagcaaaaaaaatttaggaagcatctgtgtgcagcagtagggggtgggttaaatgaaacagcaaacattcttattttcatttttatttattattattattatttttttagacagagtctcgctctgtcacccaagctggagtgcagtgggcacgatattgactcactgcaacctccgcctcctgggttcacttgattctcctgcctcagactcccaagtagctgggattacaggtggccgccaccacacctggctaatttttatatttttaatagagatggagtttcactatgttggtcaggctggtctcgaattcctgacctcaagtgatccacccgcttcgacctcccaaagtgctgggattacaggcttgaggcactgtgccttacttacaacaggtaagtggcatgtcccaggttccatggcctaagtaacaaaggctcacccaggactgaga

SEQ ID NO: 130782 - DNA, 517 bp, Homo sapiens
aaatagtcacattcaagagcacaaaatcttaactgtaacgtttaaattagcaaaaaaaatttargaagcatctgtgtgcagcagtagggggtgggttaaatgaaacagcaaacattcttattttcatttttatttattattattattatttttttagacagagtctcgctctgtcacccaagctggagtgcagtgggcacgatattgactcactgcaacctccgcctcctgggttcacttgattctcctgcctcagactcccaagtagctgggattacaggtggccgccaccacacctggctaatttttatatttttaatagagatggagtttcactatgttggtcaggctggtctcgaattcctgacctcaagtgatccacccgcttcgacctcccaaagtgctgggattacaggcttgaggcactgtgccttacttacaacaggtaagtggcatgtcccaggttccatggcctaagtaacaaaggctcacccaggactgagaccatcttactcca

SEQ ID NO: 130783 - DNA, 510 bp, Homo sapiens
ttaaggaaatagtcacattcaagagcacaaaatcttaactgtaacgtttaaattagcaaaaaaaatttaggaagcatctgtgtgcagcagtagggggtgggttaaatgaaacagcaaacattcttattttcatttttatttattattattattatttttttagacagagtctcgctctgtcacccargctggagtgcagtgggcacgatattgactcactgcaacctccgcctcctgggttcacttgattctcctgcctcagactcccaagtagctgggattacaggtggccgccaccacacctggctaatttttatatttttaatagagatggagtttcactatgttggtcaggctggtctcgaattcctgacctcaagtgatccacccgcttcgacctcccaaagtgctgggattacaggcttgaggcactgtgccttacttacaacaggtaagtggcatgtcccaggttccatggcctaagtaacaaaggctcacccaggactgaga

SEQ ID NO: 130784 - DNA, 517 bp, Homo sapiens
aaatagtcacattcaagagcacaaaatcttaactgtaacgtttaaattagcaaaaaaaatttaggaagcatctgtgtgcagcagtagggggtgggttaaatgaaacagcaaacattcttattttcatttttatttattattattattatttttttagacagagtctcgctctgtcacccaagctggagtgcagtgggcacgatattgactcactgcaacctccgcctcctgggttcacttgattctcctgcctcagactcccaagtagctgggattacaggtggccgccaccacacctggctaatttttatatttttaatagagatggagtttcactatgttggtcaggctggtctcgaattcctgacctcaagtgatccaccygcttcgacctcccaaagtgctgggattacaggcttgaggcactgtgccttacttacaacaggtaagtggcatgtcccaggttccatggcctaagtaacaaaggctcacccaggactgagaccatcttactcca

SEQ ID NO: 130785 - DNA, 545 bp, Homo sapiens
agctactctcctgcctcagcctccggagtagctgggattacaggcaggcgcccgcmaccacgcccagctaatttatttatttatttatttaaattttttgagacggagttttgctcttgttgcccaggctggagtgcaatggcgcaatctcagctcactgcaacctccgcctcctgggtttcaagtgattctcctggctcagcctcccacgtagctgggattacaggcatgcaccaccacacccggctaattttttgtatttttagtagagacggggtttcaccatgtcagccaggctggtcttgaactcctgacctcaggtgatccacccgcctcggcctcccaaagtgctgggattacaggagtgagccactgcacccggctgcacccaactttgtaaggaaataattaagctgaaagaggagttgaaaaaatattaaaatattcttcacctagatttttccaattagcattttgccatctgtgctttctctgtgtatggggtatgtgtttaattttttgttattgttggagcactggaaagt

SEQ ID NO: 130786 - DNA, 545 bp, Homo sapiens
agctactctcctgcctcagcctccggagtagctgggattacaggcaggcgcccgccaccacgcccagctaatttatttatttatttatttaaattttttgagacggagttttgctcttgttgcccaggctggagtgcaatggcgcaatctcagctcactgcaacctccgcctcctgggtttcaagtgattctcctgsctcagcctcccacgtagctgggattacaggcatgcaccaccacacccggctaattttttgtatttttagtagagacggggtttcaccatgtcagccaggctggtcttgaactcctgacctcaggtgatccacccgcctcggcctcccaaagtgctgggattacaggagtgagccactgcacccggctgcacccaactttgtaaggaaataattaagctgaaagaggagttgaaaaaatattaaaatattcttcacctagatttttccaattagcattttgccatctgtgctttctctgtgtatggggtatgtgtttaattttttgttattgttggagcactggaaagt

SEQ ID NO: 130787 - DNA, 545 bp, Homo sapiens
agctactctcctgcctcagcctccggagtagctgggattacaggcaggcgcccgccaccacgcccagctaatttatttatttatttatttaaattttttgagacggagttttgctcttgttgcccaggctggagtgcaatggcgcaatctcagctcactgcaacctccgcctcctgggtttcaagtgattctcctggctcagcctcccacgtagctgggattacaggcatgcaccaccacasccggctaattttttgtatttttagtagagacggggtttcaccatgtcagccaggctggtcttgaactcctgacctcaggtgatccacccgcctcggcctcccaaagtgctgggattacaggagtgagccactgcacccggctgcacccaactttgtaaggaaataattaagctgaaagaggagttgaaaaaatattaaaatattcttcacctagatttttccaattagcattttgccatctgtgctttctctgtgtatggggtatgtgtttaattttttgttattgttggagcactggaaagt

SEQ ID NO: 130788 - DNA, 545 bp, Homo sapiens
agctactctcctgcctcagcctccggagtagctgggattacaggcaggcgcccgccaccacgcccagctaatttatttatttatttatttaaattttttgagacggagttttgctcttgttgcccaggctggagtgcaatggcgcaatctcagctcactgcaacctccgcctcctgggtttcaagtgattctcctggctcagcctcccacgtagctgggattacaggcatgcaccaccacacccggytaattttttgtatttttagtagagacggggtttcaccatgtcagccaggctggtcttgaactcctgacctcaggtgatccacccgcctcggcctcccaaagtgctgggattacaggagtgagccactgcacccggctgcacccaactttgtaaggaaataattaagctgaaagaggagttgaaaaaatattaaaatattcttcacctagatttttccaattagcattttgccatctgtgctttctctgtgtatggggtatgtgtttaattttttgttattgttggagcactggaaagt

SEQ ID NO: 130789 - DNA, 427 bp, Homo sapiens
cctcagcctccctaagtgctgggattacaggcatgagccaccgcgcccagctgaagcttcaattttcaagataatatgtgtatgcttagtctagttacttccacatgataataatagctaacatttattgagctcttatagtgtgctaagcacttcacatgtattgtcacatatcagccccacaattgtcctataaggtaggtattattatcatcattccctttttatagatgaggaaactgagattgagaagttaaacaatgtgttgartttgtgtaccaacagcaggctttactaagtgtctttgagttggaatgaaaagtagaattttgtgcatcctctattctacatctgacagagagacaggagagtataaagagactacttattgaggggcagaagaatatttttacattgttggtggaat

SEQ ID NO: 130790 - DNA, 478 bp, Homo sapiens
gtcacagttagtatttgggacctgggaggaattttagatgccatccagcccccttaccccatttataaaagaggaaactgaggcccagagatgggatatgccctggttcaaggtctctcagaggtcaggagggctggacctaggagtaaggcatgcttccacmccaccccagaagctaagtgtgctgggcaggattcaaaggatcacccccagttatctttgcctttggattatctcccgtttgagtgtgggtatgactgtgatgaggtgtcactcatgtggtcatgtcacattatacggcaaaaggacctagtctaatcacatgaactctttaaaagcaaagagctttctctggctggtagcagaagggcagtcagagagatttgaagcaggagaaaggccagagagcatccttgaaaagcagccctggctgacagccagcagggaaacagtcctacagccacaaggaactgaattc

SEQ ID NO: 130791 - DNA, 633 bp, Homo sapiens
ataaatcagttaatctaactgaattttagtttccccacctaaaaatatgacatatgggtacacctgttagctatgaaattctagactatagacttcacaaggtaatgattttcatactttcatctacttctcataaaaaagtaaaacaacctgacactaaaatttttcaagttgcatacaaccagtagctccatttgtagcaaaaactgaaacaaatatttaacataattagtatgattgatcataccagttagtatcaactcacagtcaaatggtatatgtaaaatcatgctgcctctcctagattacttcaagttacaacagcaagatacttctcaggcaaaattcaacaggattctcaatcaaaattcaatttaatttaattcaattaaaactaggcttctgtaaaacctcagagagtaactatgatgcactgggrtcagtgttctaagtaaactaataaaattgtatcacatctttcttattgttgtcttgggttttttgtctgtttgtgcttatggcttgaatgtttctccccttcaaaactcacattgaaacttaattcccactgtggcagtattgagaggtggggcccttaagaggtgagactgggacatgagggttcatgaatgg

SEQ ID NO: 130792 - DNA, 453 bp, Homo sapiens
tctagaggttttcttagctctttattagttagggctcctcagatgcttctgtgtgtttgagcacacggggagctccctgagctagctccctgrtctcccagtcgtccccacactgggaggactggcccaagcattggaccttccttccaacccctacccagaagccaaaccaaaccgcaaccttcctgggcttccagacaccaaagtccctagacttcaaagagcaggcctcagaggcttgaggaaatgaatgatggcagaaagaccactctttcaagaagaaaataagtcatgatcctcaagtgagaagctgagatcagacacgagaaaagccacacaggagaagatagagtgaagaaaagctccactctcaagtgtcccagagttttgacaacaggaagagagcagcgggttctactagaaaaggaagccaggggtaacttggtttccaag

SEQ ID NO: 130793 - DNA, 452 bp, Homo sapiens
aaatgaagccaaactgcagttgacctgcagacccgtgatacaaatgctttttattgcaagccactgagatttttgagagtgctttattacacagccttatcaagccaagagctgactgagacaaattgcccagggagcctggggcaatatgggactgcacacttagcactggcagaacgctattccaaaggcatggtggggctgagtgccggtgttaggtgtgaggtaaggttgctcttgacatggtggtagagggctgatgtcatgtcagaccacccaggttcaagtcctggtgctgccacttgctgctgtgtgtgtgtctctgatagagttaccctctcagcaactcatttttccttgtctataaaatatgaatcataatacaaggatctgtctcacggggttgtygtgaaaaacaggggaaaccatgccgagcccagtgcctggcacac

SEQ ID NO: 130794 - DNA, 422 bp, Homo sapiens
aacaccgtggtgaaaaccctcctacctagwgcttcgccctcatcacgattatccatgtggtgagtctttaaaggccaggtgacggcccttccccctctcctgggaaatcacgccagcgctgatcctgctaggagaggggagaggggagagaatatgaatgagaccttgaaagcagaagcctcactttggggtcatatttggaaaagcccctgtcttcagcagccacagaagctccccctgggacctcctcaagccaggagcaggctgtgagaggtttccctggaatgggggtctgggtgccccccacccccgtttccacctcccgcctgcaccgccgggagctccggaggagttcccggggacctagaaacagcggcgagagcgtgagaggggaagagctgggggtccgggccaaaaggagg

SEQ ID NO: 130795 - DNA, 403 bp, Homo sapiens
ctcctacctagtgcttcgccctcatcacgattatccatgtggtgagtctttaaaggccaggtgacggcccttccccctctcctgggaaatcacgccagcgctgatcctgctaggagaggggagaggggagagaatatgaatgagaccttgaaagcagaagcctcactttggggtcatatttggaaaagcccctgtcttcagcagccacagaagctccccctgggacctcctcaagccaggagcaggctgtgagaggtttccctggaatgggggtctgggtgccccccacccccgtttccacctcccgcctgcaccgccgggagctccggaggagttcccggggacctagaaacagcggcgagagcgtgagaggggamgagctgggggtccgggccaaaaggag

SEQ ID NO: 130796 - DNA, 561 bp, Homo sapiens
ataagtgggcacattggcattttaatatattattctctttacttgtctcaagttttgaaatgtttcatttaaagaaagcattctgtagccgatggagaatggattcgaagcaagggagacacagtggtggtttttgcagtgggatgggtgggagaggtggtagagagacggggagggaggagggattttaaatttggccccgtggatgtgggtttgytgttgttgttttgttttgtttttgtcttgaacaactatgtggataggggaggctaagtaaaaagttttaaagtgataatttcaagtgttgtcattggtgtggggaaatagcaccccagtgctggtctgggcataaattggctcactggctttgctggtaattcagtggtgactccactgctggtcaaacccatgtgcaggccaggcacagtggctcgagcttgtaatcccagcactttgggaagctgaggcaggcagatcatgtgaggccaggagttcaaaaccagcccaggtggcaaagtgagactccatctctacaatcaatcaatcaatcaatcaataccc

SEQ ID NO: 130797 - DNA, 561 bp, Homo sapiens
ataagtgggcacattggcattttaatatattattctctttacttgtctcaagttttgaaatgtttcatttaaagaaagcattctgtagccgatggagaatggattcgaagcaagggagacacagtggtggtttttgcagtgggatgggtgggagaggtggtagagagacggggagggaggagggattttaaatttggccccgtggatgtgggtttgttgttgttgttttgttttgtttttgtcttgaacaactatgtggataggggaggctaagtaaaaagttttaaagtgataatttcaagtgttgtcattggtgtggggaaatagcaccccagtgctggtctgggcataaattggctcactggctttgctggyaattcagtggtgactccactgctggtcaaacccatgtgcaggccaggcacagtggctcgagcttgtaatcccagcactttgggaagctgaggcaggcagatcatgtgaggccaggagttcaaaaccagcccaggtggcaaagtgagactccatctctacaatcaatcaatcaatcaatcaataccc

SEQ ID NO: 130798 - DNA, 401 bp, Homo sapiens
aatgatgagtgttttgaaaaatgtttagtgttcaaatagaaaccattcgtgtcccttcactctctgaacatagtctgcaaatctctccctctctggtatgtttctgttttgtggattagactgctaaataagcgaagagttaattttgaagttcaggtcaacaaattcctgtttggagacgggctgttcctgaataccaggttgttatctgtctattacagccccttcacttctgggctcctggccctttgcraagtacttcagaaagcctagagagaagagagggccctcaaatcccattccagcccctaaatgaaagtggcatcacaaggagaaaagtggaggtagaaatgtaccatgggggacgttgccccattgcctttcttcccctgactactggg

SEQ ID NO: 130799 - DNA, 589 bp, Homo sapiens
aaaatactgactaagaggcctgaagaggcatctgctcctatctctagaatttgaaaccagtcgtttggtgagctctcatgctggagtgggcatggggcygtgtgggtggcagaaaatcaaggggtctcattccactgaaatgtcatggttacctcagcctatggctggtgtttgccctcttctctccaattcggtaaggaagaaagctcctttaccaaagcgtagagtacctgggcagaacacccaggaacctttttctttctctaaagtcacatgatagatctcaccacagcagtcaatttcttgttcttcctaactgcccctaccctccttgtgtagattacatgtctttttctcttcctgttacaattgttacttaacctcttaaccataggaaacttgctttcttggatccattattttcttgtgtctgaccaaatcttagtgatctgcctgcttttgtttttgatccagaaattctagtcatttggaagtactggacagagggtcagctataggcataggccaggttcttgaggtataggtcccaaggacctgaactgacaatatttgtcttagtccttaaagt

SEQ ID NO: 130800 - DNA, 522 bp, Homo sapiens
tcagtttcctcatccgaaaaaatgggctcccacgcccatctcaaaagcctgtcgcagggctgcggggacggctggagcgtggctctgtgctccccaggcccggcagggggcgccgcgggtcctcaggcctcgcccagtagccgcgtggtatccgacccrcagctccgctcggctggactcgtctctattcggcaacccttggctccactcggccaggctcggctctactcggctgtattcggcagcactcggccagactcggccttgttccgatctgctcggcttcgccctacgccggaagtgcaaaggcagtttcccggcgcggctgtggctccgccctccgggcgcgaggcccgggtgggccagagaggcaggtcctcgtccctcgggcccgtggcgctgtcgtggatgtaggggttccgcttgcctgggccctgggctatgcagagggagacacgaaccagggtttgagggggaagcgggtggagagggaggggctccccgagcctggcgtgggggcgt

SEQ ID NO: 130801 - DNA, 522 bp, Homo sapiens
tcagtttcctcatccgaaaaaatgggctcccacgcccatctcaaaagcctgtcgcagggctgcggggacggctggagcgtggctctgtgctccccaggcccggcagggggcgccgcgggtcctcaggcctcgcccagtagccgcgtggtatccgacccgcagctccgctcggctggactcgtctctattcggcracccttggctccactcggccaggctcggctctactcggctgtattcggcagcactcggccagactcggccttgttccgatctgctcggcttcgccctacgccggaagtgcaaaggcagtttcccggcgcggctgtggctccgccctccgggcgcgaggcccgggtgggccagagaggcaggtcctcgtccctcgggcccgtggcgctgtcgtggatgtaggggttccgcttgcctgggccctgggctatgcagagggagacacgaaccagggtttgagggggaagcgggtggagagggaggggctccccgagcctggcgtgggggcgt

SEQ ID NO: 130802 - DNA, 522 bp, Homo sapiens
tcagtttcctcatccgaaaaaatgggctcccacgcccatctcaaaagcctgtcgcagggctgcggggacggctggagcgtggctctgtgctccccaggcccggcagggggcgccgcgggtcctcaggcctcgcccagtagccgcgtggtatccgacccgcagctccgctcggctggactcgtctctattcggcaacccttggctccactcggccaggctcggctctactcggctgtattcggcagcactcggccagactcggccttgttccgatctgctcggcttcgccctacgccggaagtgcaaaggcagtttcccggcgcggctgtggctccgccctccgggcgcgaggcccgggtgggccagwgaggcaggtcctcgtccctcgggcccgtggcgctgtcgtggatgtaggggttccgcttgcctgggccctgggctatgcagagggagacacgaaccagggtttgagggggaagcgggtggagagggaggggctccccgagcctggcgtgggggcgt

SEQ ID NO: 130803 - DNA, 522 bp, Homo sapiens
tcagtttcctcatccgaaaaaatgggctcccacgcccatctcaaaagcctgtcgcagggctgcggggacggctggagcgtggctctgtgctccccaggcccggcagggggcgccgcgggtcctcaggcctcgcccagtagccgcgtggtatccgacccgcagctccgctcggctggactcgtctctattcggcaacccttggctccactcggccaggctcggctctactcggctgtattcggcagcactcggccagactcggccttgttccgatctgctcggcttcgccctacgccggaagtgcaaaggcagtttcccggcgcggctgtggctccgccctccgggcgcgaggcccgggtgggccagagagrcaggtcctcgtccctcgggcccgtggcgctgtcgtggatgtaggggttccgcttgcctgggccctgggctatgcagagggagacacgaaccagggtttgagggggaagcgggtggagagggaggggctccccgagcctggcgtgggggcgt

SEQ ID NO: 130804 - DNA, 548 bp, Homo sapiens
ggaagtttacaaaaccacattttgtgtggagatggaggctggaggcccggccctgggacttggtctggggtttcttgaggaagatctgagggtccaagggaggaaggatgccctggccttctggccttctctggctgatcctgccttcttgctgcctaggacaggagagtaatgtcctagaagggtccctgggaggccagttaggaaaccctttgctgcttctgtctctagctcttgtcaataaasacggtgacacctgataacagctgtggcctgggccaatttctccgccagacactgtgtcctgatgggtgtgaatgtgtaggtgtgtgtgggctccgtgcaccctggcctgttcgggtgtgacctcccagagtccaggtccttcagggaacatggaagatacccttgatggggctgagcccacatccttatagaccttgatccaaaagcagtagatgtcctttctccctattatccaaatagcagatttcagggaagaaagtggattggctccaactaggtcacatgatggtcccttgggccaa

SEQ ID NO: 130805 - DNA, 403 bp, Homo sapiens
aagtggggagaaaggagggtccccaagctttttsgataagctcggattttgagagaccctgtaggcagctgtggggacagggaacctgggagtggtttgggtgcctggtggatgggagagagatgtcactgtgatgtaaacatccaggcggccagtgagtgagggactgaccccaggtaggcttgatggggtcagggagaagaggaagaccacagagaggtggctgggcccaggtggattccatagggtgtggggtgggggaaaatggggagggagatggaggggtaaggcaggttcgggccctggcttctgggtgggtggtgattccacacggctctgaaggcctaattaaggatctatcttcatcctaagcctcatggagctttggagggctctaggtggg

SEQ ID NO: 130806 - DNA, 386 bp, Homo sapiens
agctttttggataagctcggattttgagagaccctgtaggcagctgtggggacagggaacctgggagtggtttgggtrcctggtggatgggagagagatgtcactgtgatgtaaacatccaggcggccagtgagtgagggactgaccccaggtaggcttgatggggtcagggagaagaggaagaccacagagaggtggctgggcccaggtggattccatagggtgtggggtgggggaaaatggggagggagatggaggggtaaggcaggttcgggccctggcttctgggtgggtggtgattccacacggctctgaaggcctaattaaggatctatcttcatcctaagcctcatggagctttggagggctctaggtggggaggactg

SEQ ID NO: 130807 - DNA, 385 bp, Homo sapiens
gtccccaagctttttggataagctcggattttgagagaccctgtaggcagctgtggggacagggaacctgggagtggtttgggtgcctggtggatgggagagagatgtcactgtgatgtaaacatccaggcggccagtgagtgagggactgaccccakgtaggcttgatggggtcagggagaagaggaagaccacagagaggtggctgggcccaggtggattccatagggtgtggggtgggggaaaatggggagggagatggaggggtaaggcaggttcgggccctggcttctgggtgggtggtgattccacacggctctgaaggcctaattaaggatctatcttcatcctaagcctcatggagctttggagggctctaggtggg

SEQ ID NO: 130808 - DNA, 394 bp, Homo sapiens
aagctttttggataagctcggattttgagagaccctgtaggcagctgtggggacagggaacctgggagtggtttgggtgcctggtggatgggagagagatgtcactgtgatgtaaacatccaggcggccagtgagtgagggactgaccccaggtaggcttgatggggtcagggagaagaggaagaccacagagaggtggctgggcccaggtggattccayagggtgtggggtgggggaaaatggggagggagatggaggggtaaggcaggttcgggccctggcttctgggtgggtggtgattccacacggctctgaaggcctaattaaggatctatcttcatcctaagcctcatggagctttggagggctctaggtggggaggactgcctgtct

SEQ ID NO: 130809 - DNA, 459 bp, Homo sapiens
tgcacagctcagtggcactgagtacattctcatgttgtgcagccaccacctctatctcgctctaaaacattttcatcaccccaaaaggaaaccgcctacccattaagcagttggtcccgcttctcccctctccccagccccaggaaaccatgaatctgtttccgtctatatgaatttatctactctggatatttcttatcaatggaatcraacagtatgtctggcttctgttacttagcagattttcaaggttcatccatgtcctatcaggtatcagtgagaaagaaatgtctaaagcctgcaaaagccgaacctacagcactgagcaagcggctgaagaagggaaaagagggttaagggtaacaccatcatcggccttggggactgaaaggactcagagaccgtttcacaaataggagacagagaaggtgcagggtggggcaaggggcgatgagtttg

SEQ ID NO: 130810 - DNA, 459 bp, Homo sapiens
tgcacagctcagtggcactgagtacattctcatgttgtgcagccaccacctctatctcgctctaaaacattttcatcaccccaaaaggaaaccgcctacccattaagcagttggtcccgcttctcccctctccccagccccaggaaaccatgaatctgtttccgtctatatgaatttatctactctggatatttcttatcaatggaatcaaacagtatgtctggcttctgttacttagcagattttcaaggttcatccatgtcctatcaggtatcagtgagaaagaaatgtctaaagcctgcaaaagccgaacctacagcactgagcaagyggctgaagaagggaaaagagggttaagggtaacaccatcatcggccttggggactgaaaggactcagagaccgtttcacaaataggagacagagaaggtgcagggtggggcaaggggcgatgagtttg

SEQ ID NO: 130811 - DNA, 459 bp, Homo sapiens
tgcacagctcagtggcactgagtacattctcatgttgtgcagccaccacctctatctcgctctaaaacattttcatcaccccaaaaggaaaccgcctacccattaagcagttggtcccgcttctcccctctccccagccccaggaaaccatgaatctgtttccgtctatatgaatttatctactctggatatttcttatcaatggaatcaaacagtatgtctggcttctgttacttagcagattttcaaggttcatccatgtcctatcaggtatcagtgagaaagaaatgtctaaagcctgcaaaagccgaacctacagcactgagcaagcggctgaagaagggaraagagggttaagggtaacaccatcatcggccttggggactgaaaggactcagagaccgtttcacaaataggagacagagaaggtgcagggtggggcaaggggcgatgagtttg

SEQ ID NO: 130812 - DNA, 539 bp, Homo sapiens
tttgtccttgaccccagacactgctttctcctcacccaccctacacacagtcakgttctattattttatttctcaatatttggttaacatctaatattgcaaaaaagatgtagagcaattcatacagacacttagataagagaaaattgagcacaggtgactgaaacatcaatcattttcctatacacaagcagatataacagaagtaacgttacagtagcaagagcaggtatgcagtgctgggcataaacttactgagaatagtgcaggaatgacatgaagaaaactacagacttccctgtgaaacctgcatgatgttcatgagtgagggactggcagaggcaggtgctgttggttgcctactcaatgtctactctttctttttttatttgtacatattcatgggatacaattgcagttttccacatggatattttgcattgtggtgaagtcattattattgtaaattatttcatcaattttggtccaagaaatggaaatgcagcagcttgtccagttatatatgaaaccaagaattc

SEQ ID NO: 130813 - DNA, 538 bp, Homo sapiens
aaaacaataaaactttccaaaaaatacataggagaaaatattcaggatgtagggttaggcacagagcttttaaaattgataccacaaaaggaatcattcttaaattgggcttcataaactaaaaacttttgccctgagaaaaccttgtaagaggatgagaagacaagctacggagtaagagaaaatatttgcaaaccatatatatatatatatttgtcttcttgggaagccaaagtgagaggatcacttgagtccaggagtttgagacagcctgagcaacactgtgagacctcatctctacaaaagattttctacagtcagctgggtgcggtggcgtrtaactctagtcctagttactcagaaggctgaggcagaggatcccttgagccccagagttcaaggtggcagtacatcacgagtataccactgtactccaatctgggtgacagagggagaccctgtctctaaaaaaattttaattaattaacttaatgtacaaagaactctcaaaactcaacaatgaaaaaaaatatataac

SEQ ID NO: 130814 - DNA, 597 bp, Homo sapiens
ctttgacttctcctgtattcaaatatacctattttggtatgtaaaaggcttaagacacttgaatttgaatgatggaatatatagattaaaaagcagttcttgtagcattattttaattcaaaaggcaagtgacaagtaatgacaggggcacacttaaagaaaatcagtttcactaataccataggataattatgtcactatcttcacagggctgtaacaaggaccaaattctaaaaygaggaaagggctccatcatgtctgacctttatgtgtgtgagccattagtattttcaacaaagcaaagtcaatctaaacctgaaagtaagctaaggaacagacagaaagatagttaaaaagaattcacttgcagcccttggccctgaccacttgctgagcagctgtgccacagcaggtaaatttctacctctctgagacttctcgtcctcatctgtaaaacggggataactttcagggctgtgatgaggccttctgctggtgtagtaagtgctcaccatatagcagtgaccactactactactactactactactactactactactactactacttctatttataggcacagacaactac

SEQ ID NO: 130815 - DNA, 397 bp, Homo sapiens
aatggtggcatcctgcctgacacgagttggtttgggaggcttgaggrgtggcaggagtttgcgctcagcagtggagcggtaggatgtgaggacaacggcagggtgaccgatgcttggagggtgggggcgggagcgagaggtccgcagcggggaggcccgacgggggaccctggggacctcctcatagccccccacaggcacccatctgagctccaggccaggccgggtggtgtggcagacacaggggcagcagggagggcaggccaggccagcatctgtgggagacaggtagcctaaggagaaagcccttggggcccagctccacccccgcccagaccatctccatctttaacctgcccagcaactgcaatatcaaggtccaggcatctatagatct

SEQ ID NO: 130816 - DNA, 570 bp, Homo sapiens
ctagaaagcatgcagcagagatcagaggaagggccatttggtccagagagaccctgattcacagccttgtcctgttccaagcaatgttgggatgagctgaagaagatgcctccgttctcagacccaaaaggcacaaagacggcacctttgggagagccaggcactaccagtgtcttgagtgctgaatattgtgcattcgaaagcaatgagagctctagggtggacctttcactggcactcaaagagaaccaaggaagcagagaaggatgataaatggcatcttagtggttcctggcacctgtcttaagagtaagatcttttactgtattacaaggctgggcattttcctaaaattgtttagatccttcgtgtcattattttctctcctgcatttctggtcttctgcagcacactccccaggtgggwgagtggtgtccggggtctcaccctgcaggactggattccagtactcagggacgggcagcctgtgtggtggaaggctaccttgcgcaggcacatgccagccagactatccaggaagaaatgccgggaagaaaaaggggtcgtgtt

SEQ ID NO: 130817 - DNA, 447 bp, Homo sapiens
agcagcttttatgggggcggcagtgcacagcagaggcagaggggccactccttgcagagcagggctacgtcataggcagtgcacccagaacaacagctcagaggcagggctgcactcacctttacacccacttttaattatatgcaaattgaggggcaatttatgcagaaatttctaggaaaatgttggtaacttccaggtcattgggttrtcaccatggaaaggggtggtaacttccaggtgttaccatggcaatggtaaactggcatggcacactggtgggtatggcttatggaaagctgcttctgccctatcccttttagctagtcctcagttgggtccagtgtatgagccccacctctggagttgagtccagcttcctgcctcactaacagaggtgactcagagcacccacacatttccagagcgctaaagctttcacgaatt

SEQ ID NO: 130818 - DNA, 312 bp, Homo sapiens
gggcgtcgctgggcacagggcaggtcgctaggaatccccagtaaaaccacgctcgctcagaggttcgcggcttcctcagagggcgctggggaaagagaggggacctgatttcttcgaccctcggaggaaaagtgctcggggcctcctagggacacagccctggaagctcacctcatcttagcttaggccgcggcgaggtggggaggaragttaggagagggggagaggggctctgcgccctgcagaggcctttaattctggaggaaaaagactgggacacacccaagcgagccaaggcccgagccccacgca

SEQ ID NO: 130819 - DNA, 460 bp, Homo sapiens
gaattcattttgtggggaaagcgaaggatgtataatttctaaatgctgtgatacactcatgttgcttctgaacaatatagtttatggcgtaatatacagcagccaatgcccctcagaaaattcaacagaatagttaatcccatggcaaacagggccatcattttatccattcattcatatatcctgctatctttacatttaaaatgatcatgcaggcctaaacaaaaaaggccagagaaaacctaaggtaaatttttcaggtacaggcacaatgagtatcttttattgcaacagtttatgcataatctatrttggtgccaacacctaaagttaaacatttatatttatttttattttgtttctactacccatgggtgcatgacagtaaaatactggtaacctaacagaatgtatgtgtatgggtatatatgtatatataaaatagcatatatatatgtga

SEQ ID NO: 130820 - DNA, 580 bp, Homo sapiens
ttgggatcaacaaaaaggacagtcatgtgctgtttcatgtaaacatttctgagggcaagaggaatcattagtatcaaaggaaaatagagttctaagagctagattatagaaaaaaatatagttcaaatatgaaagaggaaaatatcagtattaagatggtggtctggtaaaagctgttttatgacagtcactggggcctaaattataatggttctttactatcctgaaattgaagattaaagtgtgatcaacctttaaaaagctatttttttcagagtcaaatgacccgctaacatamtcttataataatgttttcaacttgaaaataaagaggtgagaaaactcttcgagttgaaggataaaaacaaatattctgaatgacgtctatataatctcactgattctgaagcaaaatcagtgtaataagaaaaacagacactgaacagtggaagtaccacttaatatagttcaagttctgaaagactagttaaatgatgtcaaagtcatacaaatatttttcctatctcttgtaaaatgagggtgtcatattacccccaaagacaccttcaggcaaaaaacc

SEQ ID NO: 130821 - DNA, 581 bp, Homo sapiens
aggtttcttttacaatcagataaaataaggttaccttgttggtagagatcatttaaaaagtgcttcacatttgaatctaagactgatataagtacgtcagttttcgcctttgtgtgacctatgcaagttgcatcacaatcgttgcctgtactagaatttatgttttcttttatgcaacttaaagatacagaattactttcatttattacttcattagcgtcacaactgttttctttagttgcatctttaacattatgatttgctgaatgtttttcaagcttttcatatttactagtgctagataaaaatgctgtatcaatttgattttctttttctattagtttctcrtctgagtggtctggggaaaacagatatgcagtttttccagaaaagggctgatgttcttctgataaacttggattgcttacactgctattataataaactgactgacttgtactttgggatgtggaggatacaggcaactgtgattcaggatgttcttgattacaaaattctcccatgtgactggtggtggggtgactttttgagacactgctagccatacttttcctagaaag

SEQ ID NO: 130822 - DNA, 595 bp, Homo sapiens
caaactatccttcagaaatgaagaagaaataggagggataatttcccagaccagaaaaaaaaaaaaaaaaaaaggctgaaagaatttattgttaccagacttgtcctacaagagatactaaaaggagttgttcaaaaccaaaaggatgctaatatgatactgtaaccatggtgtataaaccatcttttttaagaagacaaaatgaaaaaacttaaccacaatttttaagagacaagcaatatacataatataaattgtgggattatcaaaaattcaaaatgygggaagaaaagaaaattggtgtgtataggtttttttctttgcaattaaagttaaactgtatcagttttaaataacttgttttaactacaaaatgtgttttgtaagccttagggtaaccaaaaagcagaaatactaaaattaaaaagcaatgaattaaaacatactaccagagaaaatcaaccacaaaggaagactttgtttttaaaaaaacaaaatatacaaactgttacttagactaagaaaataagacagaagacccaaataaataaaatcagaaactaaaaggaaacattataactgaaaccacagaaat

SEQ ID NO: 130823 - DNA, 571 bp, Homo sapiens
ttacctacactttgtagattaaaaaataaaggtttttccctctattcttagcactttcaattcctttttaagtagaatagtgaacctttctagcyggaactttataagtatttttagtttttacactattttgaaaatctggcattgtatggattttacatatctcattttgctaatcattttctcagtttgtgcatatatcagatatagtcacaagttcttttgcagctttatatgataattgctaacacatgagcagtatatatgttgctcatatatattgcttcctatgagcaagatagttttctaaatgctttatatacagtgtactaactcaatccacacaacaacctgtaaggcagtaagtagtagtatccctcatttttcagagaggaaactgaggcacacagatactaagtaacttgccttaggtcaaacagctgttaagtgacagatccgtttgctagaccatttatatagtctcatgcaaaactatactatgtattgtctgtgatttgtgcaatatgtagcaaaagtataacaacatgcatgggaatgataaacaccaagt

SEQ ID NO: 130824 - DNA, 622 bp, Homo sapiens
gctgtattaatagatctaggccaggtgtggtggctcatgcctgtaatcccagcactttgagaggccaaggtgggtggattgcttgagctccagagtttgagaccagcctgggcaacatgacaaaaccccatctctataaaaaatataaaaaattagccagatatggtggcaggcacctgtagtcccagctactcaggaagctgaaatgaaaggatcacttgagctcaggaggtcgaggctgcagtgagctgagatcacaccactgcactccagcctgttcaacagagtgagtgagaccctgcctccaaaaaacaaacaaacaaacaaaaatctaaggaaaacttacataattatcttcataaatattgaaaaggcatttaaaaccccatytgtgattttttaacaaagcaacttaaaataagaattactgaataattctgtaagacaataaaaacatacacctcaactcagaaatcaatatcttaattaagagtgaatattagattcctgcctatcaccattgttatgagacttggaaaggaaaaggtaagtctaccccgatttgctagtgatgtgatggtatactatataaccaccaagagcttttgtttatgtaaataat

SEQ ID NO: 130825 - DNA, 622 bp, Homo sapiens
gctgtattaatagatctaggccaggtgtggtggctcatgcctgtaatcccagcactttgagaggccaaggtgggtggattgcttgagctccagagtttgagaccagcctgggcaacatgacaaaaccccatctctataaaaaatataaaaaattagccagatatggtggcaggcacctgtagtcccagctactcaggaagctgaaatgaaaggatcacttgagctcaggaggtcgaggctgcagtgagctgagatcacaccactgcactccagcctgttcaacagagtgagtgagaccctgcctccaaaaaacaaacaaacaaacaaaaatctaaggaaaacttacataattatcttcataaatattgaaaaggcatttaaaaccccatttgtgattttttaacaaagcaacttaaaataagaattactgaataattctgtaagacaataaaaacatacacctcaactcagaaatcaatatcttaattaagagtgaatattagattcctrcctatcaccattgttatgagacttggaaaggaaaaggtaagtctaccccgatttgctagtgatgtgatggtatactatataaccaccaagagcttttgtttatgtaaataat

SEQ ID NO: 130826 - DNA, 611 bp, Homo sapiens
caaaacttaaggagatgccaaaaaaaaaaccccacagtaatcaagataaataatattttaatgcaatcttttttaaaaatcagaattaatgttaaaaacccacgatgcacagaatatcaaaactttaaacagaggcaggatcagtattattgatttttcctttgcctcaggctccaatacagtttgtcatggcatggtactgtaactgatcctgcgtttatttaaagtgttgatgttttgtttattatggattttcatgttaattatgattttgaagatatcacattaaaatgatgaagacaaaaatgatttatcttgattactgtggtttctggagccccgttcaattctgagtgcctcactggccacccccagtcctggccctgmagacacaggagtcagacagacacatacagacagacaagcacaggtagacacacacaaatgccctctctacagttcacaggaatgtcgttttcttaatgtaaaccattatgctggccattattttatctttttatcatgctttgatgagtgcagctttatatagtagttctctcatgagagtcaccttgacagggaatatacattctattattttctttatcttg

SEQ ID NO: 130827 - DNA, 611 bp, Homo sapiens
caaaacttaaggagatgccaaaaaaaaaaccccacagtaatcaagataaataatattttaatgcaatcttttttaaaaatcagaattaatgttaaaaacccacgatgcacagaatatcaaaactttaaacagaggcaggatcagtattattgatttttcctttgcctcaggctccaatacagtttgtcatggcatggtactgtaactgatcctgcgtttatttaaagtgttgatgttttgtttattatggattttcatgttaattatgattttgaagatatcacattaaaatgatgaagacaaaaatgatttatcttgattactgtggtttctggagccccgttcaattctgagtgcctcactggccacccccagtcctggccctgaagacacaggagtcagacagacacatacagacagacaagcacaggtagacacacacaaatgccctctctacagttcacargaatgtcgttttcttaatgtaaaccattatgctggccattattttatctttttatcatgctttgatgagtgcagctttatatagtagttctctcatgagagtcaccttgacagggaatatacattctattattttctttatcttg

SEQ ID NO: 130828 - DNA, 611 bp, Homo sapiens
caaaacttaaggagatgccaaaaaaaaaaccccacagtaatcaagataaataatattttaatgcaatcttttttaaaaatcagaattaatgttaaaaacccacgatgcacagaatatcaaaactttaaacagaggcaggatcagtattattgatttttcctttgcctcaggctccaatacagtttgtcatggcatggtactgtaactgatcctgcgtttatttaaagtgttgatgttttgtttattatggattttcatgttaattatgattttgaagatatcacattaaaatgatgaagacaaaaatgatttatcttgattactgtggtttctggagccccgttcaattctgagtgcctcactggccacccccagtcctggccctgaagacacaggagtcagacagacacatacagacagacaagcacaggtagacacacacaaatgccctctctacagttcacaggaatgtcgttttcttartgtaaaccattatgctggccattattttatctttttatcatgctttgatgagtgcagctttatatagtagttctctcatgagagtcaccttgacagggaatatacattctattattttctttatcttg

SEQ ID NO: 130829 - DNA, 594 bp, Homo sapiens
atgccaagggaaatttttgttgtcttattgctctaagatctaagagaggttttttcgtcatcttattgtgctgtggttagtgagatggtagggctgatcacaggatgccagataagcatggaaatatgttcagctggcctcctggcagggaagaggggacacacctgtcaggtgtggcccacctctcaggagatgatgatactcaggtgggccagggtgtggtgctgggtgactggctgggtttagagccagttgctctgggttttggaggactctaagcccaagaggtagtagagtcacgggcagggaagccaaggcgcacacagcaatctctagattaggctgggggcatggagatcagatctggccagacacrtgatgcctgggccatcagataccaggacccctcaactccacttaacatcatgtttattcattcaagcattccttcagcaacttaaagctttgaatgtctgttccctcatctgcgatttggggaaaataatgtaataaacatacactgtgcctggcacatagttggtacccaatgagtggtagctggatacctaacctcttttaattttaaactatttt

SEQ ID NO: 130830 - DNA, 472 bp, Homo sapiens
ttatcaggtggagttttcctgcacaagctctctttgcttgctgccatccatgtaagatgtgacttgctcctccttgccttccaccatgattgtgaggctaccccagccacatggaactgtaagtccaattaaacctctttcttttctaaattgcccagtcttgagtatgtctttatcagcagcacgaaaacaggggtgggagtggatgggccgtaagctagggaaacatagattagcggaggaaccctacacatggaagtcaccttagactcccaaatcctgtgatacaagtttagcattggaaaaaaaaagtctttccttgtttcttttctttggaggataggggctgaaggggagctgaagccaagcatctccttgcatatctcargttcagtgacagaagagcttttggaccctgcataccttttaaaagcagttaccttggctttcataaaattgaatgtgaacgtag

SEQ ID NO: 130831 - DNA, 586 bp, Homo sapiens
tttgtctccctctctcccttcctccaccccatttacattcacttgaaagaaaagtctcttaaaaagcatgtgagtcatgacctgagcatctatgaacaaacagtgactcttcttaggacacagaacacctctttcctgggcattgtgcattcatatttatgtaataaaacttaaaaatatgcaggatgcaaaagtcttctggartaaagttgtttagagtttgcacaacccatataatagcaaccgcctccagaaggtggatttctatctcagctcagagaatccactaacatgtgggccagccttgggcaaaattgagaaatgggagaagacttggtttgcttccttcagcccctccacttctcagcgagtgtcttgctctcttctattctccctgcatctcttgctgtgcactcaaacccacccatcctggtgttaggtaaggctgggtttagtttaacatgttaacggccctctacatttaaatcttatatttaattataaaaggaaagggtctgtccttttaaagacattgtgggggacctaagcggggacggaggacacagaaaagaaacttctcgaggaa

SEQ ID NO: 130832 - DNA, 586 bp, Homo sapiens
tttgtctccctctctcccttcctccaccccatttacattcacttgaaagaaaagtctcttaaaaagcatgtgagtcatgacctgagcatctatgaacaaacagtgactcttcttaggacacagaacacctctttcctgggcattgtgcattcatatttatgtaataaaacttaaaaatatgcaggatgcaaaagtcttctggagtaaagttgtttagagtttgcacaacccatataatagcaaccgcctccagaaggtggatttctatctcagctcagagaatccactaacatgtgggccagccttgggcaaaattgagaartgggagaagacttggtttgcttccttcagcccctccacttctcagcgagtgtcttgctctcttctattctccctgcatctcttgctgtgcactcaaacccacccatcctggtgttaggtaaggctgggtttagtttaacatgttaacggccctctacatttaaatcttatatttaattataaaaggaaagggtctgtccttttaaagacattgtgggggacctaagcggggacggaggacacagaaaagaaacttctcgaggaa

SEQ ID NO: 130833 - DNA, 586 bp, Homo sapiens
tttgtctccctctctcccttcctccaccccatttacattcacttgaaagaaaagtctcttaaaaagcatgtgagtcatgacctgagcatctatgaacaaacagtgactcttcttaggacacagaacacctctttcctgggcattgtgcattcatatttatgtaataaaacttaaaaatatgcaggatgcaaaagtcttctggagtaaagttgtttagagtttgcacaacccatataatagcaaccgcctccagaaggtggatttctatctcagctcagagaatccactaacatgtgggccagccttgggcaaaattgagaaatgggagaagacttggtttgcttccttcagcccctccacttctcagcgagtgtcttgctctcttctaytctccctgcatctcttgctgtgcactcaaacccacccatcctggtgttaggtaaggctgggtttagtttaacatgttaacggccctctacatttaaatcttatatttaattataaaaggaaagggtctgtccttttaaagacattgtgggggacctaagcggggacggaggacacagaaaagaaacttctcgaggaa

SEQ ID NO: 130834 - DNA, 586 bp, Homo sapiens
tttgtctccctctctcccttcctccaccccatttacattcacttgaaagaaaagtctcttaaaaagcatgtgagtcatgacctgagcatctatgaacaaacagtgactcttcttaggacacagaacacctctttcctgggcattgtgcattcatatttatgtaataaaacttaaaaatatgcaggatgcaaaagtcttctggagtaaagttgtttagagtttgcacaacccatataatagcaaccgcctccagaaggtggatttctatctcagctcagagaatccactaacatgtgggccagccttgggcaaaattgagaaatgggagaagacttggtttgcttccttcagcccctccacttctcagcgagtgtcttgctctcttctattctccctgcatctcttgctgtgcactcaaacccacccatcctggtgttaggtaaggctgggtttagtttaacatgttaacggccctctacatttaaatcttatatttaattataaaaggaaagggtctgtccttttaaagacattgtgggggacctaagcggggayggaggacacagaaaagaaacttctcgaggaa

SEQ ID NO: 130835 - DNA, 575 bp, Homo sapiens
tgggcagcgatataattccttttactagtgaccaattaatccaacccatcagagtaacatttaatctttctyttaagtggtttctaaaaaggaacaacagaaatggcactgctaagaactttacagaactggaagtagtatcaaagtggctcaaaaccaaataaatataatgtaatatacaccaaattcaagttttaaagctactcaagccagggaagcaaaggaggaaatgctgattatttgggggagaaatggtagaagcgggggtagaaagggaagaccagatgttcggttttcaacatcaatgtttctgaagccaagaatatattgctgactgaggcatgataaaatgtgcagggatttccagcaatccacagtcagctgatctgctaaggagaaaaacaacaattttaaaataataaagttaggctgtaaatataattttcttatctggggttctggttatttatacctcaaagtgaatagctgcataaagatcttattgtttctcactggaacaagcttgaagcccagggaatgccttgacttcatgagattatgaaaaaaaaatgttg

SEQ ID NO: 130836 - DNA, 575 bp, Homo sapiens
tgggcagcgatataattccttttactagtgaccaattaatccaacccatcagagtaacatttaatctttcttttaagtggtttctaaaaaggaacaacagaaatggcactgctaagaactttacagaactggaagtagtatcaaagtggctcaaaaccaaataaatataatgtaatatacaccaaattcaagttttaaagctactcaagccagggaagcaaaggaggaaatgctgattatttgggggagaaatggtagaagygggggtagaaagggaagaccagatgttcggttttcaacatcaatgtttctgaagccaagaatatattgctgactgaggcatgataaaatgtgcagggatttccagcaatccacagtcagctgatctgctaaggagaaaaacaacaattttaaaataataaagttaggctgtaaatataattttcttatctggggttctggttatttatacctcaaagtgaatagctgcataaagatcttattgtttctcactggaacaagcttgaagcccagggaatgccttgacttcatgagattatgaaaaaaaaatgttg

SEQ ID NO: 130837 - DNA, 533 bp, Homo sapiens
acatcctgaataagtatattttatttcttgtcaaaatatactgtttatggtttccaataccaaagagggagtagattattttcagtataagyaatcctgttgttctttttttcctcctctactcaagatagacaaaaatttgagagctattttcttagaaaaaatgacctcaatgtcaactgtcttctccagctacaattttggcaatctcactaactacctggtgactttgtattgtctcttattgtggatttaaacattctgtaatcagaaaaaactcaacttttcaagtcttgggcctatttatttattttttttagcttaacctgttctgcctctctataagccatacatggaaataaggcctgtaaaactggcaagataaatgtaaagatcagggatcaaaggaaactctactgagaaataaaattatttttaatagaaatttttaaaaatatagtttggtgtcttgggcaaatagagtagcagtactattattctgtctgtaattgactttaaaatatttcaacata

SEQ ID NO: 130838 - DNA, 617 bp, Homo sapiens
gaaaaagaggattctctctcacctccctgggcctgggctgtccctgtgtcttgctttgacctatagaattcagtggaagtgacactgytgtcatttctgagccttggcctctagaggtcttgccagcttctgccctccctcttggatctcagctgccataacaggacacccagtgaagtggactggataatgagaggccactcagaagagaatggaggtggctcagctgatggcagcactgtgttaatcatgttttgtattttctgtattgttaagatgtttggacatcttgcaggtctttcagacctggggagacactgacccttgcagagctagcttactcctgggggtgttggcctttcatgtatagactgttcagcccagtgctgtcccccaacccccttcagctaactcccacacaccaagccaatatctcccctgtcctaaatcaatccagggccaggtatcagacaaccagggacagtctttatgtctccgagccccccagagttattcaaatgagatgattctaaactttgactctgtcttgcctttcctttttgcaaaaatctcaataaagtctcaggtctaggcttcccccttactcttgtttctgc

SEQ ID NO: 130839 - DNA, 617 bp, Homo sapiens
gaaaaagaggattctctctcacctccctgggcctgggctgtccctgtgtcttgctttgacctatagaattcagtggaagtgacactgttgtcatttctgagccttggcctctagaggtcttgccagcttctgccctccctcttggatctcagctgccataacaggacacccagtgaagtggactggataatgagaggccactcagaagagaatggaggtggctcagctgatggcagcactgtgttaatcatgttttgtattttctgtattgttaagatgtttggacatcttgcaggtctttcagacctggggagacactgacccttgcagagctagcttactcctgggggtgttggcctttcatgtatagactgttcagcccagtgctgtcccccaacccccttcagctaactcccacacaccaagccaatatctcccctgtcctaaatcaatccagggccaggtatcagacaaccagggacagtckttatgtctccgagccccccagagttattcaaatgagatgattctaaactttgactctgtcttgcctttcctttttgcaaaaatctcaataaagtctcaggtctaggcttcccccttactcttgtttctgc

SEQ ID NO: 130840 - DNA, 490 bp, Homo sapiens
atcagtcattcactcacttatcccatgtctatagaaagcctactataccctggagttagagattcaaaatgagaaaaaaccaggacccttccttggaataactcccagtctctgggggataccaatgtaggtcattaatgtttacagaggagtaggtggtgtaacccagccaagagcacagggccatggcagctcagtggaaacggtggtttgctctaccagccagaggcttctaaggaaacaccattggagctgtgtctatgcagtatgaggcatgttttggggtgaatttttatcttgttttactccctaaacaatcttggatcatatctataggaatgctgactgggarggatacagtaaattctgattatcattccccatccaagtctcacccagtttcacctggtgtacgttgtgattaggtttggcagtagcgagttcgtgaccacgttgtgacgtgctggcatatacttcctgagagttaagg

SEQ ID NO: 130841 - DNA, 612 bp, Homo sapiens
acatctcttctctggctaacagtgcttacaagtgcagctcaggctgagtcacattgttgaattcaggcctttgcagatgaagcagatggtgccaggcttgggagaactgattggtgactactgggcttccttgaaggttttgctgtcataaggtcaaaggtgcaccagtgctgaggtcacagtttgttcacgtgtagccattgttctactgacacagctaagaagtgacrcacttctcacctcggttgtgctagaaactgctcttattaatttcttatgagttctctggctaaatccctacagcagatgtttaaaacttactctaccttccagaactctgactgtattcttgcccccttctcagtcataggtgacctcaaatcttactttacaaaaaaatttaaaaagatgaggtcatttgacttgagctatgtcctttgcaccccagaaatcactgtattttcaccctttctcttgtttcattttgattttgagaaatctagtcccttctttgttccattgctgggctcttcccatagctcttgacaccatccctgatgccatccctcttacttccttagtgccttgtgtcaccatctagccctttctttc

SEQ ID NO: 130842 - DNA, 471 bp, Homo sapiens
gccatgctcagttcttccttgatcaagtcgaggtcttcttagggtcaacacgaaggaaaccctttgtccacttgcagcgcatcctgacagtgacagagacatctctggataggtccctgtctccgaggaaggccttgcgggtggcggagggctcaggacttcagtgtgctgtaacagtaaatctgtggaaagaaagtaaaggcctgtggtgaggctgcaacctcggtgccaaatcacaatgtataattggccctgattttttccatatgtatcaacaaaaacagccttgctttcatgggagatgaaagcaacctctttctttggtcctgtttcctttttgggtayagttcccaggtctccactgggttcatcatactctctttaaaacaaaccgaaaaacaaaaaaatcataaattagggatacaaaaggacttatggagaaaatctctttatgttttctatggcaaacag

SEQ ID NO: 130843 - DNA, 594 bp, Homo sapiens
ccactatgtcagtaaaaatttataataaatgtatgtatgtatgtatgtaaatatatggatataattttttcctggacaaccttttgttaaacatttattagcaccactccttcaatctttttgtttcactgggccaacctagtttatatgtctattcctgtgtctggaatttattccttccggtgggttcttggtctcgctgacttcaagaatgaagcagcagacccttgcggtgagtgttacagctcttaaaggtggtgtgtccagagtttgttccttcagatgttcagatgtgtctggagtttattccttctggtgtgttcgtggtggtgctgacttcaggagtgaagcctcagacctttgcagtgagtgttacagctcttaaaggtggcacttctggagttgtttgttcttcctggtgggttcrtggtcttgctgactgcaggactgaagccgcagactctcgtggtgagtgttacagctcttaaaggtggtgtggacccaaagactgagcagcagcaagatttattgtgaagagcaaaaaaacaaagcttccgcagtgtggaagcagacctcagcgggttgctgctgctg

SEQ ID NO: 130844 - DNA, 484 bp, Homo sapiens
tcttgccttgggagctagggatgacagtggtttcaggaatcataaggaaacaactggaagtcaaycttactgacactgaagtacagcaggcctttacttccaacagcaacatcatatggtaggattccaactgcatgagcagacattaattttggttaaagcatctggccattgagaataatattctagctcaatggcaccactgtagtcctgttaggtgagacagagtgcagttgggaagtaagcaataagcagggctgatccatggacacatgtgggatcaactggcgagtcccagaaattgctaaggagggaagcattgtctcaccagctcagtccacacacccctacctttaggccttctctgttactatagcatatttaaaaaatcataaatccagttccgaaagaattgatgaataatgttaaagtctctgaaggagggagccacaataaatggcactcttcttgctcacttgcatcc

SEQ ID NO: 130845 - DNA, 632 bp, Homo sapiens
ccttgtttggaaaggcttttcatgctggaatatctcatgggcttctaacaagcctagaggtctgggctgccctgagttaggggtccagccaggtttagtcaccccaggaaagttgtgggtgcacctagttcctttagaagtggctagggactgggaaggcacagtgactgacatactggtagtgatggatgagaatgaaaattgatctcccatmaacatcaggtcagcagcagaaaggggaggtcacaaaatggtagtggcacaagctggcactgcatagagtgggaggaagatggcactaggaagaaatgcaaatatttttagtcaagaattgggagtgactggggaaggagctacagaccatgagtcatccatgagtcattccttcataagaatatgaaggtttcttcaccagagacctctaggaatgcttcctgtctctccttttgttgtttcattaaaatgtgtgcaatcttactgagaattgggatttttctcttatttccagccttgatatagaattgagaacgtgacattaattatttttgtctctcaactaaacttattttttaaagatattttaattatataaataacatacaaatatattctcactatgaaaaattcaaata

SEQ ID NO: 130846 - DNA, 280 bp, Homo sapiens
caatctatcagatggccttcaactgtacatgtttaaacaaactgtaggacattcataccaagaaatactgctcagcaacaaaaaagaacaaactattgacacatgcaacaacctagatgaatctcagagaattatgctgagtgattagagccaatctcaaaattacatattgtatgattccatttgcatracattcttaaaataacaaaattatagaataaggagcagattagtagctgccaggggttaaggaggggatgtaggtgagaggcaagaggat

SEQ ID NO: 130847 - DNA, 402 bp, Homo sapiens
ccaatttcacttcctctttccaagaggtgtgagattcttgccrcatccccaggcccctacatgttctgtaggtagaaagaagcaaaataatctccaatatgtgcaaagttcagaaatcagggctgccagaagacagactggctatgatggactgtcatttggtattactaaaaaaaaaatcatgggtcatttaccaaaatctcactttatattcagctattttagtatcacattgacaaagtacagggttagaaatacaaacaaatttagaaatgaggaggtaaagctaggggaaaactaaaaggctagagggtggttcatataaaacctaatttaaaaatctatgagattttaaaatacgtggggagtttacaatctagtctcctatattaacacttctga

SEQ ID NO: 130848 - DNA, 402 bp, Homo sapiens
ccaatttcacttcctctttccaagaggtgtgagattcttgccacatccccaggcccctacatgttctgtaggtagaaagaagcaaaataatctccaatatgtgcaaagttcagaaatcagggctgccagaagacagactggctatgatggactgtcatttggtattactaaaaaaaaaatcatgggtcatttaccaaaatctcactttatattcagctattttagtatcacattgacaaagtacarggttagaaatacaaacaaatttagaaatgaggaggtaaagctaggggaaaactaaaaggctagagggtggttcatataaaacctaatttaaaaatctatgagattttaaaatacgtggggagtttacaatctagtctcctatattaacacttctga

SEQ ID NO: 130849 - DNA, 404 bp, Homo sapiens
aagaagtaggcagttctaggaacagagggttgctccctttttagatgctatagggtaacttcctgactttgccatggcatttgtaaactgtcatggcgctggtggsagtgtagcagtgaggatgaccacaggtcactctcattgtcatcttggtttgggtgggttttgtctggcttctttactgcaacctgttttatcagcaaggtctttacgaccttgtgtatcttgtgccgacctcctatctcttcctgtggcttagaatgccttaacctcttggtaatgcagcccagcaggtctcagccttattttacccagtccctattcaagatggagtcctctggttcaaacgcctctggcagagccactttactgaggacacatagtaaggggtggagtcagcagtg

SEQ ID NO: 130850 - DNA, 404 bp, Homo sapiens
aagaagtaggcagttctaggaacagagggttgctccctttttagatgctatagggtaacttcctgactttgccatggcatttgtaaactgtcatggcgctggtggcagtgtagcagtgaggatgaccacaggtcactctcattgtcatcttggtttgggtgggttttgtctggcttctttactgcaacctgttttatcagcaaggtctttaygaccttgtgtatcttgtgccgacctcctatctcttcctgtggcttagaatgccttaacctcttggtaatgcagcccagcaggtctcagccttattttacccagtccctattcaagatggagtcctctggttcaaacgcctctggcagagccactttactgaggacacatagtaaggggtggagtcagcagtg

SEQ ID NO: 130851 - DNA, 617 bp, Homo sapiens
gatgcatacaagtctaaaattgttatagttctctcatgaattgtactttttttttttttttttttttttgagacgaagtctcgctcttgtctcccaggctggagtgcaatggcacgatatcggctcactgtaacctcctcctcttaggctcaagcgattcccctgcctcagcctcccaagtagctgggattacaggcaactgccaccacgcccagctaatttttgtatttttagtagaaaaggggtttcaccatgttggccaggctggtctcaaactcctgacctcatgtgatctgcccaccttggcctcccaaagtgctgggattacaggcatgagccaccgcacccggcctgaattgtactttttgtattatggaggaactcactttttcactagaaatccttyatcatcaatttgttttgcctgatattagtatacctgcaatagttttttttttttggttaacatttgtatgctgtatatttttcattcttttccttttgatatttatgtaacctatgttttagaggtgtatcttgaaaacagcctataatagagtttaactgataatatttgactttttagctggagcttataattcttttacatttatttt

SEQ ID NO: 130852 - DNA, 527 bp, Homo sapiens
agtagagctcatatcagaaacttttattattccttgactcctgtatccaaaacttttgatgggacctaagcaaaccagtgacacatttaaatcagattagcaatttgcaccttcatggagggcttagcagagcagctttgttctgatgcctttacacaaatccatttgtatctgtaggaaaatgtaactttatttgcatctgtggctatatccctgggttggtaatgaggatgaaccaactcatgtctcaagcaggattgagggtgctcaaagatcaggttcacatyagagtggaggatatcctcttggggtgacctctgcctccctaaaccctctatgttgcagaagataccaggtggaggagaggcagtcccactgggaaagggaggcaatgtggcacaccggtcaatggagacagcgcaagagcatggctgtctgaaattcaaattctgactttccacctctagatgtgttagcttgggcaagtcacttgacctctgtgagcctcagtttactcaccaggaaaa

SEQ ID NO: 130853 - DNA, 534 bp, Homo sapiens
cctcagttgaagtttgatgctgtgatgactattatgttctttcattggtttcctctactactatggaggcaagaagaacatgataaaatgatacatgataaaaaatccagtggttctcaaacttcagtgggcatcagcattacctagacggctgatggaaatgcaagctctgggcctcacttccggagtgggagtgtctgtttcagcgggtctgggctgggrtctgagtatttccctttctaacaacctccccggtgaccctgatgctgttggtccatgttccacgctttgagaaccactgttctaatcagggagccgactggttctccacaacttaacttcaaatacattgcttgccaagtatcggtcccatattgagcttccataattctatgtgttgttaaaaataaggtttgagacaatcttaagttaggaaatttctcactgtgactcaaattttcagcttctgttttggaaaaaaataaataaatctggcaagattagtccttccttcctcatggcaccaatgggatg

SEQ ID NO: 130854 - DNA, 546 bp, Homo sapiens
catgcacacagtggcacatgcctgtaatcctagctatttgggaggctgaggcaggagaatcatttgaacccaggagtcggaggttgcagtgagctgaaatcatgccactgcactctagcctgggcaacagagtgagacttcatctcaaaacaaaaaaagtactgttttgaccatttcccttcccattgtctaaaacctggacttcaatcttatgaaatgaacctgtggccctcttttctttcactgtgaaatgtagttctctagtacgttcttcagacttggctgcttctgaacatcttcccccaaccaccccagtcaccatagaaacaccaagtcaagccttataaaaatcattatctaattttgtcttatttctaaagaggagcttttggttgcacwttgtcttgatgtgacagacattataacctgtgattgaatgtctgatcattttatacttacagtcctcgaaggtgatttctgtgatattggcaaagatagtgaattaatttccattcattagtcaggaatcttatgaactgtatcttt

SEQ ID NO: 130855 - DNA, 580 bp, Homo sapiens
ctacattttaacatataattcatgacactcctgaatgtcttcttaattttttataccaatttggctttacaggtgctagctgacatttattaggcagtattagttagcatcttccttggtgcaattgttcagttttattcatcccttgtgaatgaaatataactgtatgcatatattttttgatacggtgagcatgtgtagtttgccagcctctgtgccagctctgaaatgaatcaaatgcttactctcagtgaacagtctgtattctggacattttgttcttgtcgccaaaacattcattctccatcgaacagtacattgttaccacaacactttacttttccttcataaacatgttaacagcatttttgaggggtctaagttattttcccagggtargcaccagaatctgggttcgagtgatcatcaaattagaggttcatcaagtcctccatatggcatagccaggaagtgttctttaatcctcggactttttaaaggtaatgaaaggactagttgcaagtgaccaaacccttagcaactattgccatgcattatgtgattatgataattatttagc

SEQ ID NO: 130856 - DNA, 595 bp, Homo sapiens
caacactacaacagtattttaacacacttgcaatgagaaaataaatttaaataccaagattggaaagaaacagattgttattattcacaaaaaacaactatatgaataaagcacctagggaaaagttgttttatttgaagatgaattgggcagagttggatgtaaaattaatttaccgaaatcaattacaaactcattaaatttccacaaaaatattagtgtattttctaacaacttttataaatatagcatttgtaatagcaatgaaatcataagtgatctaagaataaacaacatacatgcatgggcatgttaaaggagaaaaataaaactttatgaaagtttcactaactagaaaattaactatgtttatagataagaaaacattaaaaatatcaaaaytctcctcaaattgataaagaattaaattccagtgtaaatcatatcaagattctttgtgaaacttgacatgctaattctacattttacacagatgagacaaaaacaagaaaaaactgattattcctgaaaaagattggctaggaggagagggagcttgccttagcagatcttaagcctcataataaaactaaag

SEQ ID NO: 130857 - DNA, 543 bp, Homo sapiens
aaggacaactatagaaaatgcaacaccctttcttctctgctgtgaggctaatcccaatgagctgatagtagggaaaaaactacttgaccagacaggtctaggactgatcaatagacccacagccaattattgaggaamcccaactcctccagacaagggcctgcatgacattccaaactctgctatttctttcttgaataaaaaaattgtcatttattcctggaagccaaaattgttcaacctctcaaacattacctgaatgccccaagaccatgagaaaaaacaacaagtggatatttttcaccaggcctcagaggggaattccagtttgcaggagttgtcattgaacctagacaacaatggaaggttatagttaaggttttctctgagtgttgctagtgaatttaattcatatctcattagcataaaatgcagacccatctgatttatatctacttttttatggatgaatagtagattcattaaaaagactgctactagatacccaccaaccaaagagctgaactgtaagttttttttttt

SEQ ID NO: 130858 - DNA, 457 bp, Homo sapiens
tgtcaagtataaaaattaactcaaaacggatcacagacctaaaagtaagtcttaaaactataaaactcttagaggaaaacacaggaatacatctttgtgagggagaggaccaacttcattcttttagctgtagatatccagttgtctcagcatcatttattgaaaagactattatgttgtcactgaattttcctggcatacttattggaatcaggaagtgtgagtcctctaactttgctctctttcaagattgttttcttctgggtcccttgcatttccatatgattttttagaatcggcttttccatttctctggaaataaattttgctgcctaatgcttccacttgaattgcaactcacccatggraagttatggaatcttggcatgaactcaaatgtgggacaaatggggttagttgaaatgtacacctgcttaaaggcctctatgaaaggcaa

SEQ ID NO: 130859 - DNA, 459 bp, Homo sapiens
ggaattcagtaatataatgagtgtacagtgcctatcttacagtctgctctcagttaatattagtcctttgccctctcaacctctaacaggaatagagcatcacaaagaaggataggggactttgcttcattcctcattgaatcccccacgccttacatagctcagttacagaattagaggaagatagtggcaaaaactcaggctgtgggcctctcaaagsctttggcaatagaaagccattaaagaatgttaagtaagaaagtgctatggtcaactttgctttttacacatttattgtgattcttgtgtggagaatgggttgacaagaagcaagactggctgcagagaaattagttgggatatttttgcaaaaatctaagtacagagtgatggtagctataccgaaacaccttttagtgaagatttgctatgtgctgggcactgtgctgtgtacttcat

SEQ ID NO: 130860 - DNA, 419 bp, Homo sapiens
gaattcagtaatataatgagtgtacagtgcctatcttacagtctgctctcagttaatattagtcctttgccctctcaacctctaacaggaatagagcatcacaaagaaggataggggactttgcttcattcctcattgaatcccccacgccttacatagctcagttacagaattagaggaagatagtggcaaaaactcaggctgtgggcctctcaaagcctttggcaatagaaagccattaaagaatgttaagtaagaaagtgctatggtcaactttgctttttacacatttattgtgattyttgtgtggagaatgggttgacaagaagcaagactggctgcagagaaattagttgggatatttttgcaaaaatctaagtacagagtgatggtagctataccgaaacaccttttagtga

SEQ ID NO: 130861 - DNA, 478 bp, Homo sapiens
aatgagtgtacagtgcctatcttacagtctgctctcagttaatattagtcctttgccctctcaacctctaacaggaatagagcatcacaaagaaggataggggactttgcttcattcctcattgaatcccccacgccttacatagctcagttacagaattagaggaagatagtggcaaaaactcaggctgtgggcctctcaaagcctttggcaatagaaagccattaaagaatgttaagtaagaaagtgctatggtcaactttgctttttacacatttattgtgattcttgtgtggagaatgggttgacaagaagcaagactggctgcagagaaattagttgggatatttttgcaaaaatctaagtacaragtgatggtagctataccgaaacaccttttagtgaagatttgctatgtgctgggcactgtgctgtgtacttcatgtctgtgatttcacctgcactctacaagaattca

SEQ ID NO: 130862 - DNA, 527 bp, Homo sapiens
gggtaggaattattgaggcgatggggtggaggaggaggagtgggaaagagtagtgtgccacatggagatctcagcaggaacagaggctgagaggcttcagaaagaaaaaagcatgtttaaaggatggaaagaagttcagtaagcctggagcacaaggcacagaaaggacagtaacagtaaaggaaaggaaaactagagaaaagagaggagaattaattgctgatgatgcaasggccttccaagtcatgttaagaagttctggctacagcatggaagtcttaagactggagctatggagaccagttaagagacagctgcgtccatgggatgcttgatagaaacctacactagagcatggtggtagtcacactcaaaagatatttaggagactcaattgacctcatctggtgattgatcagatgggagtggagatggtgaggacagacatgaatcaagaataactagatttctgccatgggcattaggtggaaggtttaatacaaactagctttcacatgttggtaact

SEQ ID NO: 130863 - DNA, 575 bp, Homo sapiens
cctaaaacacatggaaaagctatgaagaggtcgggggacaagggccctccatatataaagaccttcattcacaaaggatgtgttgagataacattttataaactgtacttagaaatctattctcgaaactgcttgccaactcccgaaatccctttaagcaaggagaaaagmctttcagtttaacttcataaagagaaaaccataaaatgcaagtacttcatagaggttaaaaggtaaaatacattattttgaaagcataaaccaccacagggcagacaaatgactcagagcttccccagttttgttataggggaaaggctgaagccgggagaagagcctttagtatccagaggagatgccagaatatttgggaataggaagtcatggaaagaagcttctagaacatcactcttcatctgagatcagtcctgtcttctccataacagaaaaggaacaagaagcttttttttttttaattattatactttaagttttagggtacatgtgcacaacgtgcaggttagttacatatgtatccatgtgccatgttggtgtgctgcacccattaactcgtc

SEQ ID NO: 130864 - DNA, 575 bp, Homo sapiens
cctaaaacacatggaaaagctatgaagaggtcgggggacaagggccctccatatataaagaccttcattcacaaaggatgtgttgagataacattttataaactgtacttagaaatctattctcgaaactgcttgccaactcccgaaatccctttaagcaaggagaaaagactttcagtttaacttcataaagagaaaaccataaaatgcaagtacttcatagaggttaaaaggtaaaatacattattttgaaagcataaaccaccacagggcagacaaatgactcagagcttccccagttttgttataggggaaaggctgaagcygggagaagagcctttagtatccagaggagatgccagaatatttgggaataggaagtcatggaaagaagcttctagaacatcactcttcatctgagatcagtcctgtcttctccataacagaaaaggaacaagaagcttttttttttttaattattatactttaagttttagggtacatgtgcacaacgtgcaggttagttacatatgtatccatgtgccatgttggtgtgctgcacccattaactcgtc

SEQ ID NO: 130865 - DNA, 582 bp, Homo sapiens
cagtcacagcctcacctattctctttctccaccattaaattattttgaaataaatacccaaaagcatatcatttaatctgggaatatttcaagttatagctctaaaagataaggactattttaaaaacataatcatggtgtatttcaaagatggaacaatttgaacatcaagaagaagaattgtggtgggttgaacaacatcaagtatctactaataatgggaatttaaaaaaaagaccctyatgacttgcctttagagattgttaggacactagcttagctcatcactctcaaaattgttaaaaggaaagaaatcaaggatttgtcctgcctgtcccatacattgtattttggaatagtcaaatagttgataaggtaaagctcttctttatagaatgccagcaaataaatatagaaggaatgctctagaaaagcataattctttagcccctaatgaaatagtggatttagccagtcgttatcatggaatgctaaaaccttcaggtcaaaagttgataatgaaatgtataatggatcgcttgacgaatcatacctgaagtcattaatgaatcttagtaccac

SEQ ID NO: 130866 - DNA, 609 bp, Homo sapiens
ttttctcaattattctctcaaataagttttccaaacaggaacaccagttattcttaggtttagccatttcacataatcccatatttcctggagactttgttaatttgttttctttttctttgtctttgtctgattgggttaatttgaaagccttgacttcaagctctgaaattctttcttctatttgttctagtctattgttgaaactttcccctgcattttgtttttccctatgcatgtctttcatttccagaagttccaatttgtttttatttatgatatctatttctctggaagatttttcattcatatcctagattgtttttaaaatttctttaagttagttttcacctttctctggtatctctttgagtagcttaatagtcgaccttctgaattctttatctggcacttcagagatttcttcttggtttggatccattgctgrggagctagtgtgatcttttggggatgttatagatcctgttttgtcatattaccagaattacttttcaggtttcttctcatttgggtagactacttcttctaattgttcttgaatttattttttatttgaccaagtttttcttttttaatttctattttttc

SEQ ID NO: 130867 - DNA, 426 bp, Homo sapiens
ttaaactttctaaagcaatggtagtctaaagcagagaatttccacatgttaagaaaggcataatgtctacagtgaggacagatgattctaaaaatctgtcttctttattataaagacttaaaagatggccatttctaagatattagcagcgaatcacttatagtgatactactgcaaaaatatttacaaatacacttatttccttttcttttcacatatatgcaaaaagctttaartacatatatgtgtagttacctataaagtaactatagtataactacagtaacctattttataagtaaaaatataaattatgttaattgcatttgtgtgaaaaaacatgtcataattttgattttcatcttcaactttaagttgtcattttatgacagaaactataaagataatctaataaacctgatgtat

SEQ ID NO: 130868 - DNA, 593 bp, Homo sapiens
aggtatccaactcagacttcaatattacaaacaaacctactaaagatatttatttaaatatgttttttttgttattgttgaaacaaataaaaaatgttgccctagcattttgtgataagaaaaaatgccggaacctagagtacyggtcggaatccacaacctggacctcctaaaggggcgtgactctttcccaatatgatcctcaggagttttaaaatatatcaacagactcatctttgatcaaagtaaggactgatggagggtatacagtgatggcaagaggaaaaccaaagctaactcatttaggttgcttattagaaactgggttaaagtacaatctgtacaaccagcaaaaaaagacaaatttatctgaataaaactgatagcatctagcataatgacaccactcaattgacccaagactttgttttaattaaagccttttgcttattttattagatgctgatcctataccaagaccttcctggaaatctcactaatttcaagttcatggtgttaatagttcaagatctttcactataggaataacttaagtgacaaaaataattttaaaatgatgtggtaattgtgga

SEQ ID NO: 130869 - DNA, 360 bp, Homo sapiens
ggtgtcatttcctcccaggcaccttccctaagctaccagggactgtaggccacttcttcttatgtgttgccatccatggtcctttgtatgcctattctgtaatacttatagtattgcagtattacactgtgctgtgtgtgtgcatgtgtgcacatgtaagtatgtgtgtatttcttgctatctgtgaatcytgcaatggcataaactaaatcttattcattacattacacactcacagcttggcaaatattaatagatggtcactaagtgtttaatgaacaagtgaatggatgaatgaatcaacaaagtagcaaggctttattggtggaccaagatgcgatatccatccatggtcacaag

SEQ ID NO: 130870 - DNA, 518 bp, Homo sapiens
agtgctaccaatctcaaaatataaattcyggagattaaattaggtttaatatgattgtttggtccatctctagactagtaccttgaccactagtactctttcagagatttttttatgttttcaagaatgacaaaaacgaaattctatacacaccctgatatccccaaagacactagtgccctggggattggccatgtgggttactaggttccatttatttggttatggaggatgttcttcacccaagttaatcctttcacaaaagctcatttttgttctttttcctgcagcttccctcagaagaagctgtggccagtgaggatttcagggtcgcttgtccccaggtgatatgggagtttcagctcaggaagtgactaggttagatgtgggggcaaatcaagaccttttcagccactagcttaaggctaacccaccacagacctaccttcttgaacaacactgggaatttgggtaattaaatgctaggatatcagacatgatgtgattaaatcgaaggg

SEQ ID NO: 130871 - DNA, 518 bp, Homo sapiens
agtgctaccaatctcaaaatataaattctggagattaaattagrtttaatatgattgtttggtccatctctagactagtaccttgaccactagtactctttcagagatttttttatgttttcaagaatgacaaaaacgaaattctatacacaccctgatatccccaaagacactagtgccctggggattggccatgtgggttactaggttccatttatttggttatggaggatgttcttcacccaagttaatcctttcacaaaagctcatttttgttctttttcctgcagcttccctcagaagaagctgtggccagtgaggatttcagggtcgcttgtccccaggtgatatgggagtttcagctcaggaagtgactaggttagatgtgggggcaaatcaagaccttttcagccactagcttaaggctaacccaccacagacctaccttcttgaacaacactgggaatttgggtaattaaatgctaggatatcagacatgatgtgattaaatcgaaggg

SEQ ID NO: 130872 - DNA, 425 bp, Homo sapiens
actgccacatgtttttagacactatacaaataacattttaaaatgttcattgattcaaagcttagtggcttacaattcagtgcaaaaagacatgggcaatgaagcaaagatgtgagcagttcagctgaattaacattttgagtatatgcacattagtcctttggatgggatcatgcctcaaacccattgaaatacacctcaatgaaacaataagtaaacgagggggaaaaggagaytacatgaggttttgagtggtgaagacatgaagtctgtaaggctatggagaataattaaatgtgatatttatatttcaaaataggtaaaacttgataatggcagaaggtaaggagtcagtggagaaaaacagaaaatgctggcagaaagaaacaggggctaggggtacaaggtctcttagaaagtgggaa

SEQ ID NO: 130873 - DNA, 598 bp, Homo sapiens
agctgaggaggatgcagcaaaggaggatgcagagtcctcaagggaaaagggggaaagccaggggaatgagatgccttgagaccctggggaagagagttgtcttctctaaatggtaggtattcagcatcagtgtagagacacctgctttgtaatatttatttggtcatgggattcacatgccttgacttacacataggttaacattaaatttaatttgcatattttggagaattgaccaatttataagagagaaacaagaggaaagaacaaatgccagaacttatgaaatcttcaagattaactgattacatatcagtaaaccaaaattacattacattaagactgccgttaaattaatttagtaatgcttcaccatgaagattatcttaatatttggctcaatttttaaaaaaaacttttttcttaatttttttacaaaaaaatttttctataactcaaaaaaatattttgagttacagtttayacattaagggggaagccattctccattcacatattcccatatattatataagttgaacttttttccaggcaactgcataatttaagtaagttctgacccatttcttagtcactg

SEQ ID NO: 130874 - DNA, 494 bp, Homo sapiens
taaaaccaagaaataatctcatctgattttaatgcaaattacacccatttccaaacatgctggctttttaaaacaatattttttattaagatttacaatggaatttcaaaaatgcagccatttacactaggttgattcttatttcactttatgtacatgagtggtttttcagctttaaagttttaaagaattcagctcagtattttggtgtttcagcactttctattttgaaaatgagccaaatattgatgtggtcagatctatgatccctcaaaccattaaaagttataactctgtgataaatataatgtagcagtgttccaaattggcaactcatattaagtttaagaataggaattacctacaaaaaatttccaagtyaccatatatctgtctctgtgataatgtcatgctccctagcgatgctctcaaatggtagaatgagtcactggcccttgtcttttcaaattttatccatgaaaataaaagtaaac

SEQ ID NO: 130875 - DNA, 558 bp, Homo sapiens
ccttgtttttgttgatttttttggtggggagcggcgagggtgattaacttgtcccgtgtcttaacagattgtttaaagacctacatcgtgaaaacagtcttgtgggcttggagataaacagatgggcaatcagttcagtaaattaaaaacatctctaccttaggtgtcctgccgccagaagaaaccaaatctttgccactggtcttgcttcaagccacacaagtccaggatcccatgtggcagcaggggtgttttcttacctgcatgcaaatcggagttgtgtgtttgcttttgaagagggtgaaatggcttaacacttggggtgggaaaagaccggaaaagcgttctggatgagttttgtcccctgcaactttttctgtctgtaatccctccatgagcagccaccctcccacactcccctccttcatgtaaaagaggacgatttctggcctgtgatgtctgagtgtctcaactcaagttaagttaaaaccacacaaatgtacccrgccctggatcccataagagccccaggaaaagtaagtcgggtttgtggaattc

SEQ ID NO: 130876 - DNA, 616 bp, Homo sapiens
attggctgccatttcagtgccgtcattttctagtgatttatctctttgtcttacctccttgattattaatttgcattgccaaaataagtaaatgtgtggggagggctagtgcaaggcttctccattccttactcagccttagctgttactaggcaaacagaccatgtattcaaaacccttcttgttagggacagaaactcctagaacaaggccattcaaagccactttcctttgggtatccagtgcctcaggcaagtgttttttgttgttgttgttgttttgttgttgtttgtttgtcttttttaacagggcccctgcctatataaacaatttgattaaaaacatatatttaaaaattcatcrgtacatgtgagatatgatgatttatcattgaagatttaggatgatgggcagagaaaggcaatctgttttgtctattgtccaatcagtgcacgtgaagatttgttacagtatccaggtaccatctctttgtattctttattattaaatgcattgttcttggctaatttcctattttttgttatgagaaaaaggtagcaatactgttattacaaaaccatgactttttggaacctgtttgttttgaaacaacaca

SEQ ID NO: 130877 - DNA, 538 bp, Homo sapiens
atttcctcaatctccactttgtattttagaaaagactaaaaaagaccaagcctgttaaacaactccatcaaagaaaaacaaggaagccatccagctttgttctggactcagcagctaagatggcatgagcttcatcgtaaagcatagttctatgtcatgtctactggatgaatccaatgtggctggtcccttaataaaataagttgtaacataaatgagactgcacatgttttcctgtttggtgctgagaacaaagctgcccagttagagaaaatatgaatcccactgttccattggctcctgtaaaaatgttttggggtatatataaaactgtctgttgctctcttggagattcaattgctccaaaaagctctacatattatctaygaaatctacttgtgtatctcatctggaaggatacatatgcaaatgttaacaggattatacgtttcataagaaaatcttccatgaccttctccatcactacctctgggatccaggactgttaacactactggagagcattgtattccacaga

SEQ ID NO: 130878 - DNA, 548 bp, Homo sapiens
tgcctgataaatatttgatgagtctggctgctactgattaatgaagacagtaagaagaacaattgtaggcagtcaattcttgaaaagtggctagaaattaacatttaaatataacccagggttggctgggcttagtggttcatgcctgtaatgccagtactttgggaggctcaggcagaaggatcacttgaggccaggagttcaagatgagactgggcaacatagcaagatccatctctacgcacacacacacacacacamaaaaaaaaaaaaaaaaaaaaagattggctaggtgaggtgacacatgacctagttccatctactcaaaaggctgaggtgaggtgagaggatcccttgagctcaggagttttaggctgcagtgagctatgagtgtgccattgcactccagcctgggcaacagaaccagaccctgtctctaaataaataaataaaacccaggctcaaaactccagaatttgtttctaggaaaagatcacatttcagcctggacagacacctcctggatacaggaaattgagttagaaact

SEQ ID NO: 130879 - DNA, 421 bp, Homo sapiens
tggccaggctggtctcaaactcctgatctcaagtgatccacctgccttaggctcccatagtgctgggattataggcgtgagccaccacgcccagccrggatccttaagtaaagaaaaacattgaattatttcactctaaaactttccaggggagttggcattttccctggctttaaagtcttgcttataccatcacggtaactagaggctttcttctttcatttttggcttgttgttttaatctgctatgctgatatctggcagttcagctctctttcagctcagctgagctcctgacaaatctgaggtctaatttaccttaagccaaaagatagttaaaaattaaattaatttaatcatagttttattccaataaggatgtgtgaagtgcctactatattccaggcagtatgctaagctt

SEQ ID NO: 130880 - DNA, 654 bp, Homo sapiens
gaattccctattcaatttttttgaatagtttgaagagaattagtgttagttcttctttggaagtttggcataattcagcagtaaagtcatccagttctggacttttctttgttgggagactagtgattcagtctcattactcattgttggtctgttcatgtattctatggtattctatttttttctgattcaatctatgtagattgcatttatccagkaatttctccacttcctctatatttttcagtttgctggtatatagttgttcataatagtctctgataatctttcacatttttgtgcaattggtttttatgtctttttctaatttctgattttgtttatttggatcttctctcatttttttcttggttagtctagctaatggtttattgactttgtttaccttttcataaaaacaactttttatttcaatgatcctttgtattattttttcaacctctattttgtctagttctactctgacctttattatttctttccctctacgaactttgggtttggtttattcttgcttttctaattccttgaggtgccttgttagatttgaattttttctgattttttgatgcaggcatttattcctataaactactctcttagcagtactttcgctgtatcccataagttgtg

SEQ ID NO: 130881 - DNA, 582 bp, Homo sapiens
catataacctgcatacattatcctatgtactttaaattatctctagattgcttataatccctaacatgatgtaaatactatgtaaatatttgtggtactgtattgtttagggaataatgacaagaaaaaaaaggtcggtacatgttcaacacagacaaaaccatsctgttttttccaaacattttccattcccatttggttgaatccacgaatgcagaacccatggagacagagggctgacagtatttcactctgtggcacaggatcggcccagtttgctgtttctgcctattctgctctaaggtagtcagcagatgacttaccaaggcaggagcatcatctagtggtgaatattggcaccacaggctataccgcggctctagttccttcccagggaattgttcagacaaagtacagggacagggattgcatctagtatcacttatgatcttgtttttagccggagtgaaaaacaaagtttatttaaaacaaatggttttcaccacacattttgatttaaaaaaaaaaaagctgcaaacaggtggtagcagatgagcagttgggcttcctcctgtctcccta

SEQ ID NO: 130882 - DNA, 583 bp, Homo sapiens
aaaaaacaaaaagtagtcaaagagcaagaacagacagttttcaaaagaagacatatatgcagccaacaagcatatgaaaaaaagcttaatatcgccgatcattagagaagtgcaaatcaaaaccatagtgagataccatctcattcaagtcagaatggctattaaaaagtcaaaatagcccagcatggtggctcaygcctgtaatcccaacactttgggaagctaaggtgagcggatcacctgaggtcaggagtttgagaccagcctggccaacatggcaaaaatcccgtctctaccaaatacacaaattagctgggcatagtggcaagtacctgtaatcccggctacttgggaggctgaggcaggagaatcgcttgagcctgagaagcggaggttgcagtgagctgagatcacgttgctgcacttcagcctgggcaagagagcaagactccgtctaactaaacaacaacaacaacaaaaaaaaaaacagatgctggcaaggttgtagagaaaagggaacgtttatatactgttggtgggagtataaattagctcaaccattgtggaaaacagtgtggtaatt

SEQ ID NO: 130883 - DNA, 583 bp, Homo sapiens
aaaaaacaaaaagtagtcaaagagcaagaacagacagttttcaaaagaagacatatatgcagccaacaagcatatgaaaaaaagcttaatatcgccgatcattagagaagtgcaaatcaaaaccatagtgagataccatctcattcaagtcagaatggctattaaaaagtcaaaatagcccagcatggtggctcacgcctgtaatcccaacactttgggaagctaaggtgagcggatcacctgaggtcaggagtttgagaccagcctggccaacatggcaaaaatcccgtctctacyaaatacacaaattagctgggcatagtggcaagtacctgtaatcccggctacttgggaggctgaggcaggagaatcgcttgagcctgagaagcggaggttgcagtgagctgagatcacgttgctgcacttcagcctgggcaagagagcaagactccgtctaactaaacaacaacaacaacaaaaaaaaaaacagatgctggcaaggttgtagagaaaagggaacgtttatatactgttggtgggagtataaattagctcaaccattgtggaaaacagtgtggtaatt

SEQ ID NO: 130884 - DNA, 462 bp, Homo sapiens
aattaagctaatttatataactgattatgtgagtaaaaacacaagcctaatgaaggaattttcttatagcaattgcctgttttaaaacatgggtccaatttagatgagacagaacatgcagggcagtcacttgttaagcagtctccccrcctgctgcttattcctctacacctgtctgatggaagaactgaaatttgggatgctatgggtacctcctgctcatatccaggtggcaaaaaccacccaatgcttcttatgcagaaaaggaaaaaacacaggttcatgaaatcccagacaatggaattccaatttgttcctgatcctaaggtttcataatttgaagatcattatttgtttcataatagtctctccacaatatcctttcttgcaacaacttttcttcttcttcttttttcctattcaggaagttttaaatgacacaatttcctaccctgatggcac

SEQ ID NO: 130885 - DNA, 570 bp, Homo sapiens
ttcttttatttagattctttaacattttgttargttttaaatattgtgtattatgagtggtatatcttaccctctccatttctaactattgctagtatttttaaaaacctatcattttgtaagtgtattacatagaatcactttacatattctctttgtaatcctagtaatttttttaccagatcgtcatggggttttgagaccagtacaattacagataaattatacttttctaatattataaaattattttctatccttatctagaatatgagaaagaacctctaaaaatactgaatctcactgttaggagtcagcatctatttcctgtggctgatttttaaagaaatggctccagaaaattgccattcagtatgatatttgctgtaaaatgttggtaaatgtctttgtcattattcaatagcttctttcctttcctaatttattagaaattttattaggaaaggttactaagtgttatcaaatgcctttgtggcatttttcatataatcttatttgtctcctttaccttgctattgcaaaaaattcaagttttgttttaattcagac

SEQ ID NO: 130886 - DNA, 600 bp, Homo sapiens
ctctgttcattttttcctccctgtcagtttagaagtcctactatgcagctgggcgtggtggctcacgcctgtaatcccagcagtttgggagggtgtggcgggtgaatgacctgaggtctgaagttcgagaccagcctggaccacatggtgaaacccagtctctactaaaaatacaaaaactaagcgggcgtagtggtgcatgcctgtaatcccagctactcaggaggctgaggcatgagaatcacttgaactggagaggcagaggttgcagtgagctgagattgagccactgcactccagcctgggtgatagagtgagactctgcctcaaaaaaaaaaaaaaaaaaaagtcctactatgctgtaaagttctgckcatggtcacatatttctctgagtcacctttaaacatgtatatagagagacatatttatattctatcaaaaaataattttatatgtatgtgtgtgcgtatgtgtgtgtgtgtgtgtgtgtgtgtgtatatatatatgcatatataaaatgcacaaccatgcaccaaaaatctttacctgctcatacctctccttacgccaaacacaatggaagttttaggtcaaggt

SEQ ID NO: 130887 - DNA, 600 bp, Homo sapiens
ctctgttcattttttcctccctgtcagtttagaagtcctactatgcagctgggcgtggtggctcacgcctgtaatcccagcagtttgggagggtgtggcgggtgaatgacctgaggtctgaagttcgagaccagcctggaccacatggtgaaacccagtctctactaaaaatacaaaaactaagcgggcgtagtggtgcatgcctgtaatcccagctactcaggaggctgaggcatgagaatcacttgaactggagaggcagaggttgcagtgagctgagattgagccactgcactccagcctgggtgatagagtgagactctgcctcaaaaaaaaaaaaaaaaaaaagtcctactatgctgtaaagttctgctcatggtcacatatttctctgagtcacctttaaacatgtatatagagagacatatttatattctatcaaaaaataattttatatgtatgtgtgtgcgtatgtgtgtgtgtgtgtgtgtgtgtgtgtatatatayatgcatatataaaatgcacaaccatgcaccaaaaatctttacctgctcatacctctccttacgccaaacacaatggaagttttaggtcaaggt

SEQ ID NO: 130888 - DNA, 543 bp, Homo sapiens
tccttatgcatgtgtgagagtttctgtaaatatacagggctgtagtttccaagatatgaacattttaacattagtggatattgctcagttgctcttaaacttttatcaatgttgtgaaaagtttctattattcaacatcttcattgatactcacattttatgatatgatttacactttgctcttttgagagaccagctatttcatgctgaacagagatatcacagtcaaattgatgcataggacacaagcagttttagatattcttgtatactttcagtgaaaactttaaagacatattactttggggtagttctgcaaatttttgcaggtctttttgactgactttatcttttttattaggagaaatgagtctctacttggactaataaaagtgaaatataaggatagtgctttgaataaaaaagcaaacaaatctttaaagttcaaagctgcagtaatggaaattggaagagtaagtttyctatgagttttgaattttaggtaatgaaattaagagattcatgtatctagagatgattggc

SEQ ID NO: 130889 - DNA, 535 bp, Homo sapiens
ttgggatgtggaagtgttgttctaagcaaaccctgaaaatgaaaaaaagtgaaatataaagagctatagatagcattttcaataatgaaacaaaaaagataaatacatgtattgctttataaaatgcttagtatatgcctagcacactgtactttgtaataaatggtacttatcatttatattatcatcattacaggttccaaatgcttttatcactccagatgggctttttaaattccatggtagttggatacttcttattttcaaagaaattatcattatattaaattatgttttgttgagggtcaatcwtatgttaagcactgctggtaaattctttataaacattatctcatttaatgttattttaacctgctcttagaaggattattatgtcacaaatgatataattgaggcttaaacaacttatctgaagtcacacagctaacgatggcagaaaggagattcaaagtcatgtctatttagctaaaaaacaaacaaacaaacaaacaaataaaaaaaaactatgttcttt

SEQ ID NO: 130890 - DNA, 570 bp, Homo sapiens
ccaacatgcttataaatatgttgatgatctgagttcagtatactggaaaaattcagcattctaaaactttgccaaataaacccaagagcatagaccaaaaaacattcccaataacagaggtcctaaaatcttagaragagctacaagttggatgctaaccttttaatgataacaattccatgtaaaacctataattaatatacaggatcatctaaaaattaccacactatcacagtaagtcagaataaagtgtctgtcttcagtgaccactgaaatacagcaaacttcttcttgaatgctgtaaatttagaggcaattccaatctgaaagggagcaacggagaagaggccaggtagcacagtggagcactcaaggattgagtaattaaagcagggtttgaatcacaggcccaccacttactagtaatgtttaattttctcatgtgcaatataagcataataatatctacctcctttgactgtaaaaattaaagaagctaaatatagttccagctcaataaattattactgtcattacagtatttagaaaattttatctattcaaatattc

SEQ ID NO: 130891 - DNA, 541 bp, Homo sapiens
tactaaagttaccacctctcacccagttcatctctagtccgttgacttattttcttcagagaccttataatgattataagtctttctactcatctgtttacatgtttattttctggccctatttccaaccctctgaaattaaactttatgaaacaggaactcagaactgtattctcaccatacagaatatgcaggaggcaaggttaccactgggccataaggaaactttgtgagaagaagaaaatkgagtccttgctggctggatgcaacacctcaagcacataggctggtgtggcaaggaggggctggatttcaggccccacgtatgccaggggcccttgggcaggtcacccacagtacaactgtatgcaatgggtctgattgggtagtcaatgcactttgttaaattagtcaatggaaaaatgtacttatctcttttctctgcctgattcaagatataccatgactttcaagggcccctgggtacttttgccttcatgagtctatttctccattgaaaaatactaaaaatgatatttta

SEQ ID NO: 130892 - DNA, 587 bp, Homo sapiens
ccttggctttcaacctacaagacttactatttaaataaggaggaatattatgtgaatatacatatcaagaactttgggggttttgaaaaaaatgaattgtatatatacaaatcaactttaaaaacaaatttcaattgcttgaagcaattgttctgaatgatactttttcattcacattcaaraattaattttttgaagatttaagttacataatggaattaggcatgtggaacaccaaacaggaaagaactatgtctgaaatataaaaaataaaaataaaaaaacaactatgaatatgcacaagggacacaccagtggaatgtcagataattttcaccagtttttatttggagccgttttattgtgtagaccatatttacatatttggataagtacacaaagcgtcaatgctgttaatggccttagcaaaggctcatgctgaaatttgccagtaaaacaaagaagtttaaagactggcaggtacaccattatcacataagtgctgtcagtataaagttgtggggataaaggaaactggatatttttagcacgatgtgcatgataatttatatgcttggtggctgtgc

SEQ ID NO: 130893 - DNA, 528 bp, Homo sapiens
tcgaaatagggaagaatttattaacaagacataaaacagcataaacaataaagaaaacgaataacaagttaaaattaaaatgttaatacatcarataatgagtttttttaaatgactataagcacatattgaaagtaagtatttgcaacacatataagcaatgaaagattaattaatatgagtggatagaaaattcctgtagtttaaataaggaaaggacaaattcacaaggaaaatagagctgattaaatactgggaataaaggacatgtctgttttttccctgttgctgattctcacaaaaatgtaaggagaggactgaaaaatatataaacttatcagaacaaaaagaatagaaaaagagataacaggtaagaagttctgacaagtttttgagagagagaaattagataaactaaaaaaccttaagaatataatacaacctatgaaatagcaacataaatcagaattagaaaagttaaaagatgctttaataaaactcaagaaagaattataaataaaagaaaaa

SEQ ID NO: 130894 - DNA, 528 bp, Homo sapiens
tcgaaatagggaagaatttattaacaagacataaaacagcataaacaataaagaaaacgaataacaagttaaaattaaaatgttaatacatcagataatgagtttttttaaatgactataagcacatattgaaagtaagtatttgcaacacatataagcaatgaaagattaattaatatgagtggatagaaaattcctgtagtttaaataaggaaaggacaaattcacaaggaaaatagagctgattaaatactgggaataaargacatgtctgttttttccctgttgctgattctcacaaaaatgtaaggagaggactgaaaaatatataaacttatcagaacaaaaagaatagaaaaagagataacaggtaagaagttctgacaagtttttgagagagagaaattagataaactaaaaaaccttaagaatataatacaacctatgaaatagcaacataaatcagaattagaaaagttaaaagatgctttaataaaactcaagaaagaattataaataaaagaaaaa

SEQ ID NO: 130895 - DNA, 437 bp, Homo sapiens
cttagggtaatgcagaagtcagtgacatggagaaccagggatagaacctaaataacagctgagatcgaatcttgttttcccatgtttcaatttttacaataatagtggctattatatattgtgcttaagtatcagtcattatgcgtaamtaagccctgtagttctctcatttaatctcattggaaaatgagtaaactccagttgatcaaatcactttccaaagtcatagggataaccagcagctgtacaaaatttgaacccaaatctaacttcaacgtactgagtcattgaccattctctacttactttcatttttaatttgaaagtacaaaaatcaaaatataattaattttgaaagagaccgtccacaatcccaggaccattttagatgtcagcatagtcaacagtcctttgttaaccaggcagtaaagatatgt

SEQ ID NO: 130896 - DNA, 538 bp, Homo sapiens
ccctgtgcagtctctcaaaggttaaaaattctaattgctactaaggatttcctgcaaaaagagatgtttaaaatccttatttgaaggtccacttcaccgtgcacagaggaagtgtattcgtgcacagaggaagtattcattccttctgtgaaacataaacactcacccctccagattagcccgtggtacatttgttcttgggcagttcgatgtggatgaatcttgtgagacagggaagccatggtaagtatgctgtcctgggtgttctgtctcaggactttcttctgctgcccagggcactgctattccatcatctagcatgctgctacagctgcagaaggcagacagagatctgatacattcagggcacccacatctatgaggaaaatggatgaaagatcaaagaacaccctcccatcaccacgcttccagcatcaccaacataggatgccatcttatgtgaatatcgactagggyttgtgtaattgtagctcataaagcaggatcttttccatagatacatatttttcataaggta

SEQ ID NO: 130897 - DNA, 382 bp, Homo sapiens
ctaactcataagtttgcctgagccagaaaataaatgaactttagaagtagagttttgcaatttaaagtaaattaagtcaatgaataatttcctyggaaaattgtttttggcccactcacagctcttttatggcttataccagctttttcatgggaaaaattaacgctttagacaagttgaatccataccacttaagttccctttaaataatcaagcaaggttaaaatgaaagtattcatggtaatagaatctgccaccaggggattatagcttactaagaaaactatgactaataccattcattgattaccctttaccttcccaagagtaatatggtaaaattgcagtagggaggatttaaggcagacaataaaaatgttcc

SEQ ID NO: 130898 - DNA, 382 bp, Homo sapiens
ctaactcataagtttgcctgagccagaaaataaatgaactttagaagtagagttttgcaatttaaagtaaattaagtcaatgaataatttccttggaaaattgtttttggcccactcacagctcttttatggcttataccagctttttcatgggaaaaattaacgctttagacaagttgaatccataccacttaagttccctttaaataatcaagcaaggttaaaatgaaagtattcatggtaatagaatctgccaccaggggattatagcttactaagaaaactatgactaataccattcattgaytaccctttaccttcccaagagtaatatggtaaaattgcagtagggaggatttaaggcagacaataaaaatgttcc

SEQ ID NO: 130899 - DNA, 579 bp, Homo sapiens
cctttgctgtaaggaaggagatcatatttaaattcctcctttcaaacatgtctatcttcccagatccagggctcacaaaatgacttaatgtggcttgttaggctcrtgggtgggcaggctggagactcagtcactatggcaatgacaggtttaaataaacagtgctagtaatataaataagctgccgccacaaagcaacacttttaaaccaaacacagaaccacattttaatgacagtaagcttagaaacttttagttaatattaaattaactaggtctctatgcttcagctttctctttcttacaaaatcttaaaaattcccctatgtaattccttttctattccagtttctttttatacatttctaatatttttttctggaagtcccataaggttggttatattgcagtttctcgtcaattacagtatacataattccttactcttaagaaaagggctgcagaatacttgttacagagagataaaacattttagtagttcttctgacattctatttgaatagtatgtaccctacaaaaacgacaactatcctgagtatacacaatcaacacatgttg

SEQ ID NO: 130900 - DNA, 642 bp, Homo sapiens
accacatactacatttcatatccttgtcagataacagaattatcgctgaacttgaatgtatccatttacatatttttacatgaaaaatgtgaaatgaaaatttacattcatgtcaagggaaacaaatcacaaactctattaatcgtcttactcaatattttaaatttagtaaggtggtaagtttgttgaaagaatagataggcaaataaattaatagacctttaagttcacttttttctttttaagaaatcagtttcaaatgtacagtgatgttatgtttctgagagtaataaatcaaatatttttgcaaacaaatkaaatacatatcttttaccactctaaaataacttaaaatcaggtgtctaattggttgttattagagaattgtatggaaaacatagatttgaaagaccgaatttttattttaatttgcctacatttctcttctttattaaaagaaattaaatagcatcacgaacaaaattaactataggacaaagcctgttatttctattattgtgaatatgccccttctgcgtcattttccaaatgtaggatttgctcgttaaaaataagtagtggcacactttatgatattggcaaagaaaaacatgatctagaatatgatcttgtaaaatagtt

SEQ ID NO: 130901 - DNA, 642 bp, Homo sapiens
accacatactacatttcatatccttgtcagataacagaattatcgctgaacttgaatgtatccatttacatatttttacatgaaaaatgtgaaatgaaaatttacattcatgtcaagggaaacaaatcacaaactctattaatcgtcttactcaatattttaaatttagtaaggtggtaagtttgttgaaagaatagataggcaaataaattaatagacctttaagttcacttttttctttttaagaaatcagtttcaaatgtacagtgatgttatgtttctgagagtaataaatcaaatatttttgcaaacaaatgaaatacatatcttttaccactctaaaataacttaaaatcaggtgtctaattggttgttattagagaattgtatggaaaacayagatttgaaagaccgaatttttattttaatttgcctacatttctcttctttattaaaagaaattaaatagcatcacgaacaaaattaactataggacaaagcctgttatttctattattgtgaatatgccccttctgcgtcattttccaaatgtaggatttgctcgttaaaaataagtagtggcacactttatgatattggcaaagaaaaacatgatctagaatatgatcttgtaaaatagtt

SEQ ID NO: 130902 - DNA, 642 bp, Homo sapiens
accacatactacatttcatatccttgtcagataacagaattatcgctgaacttgaatgtatccatttacatatttttacatgaaaaatgtgaaatgaaaatttacattcatgtcaagggaaacaaatcacaaactctattaatcgtcttactcaatattttaaatttagtaaggtggtaagtttgttgaaagaatagataggcaaataaattaatagacctttaagttcacttttttctttttaagaaatcagtttcaaatgtacagtgatgttatgtttctgagagtaataaatcaaatatttttgcaaacaaatgaaatacatatcttttaccactctaaaataacttaaaatcaggtgtctaattggttgttattagagaattgtatggaaaacatagatttgaaagaccgaatttttattttaatttgcctacatttytcttctttattaaaagaaattaaatagcatcacgaacaaaattaactataggacaaagcctgttatttctattattgtgaatatgccccttctgcgtcattttccaaatgtaggatttgctcgttaaaaataagtagtggcacactttatgatattggcaaagaaaaacatgatctagaatatgatcttgtaaaatagtt

SEQ ID NO: 130903 - DNA, 366 bp, Homo sapiens
ggagcctgaagttggtctcctttcctgggcattaaggtgtagtcaggagacaatactaaatgctaacagtgggatcagtgagaaacggtggaagctagtttataagctatatcatgtagttcatgataaaattgctgtataggattcagagtagaaaagttctacccagacatggtctcatgagttggggrtggaaagattaaaaagatgtccaaagtagcaggcatggagtgaagtccagagtggacagatctgaggagatgttgcactcttcagattcaggaaaaaatatgaccacagatccaagggcaggaataataatgcacagccgggcccttgtaacacaactaatataggaatgggacc

SEQ ID NO: 130904 - DNA, 316 bp, Homo sapiens
gctagtttataagctatatcatgtagttcatgataaaattgctgtataggattcagagtagaaaagttctacccagacatggtctcatgagttggggatggaaagattaaaaagatgtccaaagtarcaggcatggagtgaagtccagagtggacagatctgaggagatgttgcactcttcagattcaggaaaaaatatgaccacagatccaagggcaggaataataatgcacagccgggcccttgtaacacaactaatataggaatgggaccctatagagctgcaactgcacagcctgcacagtatgcaaaggcc

SEQ ID NO: 130905 - DNA, 420 bp, Homo sapiens
attctaatcttggatgctcaaggataagcatggcatccagcacatagcagctacttgatagatgttatrgttgattcttgttgttcatggtagttttgttttataaagttgccatactcactgaacatcaaaacacaggtttctgtgagcccctggtcacaacattttcatcaaccacccaacatataaccttgttttatgtgagtttctgtttaaagataccttatttaatatatattattaatttattaatattgaactcacaaccagcagcattgtaactcatgcctgaatgaagcttacctaataatacatgtattttctctggaaggcacatcacagtctttttgcacttagcactacagcttgggggccatttaaagtagcaaaatcaccagcaaaaagcacaaagttaggaaa

SEQ ID NO: 130906 - DNA, 557 bp, Homo sapiens
gtcatgtggctactgagcacttaaaatatggctaatgtgactgaggaactgaatttttatttaatttaaatttgaacttaaattgtcacatgtggtgaggggctaccatactgtacggcaaggtttataacsagaataaatgaaataaatacaaaatccagaatattggttacttctgagagaaaaataaagacagaatgagggagagatacacaggggatttcaaaagcaaaaataatcttctttttcttaaatgggtattcttctactgttattctttaaactgagcatatattttataaatatccttttatatgtattaaatattcaataaaacaaatgtagtgaatggggtggtgtatacatggatgtttgtactgttattaaattctgtgtaatcaaatagttttattttcataattgctagcactgagacatgccccaggtgggaggataaagcctccccaaagcccaggccccaagccctggtactaatgctcttgtcctccataaccatggatcttaagctttcacttggaaaggagaggtaggatgtt

SEQ ID NO: 130907 - DNA, 591 bp, Homo sapiens
ccagcaacctgttttcaggacccctctttttgctgagagctttctgtttcgcttgataaattctactccactcactcttccatgttcacgtgcctatttcttcctgaatgtgagacaagaacctggacctagctgagctaaggagcaaaaatcctgtgtcaccaagaaaggaaccccagtggtaggagatgggtagaggaagaagagccagcaaragtgatagcaatgttgaaatcagaaagatgaaaaccccaataacaagcactgtggtacagtggtaagaatatttgcatttgcatttggctgggcgcggtggctcacacctgtaatcccaccactttgggaggccaaggtgggtggatcacttgaggccagaagttggacaccagcccggccaacatggtgaaaccccatccctactaaaaatataaaagttagccaggcgtggtagcatgtgcctgtaaacccagctactcgggaggctgaggcaaggagagtcactgaacctgggaggtggaggctgcagttagccaagatcatgccactgtacaccagcctgggcgacagagcaagactctgtttcaaaaaaaa

SEQ ID NO: 130908 - DNA, 509 bp, Homo sapiens
gttaagcaaaataaatatgagaaatttttttaaaactacaatcttagtagatttttaacatagctctcttataattgatataaaaggcaggaaaatatcagctaagatggggagttgaacaatgagtaaacttgacctaatagatatactgaatttcatcaattgtaaggcaccactgattgtaaggccactattattttaaataccactragaaagaaaaaccactgccaagtaaactatgccattgtcattgtggtaagatgcatgctgattccagagatgtttaaatgtgatctgtgtgcacctataatcagtgaaattcgaggcagaatacactacacaacttcagatagtctctttcaaacacgagtgtttatgaaaacataccacatattggacaataaagtaagtctcaacaaataattttcaaaggattggtttcacagagaccatatcccgccgatttatatgtgtttatcctttcaacaaaatcatactatcttgatta

SEQ ID NO: 130909 - DNA, 551 bp, Homo sapiens
gtctatgttgtttatatggtataaaatgaactcacgtgactttgccaaacctacaatttgaaagaaaaagcccacaagttactatttgaagagacctcaataacctttgggaaggaatggactggttcacaggcacgagaataaacaaatgaaaggtgcttatgttttcttacatgtgtaattgtggtaaggtattctggatttaattagtgtaaaaattgtacttgaaagatagactgaaatggaagcatcactatacaggaggtaaaatgaaataactgtttaagagagatcagtgcaaacggaaatgcagagactcttcctgagagcatcatgagaaggggctatttgagtagagtgtgaagaatggcaatagagactgaggcaagagagtcatccacccaaagcamctgcatctccaacagctgagtagttttcacctaagccagaaagaaggaaaaaaaaaaaaagatctggatgatataaccctttctttacaaagatagctggttcatttgggtaggtagccatgaaaccagatgctatcttgg

SEQ ID NO: 130910 - DNA, 377 bp, Homo sapiens
atcctgttagtccgcaaagtggtaaagatgagcaagttttatggtacatggaggttcgccactggatgccgtacaccatgctgtccgtaagaagtgatttggaagttcatgaggaagagaagcctcaaactttgattgtaacagarcacaacaaagtggaatataattgcatgaataaatgtatgctgtggttgattggtaaaacatttttgtgtgcatttaatatactggtcgtttttggaaaaaataacaaccctgcaccatattgatggtctgtctaaaaatcgatcacattttaggatcaaagaattcaaaatgtctcttttctaggtatggggctttctcttctgttaccacctgctttttcttaaggaatt

SEQ ID NO: 130911 - DNA, 377 bp, Homo sapiens
atcctgttagtccgcaaagtggtaaagatgagcaagttttatggtacatggaggttcgccactggatgccgtacaccatgctgtccgtaagaagtgatttggaagttcatgaggaagagaagcctcaaactttgattgtaacagaacacaacaaagtggaatataattgcatgaataaatgtatgctgtggttgattggtaaaacatttttgtgtgcatttaatatactggtcgtttttggaaaaaataacaaccctgcaccatattgatggtctgtctaaaaatcgatcacattktaggatcaaagaattcaaaatgtctcttttctaggtatggggctttctcttctgttaccacctgctttttcttaaggaatt

SEQ ID NO: 130912 - DNA, 377 bp, Homo sapiens
atcctgttagtccgcaaagtggtaaagatgagcaagttttatggtacatggaggttcgccactggatgccgtacaccatgctgtccgtaagaagtgatttggaagttcatgaggaagagaagcctcaaactttgattgtaacagaacacaacaaagtggaatataattgcatgaataaatgtatgctgtggttgattggtaaaacatttttgtgtgcatttaatatactggtcgtttttggaaaaaataacaaccctgcaccatattgatggtctgtctaaaaatcgatcacattttaggatcaaakaattcaaaatgtctcttttctaggtatggggctttctcttctgttaccacctgctttttcttaaggaatt

SEQ ID NO: 130913 - DNA, 340 bp, Homo sapiens
atgacatttagcagtaatccattaagggcagtacctctaacaaggacgccttccagcttcagckatgttacttacgtttgatgctacttaaagtaatgaatgacgttttaaggaatccctaaccctactatcagaaaaggtgtttgttaaagagccttctcttgtgtgttacgcatgaactttggtctgtaggtgttaaatggaacctctccatgtgtatatagtatttccttgtataaagcactttactacctaccacttgtgttgtgaacgtttggtgactgctgttgaaagaaggaaaagggtgtgtgagaaagcctactgaagcagcagcactgcc

SEQ ID NO: 130914 - DNA, 559 bp, Homo sapiens
tcttataaacctagcttaacttaataggtacaaagcaaaagctagatgtgaactccttatgtttatagcttttttacaactagaaagcaaaagtaattctacaaactaaatataagccaaataatgaagccaaaaaaatcaaattaatgacattaactgaatatgaaaaatgatttgtaccaaagccaaaacactgctcactacataaatatagctctttgagtttactcaatatgggctcctctttcctctgacycaatttccctatgacattgttctgtttcttctttcgaagggcatgccatgatagtggtatgaatcctcagcttctgtgttcatcttgcctctattctcttcttgtagaaaagcaagtgattatacttagcactaacttgctccttaacacaaactcaaatgtgggcatgaaatattgcgtcaacacttggctataaagtgctcaccaaatgctccaaattaaactcacatcaagttaaatatattttattatgaaacattacaagtagtaaaaatgttatgcaatgagcacccatacacacct

SEQ ID NO: 130915 - DNA, 559 bp, Homo sapiens
tcttataaacctagcttaacttaataggtacaaagcaaaagctagatgtgaactccttatgtttatagcttttttacaactagaaagcaaaagtaattctacaaactaaatataagccaaataatgaagccaaaaaaatcaaattaatgacattaactgaatatgaaaaatgatttgtaccaaagccaaaacactgctcactacataaatatagctctttgagtttactcaatatgggctcctctttcctctgactcaatttccctatgacattgttctgtttcttctttcgaagggcatgccatgatagtggtatgaatcctcagcttctgtgttcatcttgcctctattctcttcttgtagaaaagcaagtgattatacttagcactaacttgctccttaacacaaactcaaatgtgggcatgaaatattgcgtcaacacttggctataaagtgctcaccaaatgctccaaattaaactcacakcaagttaaatatattttattatgaaacattacaagtagtaaaaatgttatgcaatgagcacccatacacacct

SEQ ID NO: 130916 - DNA, 609 bp, Homo sapiens
tgggtttgtttctacttttgccccttaggctgtgagctctttaaggagaggggtcatggctggtccatctctgcctcacmccatttgggtatgtggtgggtgctttatcagaactccccaagtgagaaaggactgtagataccatctagtcaaacttcttcatttgcagatgaggagatggaagtccagagagtgggtgaccctgaattacatctctaaccctttgtgacaggtcaggagctgagttgagaccagagccaactggccaatactcttttcactatggtggtctcgtggctgactccggtgggagagacgggctgactttcacgtagaatttaccaaagggtgatgaaggctgtagctggttaccccaatttctcagttccctatttcagttctagaaaatggatggaggctggagtcattaagtcttcatctcagggctaatgaagaactttaggggcaaaaacaagaattagaacctggtctgtctgtaccaatgtagctccagatcctgaaagaatgcattatggttgttctcaactatgatgtgttgaatgttaatacagcattcctacaacacctctgtttgtgtgctcttcactt

SEQ ID NO: 130917 - DNA, 609 bp, Homo sapiens
tgggtttgtttctacttttgccccttaggctgtgagctctttaaggagaggggtcatggctggtccatctctgcctcaccccatttgggtatgtggtgggtgctttatcagaactccccaagtgagaaaggactgtagataccatctagtcaaacttcttcatttgcagatgaggagatggaagtccagagagtgggtgaccctgaattacatctctaaccctttgtgacaggtcaggagctgagttgagaccagagccaactggccaatactcttttcactatggtggtctcgtggctgactccggtgggagagacgggctgactttcacgtagaatttaccaaagggtgatgaaggctgtagctggttaycccaatttctcagttccctatttcagttctagaaaatggatggaggctggagtcattaagtcttcatctcagggctaatgaagaactttaggggcaaaaacaagaattagaacctggtctgtctgtaccaatgtagctccagatcctgaaagaatgcattatggttgttctcaactatgatgtgttgaatgttaatacagcattcctacaacacctctgtttgtgtgctcttcactt

SEQ ID NO: 130918 - DNA, 593 bp, Homo sapiens
gtgactttggataagttacttaagctctctatgcctgatggatttatagatagacaggcatagaagcagatcacttagaacagtgcttgatcctcagtatgccctacgaactattaattactattaccacctaaacttgaatctccttcaagacctgttgctttctaccgtggctctctgaatcagtctcgyggttgaggtgcaccttaactcacaagcagcatccttactctgtcatctgtgcctcccacagtgcccatggaataccctgctgtgttgcttcatctgcctcttcctcaaaactgggagcttcctcaggtcagggcaatgacttgactttgatcaattcacatgtctggcacctcctcagcacagggtttgactcatatacagtactcataaatgttccaaaatagatgaaaaaataatctccctaatgcatagaggtgggggaagtggggtaccaacattcaccagatgcctaacaaatactaggcatttagctgattttatttattagtcatggagaaatattgttagtgccttacttattaatggttcacttattagcaggtctttattagtaggtcaaa

SEQ ID NO: 130919 - DNA, 456 bp, Homo sapiens
ggaggctggagtcattaagtcttcatctcagggctaatgaagaactttaggggcaaaaacaagaattagaacctggtctgtctgtaccaatgtagctccagatcctgaaagaatgcattatggttgttctcaactatgatgtgttgaatgttaatacagcattcctacaacacctctgtytgtgtgctcttcacttttgcttcacaatactcctatttttctcttttaacagatgagaaaactgagacttagaaagcaaagacaacttgcacaggtctcacagctataaactggcagagctaggattcatactcaagttggtctgagtctaaagtccaggccctttcctctaactcccagccttgtgcacctgtgagaatcattagcatggcacattgaggtttgtctgcttatacgtttgccactccacaaccccacacttggcattgtcattat

SEQ ID NO: 130920 - DNA, 461 bp, Homo sapiens
gagtcattaagtcttcatctcagggctaatgaagaactttaggggcaaaaacaagaattagaacctggtctgtctgtaccaatgtagctccagatcctgaaagaatgcattatggttgttctcaactatgatgtgttgaatgttaatacagcattcctacaacacctctgtttgtgtgcwcttcacttttgcttcacaatactcctatttttctcttttaacagatgagaaaactgagacttagaaagcaaagacaacttgcacaggtctcacagctataaactggcagagctaggattcatactcaagttggtctgagtctaaagtccaggccctttcctctaactcccagccttgtgcacctgtgagaatcattagcatggcacattgaggtttgtctgcttatacgtttgccactccacaaccccacacttggcattgtcattatgagctgggtcagt

SEQ ID NO: 130921 - DNA, 599 bp, Homo sapiens
atttcttgtttgctgttgtacctccaagggcctagaaaagtgccttattcaaagtagacatttgtgtaactaaatgaatgaatgaatacaagaatgaatcaataaatgatgaccaagtctgatctggaagaacgacaaagcatcggccagggggaagagggaacagcactctagacagaagaaacagcttataaaaggccacaggtttcaaagcacatgacatgttaagagggtgataagctggtagggtgttgtatacagcacaaggagtacagggagcagcagggtttggagctggaaagatgaatcatgctaaggaactggactttattttgtagaaaatgatgaattaacaaagattttatataaagaaagtggcatgttaaacagaatttttatttaaaaaatagtttttacagaataagcttgggcagagtaaattaatttctctgagcctctattttaacatatttaaaatagggataataataattaggccaggctccagcctaagtgcctggacctcatatgtagtaactgttttaaycctctcaataaagtaggaactattattattattattatcattatcatcatcc

SEQ ID NO: 130922 - DNA, 606 bp, Homo sapiens
ctgaaagaatgcattatggttgttctcaactatgatgtgttgaatgttaatacagcattcctacaacacctctgtttgtgtgctcttcacttttgcttcacaatactcctatttttctcttttaacagatgagaaaactgagacttagaaagcaaagacaacttgcacaggtctcacagctataaactggcagagctaggattcatactcaagttggtctgagtctaaagtccaggccctttcctctaactcccagccttgtgcacctgtgagaatcattagcatggcacattgaggtttgtctgcttatacgtttgccactccacaaccccacacttggcattgtcattatgagctgggtcagttgtgtgtggtgtggtctagagaattattctgagaaggtgtgaactaaaaagcagagttatgagtggaggawggcgatgggaaggggatggactatggttttaccttgactttccataaattgtgtgctcctctactttggttgggtctactattgattgtccaacttctcttgtccttcaagaattggccaaagctcaccttctggcagagcgtctcttaccccccaccccaggttgctat

SEQ ID NO: 130923 - DNA, 554 bp, Homo sapiens
ttttttgttttgtatctctcatgtctagcatagtgcaggtgttagaggggtagctttggatgctgtgacttgatgtagagctaagcaggaatggtggtaccaataataraagtgataatcaccaatatcatcatcattataaaataaggacagcttagtgatctcttatctagtgcccagcatgattttaagcactctggacttattgacccttgcatattagtttactatggctgctggaataaattactaccacttcatagcttaaaacaacacaaatgtattatcttacagttctgtaggtcagaaatccaacatgggtcttgctaaaatcaaggtgtaaggctgtgggctgtgttcctttctaggctctagaggagaattcattcctttggctttctagcttctagaggctgcccatattccttggctcatggccctttcctccatctttgaagctaacaatgttgcatcgctctgaccattcttccctagttatagttccctctcaccacactctcttatctacctcttccacttttaagaacacttgt

SEQ ID NO: 130924 - DNA, 554 bp, Homo sapiens
ttttttgttttgtatctctcatgtctagcatagtgcaggtgttagaggggtagctttggatgctgtgacttgatgtagagctaagcaggaatggtggtaccaataatagaagtgataatcaccaatatcatcatcattataaaataaggacagcttagtgatctcttatctagtgyccagcatgattttaagcactctggacttattgacccttgcatattagtttactatggctgctggaataaattactaccacttcatagcttaaaacaacacaaatgtattatcttacagttctgtaggtcagaaatccaacatgggtcttgctaaaatcaaggtgtaaggctgtgggctgtgttcctttctaggctctagaggagaattcattcctttggctttctagcttctagaggctgcccatattccttggctcatggccctttcctccatctttgaagctaacaatgttgcatcgctctgaccattcttccctagttatagttccctctcaccacactctcttatctacctcttccacttttaagaacacttgt

SEQ ID NO: 130925 - DNA, 550 bp, Homo sapiens
gatagaataagataggatccttcatcccaaagagctcacagtctagtagaagagacaggtcataaacaagttagtgcatccacgtatgataggwgctaggagaagggtggattccaggtaggtacagttgtcccttggtctctgcagagcactggcttcaggacccctgaggatgccaaaatctgtggatgctcaagtccctgatataaaatgactttgtatttgcttatcacctacatacattctctcatatactttaaaccatctctagattacttataatacctaatacaatgtaaatgctatgtaagtagttgttatactatattgtttttatttgttttattctttttaaaaatattttctatctgcagttgttgaatccacagacacggagcatgtagatatagaggttcgaatgtattgcaaagtaaaaagtgggcacagctggcagagtggacagtgagtgcttgggcttcagagtcagcctgcttcatttgaatcctgcctcttactagctctggaactttgggcaagtaactccagtttt

SEQ ID NO: 130926 - DNA, 550 bp, Homo sapiens
gatagaataagataggatccttcatcccaaagagctcacagtctagtagaagagacaggtcataaacaagttagtgcatccacgtatgataggtgctaggagaagggtggattccaggtaggtacagttgtcccttggtctctgcagagcactggcttcaggacccctgaggatgccaaaatctgtggatgctcaagtccctgatataaaatgactttgtatttgcttatcacctacatacattctctcatatactttaaaccatctctagattacttataatacctaatacaatgtaaatgctatgtaagtagttgttatactatattgtttttatttgttttattctttttaaaaatattttctatctgcagttgttgaatccacagacacrgagcatgtagatatagaggttcgaatgtattgcaaagtaaaaagtgggcacagctggcagagtggacagtgagtgcttgggcttcagagtcagcctgcttcatttgaatcctgcctcttactagctctggaactttgggcaagtaactccagtttt

SEQ ID NO: 130927 - DNA, 580 bp, Homo sapiens
tctgggctcttgttgcccaggatagactcttgtctgattggatcctagctaccactgtgctcctctctgagctagtcagttttgttgaattcactctcctgtcctttttaggaatgctgtcaagattgagtaggtcaccagttacttgtttttaaatcctgaggccaaccaatattagctgtgtgaccttgcctacattgcttaaactgtttgagcttcagtttctgtatgtgtaaaatggagacgatagtagcattgaccttgtaaggatgttgtaargattgaatgggatttaatgactatgaagtgcttagtgcatgcattaaagacattgttattttcttcatgttgggattctgcagggggcactaacagattcttctcggaaggctgctctgatcgtgcctctgaatctctgcccccacattgccctgaacatctgggcacctgagacataccggaggcctccctgacagcaggtgctgagccctctctacttgtcccaaatacggtgcacccaaacacctcatgtgtcattaaattttggttgaaacaggtttcttttttcacttttgttgat

SEQ ID NO: 130928 - DNA, 478 bp, Homo sapiens
cctgtctgaaactagcaacttgagcacaggatggatgttattcgtatgtagtaagccctcaggattctttgagatttgtgcagctgtgccatctgtgatatggtttggctgtgtccccattcaaatctcatcttgaackgtagctcccataatccccacatgtcataggatggacccaatgggaagtagctgaatcgtgggggtgagtttttcccatgctgttctcgtgatagtgaataaatctcaggagatctgatggttttataaagggcagttgccctgcacatgctctcttgcctgccaccatgtaagatgtgcttttgctcctcctttgccttccagcatgattttgagtcctccccagctatgtggaactgtgagtccattaaacctctttttctttataaattacccggtcttaggtatttctttattagcagcgtgagaaggaactaatacaggctgccatgtctgttgt

SEQ ID NO: 130929 - DNA, 452 bp, Homo sapiens
agtaatctcaagcctcccaacttaacagcaaaatagtacattttgatgccatgattacatacagagggcccagactaaaaatggataggttcaaatccaagctctacaatgtttcccagttacwtaaatttgttgtgccgcagttaacccctttggaaactataatagccccttcctcacaggggcattgtgaggattaaatgacataaggaatgtcaggcctcagtgcacttgggacacctagaagactcatcatcaattttgctatttattgttgttgttgttagtgatgtgttaaaacaggaaaatttaatgaatgtttgggattgcagagcaggaaggtggctggccactcccccagccccagaaggccctggaagctggctggggatagaattaagaacacagctgaaattaaaaccaacggtcccttttctgccctcatgtccccc

SEQ ID NO: 130930 - DNA, 452 bp, Homo sapiens
agtaatctcaagcctcccaacttaacagcaaaatagtacattttgatgccatgattacatacagagggcccagactaaaaatggataggttcaaatccaagctctacaatgtttcccagttacataaatttgttgtgcygcagttaacccctttggaaactataatagccccttcctcacaggggcattgtgaggattaaatgacataaggaatgtcaggcctcagtgcacttgggacacctagaagactcatcatcaattttgctatttattgttgttgttgttagtgatgtgttaaaacaggaaaatttaatgaatgtttgggattgcagagcaggaaggtggctggccactcccccagccccagaaggccctggaagctggctggggatagaattaagaacacagctgaaattaaaaccaacggtcccttttctgccctcatgtccccc

SEQ ID NO: 130931 - DNA, 542 bp, Homo sapiens
aaatttttccagttttctcatactttcctatatatctggctttgtacatggggatggttcgttacaacagtcgttataatgaaataaacagacctgatggggagcaaaaccatctgttactctagattccacctagatgggaaagctggattttttttaagctaaatatttggcccaagtccctatgtttggaaagtaatataataatattaagcattctttctgagataaaaaataactcatcctgtagtcttcagttatattagatgtgatattgtcaatcccttcccatgacttgcagtgccagtcacttttctacttagaattagaaaagttcttgaatgtttgcgggtcatgtttgaagttgtgcgagtttytgacgatgtgtaaagctacaacacttctctgtgcatgagctttagctctactttaacagtgaaaccagttggcaagagatgtaaccacaaagcagttttataacgtttcttaactctcttccctctcaagtttttagacctttagtcctgccaactccttctttc

SEQ ID NO: 130932 - DNA, 628 bp, Homo sapiens
tcttccttccacttgcacttcggctttgggcccggagaatctggaaaacgaaacccaacgataagttttgcagaaacaatgggaaatcttgacgcaaggttcaacttgcaaaccttctttataaataaaatccagatttgattttatattttatattctatagaatttttttwaaattacaaatatcaagcactacacattcacaggtgcccagggaaaaataagtaaccctatataggtaatattctctgctaaagatggcttcctaaccagcaagctttgtaacacttattggaggggaatcctcacataccagatgacaatgacatgtccttctaaactgccaagtgctgatgcagaatctgctgtttcctttctccgtctcatgttatttctgctattgctgccttagttcatgtcttcatcatctttcccctggactactgcattatacctctttaactggttcttcattatcttccaatccagtctctatgatgctaccattatccccaataatacaaagtaattatccaaaaatataaatctattttaccctccttttcaaaattctttcagcattcctactcattcctgaaattaaactcgaagtgcttagtaagtcaca

SEQ ID NO: 130933 - DNA, 490 bp, Homo sapiens
actggtgataggtaaattctgacacaatagaacatttgaagaaggactggtagtgccttattttgtaatctgtgccacagagagtcattaaggaatatgtgaatctatgtggggaagctcttgtgaaatctaccatcattaccaagctcratgaataaatgatatagatatggcagatggtagcaagagaagggacctacccaggaaaggagaacttatggttctagtggaggcagaggttagacaggaagtcagccatgagcaaggatgctgggtgagccagggtgaggcgtgtgctgcaagaaaaaaagtgctcactctgaaggatagcacaacagatttgtcttttgagaaaatagtctcatcagtctttgtgacggtactacactgacctttaaggcatcactacataagagtttttcatgctgacaggctgaaagaaaatgcaaatgttgaaaagaaactgagttaactgggggaaagtcgtctt

SEQ ID NO: 130934 - DNA, 374 bp, Homo sapiens
atctgtgttgagaaagattaaatggctgtgattggttcagaaccattagyacaggtgtaagacgatgagcatttgggtggcatggatgctgtggagtctatcctggactttattcctatttccattgtctgtagtcaagctcctcacacacttattcctagattttgtaaaaacttctcatctgcctgctctggttcttgctgtttttttccagtccactgtgtaaacctttccagacaaaggttcttaaaaccttcttctcatgtggtcacatccctatccaattatcttaaatatgtcttttttttcctctttttgagatagagtctcacttcatcgcccaggctggagtgcagtggcattatctctgctca

SEQ ID NO: 130935 - DNA, 437 bp, Homo sapiens
taaaccactcaccatatcaagaattaggaaaatgtcaacttggataagaaaagaccatcaatatatgcccacaccaaaatgacacagatgttggaattatygggtaaggattttaaagtagcaatcataaaaatgcttcaacaagcaattaggaacatgactgaaacaaatgaagagatagataatttcagcaaagaaagagaaagccatagcaaagaacagaagacataaagaagaaccaaaaggaaatgttatgactaaacagtacaatcactgaaattttaaaactcattggatgggcacaagagtgaaatagagaggacagaggaaaaaaacttaatgaaccttaagacagaagaattgaaattacccaatctgaccaacagagagaaaatagactgaaaaacaatatgagtcccagggatgtgtaggactat

SEQ ID NO: 130936 - DNA, 529 bp, Homo sapiens
gtaacattccctgctgacgcttctcaagtcaaaacatacactcttctggctcgttgctcaggtagaagttatgttctacatttcaatatgctcacagtactgaatgggagcatcgtcaattaaagatggtcataatttctttgcttcttctctcattgagaggtacagtctaagtcccccactccttgaatctggctggctctagtggcttacttgaccaatacaatgtggcagaagtgacattctaggacttattagtctaggtcgtaagtttgcacctttcaattgggcatcttgaaatgcttgctttggggtaagccagctactgcagaagtccatcttacctgtgaccactatgttgtgaggaagcccaggycagccacctaagaggctgcaaggagagagagctccttccatgctcttactgttccatccacaccagcatgttcaccagatataagagtgaaggagtcatcctggtcattcagtgttggggtgatcaaacccagcaccaggtcgttgaggcaac

SEQ ID NO: 130937 - DNA, 389 bp, Homo sapiens
cttatcctactggcacagcaatttgatctaagtacagagtgygcattttggttgtattgtgaggtagaaaaagccactcaaccagatcatcctgttaaactataactcctataggcgaatgcttagtaggaaaaactaaactgtaatggctgtattggattaacctgttctacttgtgcttgctgaattttgtcctcaattaattgacattcctccaatgcttctttgggcagggagcatttactgttaaggttagaatcatctcataagtagaaaagaggcgagacatagcataggtaggaatgcctaaagttggatgaatccaattaatgtctcctaataatctttggagatcatgtaaggtttctaaattatctcttcaaatttga

SEQ ID NO: 130938 - DNA, 561 bp, Homo sapiens
tcaaggtgaatagacaacatcctatttggaaggatgccactttgattgaagaagataacaacagaccagcctgatgggctgaattgcatgctgaaggatggaacagtggtaaaagctcctgtgtttgggtttgttagctcatgggcattggctgggccacatagtcaggcaggacaacaatggaacccttgtctattaaaagaatgcccatgtgggtcatggtcctatggaaatttgaggagtgcattgaagcaggacccattgatgaccgttagaagagctaatggttccaggtttagaaggtgactagaattgacagcacatatccctgtgggcttccttgaggtggacacctgagttcatgaaatgagtagatatgttttataataataaaaacagaacagaagatattgcatggatttggatgaccaaaaatyatttattcagaccaaagaacatactgtacataatgcccaagaatggcagagatatcctcctcagagtagtggtttgatagagaagtgaaataggcaattaatgcattggttgtcaacacacacc

SEQ ID NO: 130939 - DNA, 573 bp, Homo sapiens
ccaactttgaaaaacatgaactgccaaagcttagtctattagttcatccttgcactgctataaagaaatacatgagcttgggtactttataaagaaaagaggtttaattggctcacagctctgcaggctgtacaggaaacatagttgcttctgcttctggggagtcctcaggaagcttctgatcatgatggaaggcaaagggggagtgaggcacttcccatgactggagcaggaggaacagtggggaggtgctacacatttttaaacaaccagatctcatgagaactcgttcaacatcatgagaacagcaccaagggtataatattaagccattcttgagaaacctccaccaggtcccatttcaacactggtgattacaattcracacgagatttgggcagggacacagatccaaatcacatcacttagctatctgaaacagataaccttagtagtcctacacccttttcaacaaatgatgctgggataattggctagccacatataggagaacaaaactggatcctcatctctcaccttacacaaaaatcaactcaagatgggttaaggact

SEQ ID NO: 130940 - DNA, 487 bp, Homo sapiens
acatggctggggaggcctcagaatcatggcagaaggcaaggaggagaaagtcatgtcttgcatggatggcagcaggcaaagagggagctggagcttgtgcagggmaactcccgtttataaaaccaacagatcatgtgagacccactcaccacaagaacagcatgggaaagacatgccccccacaattcagttatctcgcactgggtccctcccacaacatttgaggatcatcggagccacaagatgagaatttgggtggggacacatagccaaaccacatcagttcccatatatctttttcttgttggataaatgtgttttgtctcatcttataagggtactaaacctatcattagagccctaccatggtaacttcatctaaacttcattacctcctacaggccccatctccaaatactgtcacattgggagttagagctttaacatatggatttggggagggacacaattcagttcatagcaacaa

SEQ ID NO: 130941 - DNA, 487 bp, Homo sapiens
acatggctggggaggcctcagaatcatggcagaaggcaaggaggagaaagtcatgtcttgcatggatggcagcaggcaaagagggagctggagcttgtgcagggcaactcccgtttataaaaccaacagatcatgtgagacccactcaccacaagaacagcatgggaaagacatgccccccacaattcagttatctcgcactgggtccctcccacaacatktgaggatcatcggagccacaagatgagaatttgggtggggacacatagccaaaccacatcagttcccatatatctttttcttgttggataaatgtgttttgtctcatcttataagggtactaaacctatcattagagccctaccatggtaacttcatctaaacttcattacctcctacaggccccatctccaaatactgtcacattgggagttagagctttaacatatggatttggggagggacacaattcagttcatagcaacaa

SEQ ID NO: 130942 - DNA, 588 bp, Homo sapiens
gggtttagtatgtatagagtcctaatatctacaaacactaaaacacattcaatatagctcataatacagtactgccactgagtactttttcagttactacccgttgattaaaattctcatttccaagtggcttatcagagactaattggtagaaaataattactttttatgttaactgaagttagtatggttcttgtttaatcttgatcacacacctaacacatttgcattcattgaatcctggacttttcagaattaatcatgtgtttgttatttgaatttattcaatgagtgcaacactaggcatagtactatttgcagggaataaaataatgaaaccaaacagactccatagaatttacagtctagtgagaaaacaggcattattgatatgtcatacaaaggcatactatatcgtccctgtgttaaatgctatgataaagaagtatagrgaattatggaaacctttgaatcagtcagagataggaatgaaggatgacttggagttgactatgctgcaggagatgagatttagagtagaaatagcattatatacaaaggcccagtggtttaagggaggacagagaa

SEQ ID NO: 130943 - DNA, 596 bp, Homo sapiens
cattttgacatttctcaaagtgaaaaccctgttggtctattacattaaaggaagagggtaaatatgccttttcttcatttctagtttttagttaatactgaggaatgaaattatatttgctgaagaacttggagacggttgccaatattttcacttcaattttttttttaaaagcctcttcaaaaagaaaatattttacccctgccaaggctctttgtagagaactgtagcctttaaaaataaagttcaacagatgcttttaaagtttgaaattaatttttaaagtaatgtgacttttagtggtttgttgattgatattttctactcaggatgagtgattaggagaagaattcacaggacgaataacaaacgatactctggaacagccaacttcgatcaaaaaggaatatgagagagaaaaaaatctgctttggcctatctggttccaggtagctggggcatggaaatcagactcggggctggcagttggcccatgcatcccaatctcttcataacttaaggccacctacttaataagtcctattcctctcctgtcaccactcrattcacttgcaatcaatactgagtaagttaaa

SEQ ID NO: 130944 - DNA, 576 bp, Homo sapiens
cgtttgtcattcccagtgggactttttgtgcctaatgccaacctcatttgcctacataatgattcctatattccactcattgccttggagaaagcctgacagaaactgcatagaaattgctaactttccatctttttagggcagttcattatgagtgtttaggcttctgttatcatatgggctcaccacaatcctggtagtttcttatttattttgaaataggctaatgatattaagaactgtgaaagttactctagaaactttcattttcttcttggctccaatgtgaggtttccacatgattatactgcctgtgatagtgtatttttgtaaatagaaaaaaatagcaacattcactggaattgactggaagctcttggaggacataatcttaatcaactttgcttattcctcaagcacccaacataaggttttgttagagcatgtaagaaatgaatgtttgttgaaaatgagtagaactgcatgcacagacaggtgacctgtctttgttttggctcttaaatgtcytaagctccaaagcaaccatgaaaggtcagcaaactagtgtgcttgagc

SEQ ID NO: 130945 - DNA, 609 bp, Homo sapiens
ccaactatttacttgatacgggctgataattttattcctaattcaatgtcagatactcaaatgagcagagctcttgaaagtcaggtgacttactttgtcaaaatgtaggcatactttggagataytgtggattcagttccagattactgcaataaagcaaaaattacaataaagcaagttacacattattttattttcctagtaaatataaaagttatatttgtgctatactgtagcctaaatatgcagtagcattatatctataaactacatacttcaaaaatattttattgctaaaaaatgctaacaatcatctgagccttcaatgagttgtaaaatatttttgctggtggagggtcttgcctcaatgttgattgctgctgactgaataagatggtgctagagttttgggtggctgtggcaatttcttaaaatatgacaacaataaagtttaccaattgactcttccttttacaaaagatttctttgtacatgtgatgctgtttgatagcattttacccacagtagaaattctttcaaaattaaagccaattctcttaaaccctgtcactgctttgtcaactaagtttatgtaatattctttttttg

SEQ ID NO: 130946 - DNA, 609 bp, Homo sapiens
ccaactatttacttgatacgggctgataattttattcctaattcaatgtcagatactcaaatgagcagagctcttgaaagtcaggtgacttactttgtcaaaatgtaggcatactttggagatattgtggattcagttccagattactgcaataaagcaaaaattacaataaagcaagttacacattattttattttcctagtaaatataaaagttatatttgtgctatactgtagcctaaatatgcagtagcattatatctataaactacatacttcaaaaataytttattgctaaaaaatgctaacaatcatctgagccttcaatgagttgtaaaatatttttgctggtggagggtcttgcctcaatgttgattgctgctgactgaataagatggtgctagagttttgggtggctgtggcaatttcttaaaatatgacaacaataaagtttaccaattgactcttccttttacaaaagatttctttgtacatgtgatgctgtttgatagcattttacccacagtagaaattctttcaaaattaaagccaattctcttaaaccctgtcactgctttgtcaactaagtttatgtaatattctttttttg

SEQ ID NO: 130947 - DNA, 557 bp, Homo sapiens
atcaaattgataccttctcttacagttctgttctcctacttcctgagtctcacacgtgtacttatttttagggacttgctgaccctctgtgctttttgtgtcactcagaaacaaacactgatccttaaacacattaaaattctcgtgaaatccaaaaagcaagggaatgtacagtcattgtattgcatcttttcaagccagtcttgttttcctgacactgctttcctttccattattctctggactcctaggacagtgttaactccacaactaaactaaaatgttaatggaaactggaaataaggcccaaagctgagttgagcaggctgggattttgttgtagctcagtctcagttgctttatgtgcatctttaaatggccttcagatggaaccgtctggccattttaagcaggaagcctattcattagagaaccacatggcaggtaatctactttggctggttaacttagacctttcactcacacgtggtcarcttcagttggatgaaggcagcaacaactatctaagggttgaaaggttggagtactagcctggc

SEQ ID NO: 130948 - DNA, 548 bp, Homo sapiens
cccaaagttctagaattactttttttttttttaatcctaacctacttctagttggatttctggctcttccaacttcaaggattagaacttctaaccagtgcactccacactcacacattcctagaacccggggttcagagcaggaggaggagaatgcttccaggctgatggaaaacactgatgtcactcacatgcaaagagagctaacagccaagtgggcggatcacctgaggtcaggagttcgagaccagcttggctaatatgatgaaactccatctctaaaaatacaaaaattagtcrggcatggtggcacatgcctatattcccagctactccggaggctgaggcaggagaatcacttgaacccgggaggcagagattgcagtgaaccaagatagtgccactgcactccagcctgggcgacagagcaagactccatctcaaaaaaattttttaattaaaaaaataaaacccattatggcaagcaatttcagacaagatcaggcacgttcagggtggtgtggcggtacacatggcaggctgtttca

SEQ ID NO: 130949 - DNA, 514 bp, Homo sapiens
ggatttctggctcttccaacttcaaggattagaacttctaaccagtgcactccacactcacacattcctagaacccggggttcagagcaggaggaggagaatgcttccaggctgatggaaaacactgatgtcactcacatgcaaagagagctaacagccaagtgggcggatcacctgaggtcaggagttcgagaccagcttggctaatatgatgaaactccatctctaaaaatacaaaaattagtcgggcatggtggcacatgcctatattcccagctactcmggaggctgaggcaggagaatcacttgaacccgggaggcagagattgcagtgaaccaagatagtgccactgcactccagcctgggcgacagagcaagactccatctcaaaaaaattttttaattaaaaaaataaaacccattatggcaagcaatttcagacaagatcaggcacgttcagggtggtgtggcggtacacatggcaggctgtttcaagaacacgcagttcattca

SEQ ID NO: 130950 - DNA, 435 bp, Homo sapiens
cctatttgttacgtatggagtcctcaaaagaatggggactgagatgagggagactatgyccaggagacaagtggccatgggtccttttcagcagtcaggggccctcttcgtctgtgcccatttttccttcattcatcaggaacaagacccatgaatgtcctgacttgacatgtgatgttctttccaccacaatccatgctgcctccctgagtggagaaaccactcccctcttcaaagagggccttttgtttgatcaaggctgttttcactgtgtcatggtctcagacagctttcttttgtgttctgtttaaatacagaatgacagtccactaacacgaagtctaaaaactttggcttatctttttgtaaaagctactgtatcaaatctgtcctaaaaatagcagaatgacccattctgtatgtacaggggaattc

SEQ ID NO: 130951 - DNA, 499 bp, Homo sapiens
tagaagtttatggaattctcttctggttgcttccattttcacagttttaaaaagctcactctacatgtgagaaggtgatgtcagaggtttgaggaaagaggagaagatataaggaagcaagagaggcaatagacagactaggaagcaagtcytaagcttgagattggcttcatgaatgtcaagcgaggctagtcagtatagttgtgtttttctcctgccatgtttagctacagagttgcagatgtggagaactggatttaaccaggatcagggccttgccaagcacaacagagccagataaaggggccaagctgctgagcgcgtatgtatgcagggaagtgaaattaatgatggccataaaatataagctgaggaagtaaataggtgagggatttgagggatggtgaagaggcggtaggatcaacaaactgtaagtcccaatgaggtcaacaaagagttgaggctgggatacaaaggaaatgagccatgaagtttttca

SEQ ID NO: 130952 - DNA, 548 bp, Homo sapiens
acatgaagtttaggcccagcacagtggtttatgcctgtaatcccagcacattgggaggttgaggcaggagaatcacttgaggcttgagcctaggagttggaggctgcagtgagctatgatcacatcactgcactccagtgagaacctgtctctctctcccctatatatattaaggcattatatttatagaagctagaaatgtggtaaatacaataggctctacattgaaccaaggaatcaaagtcaacacaacaatcaaaactaatatgaggcaaactgacatcatgttcctcctggtgtgacacactctgaaggacasagcagcacttctgtggtattactgtgcatgccccaaatctaagcatgagaaaacatcagtcaaaccaatgttttctcattttttagaatgtccaaactaagggacatttaagtactaaagtacagtatttgcagtatattttgtatacttcaaaaatggcaaggtcataaaagataaagaaaggctgagatatgcagtttagaaatatgcagtgcatgaccctagggtg

SEQ ID NO: 130953 - DNA, 559 bp, Homo sapiens
ctcatgagcattttttaaataccacacactcctccacagataaacagacagcaggacaagatatgcaatatacttactaactattcattccacacatacattctatgcatgtgagaaagtctttgatttatagtgagtgtctagtcttttcaagcactgtgttaattattcaaagtaggaggtttcaaccagggacacaactagcatatacacagggcttttggtagacttaaacaaaacatgacccctctaactggagtaatcatggtttgtcaaacagacccaggatagatttcagtgtctcctcaccctcttggcctggcatttttatgcagtgcacaagctatacaaccattcacagagctcctgttttcaagactaagcaaaccacctgtttcatggtaccaggctacattcttattcccagaaactcaactcacagcagcatgcctgcactcaaatggggagctgagaagacaggcaagcaytggctgtgctcattgtgactgtagttccccagaattcatgcttctcagcaatcttcactagtagcatgaaa

SEQ ID NO: 130954 - DNA, 479 bp, Homo sapiens
agatctttttgcattaaaaaaaaaaaaagttgtgtgtttgatgtgtgaccttgtagtttacctagagttttccagattttggttagataataatcttttatttttctactgatgatatctctgtgtgtctctgcaccttgaaaatcaggattctgtgtggtccccacacacaggatgtttcctagatcctatacatttttattacacataccatgttattaatagattattaatccattcattcaccagaaaaatggtaggtattcactgtaaaccaaacaccattctaagcattggggacgctataaaagtggagtatatattcgagcaaaaagaaacaactaaactcagagagagagagagaggtttcagaacatgagggtaaagrgcaaaagaattatgagggggtggctattttaggtagagcggtcaatgagggcctctctgagaaagtgacatttgggtagaatcctaaatgg

SEQ ID NO: 130955 - DNA, 545 bp, Homo sapiens
ttcatagatactgtgctaagaattaaattaaaaggtaaacaaaattacaagtgaagtagcaattcccacagcattttattaatcaatccatacaaaaataattattgcacacctatagtgtgcaaggtactaaagaatgaaataaaatcccatttctcatggaacagacattctatttgggagagtgaaattacagctattaaagtaaatgtcacaatgggaaaaaaaacttgcaaaaatagagctgggtaaaaggtaaagagtaactgtggggagtagctctctgagaagtgatatttgaacaagaaccattaggcttagcataatggcagtcaytggtagcattgaaagaatattttcaggagattggtgaagatgaaggactattttcagtgggttctaaaaaaaggacaatcagttggatatatcacatatgtaaaaaaaatttttttaaagaaagaaacaggacgagggtaaacggaaacagccattaacgttaatgctaggaaactctgttgtaaaagggagcagagtaattggcaaca

SEQ ID NO: 130956 - DNA, 524 bp, Homo sapiens
tggtgtcttataattctggaacagcaaacaaaatttttcaagtcagcctacttctaacactaaataatttcatattttctctaagtaccttatacctgtgggtccaattttacttctattaataaaggcagaatagatagatttttccagaaggcacttaagtgtctgaattctgcccatggcagagacacaattttatctgaaaaaggttaaagagattaatacttcctcattaaatttccaaataatttatttaagtatatattgccaattttcacataaaattaaagaactttcttttattcccgagaaggcaagtcatgggttgtctcaaacaaaatatgaaaagaacctgggtcaggtatcagtgctcrttcaattaccttggctttcttctttacgtcaagcccaaataattctaaatgttgtgcttaggttttcaaagggcttacgaagaagcaattaaaagctcattcaaatgtagagagcaaacaaattaaaattatataattccatcaacctat

SEQ ID NO: 130957 - DNA, 386 bp, Homo sapiens
aggggccatacctgttgtgtttactgctgtgtgcccagctcagcatgcaccccatggcttgacacagggcagggtatgtttaggtgtgaataattgtatgtacagatgagtatatacgtgagtagaatgtatttctatacattatagatgtattttggctttttataatctatataaggtctttacacatyttttgttaaatttaatgatgttttgtttgtattgcttagtaaatggattattttttattgtcattattagtatgctaattgtttattgctctgggccatagtgttctcagtgaataccctgttggccttgggaggtacagtttctcattgtgtgggacactggtgtggaaaaatagcagccacttgacatgtgac

SEQ ID NO: 130958 - DNA, 587 bp, Homo sapiens
agagttaacgttcagaaagcatctgttacctcagtaacaatggacgtagaatatgctaactcaggtgatccagagtatatgcatatatgtatataagttactgaatctgacagaaggaagagtcaaggatgttttggtgactgaactctaaagcagcataagctcgtggaaggtaataaatagtgaaactctggaagcaccaagtttaaaaggaaaaagagtcaatgaagctaagagattacaatttgataacaaatgacatcatataccaacacttyaggaaacaactgtcaggcagaactttaaaaaaagatttatggaaattgttttaaaactcattattaaatttggcagcacatcctcaacttggagagaaaggaagaggcaaagaaatcaaaggctctgacagtaatttatggatgtaggcaaatgataaatacttccagagcttgaaatttacaccatcatttgcttgaaagtaaccacttgttaactggatttgggaagtaagtttatgacattgacctacttcctgatcatcagcaaagaagctgcattatggaaggtcctgcctggccagcattaaa

SEQ ID NO: 130959 - DNA, 488 bp, Homo sapiens
ggactgcagaggacccatctgcatagcggacttagagttttttgtgaatggggagggagtgtggaggttgagcgaattcagaaagacattttgaagaagccgagggactaattagttctggcctgaagagagttagggcttctactccaggtagggggagggatgacygatttgccaagaaagaggcaagaaggttgaggggacgctgtctggtggcctctgggttctgtgactcaaactccctgtggggagctcagcatggtgatgggtggaggatttgaggaggtgtcgcgggtgggagcagttgaaatagttgggaggaagatttggggtcattgtggaaggtccagtggaagtcttatccctgcttcctcctcctcatcatcctgcgctttgatcgtatgtttgtgtgtgcatgtacatgtgtgtatccatgtatctttgtatctgacagacatcagtattggaattatctaaggggataatct

SEQ ID NO: 130960 - DNA, 573 bp, Homo sapiens
caaatactgtatggtccaacttctagcaggtggctagtataatcaaactcataaaatcagaaagtagaatggtggttgccagggagaagaaatgatgagttgtttaatagatttagagtttcggtttgagaagatgaaaacattctgggcatgaatgatgatgatggctggacaacaatgtgaatctacttaatgccactgtacygtacagtaataagaatattgacatgagacgtttctgcaaaaaatctcaatgcccaaccccctgttggaatgggaaaagcagaagctctgaaatataactttaaatggagagcaaaaattaaatgtagcaaaatttatagaaatgctgaaaacataataaaaaatctattagtaatacatttggttaataaggtaaaaaacaatattttactttaatggaagcatctgagcttgtcaactgtttttgtaaccaaagtacggatgatttcctactctagggtggctcatttaaaattatatgtaataaaagttcgcaagcattttgatggctttcagcagtactattcatttattatctgcttgttgaac

SEQ ID NO: 130961 - DNA, 573 bp, Homo sapiens
caaatactgtatggtccaacttctagcaggtggctagtataatcaaactcataaaatcagaaagtagaatggtggttgccagggagaagaaatgatgagttgtttaatagatttagagtttcggtttgagaagatgaaaacattctgggcatgaatgatgatgatggctggacaacaatgtgaatctacttaatgccactgtaccgtacagtaataagaatattgacatgagacgtttctgcaaaaaatctcaatgcccaaccccytgttggaatgggaaaagcagaagctctgaaatataactttaaatggagagcaaaaattaaatgtagcaaaatttatagaaatgctgaaaacataataaaaaatctattagtaatacatttggttaataaggtaaaaaacaatattttactttaatggaagcatctgagcttgtcaactgtttttgtaaccaaagtacggatgatttcctactctagggtggctcatttaaaattatatgtaataaaagttcgcaagcattttgatggctttcagcagtactattcatttattatctgcttgttgaac

SEQ ID NO: 130962 - DNA, 446 bp, Homo sapiens
tttatctctttttgtgtttacttgtaatctgctagtttctgtcaagtaaattttaattcatttcaactaaagccaaaacaacagacatttaataattaccccatatatcctagttgctgggttaaaggctgagattgctggaaaaataagaaatcctatatttcactatcctctgtaaccctcagcaaattatgaggcaagatatattatgttgtaacttaaaatcccctttatgatgttaaatttgaaaagctagacacagaagacaaatacccaaatactacatgatttcactcacatgtggaattaaacaagcaaacaaaaaacgaaaacaagagaccacagaagcagcgagtagtgagtagggaaggaagmggatgatggggagaggttggtcaatgggtccaaagttacaattagagaggaagaataagttgtggggctcc

SEQ ID NO: 130963 - DNA, 637 bp, Homo sapiens
taacattgacaatggcagtagtaataatkataatgtattattaagtagagagctcatcatacatgctgggtattattctgagacctcacaataatcttatgagatggttgctattatttttattgatgagaaaaatgagtaatagaggggttaagtaaatttttcaatgtcaatagctagacagagagcttgtgcttatggtggctactctatgctttcttgaatgacttaaaaaaatttcctcttatctaattttattctcctcctttgcacctgctcattcttttatgaatatgcgtacgtgtttctctttaaaacaaaataaaaaccaactctcccagcccccaaatctctcactagttgtcaccttatatcaagactatattaaaaaataacgaacagttaatatctccccaactattcaactgtggactaggttgaatcatatgacattgctgataatggactgattttgatgtatagaatggcaatcttatctggttcagtcaaatgcttttcaacccaatgcagtcagcttcctacttttaccactctgaatgtactctttaaaggtggacaggtcatgtcccacttacaaaaatgcagtagttacttttcatccctctttttattaaaa

SEQ ID NO: 130964 - DNA, 570 bp, Homo sapiens
gaagaaccactaacacctagggggtcctggaatactctcagcttatcttcagcagtagaacctgtctcagagaaaaaaagtgttctggatgtccttcttactggtttgaggaccaggggttacttagtacagagcattccaaaaaagcaagagggcagtgatgaggatgaggctcaraagttgcacatgtgtcatctgcaagcctgccaatttcaggacagcagtctccaaatcaaggcaggaaacagtgaacagagcctttcatatgcatgcatgactcaatgaagactgctcagctccatttacaaaaaagaacttaacagaggagttcttgacgatcagatggacataggcctaaaacctgtagagtccatacccctcagattggtctaaaattatattatccctgttaatataagatacttatgagttattttgtgaagttattaaaatgaaatgagacaaaattgagggatttggtcttgaaaaatgaggacagcgaaaagtctgccacataaactaaagacttttgaaggaaacaaaacaatatttcagaagggcttagttgct

SEQ ID NO: 130965 - DNA, 638 bp, Homo sapiens
agcctcccagcctacatctttctccaatgctggatgcttcctgccccttgaacaccagactccaagttcttgagttttgggactctggctggctctccttgctcctcagcttacagactgcctgttgtgggactttgtgatcatgtaagttaatacttaataaactcacctatatatgtgtgtgtgtgtgtgtgtgtrtgtgtgtgtgtgataagttttttccctctagagaaccctaatacagccatcacctccaatacctaaaggcagggcttttaaagagataattaaagataaataaagtcataaatatggggccctattccaataggattggtgcacttagaagaaggtatcagagtacacactcacagagaaaagggaatgtgaggacacagagagaagacagccatatgcaagccaaggagagaatcctcacgagaaaccaaactaccaacagcttgatttggactccaggctccagaactgtgaacaataaagatgtgaacttaggaggttattccacttctgaggaataaatttctattgtttaagccacccagcctgtggtattttgttatggcagatccagcagactaatgcatactcctgtctatgccaaaatggtgctttggttg

SEQ ID NO: 130966 - DNA, 601 bp, Homo sapiens
ttgtttacagaaccttatggtagtcataggtaagtgaaaatattataaaataaaacaatacagagaaaagaccttaaggaatcaattgcaaaaggggaaacaaaaaataatttaatgacactcatmatgaattgaaaataaatacacctagtccttgttcttttaactagtgtaaatgttggcccactataagatatttttaatatgttaaatattgaaagagccaacattaaaatcaaaatattgaaccataagcattgatttttgatattcataatttatggtattaaatagaatattaaactgatcaaaatgattaaatattttagtcacttaaaaaatatcttgctaccttattttactttttttaacttaaattgattttaactattgtgttttgtacttttttaagactgaaaattgtgaaacatctaaactttcaacaaaatctattatttggagaaaactcaatatccaaaaatgtgtggatcactcacacaaaaaatgaaatgctacaaaacaatattgttgaaaccagtatattctcattctgtctattcctttcttctgccactacatcagcttgtctgtctcttaaaga

SEQ ID NO: 130967 - DNA, 601 bp, Homo sapiens
ttgtttacagaaccttatggtagtcataggtaagtgaaaatattataaaataaaacaatacagagaaaagaccttaaggaatcaattgcaaaaggggaaacaaaaaataatttaatgacactcataatgaattgaaaataaatacacctagtccttgttcttttaactagtgtaaatgttggcccactataagatatttttaatatgttaaatattgaaagagccaacattaaaatcaaaatattgaaccataagcattgatttttgatattcataatttatggtattaaatagaatattaaactgatcaaaatgattaaatattttagtcacttaaaaaatatcttgctaccttattttactttttttaacttaaattgattttaactattgtgttttrtacttttttaagactgaaaattgtgaaacatctaaactttcaacaaaatctattatttggagaaaactcaatatccaaaaatgtgtggatcactcacacaaaaaatgaaatgctacaaaacaatattgttgaaaccagtatattctcattctgtctattcctttcttctgccactacatcagcttgtctgtctcttaaaga

SEQ ID NO: 130968 - DNA, 467 bp, Homo sapiens
ttggagaaaactcaatatccaaaaatgtgtggatcactcacacaaaaaatgaaatgctacaaaacaatattgttgaaaccagtatattctcattctgtctattcctttcttctgccactacatcagcttgtctgtctcttaaagatyacacaaacagagaaaagagtgggttgaatttggggcattctttacgttctacttttacatgtctgtgttaacttttttggtagatattatgcatctgattaaaaaccaaaacttaaagaagccattaaatatttttaaacaaaaatgttaatgattgttcaatagctcattatatgtatttttcataatttacttaaatattcctccattgaaagcatttagactgtgccttgttctacaagccaaccctatttatcttgatcaattctttaatttggagtccttctgtatcaccttcactattatgattttagctcccc

SEQ ID NO: 130969 - DNA, 484 bp, Homo sapiens
gaattcacttcctacagtttctcttcactgtggattcctgtcctgtcctgggaaaccctgccagcatgttttcaagaatatacttggtctctgccccttaagactttactctaggactctttcatttacctgtcyttgggaaaggaaatctctctccccccactttttttttttttttttttttttttgctgctgttctcagattggcctgcttttgcttcccaatgatatttatcggtcattcaaggattctctttttccatggtctatctgggatcctgctacttctctgttttccttcactgagatcctgctaacatgcagggctttgatggtttatccctacccacttgcattttggggtttcggtggatatctttgcttttagtttcaatgaaaatgttggtcctgggtgtgactttggtaccagtccctctttcattttatatatagggttttaggaggagccagagtctgcattttt

SEQ ID NO: 130970 - DNA, 371 bp, Homo sapiens
tcctacagtttctcttcactgtggattcctgtcctgtcctgggaaaccctgccagcatgttttcaagaatatacttggtctctgccccttaagactttactctaggactctttcatttacctgtctttgggaaaggaaatctctctccccccacyttttttttttttttttttttttttgctgctgttctcagattggcctgcttttgcttcccaatgatatttatcggtcattcaaggattctctttttccatggtctatctgggatcctgctacttctctgttttccttcactgagatcctgctaacatgcagggctttgatggtttatccctacccacttgcattttggggtttcggtggatatcttt

SEQ ID NO: 130971 - DNA, 484 bp, Homo sapiens
gaattcacttcctacagtttctcttcactgtggattcctgtcctgtcctgggaaaccctgccagcatgttttcaagaatatacttggtctctgccccttaagactttactctaggactctttcatttacctgtctttgggaaaggaaatctctctccccccactttttttttttttttttttttttttgctgctgttctcagattggcctgcttttgcttcccaatgatatttatcggtcattcaaggattctctttttccatggtctatctgggatcctgctacttctctgttttccttcactgagatcctgctaacatgcagggctttgatggtttatccctacccacttgcattttggggtttcggkggatatctttgcttttagtttcaatgaaaatgttggtcctgggtgtgactttggtaccagtccctctttcattttatatatagggttttaggaggagccagagtctgcattttt

SEQ ID NO: 130972 - DNA, 620 bp, Homo sapiens
gctttaaaaatgtctctgaataatttaacatcagtttacattttcactgtagtaaaattgctaatatcagatccttcctcaaaaacaaatgtcatcgaaagggaaggagagagagtagccaggagtgtgggctatgtgacacgttttatggagctcagagtggaaaaggagagactgggctggcagagctcccacagactgtggtatacacgctagtctacatgaatggcaccccagggtcatgcagtgactgatgtcactgaagccaactcctttgcatttcagatgtgagctggtacctgccctgtcaacatggagcaatagctaagaaaatttattcccagtgtggatttgctgggagacttgcagaattttgtggtaactcagggtgagcgagcctgctcattgagcttyttctgactacttggcatgtccctgaaatttgcagaacccttaagggctggtgccctttgggtcatcatgctgaaaggagcattgcaaaatgcaaagacaaagagccactccacacagatttcagttgggaaggcaaagtggcaaatagacaatatttagtccatgtacagaacaaagttagagcagatgaacagagaaagaaagat

SEQ ID NO: 130973 - DNA, 598 bp, Homo sapiens
tcaacatggagcaatagctaagaaaatttattcccagtgtggatttgctgggagacttgcagaattttgtggtaactcagggtgagcgagcctgctcattgagctttttctgactacttggcatgtccctgaaatttgcagaacccttaagggctggtgccctttgggtcatcatgctgaaaggagcattgcaaaatgcaaagacaaagagccactccacacagatttcagttgggaaggcaaagtggcaaatagacaatatttagtccrtgtacagaacaaagttagagcagatgaacagagaaagaaagatccagttttcatgttaatgccttcaattataaagaacaaaagaagagaaatagtgttgtaaatttttttttcccaagtggattttttttttttctgggtatctcttgtccttgtttcttaagttctttgtaaagagatgattacaaatgaaatctatcctggtgtgaatgtgtaaggagattactcgaccaaacacacacatattttaaacacaacactatcctgcagcacaataacatcccgccttgttttaaggagggacaattacatcatagaaatgatgggg

SEQ ID NO: 130974 - DNA, 417 bp, Homo sapiens
ggcaaatagacaatatttagtccatgtacagaacaaagttagagcagatgaacagagaaagaaagatccagttttcatgttaatgccttcaattataaagaacaaaagaagagaaatagtgttgtaaatttttttttcccaagtggattttttttttttctgggtatctcttgtccttgtttcttaagttctttgtaaagagatgattacaaatgaaatctatcctggtgtgaatgtgtaaggagattactcraccaaacacacacatattttaaacacaacactatcctgcagcacaataacatcccgccttgttttaaggagggacaattacatcatagaaatgatggggcatcatcagttttttgaatcaggagaataaagggcatgtcccaaaaacaatctttctttttgatc

SEQ ID NO: 130975 - DNA, 601 bp, Homo sapiens
gtgctgagtgaagttcttatcataactccttcaattttgtctgggagaaggagagtttattgtacctatttcacagatgaaaaaagaggcctagggatctaaacatcttgctcaacatcacagagatactaagtagcaaaatcagcctttgaattctggagtctggatctgaggtctgagctcttacccataggctatgctgctggattgtagcaatcaggaccatggggctcaggacagtgggtgatatttccagatctgcattctarttgggtgtgctctagtctttaggaggacctgggacttgaatgatgccaattgctagtccccatttaatgcatgaggctttcctatggctcagcatttactgactacatatgtgtgtgcttgttgtcatctgcgttctgaacaaatgaagatccacaaaggaaggctttctgttttcttcgcttctattccgccagcacctggcacagtgcccagctgcccgtgagctctctcacagtgtttgttgaaggaatgaagggcatcagtacctattgttgattgttcaacttccccagtgaagtgttttgtattctaaacatctaaagaagaaact

SEQ ID NO: 130976 - DNA, 537 bp, Homo sapiens
ggacagtgggtgatatttccagatctgcattctaattgggtgtgctctagtctttaggaggacctgggacttgaatgatgccaattgctagtccccatttaatgcatgaggctttcctatggctcagcatttactgactacatatgtgtgtgcttgttgtcatctgcgttctgaacaaatgaagatccacaaaggaaggctttctgttttcttcgcttctattccgccagcacctggcacagtgcccagctgcccgtgagctctctcacagtgtttgttgaaggaatgaagggcatcagtacctaytgttgattgttcaacttccccagtgaagtgttttgtattctaaacatctaaagaagaaactaattttggagctacactttaaactgatgcttttgaagtttcttattgacagagccctaggttccaagctcatttttggcagaaaggacacaaagagaaaagcatgaagacaaaaagccccactcctgatttgactgacattccctgctaaaaatgctaaccagccagctg

SEQ ID NO: 130977 - DNA, 462 bp, Homo sapiens
tcaatctgaattcacttcctacagtttctcttcactgtggattcctgtcctgtcctgggaaaccctgccagcatgttttcaagaatatacttggtctctgccccttaagactttactctaggactctttcatttacctgtcyttgggaaaggaaatctctctccccccacttttttttttttttttttttttttggctgctgttctcaaattggcctgcttttgcttcccaatgatatttatcggtcattcaaggattctttttttccatggtctatctgggatcctgctacttctctgttttccttcactgaaatcctgctaacatgcagggctttgatggtttatccctacccacttgcattttggggtttcgggggatatctttgcttttagtttcaatgaaaatgttggtcctgggtgtgactttggtaccagtccctctttcattttatatataggg

SEQ ID NO: 130978 - DNA, 487 bp, Homo sapiens
ttatttgatgtggagaaaaatccccacacatatggccacagaagtattctgcagcgaatgttgaacatataggaggggaagctgtttgttttttctctctatacaccaaggcatggtctactcatggcagtaacagaagcaaaatagaacagaagaaaccaaacaaggccactgcgatcaaygccccaataacatattgtcacttctgcctttttttattggccaaagcaagccacagaaacagtctatagtgttccccacctgagtctcagtgctcatgtgggagactgttcctgttctgtcttcagtcctggatgaccagaccattttctaccttctattcttttattccttttcatttcagttcagttcaattctgatcaacgtaattgcattgagcccctactatgcaccccagcccactctgcagggagcactgggaatacaacacacaaaaacaaactcagaagcttccctctaatatgcc

SEQ ID NO: 130979 - DNA, 511 bp, Homo sapiens
agaataacaaattattattttattataaattattcataatttgaaatgtttacaaacagaaactagctggcttcatgaatgaaggcgtactgattttttaatttttgaaaattaacatccattgattttgatacaattcctccaagatattgtctagtattaggcatctgcttaagctattgcttttctcaccttgttagatataactcattcacacaactagatcaggcttatcactaccccataaaaaggataattacaatcaggaacatcaaaaatgtggcagaaacaaacgagagaactgaagagttgaaacttgatatttcatctcttgtttgctaatggtgcaaatgctttttccctcttcatattaatagtaatgagatctttgaatataatgtatatttcttggtaactgccttttttccccagttgmtaagtaatatttcacctttcatcagaagagaaagatagatggtacttaacctgctttgcaagtcagagtaccaga

SEQ ID NO: 130980 - DNA, 500 bp, Homo sapiens
taatgttccctgaaaggagagaaatgatctgggtcaggattggaaacgaaaatttaaatattttcttttgctggctgccmatccacacattctcaggctgaatattaagagtagaaggatagaatcaggcagacttaattaactgccttttggcagtgacattattacataacatttcaaactggttggtggcatatccaggaagtagaaatgatgagtgttgacttttcttgctcagcattcaatctagggaccttaatggaaatggggttattgtggatatttccaaggtcggcttttaaacatcaggtacaatactcttgaaagggattgagagataaaggggtcaagggacaatgcaagcaaggaatcccttaggaccctaataaatatttcatttcagtggttctttctaaatgcagtatataattaaacattggtgatgttttcaactgggtgtgctcagtgtttaagtccagcccatacaagttgttaactaa

SEQ ID NO: 130981 - DNA, 608 bp, Homo sapiens
ttttctctcctactgcaagaagtcttttaacatgccacctgtaatctcacatcgtgtatctacttacccctaacccaaagccttgtcttccatattacttttttttttctattcattctcgattcctttctctargtgattgtacaagaagatgtaaagaaattaagactttattccagccaagtaaataaagtagcttaaaatggttaggcagaagccaggaagtcaatggatataccacagaaaattaagacattaagaatttaggtaaatggacaatagtaattttaactttagtcaccatggtttaaggttgtgtgtttctaggtaaataattaggggccaactataattacgcattgtgggctccaaaacacaaactaaggtagaaatgatccaaagattagagatagaagaaaaaaagggccaagtcagtaattttgtcttttaccatggagaaaatataaaaatctagatttaagaaagtaataacaagaagtagttatcctcatatgaaagaattaagttttcttttcagtgggacttgtctaatgctttaactatttttgcataaacaactggcaaaaatataaggctgacaaaaagaa

SEQ ID NO: 130982 - DNA, 608 bp, Homo sapiens
ttttctctcctactgcaagaagtcttttaacatgccacctgtaatctcacatcgtgtatctacttacccctaacccaaagccttgtcttccatattacttttttttttctattcattctcgattcctttctctaggtgattgtacaagaagatgtaaagaaattaagactttattccagccaagtaaataaagtagcttaaaatggttaggcagaagccaggaagtcaatggatataccacagaaaattaagacattaagaatttaggtaaatggacaatagtaattttaactttagtcaccatggtttaaggttgtgtgtttctaggtaaataattaggggccaactataattacgcattgtgggctccaaaacacaaactaaggtagaaatgatccaaagattagagatagaagaaaaaaagggccaagtcagtaattttgtcttttaccatggagaaaatataaaaatctagatttaagaaagtaatawcaagaagtagttatcctcatatgaaagaattaagttttcttttcagtgggacttgtctaatgctttaactatttttgcataaacaactggcaaaaatataaggctgacaaaaagaa

SEQ ID NO: 130983 - DNA, 582 bp, Homo sapiens
tctgtgggggaaaatacagaaaacatatattcataccatataaattataaagaatatgcaaggagcatcattatattattgtaaactagggttttttgcctgctactttgtgccaggctgtttaaatctttcaagattcacaactactctctgacataagtcgtaatatttccaccatacgttacaattgagaaacctaaagaaatgaaatgttaagtwacttgtagttgcagagctacctctatacccagtcagtctggctgcagaacctacacttaactactagaatatgtaaccagctgtgattaagactgttttaaactaaacaattacaatttatataacttgctgctaaaacattgaaattatagataaaatagttggttttctagtgaaatgtgaattgccaaagttggcataagcagaaatttaaacaatacaatcaaggaaaacacagtcaaaaaactaactccactgacggtggcagacccaggtaactttgtgagaatcctatcagtatatgaaggcaaatataatttccctacaatttaagttgatacagaatacagaaaataggaatat

SEQ ID NO: 130984 - DNA, 266 bp, Homo sapiens
tttcttgaaccctttactttcagcctatgtatgtcattacatgtgagatgggtctcttgaagacagaggaaaaatgggtcttgtttttgtatacaacttgccattgtragtcttttaagtgggttgtttagatcgtttaccttcaaggttaatattgacatgtaagcttttaatcttattgtgaagtcattagctggtttctttgtagtttctattctatggttgctttataggtcctgtgggctatgtattgaagtgtggttttg

SEQ ID NO: 130985 - DNA, 588 bp, Homo sapiens
tttcagcctatgtatgtcattacatgtgagatgggtctcttgaagacagaggaaaaatgggtcttgtttttgtatacaacttgccattgtaagtcttttaagtgggttgtttagatcgtttaccttcaaggttaatattgacatgtaagcttttaatcttattgtgaagtcattagctggttkctttgtagtttctattctatggttgctttataggtcctgtgggctatgtattgaagtgtggttttgtggtataaggtaccactcttttttttctcttttgagatagggtcccgttctgacacccaggatggagtgcagtggcatgatcataggttattgcagccttgacttttcaggcacaatggatcttcccacattagcctcccaggtagcccaggtagctgggattacaggtgcacaccaccatgcgcagctaatttttttttttttttttttttttttttagagatagggttttgccatgctgcccgagctggtctcaaacctctggtctcaatctatccactcacgttggcctcccaaagtgctgggattataggcatgagccacagcacccagctggta

SEQ ID NO: 130986 - DNA, 628 bp, Homo sapiens
ttcagcctatgtatgtcattacatgtgagatgggtctcttgaagacagaggaaaaatgggtcttgtttttgtatacaacttgccattgtaagtcttttaagtgggttgtttagatcgtttaccttcaaggttaatattgacatgtaagcttttaatcttattgtgaagtcattagctggtttctttgtagtttctattctatggttgctttataggtcctgtgggctatgtattgaagtgtggttttgtggtataaggtaccactcttttttttctmttttgagatagggtcccgttctgacacccaggatggagtgcagtggcatgatcataggttattgcagccttgacttttcaggcacaatggatcttcccacattagcctcccaggtagcccaggtagctgggattacaggtgcacaccaccatgcgcagctaatttttttttttttttttttttttttttagagatagggttttgccatgctgcccgagctggtctcaaacctctggtctcaatctatccactcacgttggcctcccaaagtgctgggattataggcatgagccacagcacccagctggtattgctttttcctttctgtgtttaggaatcccttaaagatct

SEQ ID NO: 130987 - DNA, 599 bp, Homo sapiens
ctaaactcagaaaaatgagactcgctgggcaaaacctagttatactaggaaagagaacagatctctttttctcttgggtcagattttaaagactccacctgtgcaggtctgcagtcactcctggacagaatggcaatgtgcagctggaccagttccgggaaaaaaggaaggagattccaagggaaggggagggcaatgtttatgaactacagagtttaagctatactcctctatgccagattgttagtaatatggtacccactctatttatgtattccacttttgtctttaaaaaatttagagccagtgtggcaaataaaatttagggaaggtcaggttcatctatgcatgagtcagagctttcacgggaaagggacctgakgtagccagagggatgctagcagaaggcattggtagggagagatcaggtggtgtgatttgagcttttttcctcctcaaggcatgatctcaacttgtaaacagtccaaaggtttttattatccagatgattctcattttagtgcttaccttgtatatttctggttttctcgcattaaggaaaatggcattttcttacatcattctctgtaatgattctc

SEQ ID NO: 130988 - DNA, 551 bp, Homo sapiens
ctaggtatgcagtttctaagtgaataaattgaaaaaaaaaaccttgcttcttttcatgctctaatttttactatactgaaggtttatgatgtggttgtaaaaatctattttatggcttgaaaagaaatactatgtcttgctgattttttttaactttagtagacaggtttatgttgtgtatagttcgtcccataactttttgttcatatagtttttctaactttagttttaatcttaaaaggtttacacaatacgtctttgctatagcacttaaaaaaatcatataaagaaatacatgttaacttccaaggaagaatgccttgagggtaggagatcagaatatagaattccagcagcctgtccatgmtcccatagcaatgcttaataatttcccaggcagttcctatcagtagctgtgtggctcctgcaaagcaagactccaggctaaatcactctctcctcatggggcatcaactaataccttccttacttaacagggaaaggcttcctgatgccaggcactacaatctcatagggttacacccttgata

SEQ ID NO: 130989 - DNA, 558 bp, Homo sapiens
attatgttccaaggatatgaatacccaagaatttagcttttcaacttttatgcaaatataccactaatctgttgtacatgtgcatacaacaatgttcatagcagcactgttagcactagcaaaaactgaaaaccacccacgtgtccatcaacaatgaaatgataaattcatgacagtgtattcagatartggaatactatgcaacaatgaaaattaataaactaaagctatatctaacaatataggtgaatcacataaacatactgttgaatgaaaggagtaagacacaaaggagcacatactgtgcaattctattcacctaaagctcaaaaacaggcaaaactaatatagatgctaaaactacaggaaaagtcaatgaataatcatcaccaaagtcagactggtattgcatagatttgtcttgtgaaaaaaaaaagttaaaatggtgtgtagggttgtgatcatggtgggccataaaaaaagtgtaggttttaaaatgttgccaatgttctagctcctcaccttcataatgattacataggtgttcccttcattatt

SEQ ID NO: 130990 - DNA, 622 bp, Homo sapiens
ctaaattaaaggttttcttacataataaataatttctttgactctttgaaaatggttccattatctcctratctaggaaacccacagagaaagacttagtgtctgccattaccttggtaatcagataattattctgactattctatcagaaaaaaaaaaaactgtacatactgaaaagaagactctttcctgctaaaatctgggtaaacaaaatagctgctagactgggaaacaaaaagaggggtcacagatctgagttgactcttcctttttcatgagtcataggacagcagatatactagttgtcttttgctttcagaagagttttacattacctaaactcatggctgaatcacaaagtacatggccagaagacttagtgacttagtaacagagttctcttagacattttaccctccttaaactaattttggtcttgacacagttaactattaaaaaaaaaaaaaaaaaaaagccctgaagcctgcctattcacctctgatcactgagaatgaattgaattatcaccgtacaaataaatttgggaagcaagataatgggagggaaaagagatgattaatatttgaactgtaaaggatatatgtctgaaatttaattatta

SEQ ID NO: 130991 - DNA, 622 bp, Homo sapiens
ctaaattaaaggttttcttacataataaataatttctttgactctttgaaaatggttccattatctcctgatctaggaaacccacagagaaagacttagtgtctgccattaccttggtaatcagataattattctgactattctatcagaaaaaaaaaaaactgtacatactgaaaagaagactctttcctgctaaaatctgggtaaacaaaatagctgctagactgggaaacaaaaagaggggtcacagatctgagttgactcttcctttttcatgagtcataggacagcagatatactagttgtcttttgctttcagaagagttttacattacctaaactcatggctgaatcacaaagtacatggccagaagacttagtgacttagtaacagagttctcttagacattttaccctccttaaactaattttggtcttgacacagttaactattaaaaaaaaaaaaaaaaaaaagccctgaagcctgcctattcacctctgakcactgagaatgaattgaattatcaccgtacaaataaatttgggaagcaagataatgggagggaaaagagatgattaatatttgaactgtaaaggatatatgtctgaaatttaattatta

SEQ ID NO: 130992 - DNA, 622 bp, Homo sapiens
ctaaattaaaggttttcttacataataaataatttctttgactctttgaaaatggttccattatctcctgatctaggaaacccacagagaaagacttagtgtctgccattaccttggtaatcagataattattctgactattctatcagaaaaaaaaaaaactgtacatactgaaaagaagactctttcctgctaaaatctgggtaaacaaaatagctgctagactgggaaacaaaaagaggggtcacagatctgagttgactcttcctttttcatgagtcataggacagcagatatactagttgtcttttgctttcagaagagttttacattacctaaactcatggctgaatcacaaagtacatggccagaagacttagtgacttagtaacagagttctcttagacattttaccctccttaaactaattttggtcttgacacagttaactattaaaaaaaaaaaaaaaaaaaagccctgaagcctgcctattcacctctgatcactgagaatgaattgaattatcaccgtacaaataaatttgggaagcaagataatgggagggaaaagagatgattaatatttgaactgtaaagsatatatgtctgaaatttaattatta

SEQ ID NO: 130993 - DNA, 627 bp, Homo sapiens
agattaatggaagagaagaacccagaaacagacctagataaatataatcaactgatctttgatatagagcaaaggttacataataaagcaaagatagtcttttcaacaaayggtgctagaacaactagacatccatatgaaaaataatttagagacagacaattgacaaacattaactcaaaatggatcaaacccttaagtgtaaaatgaaaaaccataaaactcttagaagacgacacaggagaaaaacctagatgaccttgggtatggcactgactttttagatacaaaaccaaaggatgatccatgagagaaataattaatgagctctacatcattaaaataaagaaaaaacttttggaccgggtgcagtggctcatgcctgtaatcccagcactttgggaggccaaggtgggtgaatcatgaggtcaggaaattgagaccatcctggacaacatggtgaaactccgtctctactaaaatacaaacaaaaaaaaaacaccccaaaaacaaacaaacaaacaaaaaaccaattagccaggcatggtggtgtatgcctatagtcccagctagtcgggaggctgaggcagggaaattgcttgaacttgggaggcggaggttgcagtg

SEQ ID NO: 130994 - DNA, 627 bp, Homo sapiens
agattaatggaagagaagaacccagaaacagacctagataaatataatcaactgatctttgatatagagcaaaggttacataataaagcaaagatagtcttttcaacaaacggtgctagaacaactagacatccatatgaaaaataatttagagacagacaattgacaaacattaactcaaaatggatcaaacccttaagtgtaaaatgaaaaaccataaaactcttagaagacgacacaggagaaaaacctagatgaccttgggtatggcactgactttttagatacaaaaccaaaggatgatccatgagagaaataattaatgagctctacatcattaaaataaagaaaaaacttttggaccgggtgcagtggctcatgcctgtaatcccagcactttgggaggccaaggtgggtgaatcrtgaggtcaggaaattgagaccatcctggacaacatggtgaaactccgtctctactaaaatacaaacaaaaaaaaaacaccccaaaaacaaacaaacaaacaaaaaaccaattagccaggcatggtggtgtatgcctatagtcccagctagtcgggaggctgaggcagggaaattgcttgaacttgggaggcggaggttgcagtg

SEQ ID NO: 130995 - DNA, 627 bp, Homo sapiens
agattaatggaagagaagaacccagaaacagacctagataaatataatcaactgatctttgatatagagcaaaggttacataataaagcaaagatagtcttttcaacaaacggtgctagaacaactagacatccatatgaaaaataatttagagacagacaattgacaaacattaactcaaaatggatcaaacccttaagtgtaaaatgaaaaaccataaaactcttagaagacgacacaggagaaaaacctagatgaccttgggtatggcactgactttttagatacaaaaccaaaggatgatccatgagagaaataattaatgagctctacatcattaaaataaagaaaaaacttttggaccgggtgcagtggctcatgcctgtaatcccagcactttgggaggccaaggtgggtgaatcatgaggtcaggaaattgagaccatcctggacaacatggtgaaactccgtctctactaaaatacaaacaaaaaaaaaacaccccaaaaacaaacaaacaaacaaaaaaccaattagccaggcatggtggtgtatrcctatagtcccagctagtcgggaggctgaggcagggaaattgcttgaacttgggaggcggaggttgcagtg

SEQ ID NO: 130996 - DNA, 551 bp, Homo sapiens
tccaaccatatgacattctagaagaagcaaaactacagagacagtacaaagttcactggttgctaggggttttatggataggatgaataggcagaacatagaggatttttaggtctgtgaaaatactctgtatgacactataataatagatccatgccatgatatatttgtccaaatccacagaatgtacgacattcatgtaacctctggcctttggttgattatgatgtgtcaatgcaggctcaccaattgtaacaaatgcactactctagtggagggtgttgataatgagggaagctatccatgtatgggggcagggagcataaagaaaacctctaccttcctcttaattttgctgtgagcctaaaactgccctaaaaattgtcttttgagaaattaaaagacatttagaaatcatggaaaaaatagaaaaasgtaaggcaattgctcatcatagcagataaaaaatccaaaggttctgaattctgtcccaaaataccctcaatagggtgtccacctttacctcattaacttatttgaatggtacattt

SEQ ID NO: 130997 - DNA, 551 bp, Homo sapiens
tccaaccatatgacattctagaagaagcaaaactacagagacagtacaaagttcactggttgctaggggttttatggataggatgaataggcagaacatagaggatttttaggtctgtgaaaatactctgtatgacactataataatagatccatgccatgatatatttgtccaaatccacagaatgtacgacattcatgtaacctctggcctttggttgattatgatgtgtcaatgcaggctcaccaattgtaacaaatgcactactctagtggagggtgttgataatgagggaagctatccatgtatgggggcagggagcataaagaaaacctctaccttcctcttaattttgctgtgagcctaaaactgccctaaaaattgtcttttgagaaattaaaagacatttagaaatcatggaaaaaatagaaaaacgtaaggcaattgctcatcatagcagataaaaaatccaaaggttctgaattctgtcccaaaataccctcaatagggtgtccacctttacctcrttaacttatttgaatggtacattt

SEQ ID NO: 130998 - DNA, 525 bp, Homo sapiens
ccatcatgtggtaaatggataatcatactgtgataaatccataaattagaatattacttagcaataaaaggaaacaaagggaaaaaatggaataaactaccaatatatgtaacaacatagattaatcacaaatgcattaagstaagtaaaaatagccagacctgaaaagctacatactatatcatttcatttatattacactagggaaaaggcaaaactgtggagccaacacagatcagtggttgctagggactgagagtgagagacggagtggctatcaggataaagagaaaattcaagattatagatcttgtgatggttatatgaatgtatgtattttcaacacaggcagctctgaatactaaaataattaaattctaatgaacataaattataccttaatttaaaatgaaaaaagcttaaaaataatatattcatttgttgcataattttccatgtgcttaatgttttttcttaacaccctgatatattcgtcaaacagcaagcctgggcaacatagcaaga

SEQ ID NO: 130999 - DNA, 512 bp, Homo sapiens
tctcaccctttcaagataactgagtcgctttcttttcaaaacttaatttcctggctaagtgcagtggttcacacctgtaatccaacaatttgggaggctgaggcaggatgattgcttgatgccaggagtttgaaaccagcctgggaaacatagcaagaccccatttacaaaaaaatacaaaaactagctaggtgtggtgctgcacacccgtagtcccagctactctggtgactgacctgggaggatcacttgagcctaggaggtcaaggctgcagtgaactatgattgtgccattatactccagcctgggcaacagagtgagaccctgtytcaaagaaatgaaaaaaaaaaaaaacaaaaaaaaaacctttaattttctgcatttaactcactgtcatttagatatgccgtaagtatttcatggttttttcctcctcccaacacccctctccctgccacggtgtgggaagctcaggttctactctttaccattctctgtgtgaaattcaact

SEQ ID NO: 131000 - DNA, 512 bp, Homo sapiens
tctcaccctttcaagataactgagtcgctttcttttcaaaacttaatttcctggctaagtgcagtggttcacacctgtaatccaacaatttgggaggctgaggcaggatgattgcttgatgccaggagtttgaaaccagcctgggaaacatagcaagaccccatttacaaaaaaatacaaaaactagctaggtgtggtgctgcacacccgtagtcccagctactctggtgactgacctgggaggatcacttgagcctaggaggtcaaggctgcagtgaactatgattgtgccattatactccagcctgggcaacagagtgagaccctgtctcaaagaaatgaaaaaaaaaaaaaamaaaaaaaaaacctttaattttctgcatttaactcactgtcatttagatatgccgtaagtatttcatggttttttcctcctcccaacacccctctccctgccacggtgtgggaagctcaggttctactctttaccattctctgtgtgaaattcaact

SEQ ID NO: 131001 - DNA, 579 bp, Homo sapiens
tatatggatgcattaaggaagggaacaatatgactgtatttgcattttcaaaaggatagtctgacagttgggtggagatcacaatggaggtggttaagactatgagaaagcaggaggtgatgagattctgaataaaggcaatacgtaagagcagaatatagatcacctcaatgtatcctgaaaaaaagtgggcagcatagccttgggtaagttagcttttctatgcctcaatttcctcctttttgaggaggaataataataycaagttgtactttttgagtttccatctcttcctcagacatatatatatatgtctgaggaacacacatatatatatgttctgcaggatatgattacacttctgatttaattagcaaaatatttattagaagccagaggaccacagaggccaggtccttctagaggttaggagcaggtaaagtatatcttggtgttgcttttgatcttttctctggcttccagtttcctaagaaagctaatgctgccagtggcactatccatacagggtgcagtccttctgggtctgaagaaatgcctgaagattaatataccaaagtt

SEQ ID NO: 131002 - DNA, 495 bp, Homo sapiens
tgaattccagtaagcactttcagaaggggtaagatgtatacgtgatcatctacttaggtcataatactgcacaaatagtgctaatgtgaaatatctgctgggatttttagtacaggttgtttttatagtttaaggatcaagttgcttagagagtgttcacttctctaagacatacggaaaatatctatgaaactttactatstgaatgtgtactacctgggcacactatatatagctagtatagcaggatggaaacttcttttggttggaaaatgcgtagacacaaatgacaaaatcaagtgtaagcaaagacagtaagcatattggaaattatcttggacaaagagaattttgcatttcttttgaatatctcctatggaatatatcacatagttactaaatgcttcccgttgagaaatagtgaagaagtatttttctaagaaataaattattagagactcaaatattaacccttattagccatacttacaagag

SEQ ID NO: 131003 - DNA, 495 bp, Homo sapiens
tgaattccagtaagcactttcagaaggggtaagatgtatacgtgatcatctacttaggtcataatactgcacaaatagtgctaatgtgaaatatctgctgggatttttagtacaggttgtttttatagtttaaggatcaagttgcttagagagtgttcacttctctaagacatacggaaaatatctatgaaactttactatctgaatgtgtactacctgggcacactatatatagctagtatagcaggatggaaacttcttttggttggaaaatgcgtagacacaaatgacaaaatcaagtgtaagcaaagacagtaagcatattggaaattatcttggacaaagagaattttgcatttcttttgaatatctcctatggaatatatcayatagttactaaatgcttcccgttgagaaatagtgaagaagtatttttctaagaaataaattattagagactcaaatattaacccttattagccatacttacaagag

SEQ ID NO: 131004 - DNA, 537 bp, Homo sapiens
gatgatcccttgtcatgaatggaacttaggtagctattgtcacaatctctgcagtcactaagcatagaaagtcctcactaaatgcactaagcatagaacgttctcactaaatgcacaagattcaaataagatggtattttccaattccttcactcagtcacttatatgagggctaaagccatggtaacatagaggctcaagtaacttaaaaaataacatatttgaaatttacttgctggaaagggacaccccaccttgattttaatgaatttcagagcaaatacaagctgtcctcrgtggctttcatatgaattccctgcacagtcttcttcctttagaaatgcaaaaactatttcaagatttttatgcctgcatggagaaaattgctattgtgtacaattagcatatttactaaggtttgtcattacttttggtaattaaaatcgtacaaaaagagagacatatccaattcaagaaaattacacagtacagtaatatacaatcataatagtcgcctgacaattattaaaatacacc

SEQ ID NO: 131005 - DNA, 568 bp, Homo sapiens
gacactcagagatggggtatttttaacacttcttgactctttttctagtgggagtcaaactgtcacttacctgtgttgttttttgcagaagaaataataccttaccctcctcccacctcagtagtagaaaacccctgatttatatcattgcaagttttcaaccccacaataagggcaaactcttttatttctccttccataggaacaatgtacctttgtctgtggtcacyggatggagactttccaaacctttaccacagtaacacgactctgcattagtgcaaaatcctgggccccaaaacaatccttgttcctctcctgatggaggagtatttttcttgcatccctctcccagaagcagtgatcctttgcctggtgtcaggtggggtagggtagggtatgagaggtttcttaaccttctctggaagctgatgtgttttgcttcttcttatctcccagaaacagtagacttttgcatgggttcatggacccagatgcttttttgccacagcaaattaagggttttgattcttaggagagaagcaaatgttcacgtagtcaatttttt

SEQ ID NO: 131006 - DNA, 533 bp, Homo sapiens
gcgtacagcattgaacaagacagacatggttcctgctcacaaggaatctagaatctagaatcaattacatgaacttctttgatcatgattatagatattgctactaagtattttaagaatgcatagtggaagaattcattaagtagaataatttggtggagcagtaggggacacagggaatgcttccttgagaaatgtataagctgatatttaaaaaagaaaaaatttagccagccttagatgtgtgtgtgtgtgtgtgtgtgtgtgtgtgtgtgtgtgtgtctgttgaggtgggcagagatgttgagtacacagggatgcaagaaattcgcaatgcaaaggagaatgtcgggttcaaagtggattggcttagctaaaggaattgaaaaaattacaaagtgactaatttaaagagtcagagaaaagtagttcaagatgaaactggagtaagctggagccaattatatatgtgtattyggcttttacattttaatgatataggaaataaagtaatatataagacaaatgtttta

SEQ ID NO: 131007 - DNA, 588 bp, Homo sapiens
gtgaccaaatattgttacatggtatttttgtccatttgggcaatgataataaartattattaactgagtggcttaaaaacaataaaagtttatttctttcaattcggaagactaggaagtacaagattccatttctagtgagggcttgcttcattcttcacaggtgaccatcttttcattgtatcctcgtatcacagaaggagggaagggagttttctggagcctcttttataagggcactaatcccattaatgagagctctttcctcatgacctaatcagctcccaaaggctttacctcctgacactatcatatttggaattagttttcaatagatcaattttgggagatacaaacattcagtctatacaaataggcaaataaaattatctgggatttaatcaaaatagagggtatacattccaaatataagccatcagattttcctttgaattcttcaccccaggaaacttgtttgaagtattaatgatatttaataccttacaatgacatttaataccttacaattagagattgtaccttgttgcaatggcattactacagggattggggggaaagggagtcttt

SEQ ID NO: 131008 - DNA, 588 bp, Homo sapiens
gtgaccaaatattgttacatggtatttttgtccatttgggcaatgataataaaatattattaactgagtggcttaaaaacaataaaagtttatttctttcaattcggaagactaggaagtacaagattccatttctagtgagggcttgcttcattcttcacaggtgaccatcttttcattgtatcctcgtatcacagaaggagggaagggagttttctggagcctcttttataagggcactaatcccattmatgagagctctttcctcatgacctaatcagctcccaaaggctttacctcctgacactatcatatttggaattagttttcaatagatcaattttgggagatacaaacattcagtctatacaaataggcaaataaaattatctgggatttaatcaaaatagagggtatacattccaaatataagccatcagattttcctttgaattcttcaccccaggaaacttgtttgaagtattaatgatatttaataccttacaatgacatttaataccttacaattagagattgtaccttgttgcaatggcattactacagggattggggggaaagggagtcttt

SEQ ID NO: 131009 - DNA, 609 bp, Homo sapiens
ctcttctcacagctccactaggtagtgccccagtggagactctgtgtgggggctcccactcacattttctttctgcactgccctagcagaagttctccatgagggttctgtccctgcagcacacctctgcctggacattcaggtgttttcatacatcctctgaaatctaggtagaggtttccaaacctcaatacttgacttctktgcacccacgggctcaacactacatgtaagccaccaaggtttggggcttgcaccctctgaagcaacgacctgagctgtacatttgccccttttagccacagctaggatgcaagacacctgagtcctgagactgcacaaacagcaagacccagggctcagcccacaaaaacattttttcctcctaggcctcctggcttgtgataggaagtgctgttgtgaagatgtctgacatgctctggagacattttcctcgttgtcctggcagttaacctttgggtcctcattacctatgcaaatttcttcagctggcttgaatttctcctcaggacaagggtttttcttttctattgcattgtcaggctgaaaattttctgaacttttatgctctgcttccattttaaacat

SEQ ID NO: 131010 - DNA, 547 bp, Homo sapiens
tcatgtcttacttggtgacaggcaagagaccatctgcaggggaactgccatttataaaaccatcaggtcttgtgagacttatttactctcatgagaacagcatgggaaaaacccacccccataattcaattacatcccactgggtccctcctgccacttgtagggattatgggagcgacaatccaagatgagatttgggtggagacacagctaaaccatatcacaatgtatctgcatataattttgcagcagaaaagtcattagttttttattctaataggagaacaaagtcattagttttttattctagtaggagaacaaagaatttagagaataaagtagrtatatattgaattgaataagcaccatctgattttccattcattacccatacaagaataaagtctgtcctgtaattaaaaagttcttcagtttaaaacagtgctcactgaattagtaggcatctgatattctggggtagtaggaagatatgacccccttgtgtggctacctttcttatatattatcacatattttcataacttgt

SEQ ID NO: 131011 - DNA, 547 bp, Homo sapiens
tcatgtcttacttggtgacaggcaagagaccatctgcaggggaactgccatttataaaaccatcaggtcttgtgagacttatttactctcatgagaacagcatgggaaaaacccacccccataattcaattacatcccactgggtccctcctgccacttgtagggattatgggagcgacaatccaagatgagatttgggtggagacacagctaaaccatatcacaatgtatctgcatataattttgcagcagaaaagtcattagttttttattctaataggagaacaaagtcattagttttttattctagtaggagaacaaagaatttagagaataaagtaggyatatattgaattgaataagcaccatctgattttccattcattacccatacaagaataaagtctgtcctgtaattaaaaagttcttcagtttaaaacagtgctcactgaattagtaggcatctgatattctggggtagtaggaagatatgacccccttgtgtggctacctttcttatatattatcacatattttcataacttgt

SEQ ID NO: 131012 - DNA, 430 bp, Homo sapiens
ttcctaccaagaagattccattaattagyaatggttagctaatgaaagatagagatgaggtgggaacaagggagagtattttccataaaggaagctacatgtgcaaagtcccagagagaagaaagaaaagatttggaagaattgaaagaagtctcataaggataaaaagagcagagtgaggcagtgatggccgtgagaggggacagggaggtaggaagggaccagattgtggaagtacttacaaatttcactaagggtctgagattttatcctaagagaaatgggaagggttatactagacaagtgacatgattagatattggcttatatggaaaatgggtgtgattaatcacagagaagatgtagagaggtctgtcaatagactgtagtagtaattgggcaagagggatttgcgacctagattcggatg

SEQ ID NO: 131013 - DNA, 430 bp, Homo sapiens
ttcctaccaagaagattccattaattagtaatggttagctaatgaaagatagagatgaggtgggaacaagggagagtattttccataaaggaagctacatgtgcaaagtcccagagagaagaaagaaaagatttggaagaattgaaagaagtctcataaggataaaaagagcagagtgaggcagtgatggccgtgagaggggacagggaggtaggaagggaccagaytgtggaagtacttacaaatttcactaagggtctgagattttatcctaagagaaatgggaagggttatactagacaagtgacatgattagatattggcttatatggaaaatgggtgtgattaatcacagagaagatgtagagaggtctgtcaatagactgtagtagtaattgggcaagagggatttgcgacctagattcggatg

SEQ ID NO: 131014 - DNA, 487 bp, Homo sapiens
agtagcataaagaaataataaaaaacatattttttaaacataaatttaatttcaagttccctgacagcaggttccttatttgtaggttttctattttgaataagtttgctaaaatatgttattttttgattactcaaaaattcagttttattcttttccccataacttaattaaagtgcatttctgtgacattatttccatattcctatattttcctttgagttttgcctgttaggagaaccagtatcaaatgtacataaaaatgaacgttagactgagtaagatgtgatttctttaccacggcagagttcttctactcaaacccactttagtggttctggaaccattgcatacwttttaaacagctgaaaaaaattcgaagaaaattgaatggctttcaagtctgcctttttcccaagcagacagctgatttatggtcactttttgtaatagcctagggcatcaattgggaaagaacattaaagaa

SEQ ID NO: 131015 - DNA, 621 bp, Homo sapiens
cctcattttttgaagcatcagatgacaaatctcttgggtgtgagtcgagggtgaaaagtagatgcactagggatgttagccatcggctaacatgatgtttcttgtctccccaggacctgctcattccaaatctcatttatatctttgcaaaatgatagactaccaccaggcatgcctcccttcaaatgatggtcaatcagataacatctaggccatgaggggaaactcaggtttcagtttcctttgtatgtaatggtcagataacyagtctttttcaaaatctaggggcatcatagggactgttaatcaaaagcagaaatgttatttgattaaggagtatggcttttctccaaaactctaaaagcttcatgatttttctgcctgacttaaccatacatttcatatagcatctggatcttctacaaaccctgtgaaccttaggagccaaatggcagaccttctttctttagaaactgggccctatttaaagacaccaaccttaggttatctggcaagttgttaagaatagcaccccaaacctgtggcaatattgcctctaaagtctaaagaaacccactaaatgttgggtccctttttagtgatgaggaggaaaattgtggc

SEQ ID NO: 131016 - DNA, 412 bp, Homo sapiens
tagtttcaggaatagttttaaaaaggaaggtataactggtatttgcaatttgagttatcatccatttaaatatattgtattttctttttttttstatttccttttgctttttttaaattacactttaagttttagggtacatgtgcacaatgtgcaggtttgttacatatgtaaacatgtgccatgttggtgtgctgcacccattaactcgtcatttacattaggtatatctcctaatgctatccctcctccctcctgtattgataggacgtatctcaaaataataacagctatctatgacaaacccacagccaatattaatatattttattttcaaataagccacatagcaagaataaattcctttgacatttcctaggctttatcaagatctgtctgttgtgaggaattc

SEQ ID NO: 131017 - DNA, 414 bp, Homo sapiens
gaattctgggagtaatctgttactagtttcaggaatagttttaaaaaggaaggtataactggtatttgcaatttgagttatcatccatttaaatatattgtattttctttttttttctatttccttttgctttttttaaattacactttaagttttagggtacatgtgcacaatgtgcaggtttgttacatatgtaaacatgtgccatgttggtgtgctgcacccattaactcgtcatttacattaggtatatctcctaatgctatccctcctccctcctgtattgataggacgtatctcaaaataataacagctatctatgacaaacccacagccaatattaatatattktattttcaaataagccacatagcaagaataaattcctttgacatttcctaggctttatcaaga

SEQ ID NO: 131018 - DNA, 580 bp, Homo sapiens
aagtctaaacaatgtcagtgataaaatattcctcttgagaggggaccattaacaatgcccctcctccaccttggtacggcactataacccaaaatgatgagactctagtaaacctctggaacagggttttacacatgttaatctgtaacctggtaggcaaaattatgccactttgggcccgtctcttttccttttagggacaactactggtgcctccttcctagtcttatgagaagaatgtcagtagcataaattgaaatgggaattttgcttcctgcatatcgcatccacccctttttcttaaataaatatgcacatgctttttaaaaaaccaaacaactgtaatttcaaaatgtctttatactgcataagaaggaagttaattcttttaacatcttgttatatataccwtctttattctctgcaaatattgattaatctaggaaaattcaggactgatacggtttggctgtgtccccacccaaatctcatcttgaattgtagttcccataatccccatgtgccacgggagggacccagtgggaggtaactgaatcagggaggtggtttcccccatgct

SEQ ID NO: 131019 - DNA, 587 bp, Homo sapiens
ccacatcaattatggagactaccacgaccctggctactagcacagccagaagaggaaagcccccgacaaaagaacccattagccaggtgagcctgtggattttattccttcattttcatcctatattatttatgatagtgggcttttctgcatatgygtcttttctaaattggaacatttttctgatcttaggcactacagcttcctttgaaactagcttaacataatgcattccgtttgaatatgaaatgtgtgtatgttgttcattagaggtttgtggacttttacaaaagattttgttttggtttgttagatgctaaatgatagtcttgattccataaccctcctctggcccaagctgagtagatcgtctgctaattacataggattttcactttttagtttaaatgaacaagttaatgaaatatttgaaaaccttgtctgtttaagctcagcacttcaaaataaaatcaaggcaaatttaatcttaaaagagatattttaatagtacaatacttctatagtattttgaagtttaaagttttgaattgatagccagccatgtggctttcttggtgaatgatggg

SEQ ID NO: 131020 - DNA, 587 bp, Homo sapiens
ccacatcaattatggagactaccacgaccctggctactagcacagccagaagaggaaagcccccgacaaaagaacccattagccaggtgagcctgtggattttattccttcattttcatcctatattatttatgatagtgggcttttctgcatatgcgtcttttctaaattggaacatttttctgatcttaggcactacagcttcctttgaractagcttaacataatgcattccgtttgaatatgaaatgtgtgtatgttgttcattagaggtttgtggacttttacaaaagattttgttttggtttgttagatgctaaatgatagtcttgattccataaccctcctctggcccaagctgagtagatcgtctgctaattacataggattttcactttttagtttaaatgaacaagttaatgaaatatttgaaaaccttgtctgtttaagctcagcacttcaaaataaaatcaaggcaaatttaatcttaaaagagatattttaatagtacaatacttctatagtattttgaagtttaaagttttgaattgatagccagccatgtggctttcttggtgaatgatggg

SEQ ID NO: 131021 - DNA, 602 bp, Homo sapiens
aaaaaaaaccttattcgaaatgctgttagatgctgttcaaatgccattagattcctgttggtatttgcagcctttgtatgtatccagttgttaattttttcagaattgtgtattatccttggtccaaaattaattgttycgttttgttctgttttactgatagtgagtatattcagtaggtgccatttaaagcttttccaaatacacgatccctacttttccagaaaaatgcattctgaagaagcaagaatgataattatatttaaatttgcttttacttcttgcatttgaaacagacctgcatccagtttggaaggaaaataatagaaggcaaattctgtttgtatcagcaccccaaatatgaattaacatgtttcccagaaaatgaagaaaattgactctgatttttactttgaatggaaaagggtgagaggaacagaatagatgaagagaaaatgtcctagaagagggatgggcaaaaaatacaaaaaatgcaaattaaatgtagtgttggatatattgtacctacatgtgcacttattttcatttttctctcttttcttttcgtttcctatttgcatgtggctacaaaataaaatggg

SEQ ID NO: 131022 - DNA, 579 bp, Homo sapiens
tgatttaatcatttcatgtccaataaagtattgatttcattttcattggttatcttttatatgatcatttagccattttaggcattatatcttcaagaagaaggagatttgtaaatactacaaaggggttttcgttttgtgttgttgagatattactattaaagtttctttttttttttttggatacagctgtgtaaaataaccaagatctatttctcattctagcatgtggtctcagcattctgtacaaatgattttactggcttcrtaaactcccaagttaaagaatctctttaggaagaatcttaattgacctcttgaattgttggcctggtacccagagtaaaagaattgtgttttaataaggattacttttgtcgtggtttattatgctttagcaccacacgctaattgatgtagttgcaggaaataaggtaagacatgccatggtttggttaaaagcttcattacatgtatttatgaagagtcttatggatgaaataatttacaacatctattacatatattgaaatgtatgctactgcttccatttcttataatctgcggaacccaggtctg

SEQ ID NO: 131023 - DNA, 442 bp, Homo sapiens
gttaaccatccccagttcatagtagtatcccagagttattgtgatgaacacaactctgatcatatcactttcctgctcaaaattcttcagtgactaccacacattgaaaggatccagtctaagttatttaaagatacttatcaatgccctttgtgcactggcctctactatggtttcaagcctcatcgccacagacagcttctctgtacttaatgtatgttccaacagtactggactcttttgatttmcatataaaatagaaatctttatattttcacacatctgttatatcttctttcaatattctatctcctgtatctgccaggtcaattattcctcattcaaagatttgttattcaataattatctccccattccttctagacagagtgctaccctgctctctgacacagttgtttcttgtgatattagactatgtatc

SEQ ID NO: 131024 - DNA, 542 bp, Homo sapiens
gaattcaaatctgtctccccagccaggcacggtgactcatgcctgtaatcccacaactttgggaggctgaggtgggcagatcacctgaagtcaggagtttgagaccagcctggccaacatggtgaaaccccatctctactaaaaatacaaaaattagccaggcttggtggcatgcgtctgtaatcctagctactcaggaggctgaggcaggagaattgcttgaacctgggaggtgtaggctgcagtgagctgagattgcaccactgcactgcagcctgggcaayagagcaagactccatctcaaaaaaaaaaaaaagaaaaaatgtctccccagtttgaggcctggggtaaatttatgggatcagaaggcaatgaaaagatttaggaatgttggcttggcagaatctgattggagggctttaaatttgaccatttacagaaaggtatgttgaggcggacttttagccccacatcttccaagccattgtacgtctggcttctgagagagttctggcattcggattcccatcaagtctcttagt

SEQ ID NO: 131025 - DNA, 542 bp, Homo sapiens
gaattcaaatctgtctccccagccaggcacggtgactcatgcctgtaatcccacaactttgggaggctgaggtgggcagatcacctgaagtcaggagtttgagaccagcctggccaacatggtgaaaccccatctctactaaaaatacaaaaattagccaggcttggtggcatgcgtctgtaatcctagctactcaggaggctgaggcaggagaattgcttgaacctgggaggtgtaggctgcagtgagctgagattgcaccactgcactgcagcctgggcaacagagcaagactccatctcaaaaaaaaaaaaaagaaaaaatgtctccccagtttgaggcctggggtaaatttatgggatcagaaggcaatgaaaagatttaggaatgttggcttggcagaatctgaytggagggctttaaatttgaccatttacagaaaggtatgttgaggcggacttttagccccacatcttccaagccattgtacgtctggcttctgagagagttctggcattcggattcccatcaagtctcttagt

SEQ ID NO: 131026 - DNA, 643 bp, Homo sapiens
tattcagggcgatggcaggaacagaactgtaacaaggaacaaggagaaccacctcactcacaggcccagttccatttcctaaacagacgaatttgtattccctgtaactcattagcccctagtcttctgaatccttttctaagagagtaagtaaaataaatgaaagcattaagatacattaataatttttattttacaaatatttgagttagtgattctgcagagttttattaataattcaaaaaactgactttaacctgtcacttcaaaataggttaaatagtgcagctgagttacgcctcaaaastttttaacttgttttggaaagaaaattgtgttgtatgtccaacaaacctatatatgattgtttattgtgtattgatgtacataccagagactgtttttgtatatttactgggcgcttaataaattatttgcctaatatttagttatctctcctttttcttctagattacataccggttacggcacctccttcgtgcaaggtgtgatgcatccccagtgaccaacaacaccatccaatttcactgtgatcctagtttctgggctcaaaatatcatcaacttaggtgggccattaccattacatacatttctcagtggcatttgtctgtaaaactcaa

SEQ ID NO: 131027 - DNA, 578 bp, Homo sapiens
acagccccaagacagctcctccctaaccaccactcaagtaaccagctggaaaagtattcagaaaacccgcatcctgacacaccactaccaaacaacttaaacagcaaagaacaacccatttaaacagcaaygccagctgccaggaaaagcagggacaataagtagaggaaaagcagactccttggggtccgccaagacacagtctctcagcatcagcactttcaaatgtagaatccacacacccctggggcctgcggagctccacaaggcatgctgtcctcaaagataaatgagcaggcaaactggacagaaaaccactcagggtattactctttaaaatatctttacagggtcaaagacaaatgggtctacaggctatgtgtattcccaacagattctgagaatgatgtcactatccctttcaagatgtgtttaacatatcttgtgttaaacaagatgtggacacttgtattcctgccactgaacaccactgctttgctaatttgaactgattccagctaacactaccccagctccctggatctggttaccattagccaagattgtcatccatattg

SEQ ID NO: 131028 - DNA, 578 bp, Homo sapiens
acagccccaagacagctcctccctaaccaccactcaagtaaccagctggaaaagtattcagaaaacccgcatcctgacacaccactaccaaacaacttaaacagcaaagaacaacccatttaaacagcaatgccagctgccaggaaaagcagggacaataagtagaggaaaagcagactccttggggtccgccaagacacagtctctcagcatcagcactttcaaatgtagaatccacacacccctggggcctgcggagctccacaaggcatgctgtcctcaaagataaatgagcaggcaaactggacagaaaaccactcagggtattactctttaaaatatctttacagggtcaaagacaaatgggtctacaggctatgtgtattcccaacagattctgagaatgatgtcactatccctttcaagatgtgtttaacatatcttgtgttaaacaagatgtggacacttgtattcctgccactgaacaccactgctttgctaatttgaactgattccagctaacrctaccccagctccctggatctggttaccattagccaagattgtcatccatattg

SEQ ID NO: 131029 - DNA, 385 bp, Homo sapiens
ggaattctcccttatagacctggaaaaacaaagcaggygtgagtttaaggcaacaggtccagtccccatcattgcaggacatgtgccatgcctgaccgtggccgggtttactgctccactgctggtgagtttagaatgagaaagaagcctgtcagttcaagagcagccagtgggcagcactgagggaaatccccattcactgtaattccctcctgctctgtgtttaccgagtgctcacaaatgtgggctggctaggagagggctcagggtaccctaaaaacaaaagcaccctgactgccaaatcccaatcactttagctgagagaggaagcaagccctaggcaatctctctcaagcaaccaacacagaactcacgcagtttagga

SEQ ID NO: 131030 - DNA, 440 bp, Homo sapiens
cccagaatgtctttaatgttttcccaactggggacatcacatctgccctcagtgcctcagtttccccattaaaatctagaggccctgcctgctctgacatgctgagtggcaggcaggcatctggctggagaggaaggcatacttggacttggaccaagcctcagggggcagtgggtcaatttcaggcctcargtcaagggagctgtggaccagggatttctgggggccaggggtgctggaaggcaccaggctgaaccagaggggacctggtggggggcctggggttgcagagggatgggggagctgggtcccccaactcgcaccagaaggaactccagccctgcctgcaaggggctgagacaacccacgctcgaccctgagggctgaacaccattggtagctggtagctctatactgcccaaccaggccacaccccacct

SEQ ID NO: 131031 - DNA, 327 bp, Homo sapiens
ctgcaaaaaaaatttaaaaaatagccaggtatggtggcactcaactgtggtaccagccagtggggagctgaggcaggaagatggcttaaattcagaaggtcgaggcttcagtgagctataagtgcacaagtgctctccagcctgggcgacagagcaggaccstgtcacaatacaaattaagtaatgaaatcataagttagagcctttaggctttgtagcccttgcaaccccggagccgtgcagtgggatttgcattgctgggaatgaagagacccctgcccagtattgctgcctgactaatcagtgttttaaaaaatatatgaatct

SEQ ID NO: 131032 - DNA, 596 bp, Homo sapiens
gaagacagcagcaggtctgggttgtgggaggcgggatccaggacggcacatggaacagaagctgtgtggaggcaaaggatctgaggtcaggagctctggacacaactctccagcagcctcagctcccacgatggcccctcccttaatgaacacccccatggcttcagcacacggtctcctccccatgggagacacttgcccctctttgtacctgtcatttgcccatcttgcaaatttcccttttcctccaggaaacctgccctgactccagggttacagtgatcaccctcagatctaagcttcctctgcgggggcacctgtctcagcagggcatggcctcgggtggtcgtsagctgggtagatctatggttgcactgggcattgctctcatcaaagattcccaggggccctttgcagagagctttggtccccagggtccctggtcaggaagcagttgctcaggggaacagaaggggtggtcttcctaccctatgcccagccgggggtgggggttcaggcagatggcaccaagctcacttcccttgtaaccctgttgtctcaatgttgttcccaaacacactaaatttgtcagcagc

SEQ ID NO: 131033 - DNA, 532 bp, Homo sapiens
ctgaatactgaattgtaaacaacacctgtccatcttttgggaggaaataggaccaccgtgatcttcagggcagaggagattctttctcrgtgttaaatgcaaagttggcccttactatagaatgactgtccgggattagggagtgcctgacaagagctgagccctcatggactgggagtgaggagacttggggtctggtcccagctgctcttaccgcttgtgcctgtcacttcatctctccagacctcagtttgctgatctgaaaaaagaaaatgaggttaatttatccccatttcatacggctgttaggatgaacaaatacattctcgggtgtgaaagcacgaagacactctaaatgcaagttatcattgatgattcttgctggtagttgggtagtggggatgataataatgtccactagaacgcactctctaatgagtttcagtaacttaaagcacaaagccaaggtgaacattcaacctgcagccacagggcacaggtcacagctcagccctggagagatttttttttt

SEQ ID NO: 131034 - DNA, 455 bp, Homo sapiens
tgggggaaactgcccccatgtttcaattatctctcaccaggtccctcccacaacatgtgggagttatgggagctacaattcaagatgagatttgggtggggacacagccaaaccatatcatcactatccctccttcctgtaacaacaccctggcccactccctgctcctgtgccatcctaaatatcctaactggttccagccagggtaatgtagcacatggagccactgygaaatgctgtggtccctcaccccaccccacccccatcaatatttttactactttgggcctttgtggcttccacacaaatccagaaaagcccttttgggacttaggcactcccatcctcactgcacagtttgtgtgaatattgaggtcttgtcatgtgaaaccagccactgctcctgatgcaaattccatcagtttccattgcacaaggaatgagtattcccaagg

SEQ ID NO: 131035 - DNA, 482 bp, Homo sapiens
agcctgtcttctctccaccactggaacacttgagaggaggaatggagaattcggtaacaaggacagctgaattttagtttacattttcccctggccaaaatttaggtaacttcaggtaaatctcatttcatcttttatattttttagatgcctgctgtgttccccattgcctgccttgccttgccgttccctttttttcttttcttttcttctttctttcttyctttttcttttctttctttcttttcgttcttctttctttctccttcccttcctcctccctcccttccttccttcctttttttttcttttcccatattgaacctggcccttattagatgctcaaatgatgctcttgtattagttgtgggtaaattttctttgagaataaggcatttttcaaaacagatatattagagctttcagatcctgtaatagatctattgtcattgcatcaactgtcaactagtagcttggaataa

SEQ ID NO: 131036 - DNA, 579 bp, Homo sapiens
catttttgtatatgaagaactcatttcaaatgtatggaataatgtgattctatttgtatagagaagatagttatgttaaatatgtaattagatatgtaaaatgcctaatataaacataaacacatctctgtatatttatgtatgtatgtgtatacacagagtgatacatttgtaaaggcatagaaaatacctggctgagttctcaaccggctgtttgctgctgagaaatcggagccaggagctcagctggatackttggaagacccccgtgtttcacttcatatccttctctactgcttgtgtttcttcttattaacttgcccttgtcctgtattttttaaaaagattgttaatatgtgctaatattgagcacaaatttattgtattggctgggcaaataatcaatacttccctgttaccttgaaaagaagcaacctaaataacatagtttttcataagttttcaggtgtttgggggaacatgaaatagtgtatttatagctcttctctgtaatattaaggttgaaacctttttatacctgctaagttatataaatggttctattttaatgttttatag

SEQ ID NO: 131037 - DNA, 604 bp, Homo sapiens
tctgcagttgtgagtctttttcccatatcctgggccctacactaagcggctgtaggattagccgttgactaaatggagcgcttctgctcagcacttctctatagcacccaaaaaacaaaaagatgcaaagaaacatggcaaaactgtaaaatcattttccactgtcctcaaactctccttctaccagccactcttagcaatgtgacggcgagacaacatcctcttgactcaaaattcctcccttccactaaagtagaaaacattcttattttagccaaacttagccatgccaatgtatccctcagctattcaaatctttatgcttcttatttcaaatgatggaatgaaaggctctgtcttttggtctcaaaagttatttggcatttcagagccagcagtgttggtaacatgaggaatgctgggaacccawcccacatgcccagtctctgccctcaccttagactcctgcttctttcacgtcttcgaaaggaaaagagggtagaatctggacaagaaatgagggtgtggctggcagtttcctctgcttcaccaaaccctctcatttatgctgttttaacagctctactgaatgacaattgacatg

SEQ ID NO: 131038 - DNA, 433 bp, Homo sapiens
attcaagatatttgttttaaaatgtgttgttctgtgcatgacaatgactacaaccatgagaacaaactacacgatactagagaaatgttaacaattaaggctaatgatagatgatggggaagtaaaaagtgaggaggaaacagataaacatctaatttagtcatgaaacaatattactaattagtactaatmccgtctatacaacttaaataccatttatacttactatacagcagagcatttatgggaattaaaatcaaaatgtgtttgtatgtgtactaaattaacaaaaatatgtattattagagtaataaattatgaatattgtgttacatatataacatttgttgttataaaatagtatgtatttgttaatttagttattcatgctttttattaacaaatttaaaagcactgggatttacaaattatg

SEQ ID NO: 131039 - DNA, 433 bp, Homo sapiens
attcaagatatttgttttaaaatgtgttgttctgtgcatgacaatgactacaaccatgagaacaaactacacgatactagagaaatgttaacaattaaggctaatgatagatgatggggaagtaaaaagtgaggaggaaacagataaacatctaatttagtcatgaaacaatattactaattagtactaatcccgtctatacaacttaaataccatttatacttactatacagcagagcmtttatgggaattaaaatcaaaatgtgtttgtatgtgtactaaattaacaaaaatatgtattattagagtaataaattatgaatattgtgttacatatataacatttgttgttataaaatagtatgtatttgttaatttagttattcatgctttttattaacaaatttaaaagcactgggatttacaaattatg

SEQ ID NO: 131040 - DNA, 455 bp, Homo sapiens
tagtatgcttctaataaaacgtacttctctggtagacagaacagtctgtcagtgcttacatgactgtaaaaaactatctttgaattgaatcaatcaaacatagactcaatattcgtttcttttacatgggcactttttccctcaaaatgtctctaacagataagttctgccatcytgaggctaattttatataccaaaatgttctgatgaactgtaaaaggtagatattcattaaaatcagtatttattttgaagacttacttaagcaaattgttgattttatgaaagtagttgatgagcaagaaatgttctccttccatggttcttcactcacaattatgacttgaccaaaaccaaactctgataattgtatgaatttatagctggaaacaaaatatgtgagaacagtaagaaaaagttcatcaccaagaaaccccaagggcaggttgcatagt

SEQ ID NO: 131041 - DNA, 452 bp, Homo sapiens
atgcttctaataaaacgtacttctctggtagacagaacagtctgtcagtgcttacatgactgtaaaaaactatctttgaattgaatcaatcaaacatagactcaatattcgtttcttttacatgggcactttttccctcaaaatgtctctaacagataagttctgccatcctgaggctaattttatataccaaaatgttctgatgaactgtaaaaggtagatattcattaaaatcagtatttattttgaagacttacttaagcaaattgttgattttatgaaagtagttgatgagcaagaaatgttctccttcyatggttcttcactcacaattatgacttgaccaaaaccaaactctgataattgtatgaatttatagctggaaacaaaatatgtgagaacagtaagaaaaagttcatcaccaagaaaccccaagggcaggttgcatagtt

SEQ ID NO: 131042 - DNA, 475 bp, Homo sapiens
ttgcatagccagctcttttttatatgaggaaaagttagtaagtaaatatttacgtaaagccagagaattaaaatacaacttctagtctgcacactactactgaaacttcttggagaaatctccctaatttatttagcctggctttcttatctctaaagtaatatctacctcattagatttctatgaggacaaacatgggaaaacaatgggagatatgtcaaatcctttagaaggaagtctcttgtattcagatgagttatatgttccttctttagatatatgattgtgggcaatcatctcaccttggtaatgcatcttattttatgaacaagactgcagatatcattatcagagatgtatagttgtggtagagttaacccaggaaatctttaaggarcactggagaacctcagcttcactctttaattatagcatggttaacacacagtactgttatgttaagaagacttcaaac

SEQ ID NO: 131043 - DNA, 403 bp, Homo sapiens
aaaaaatccatctcacactttaaaaatttgttctcaacttcagaaataattttgaaagaacaagtactgacaaagactacttttaattatagtaataagcaaggaactaatggggggtattcagtcaaaaaggaaaaatatgcttccatttggcctcacctccacatttcattcctaacttagcccaaaccatattctaatacaatacaatcaatttattcatggcaaggtggtaattagtatgtagtcctagtaaaatgggtctggtgatattttttgatttgcaccttctttggttgggaatattgcattcaataactgtatggcaaataaaatgactcgacaggsccacgcagcagaagtattttcaatagcaagttgcctttatatgggcatatttcta

SEQ ID NO: 131044 - DNA, 407 bp, Homo sapiens
gaattcctctttcccttaaatttctcaaagacttcctgtgaaggtttaaatagataattcatataaacctagcacaaattaagtacatgataagtgttagccagttagtatcagtattccatttagattcatttgtcctccttgtagcctggttactgtgctcagcttggctctcttccattccagttgaaacaagacccttccattgttcatgtttttcatcccagctcctgtrttacttcatgccttgatttcttcctgactctaactgcactctaactctaaatcatcagggacactcaggaatttattattattattatttttgagacagagtttcactcgtgtcccccaggctggcgtgcagtgatgcaatcttggctcactgcaacctccacctcctgggt

SEQ ID NO: 131045 - DNA, 249 bp, Homo sapiens
aactataataattttgggtgttatttactttttggacccctaagaagctcaatgagcttcttagtaaawtaatataatttctattatatagaaataagtatatagaaatttctattatattgaaataacagatagtaaattaatataatttctgtccaagctgcaactgcttaaaaaaaatcccaaccctatttaaggtttaagaacccctctaattaagattgggtaaaacacagagatgatgaattc

SEQ ID NO: 131046 - DNA, 431 bp, Homo sapiens
atatgcaaaggcagggttaaggtaaaagagagctcgagtgaggtacagaagattcaaagtctgttattgctgggctgaaaatgactagagatgcatgcaaaggaataagcctttatgaagggtattatttgtcatggtagagattactttatcataagctgggagccactgaagacctcggagctgaagagtgaccctgatcagattcatgttctaaaatgactggctatgtgcggtggcatatgcctgtaatcccaggatttggggagactagggcaggaggattgcttgagcccasaagtttgagaccagcctgggcaacatggagagaccccgtttctaccaaacaataacaacaaaaaagtagccaggcatggtggtgcatgcttgtagtcccagctactggggaggctgagacgggaggactgctt

SEQ ID NO: 131047 - DNA, 576 bp, Homo sapiens
tatatttgaacttgaagtagcttttctgtacctgatcactgtagacacaggrcatttcaggaatgcaaaaacatttacttaattttttttttgagacagtaatttttgaaaatgaggatttccttaaatctttatttgaattctttctaccatgaagaattgttcagaatttgtcttgtttggttatatgttgtagttgaaattgggcaattattagaaaatgaatttgtataatccagcagttaacatgaatttagatagagacttcagtgcatttagtttttagccaatgaattctgtttgaagtttttgatctgagaagaagcattataagaacaatatataactgcagctccatttatagcacaggcagcactgatttggacaataaaaataaggaaacataggaaatacaggaaaaaagactgctctagggtgctcacctgactgttacattaataatctggggataagaagtagcaaacttaaaaaatatcaaagttggatggggacgaaattatggggaactgtaggtaaatttaacctctggaaacttagggacaggactgattttat

SEQ ID NO: 131048 - DNA, 179 bp, Homo sapiens
gctacctgcatcaccatctcattattattttttctttaaacagatcttaggtgcatgggattggaataatcagaattcctgatttatgacactctgtcatcactcgtgcatgtatggccctcttattttctaatagttaattataayggcttttaaataatgtaatgaacatctatgaa

SEQ ID NO: 131049 - DNA, 558 bp, Homo sapiens
ggcatggtaactcacgcctgtggtctcaatactttaggagttcaacacaggtggatcacttaaggccaaaagttcaaaccatgcatggctgacaaaggcaaacacccatgtctactaaaaatacaaaaattacgcgagcatggtgatgtatgcctgtaatcccatctactcaggtgcttgaggcaagagaatcgcttgaacccgggaggtagaggttgcaatgagctgaaatcacgccacagcactccagcctgggtgacagaataagtctctgtctcaaaaactaaagaaaaaaaaraaaagaaaagtaaaaagaaaaaaaaacccagcattttgtggaaagctgtacatttcttttccaggttagaacatttcagtaattgtttctttcatgggctactcagccattttttttaagaaatgtgaatattttgcccgtggttcactctgaacatctgtattgaaaacacaatgtaaattgtaattttatttagcatagttactgtttatatgtcagaatatatgccagaagatttgaatttttaaaataacctactt

SEQ ID NO: 131050 - DNA, 576 bp, Homo sapiens
ctttgagagggcacaactacatcagcagacccagaatttaaaaacacacagcttttaaactgctcattggccctgaatgcagttttcttcctttggaaattatrataacagagtgttaaaagtgtagggtccaagacattttatttagtcttcagtcccaataatcaatatttgggggagaacattgatgctgtgatattttaaacatttcattttcctaactatattctaactatattaaacaaagaaaaactgtgctggtagaaataagtattttgttacaattttacaggacataattattgggggcagtagaaggacttaatccattttagtggtattcagttacaaaagatatcaatcactatttgcaaaagaaataattcagttaaataagtctcttccaaaaatgttctcttcctctgaaatattttagaaattgatatggcttgactctgtgtccctacccaaatctcattttgaatgttactcccataactcccatatattgtgggagttaatttgaattaactcccacaataatttgaatcattgggtagttccccctatactgtt

SEQ ID NO: 131051 - DNA, 595 bp, Homo sapiens
aactcatgagagaaaccaggtattaaaaaaattgcttaataccccccaaatttttctctggtcagtgtagcatgatgaacctttagatgtctaattagaattttattaagcattgcttggtgttgaaaaatcatgagttatgagcctgctttttgtgatgtaaatgggctggataagtttagatttcagtcttaattctttgaaggatttatagaaatacttggtttggctataaattgtttctttgtttctggttaaatatgtaagtcaaatgtgaagaggaatcaaggatctttgtaaccagggaattaatttattcaggttctactgggtgagagcttctctcagctagatcttctgttcatgataattcttyttggaaattcactttctaaaatagaaagtcatttttcaaggtacagctgataacgtatctagagaacacagaacagcctgttttctttgagcatttatgattaaaggattgaattcaggtcttttagtgtattatatatactaaggacagagggcactacttagtcatgtacttgaagcaaaaagtaaagtctttataaagatctcagagggaggctga

SEQ ID NO: 131052 - DNA, 460 bp, Homo sapiens
tattcaaagcttagaaaatagaatgtcattgaaagaacaagtctgggttaaaggacctaggatcttaattgaaataaataaataagagaacaagtaataaaaccaggtaatttgcaacaccaacacattttgttacaattcctccccccacaccccgttgtaattgaaagcatatttgtttttactctctcccttttttaaaaattgtaatctatgttagtattgcaaaacyaattataagtcacccaagtgtaaccaaggagagctgagggctcctgaaataggacaaagggaattcattaagaaataatgttaagcttatggtttcagaaggtcattagaaatgcaaaaccagagaacaccattgcctgagccgatatcaaatccaatcatttatcattcccagggttctcaacatggggtcatcatctgggctccttaacccccaagcagaatgaca

SEQ ID NO: 131053 - DNA, 460 bp, Homo sapiens
tattcaaagcttagaaaatagaatgtcattgaaagaacaagtctgggttaaaggacctaggatcttaattgaaataaataaataagagaacaagtaataaaaccaggtaatttgcaacaccaacacattttgttacaattcctccccccacaccccgttgtaattgaaagcatatttgtttttactctctcccttttttaaaaattgtaatctatgttagtattgcaaaactaattataagtcacccaagtgtaaccaaggagagctgagggctcctgaaataggacaaagggaattcattaagaaataatgttaagcttatggtttcagaaggtcattagaaatgcaaaaccagagaacaccattgcctgagccgatatcaaatccaatcatttatcattcccagggttctcaacatggggtcatcatctgggctccttarcccccaagcagaatgaca

SEQ ID NO: 131054 - DNA, 601 bp, Homo sapiens
cctgctaacggactggtctcttttcttaccctgctcctcaaaccttgtacttctgtgaattggctccygcctcagtctccctttctactcctactctgtcagctgcctcaggtgcttcaaacatttgcatggccacctatttaaatttcttaccttctctcctctaatgaccttcatttccatttcctttgactctattaatggccaaatccctaggtagtataattgctcagagatgtctgatctctggaatcttaaaaggttattgtttcactgtaacctctcagtctttcaatttccttagtgccttgatgagacaacttctaccttttaaattcatcacaacttctagttcctaggctctacctaccattaatttcttctctagcccttctagaccccatgatgcatcacttcagcacctccactgcctggacactcaaacctctttctcatctgaccacagtctaaccttttccctacaactcaaccaaaattgccccttctagggccacattcagtagacacgttaaaattcttatctaacttacattctctgcattatttaacattcatgatattgcctatattccaaaatttt

SEQ ID NO: 131055 - DNA, 451 bp, Homo sapiens
ttttttcttaaacaacatatgctgctgttagaaagaaatgatggaagcacttcttctgataatatgatattttaagagttactttttggggaatatacctctaaatataaaaacatgaatgcttggtgtgaaggtaaagttatgcataatcaaatrcagctgggcagccaagtccatcctcacacaggcaattcatttcactagaccttgattggatattattattttacctgttcataataaagtggttctttgaagcaagtattatattccaacagttccttctgttttattggaaaagcaggatctgtgaatcctttcttgataactgtaggctgttcatctcaactgattattcattttactggagtccttcttcaagagggtgtcaaggacttttatttttgtcatagaaacactaatttgcatttgaaagatgggaagttgggaa

SEQ ID NO: 131056 - DNA, 577 bp, Homo sapiens
aaaatatgcacttagcataacaaaaactcagcaaatataagatgaaagcgacctgatttattcgtaattctgctggggaaggatatataattataagacatctaaagatctctatcaattccaagtgtcacatattttcaactgttttgccacaactgctgaaataagatttctttttattttgtattgttttgctgtatcacatctccgttttagagaatctcctttatatcttagtgggagttaagctcacctctaggactcagctgggaggcagagaaaatattyaggcttgaatcattgctcctggagggaatttttgaatattgaaccagatgtacatgacagttttcttcattctttttcgtcctctaggactggctatcagcctgcggctgattttgggaatccccaatatccctctgtattatttatttttattgttatttaagacagttggtcagtttctatcacttgccatcaacaactctgactaccagatgtggctaattctgggtatgggtcctgggctgagagtttaccaggatgtgagacttaagcataccagtttgaacta

SEQ ID NO: 131057 - DNA, 499 bp, Homo sapiens
tccaacttgcctctctctacccaagttataattctatatttctctccttctctttctctttctctctttcaatgaggggctgagctgataaagacttcctttttcctagaaagtaagtaagatgatactgttcatgggcaaagacagaacactctcaatttcttattaaacattgctatatttattataatatgccattgaatcttttgtaatttttggaatatgatcaaattttgygaagataagaataactcttttttattttcctttatgacattttacttctagccaaattaatattgataacaattcctaaaaatatcatctattttgaagtgggcattcttggctcgttaatgtctttactgagaatgtttctaaatgagtttgtgtatttttatgtgactgtgtgtttagcttactgattcccatttttactgtaagttttattagaatgaatgttaaattttataaaagactattttaaattttggtagag

SEQ ID NO: 131058 - DNA, 527 bp, Homo sapiens
gtatacaaattacatggatttgatcattacacattgtgtatttatatcaaaacatgctctgcatcttataaatatgtgcaattattatgtgtcatttaaaattacataataaaaaagtgagytttgcttgcattttctttcttttacgtactttttgggggggctatcttcattatagttcagaatcacagctgtccttgctttgtaaaaagatctggaaaagcctttcttttaaactagtattttaaaaaattaatggtgtggggcagcttaaataacatagcaatagaaattatctggttcttaaaggtttattacatttcccctgtaaatagtcgcagccttgtaactgttcgaaaggcagctttttgactgcattttcaattcttttcttaatattttctgagataaatccaggaatctacatttctctttaaaataaccaattgtatttagacttcatgcattgcaatttagcatttatttatctttaggcagcttgctgtaatcagtacataaaacattta

SEQ ID NO: 131059 - DNA, 449 bp, Homo sapiens
taatcacaaattttgatccaggtgggatctcatttcttagaatcagatcaatatctccaaccattagacatttccaactgaataccataaaagcatttcaaacaaatcccaaactgagctcatcatttctccctatgcttttgtgattcctgactctgtatgtagaattactgtttttctattgttgaagccacacatgtagatatcatcttgactcagtcatcaagtcctgttattctgtctcctaattcaagacaatattactttgcacttgaaatccttcaataattgtgtcccygccgacattgtccctgaaccattctcttcactacaaccagagcatgtttttaaaaaacacatctgattacatcacttgcagatgatgttccaatggcttcccctgtaccatttggagaagatcccctagcttataaaaccctgcacactcc

SEQ ID NO: 131060 - DNA, 459 bp, Homo sapiens
atttaaatgagtgaacctaagtgcaaacatctgtgcacttactgttactttatattgtgtctcagattgaaggagagggaaactaaagtgtgaagaatgttctaggattgtcatgataaggggactggaggctagccataggcacacacacagaaaaggatatctcaaaggaatacacagcttgattatatgttcattcatttctcagaataaaagagttaacaaagctccctttagtaaataaaaatttaaaggaattccctgaaatgtgtctgtcattaagggcaggtaatgaatagcttgaaaaaacacattcatttcttgctacacccmcaggcattaagaactatttaaaatatgtttgccttcgaaacactctccacagacacaattaaaaactgccaatgcaatttctgctagcacctggggcagatgctttgcaggtttccatagaagtaa

SEQ ID NO: 131061 - DNA, 443 bp, Homo sapiens
ataacaaaatcctgtcctttgcagcagcatggatgcagctggaggccattatcctaagtgaattaacacagaaacagaaaaccaaatacagaatgttcttacttctgagtgggaactaaatattgagtacacatggacacaaagatggaagcaatagacattgaggatttcaaagggggacagggagagaaggggccaagggtctaaaaactacctatcaagtactatgttagttacttgggctacttgatcattagaagcctaaactctagcatcacacaatatacctgtgtaacaaacctgcayatatacctcctgaatcacaaaaaaaaaataaaaaataaaaataaaaacctcactaaggctcttactgcgagcagagtactaggatttctagaaggactcctagtaagcagcgaatgtgggctattggtaattaaata

SEQ ID NO: 131062 - DNA, 537 bp, Homo sapiens
ggctcttactgcgagcagagtactaggatttctagaaggactcctagtaagcagygaatgtgggctattggtaattaaataagctctgttaagtagttaattgttcttttaaaaattgtatatttacctttatcatagttttctatatgcatagtttaaaggtgaatagttctacatagcttgttatgaaaaatgttcccctgcctatctgtctcctgcaccgcaccattcttgcttccctttggcagccattttcaattattatagttgtttattttgtttttaatgttcatatttctaaataatattcccatattgctttcttcatttaggatatgtattgatttttattttactttggaaaatgaggattgagcaatcttacccattgtctccctgacatataactttcctcataatttttggtgacattaaatattcaaggattatatttccatgattatataaatataatacactgatggtattatactctataattagattttttcctaataagaaggattgttttctaag

SEQ ID NO: 131063 - DNA, 447 bp, Homo sapiens
gaattcaagatgaagactcaattcttgacctattgtttaaaattatatagctacctgatacaaatttgatggtgaaaactattggtcatgagtgttcatctaatagcttttaaagccaaataattttgcatggtaatctcttcactagtgacaagaaactctgtgttgcagagtcttccttatmtgattttaataacttctcctctagtattctcctaagccaccagacatgttgattgatttgtgagtattcagagtcaaaactgattttaatgttgatcctggtaaaatattatccaaaaaataaaactgacactcctcctcactttcttctcaaactattttaaatattttaaagagaaataaaaatgatatctatttctatttttagaacattatttctatccctgctgccctccatcattgctgatcaccccaaactgcagg

SEQ ID NO: 131064 - DNA, 634 bp, Homo sapiens
tagttctgttttttttctttagtcaacaattcctcaagttagttcatgtccttgttggtttccatctagctgctaaaccatagtggatatttgctatttctgtctgtacaaaatattttcctctttctgcttctagtacacccaccttcttttaggtaacactacatttacaggtgtttttgggcttccctatcacggtacctgatggccatggaggtgagtactaagcttggccaattagaatgtttcattctttttttttttttttttaagacacggtctcactctgtcatgcaagctgtaatgcagcaatgtgataatagctcagtaaagcctcgacctcctgaactcaagggatcctccttyttcagcctcttgagtagacaggactataggcatgatgtgccaccacacccagcacctggctgttttttttttttttttttttttttttgtagagacagggactcattatgttgccctggctggtctcaaactcctggcttcaaatgattctcccaccttggcctctcaaagtgctaggattataggtgtgagtcatgtccaggtcatctctctttttaacccacgtttttcaagctcaaaggacatgattctgagagtgccaagtttc

SEQ ID NO: 131065 - DNA, 634 bp, Homo sapiens
tagttctgttttttttctttagtcaacaattcctcaagttagttcatgtccttgttggtttccatctagctgctaaaccatagtggatatttgctatttctgtctgtacaaaatattttcctctttctgcttctagtacacccaccttcttttaggtaacactacatttacaggtgtttttgggcttccctatcacggtacctgatggccatggaggtgagtactaagcttggccaattagaatgtttcattctttttttttttttttttaagacacggtctcactctgtcatgcaagctgtaatgcagcaatgtgataatagctcagtaaagcctcgacctcctgaactcaagggatcctccttcttcagcctcttgagtagacaggactataggcatgatgtgccaccacacycagcacctggctgttttttttttttttttttttttttttgtagagacagggactcattatgttgccctggctggtctcaaactcctggcttcaaatgattctcccaccttggcctctcaaagtgctaggattataggtgtgagtcatgtccaggtcatctctctttttaacccacgtttttcaagctcaaaggacatgattctgagagtgccaagtttc

SEQ ID NO: 131066 - DNA, 550 bp, Homo sapiens
gaaaagcatccagtaaatgaacttagtttcttgccctgtcactggccatgccgacatacctcactctggcttaactttctttatgctttctacccgttaattcatcctccatattgcttgccaagtgaagaatctaaaatgaaaatttgctcaagtcactgcttgtttaattctccaataatttccctcagtttctggtagtgcaattcagttcaaactccttggtttattatataagactgatgtttctacttccttacctgacctccccactccctgctctctttccttgctccgcaatccaatttttcaaatgtatcaagttttatacctccataccattttatatgttgytatcattgtctggagaacctatctctctttttgatgtagttacttggttcttatctttcaagtatcaaggcatccaggaaatctttcttcaatccaaacaatgatcatattaatttgtagttactgttttacttgtccgttttccctagcaaagtctgaactttaggaaggcatatggaatggcttatttgtcttt

SEQ ID NO: 131067 - DNA, 562 bp, Homo sapiens
cttttgtcttccctaaccgtttgttttgaaaaatcccaagcctgcagatatgttgaaagaatagcacaataaacacccacatacccttcatctagattcaccaattgctaatattttataacatttatatgctatctatctattatctatctatccatgtaataaagcttctctccaatttcccttttattgagccatttgaaagcaaattgcaacatgatgtcactctgcctcttaatatttcagtatttattgcctaagaataaagacattttcctacattaccacaataccattttaacttctaagaatttaaaagtgtcacaatattctataatatctaatataaagtgcatattgagttttcaattgtcccccaaatatttttcaaattataataaattgtccctcaaatgaaagctttttwaaaaaaaaaaaaccaacaagtttcatgtattgcatttgcttgtgatatccatttagttttctttagtctctttactcttctttaatttagaacaacttgtttgtcttgtatgacaggaactcttaaagaaattaa

SEQ ID NO: 131068 - DNA, 607 bp, Homo sapiens
acatacatataggtgtattttacaaaaatgaagtcacatttcacagtgttttgtaatccacttttcatacttaggtattcctaaacaatttttacataattttttgtcattttataagattctttaaaaggtaaacaatccactgcaaaaagaaaatgttatttcttctcccaatctcctaattattgagttagtttgcttttaatcttgttaggaaatgactggtaaacagtctttagctaaaaagggaaaaatttgaaagacattggttgggcatcacatccaagttctctattctgaaaagattttccctgcaaaatgattaaatttgaaataacttagtattagaaaacaacataaggaaataaacaaagtttttaaggcaaaatacgtgaaaaccagaagctacaaccttcactgaatagagggagtagacaatatggatacctatggagtctctcwgtaatgacggttctcgctttgcacagtcacatgggctataaaaatgaccttgtaaacagaaaccttgcaaagtggtgctcgtagctagtgggaaaagttgatcgttccatgacctttaaaaatttctgtcaaacattaaaaactc

SEQ ID NO: 131069 - DNA, 602 bp, Homo sapiens
cctttgctaggcaagtcctgtctgtaaatcttcacatagaaaacccttagcaaagtgcctaacatatggaaagagtcaatagtgttattaattaaaatattgttctttagatgttcttctattcttaaaatgcctgattgttctggattttcttattcacttttgcttgttttcaaggcaaagawtgaataatagtaacctttctataggagaaaagatggcaggtatgtctacatcagtcaggacaaactggttttgctgcagttacaaacagtcccacaaatctcagtggcttaaatcaagaaaggtgacttttttacctaatgctacatgtccagtgtggactggcaagacagttcaacttatagtggagatacactaacattttatggtaataccaactgaacatgaggtttcagggtttgccatgtcagaagaaggtaagaatacagagtagagcattgtcaattaaatggtttattccgcaagtgacacaaattatcgcttagcttttacttaccctaagtctagatctactatctcctacccacattctcattttgatggcagggaatcagtttttaaattggggttttcaaaat

SEQ ID NO: 131070 - DNA, 602 bp, Homo sapiens
cctttgctaggcaagtcctgtctgtaaatcttcacatagaaaacccttagcaaagtgcctaacatatggaaagagtcaatagtgttattaattaaaatattgttctttagatgttcttctattcttaaaatgcctgattgttctggattttcttattcacttttgcttgttttcaaggcaaagaakgaataatagtaacctttctataggagaaaagatggcaggtatgtctacatcagtcaggacaaactggttttgctgcagttacaaacagtcccacaaatctcagtggcttaaatcaagaaaggtgacttttttacctaatgctacatgtccagtgtggactggcaagacagttcaacttatagtggagatacactaacattttatggtaataccaactgaacatgaggtttcagggtttgccatgtcagaagaaggtaagaatacagagtagagcattgtcaattaaatggtttattccgcaagtgacacaaattatcgcttagcttttacttaccctaagtctagatctactatctcctacccacattctcattttgatggcagggaatcagtttttaaattggggttttcaaaat

SEQ ID NO: 131071 - DNA, 312 bp, Homo sapiens
atgtacctatacaaaggctcaaaataggccatctttttaaagaaaaaggcaatgattcacaaaagactatgaatagaacatgcaactagttgatacaaatctaataggatttgttaaaatcagtcacatctaatacacctgaagygttcttgtataaaatagcacatgaagaaaagaagactttatcaatgtctaaaaaagtgggtttgttcatagacaatctgacaagttaccataaaaagtatttcctgagacataaggaaatgcaacattattcttcttgaaccttttagctcaagactttccactcaa

SEQ ID NO: 131072 - DNA, 494 bp, Homo sapiens
aggtgaaactggcatttttcatgataaactctaagatgcactcaaaacccaagttaggacagtgacagtgtaattcccaggtgtcggctgggaaaggttcctgcagctaagaattaagtttwtttttaagcttttttacccaaatatacattctcaggcctaattttcacatccattcttttgcttctgattggctctggcaacaatagactttaataagaaaaaggtttttttttgttaaaactatttaaattaaaccacagtgtggtacagaaatataaaaacctaacttttttgtttgaaaaatactagaaaaatgtctttttatcatttaaacaaccttgtagatcaagtgactacatttcaagttaatcaccaatgaataaaaatgaactgcaactttgaggtttttttccctgttagtttctacctaatattttgcagatttttttccctaaagttattcagctttgactcacatacagttatcagcc

SEQ ID NO: 131073 - DNA, 494 bp, Homo sapiens
aggtgaaactggcatttttcatgataaactctaagatgcactcaaaacccaagttaggacagtgacagtgtaattcccaggtgtcggctgggaaaggttcctgcagctaagaattaagtttatttttaagcttttttacccaaatawacattctcaggcctaattttcacatccattcttttgcttctgattggctctggcaacaatagactttaataagaaaaaggtttttttttgttaaaactatttaaattaaaccacagtgtggtacagaaatataaaaacctaacttttttgtttgaaaaatactagaaaaatgtctttttatcatttaaacaaccttgtagatcaagtgactacatttcaagttaatcaccaatgaataaaaatgaactgcaactttgaggtttttttccctgttagtttctacctaatattttgcagatttttttccctaaagttattcagctttgactcacatacagttatcagcc

SEQ ID NO: 131074 - DNA, 494 bp, Homo sapiens
aggtgaaactggcatttttcatgataaactctaagatgcactcaaaacccaagttaggacagtgacagtgtaattcccaggtgtcggctgggaaaggttcctgcagctaagaattaagtttatttttaagcttttttacccaaatatacattctcaggcctaattttcacatccattcttttgcttctgattggctctgkcaacaatagactttaataagaaaaaggtttttttttgttaaaactatttaaattaaaccacagtgtggtacagaaatataaaaacctaacttttttgtttgaaaaatactagaaaaatgtctttttatcatttaaacaaccttgtagatcaagtgactacatttcaagttaatcaccaatgaataaaaatgaactgcaactttgaggtttttttccctgttagtttctacctaatattttgcagatttttttccctaaagttattcagctttgactcacatacagttatcagcc

SEQ ID NO: 131075 - DNA, 466 bp, Homo sapiens
gtgaaactggcatttttcatgataaactctaagatgcactcaaaacccaagttaggacagtgacagtgtaattcccaggtgtcggctgggaaaggttcctgcagctaagaattaagtttatttttaagcttttttacccaaatatacattctcaggcctaattttcacatccattcttttgcttctgattggctctggcaacaatagactttaayaagaaaaaggtttttttttgttaaaactatttaaattaaaccacagtgtggtacagaaatataaaaacctaacttttttgtttgaaaaatactagaaaaatgtctttttatcatttaaacaaccttgtagatcaagtgactacatttcaagttaatcaccaatgaataaaaatgaactgcaactttgaggtttttttccctgttagtttctacctaatattttgcagatttttttccctaaagttattcag

SEQ ID NO: 131076 - DNA, 512 bp, Homo sapiens
taccttctcttgacaaaatgtgagaccttcatatttgcaaatgtgctgctggtgtatggagcagtactgaaacttgacagttctattttatgcagcctttgtagaaatgttttttaggtgggcatattgcaagataaaatgcaaatacagtcaggctttattgtcggtagaggaatagttgtgcccttggatatagctaattatttctgtgcctttgacaagaggagaatttatagttgaagcagkgtcctttcctgtcctgaacagaacaaatctcactttgctgtggccacacactttgcctagacataaagtaggctacataaacagagaaggtaaaagatatgacaaataattatcttacttatctgcatattgttgactaactgttgagtaattaaaagctgtgttcagtgatcactgtgatccaagtccagataaacttgatattcagcttctgggcggttgtgagaacatgttctagatcactctcacaccagatgttgggtgct

SEQ ID NO: 131077 - DNA, 495 bp, Homo sapiens
tcatgaaacttgtaaacaaatattaatcaatagtgataccatgttacttaagatgtaaattgcattctgaatcaggttctgatattatcagtttctatgaaattacattcatgtttgcatgtwaatagttatatgaatatttaatttgaatacttcaacagccaaaaaaaaatgatgacacaaaaattcgaaagaatcaacttagagaaagccattttattggcacataggagtaaactcagaaacaggtttacaagtttgttcttgtaggagctgatacctttaaaggaaaacacatatacacaattttttttgctaataataaagcaccctggtctttttcggtctagggcaactgtaaacttgccagtgcagaatgtccttgaggtaaaaaagcaaactcaactattggagtgggactccacaggcaactcttcaaatatgaatatgcttcatttttctttaagtgatataaattcatattaattgataata

SEQ ID NO: 131078 - DNA, 626 bp, Homo sapiens
ttttatctagtaccattattcaatttagatatattgcataggatgtgccaacaatcacttttataaccaataattccatgattttgcttgggtaatcccttttaatggtgaacttcaggtcacaacggtaactatcagttcaactacaccaaggtttcygaagacaatggcttctccctccaagcaggttgtatataaattccaaatagaacctggcatcaccctgaaggaattctaacttcacactgttggggaaatttaccaagatggcttcagagtagactaactttacacagcacattaaaaagaaaagacatttattcagcatcacgatcagactattacattagcaatcaacagcataggtgcaaaaaaaaaatctacattaaaaccctttgttggaatgctttacactttccacagaacagaaactaaaataacctgttatacaattagtcacaaatacagtcctcgagttttttgcccatacacatgagtatttgtctaaaacatgtcttctttgtagcagctaggccctgccaccactgtgcttggctgagttcacaaatctgttgtaacctgtagcttccctgtcacttctctggctctccgctcctgctaagctt

SEQ ID NO: 131079 - DNA, 626 bp, Homo sapiens
ttttatctagtaccattattcaatttagatatattgcataggatgtgccaacaatcacttttataaccaataattccatgattttgcttgggtaatcccttttaatggtgaacttcaggtcacaacggtaactatcagttcaactacaccaaggtttctgaagacaatggcttctccctccaagcaggttgtatataaattccaaatagaacctggcatcaccctgaaggaattctaacttcacactgttggggaaatttaccaagatggcttcagagtagactaactttacacagcacattaaaaagaaaagacatttattcagcatcacgatcagactattacattagcaatcaacagcatrggtgcaaaaaaaaaatctacattaaaaccctttgttggaatgctttacactttccacagaacagaaactaaaataacctgttatacaattagtcacaaatacagtcctcgagttttttgcccatacacatgagtatttgtctaaaacatgtcttctttgtagcagctaggccctgccaccactgtgcttggctgagttcacaaatctgttgtaacctgtagcttccctgtcacttctctggctctccgctcctgctaagctt

SEQ ID NO: 131080 - DNA, 554 bp, Homo sapiens
gtagcactttatatcatgccatcttgtaataatgcctcttaggaaacggccttaaggatattatgcaaaaggtactttgaagagggtggagaggaagagattacaacttcccttttgcagtcagctcctgtctctgatgtgtaaccctagtgtctactgcctggtttgcctttttctgtattgtccgtgtaaataccatcctgggtcttctgatttgagaatcattttctcctactgtgttttggagaaaattgagcatgtgttatatctagtcctggtcagtgtcatctccacccccygccttagctcctttggtcaccctttttgagaaccattttgccaccaccttcttccttcattttccaaagccccattaaccccaaagctagtcaacttgctgtgtatggggataatagaaaagtattcacctcagcttagacatgtctcattttcatcatttaggtttccctttaaatgccactttaaagggcttctaggaccaatctttcaaaagtggatcctgcctagttatttgccaacaaaatactcggcaa

SEQ ID NO: 131081 - DNA, 555 bp, Homo sapiens
cccttccaaacctcacgtttgatccccaatattagagatgggcccaatgggaggtcttaggtcatggggttagatccctcatgaatagattaatgcctctccttgggcttaagtgagttctggytctatttgttcctagttgtaaaaagagcctggagcctcctcctccccttgcttcctctatgaccatgcaatctctacacacatcagctctcctttaccttcagccatgagtagaggcagcctgaagccctcatccaatgcatatacccaatcataaactttccaaccagccaaatcatgagcaaaatacacctttttgtctgtataaattacccaggcttaagtatttctttatagcaacacaaaatggactaagacaataacataccaatattaatacattaattagtattgactgtatgaattatattgtctggtgagatataaaatgcacatagaataaaatatgtgacaacaataacatattagttgggaacttggtaaaggtgttatacatagggaaaaagtatataattttctatggtttgtgtt

SEQ ID NO: 131082 - DNA, 604 bp, Homo sapiens
gccacataaactctttaaagccactgtggagaaggaagggaaataacaatatagcagtctaccttaactaccttcataaaaggctaaggaatatggcaaccatgtgaattaaaatgagatgaccaatataagggaaaagaggaaaaatgctggcaaaccacctgaaaaaactaaagggcatgtgtattgtgatacaaggtggctgacaacagttactcagaaaggaaaattatattccgtgaaggtccttattacctagcacgatttgctttaagcctccattcttaacctaggtctgcaaacgggattcacaaaattcatgaattccctgaaattgtatgcaaaactctatgtacctgctctacattttctttttcttttttctttttttttttttttgagayggagtctcactctgtcaccccggctgaagtgcagtggcgcaatctaggctcactgcaagctccgcctcccaggttcacgccattctcctgcctcagcctcccgagcagctgggactacaggcgcccgccaccacacccggctaattttgttactgtatttttagtagagtcggggtttcaccatgttagccaggatggtc

SEQ ID NO: 131083 - DNA, 604 bp, Homo sapiens
gccacataaactctttaaagccactgtggagaaggaagggaaataacaatatagcagtctaccttaactaccttcataaaaggctaaggaatatggcaaccatgtgaattaaaatgagatgaccaatataagggaaaagaggaaaaatgctggcaaaccacctgaaaaaactaaagggcatgtgtattgtgatacaaggtggctgacaacagttactcagaaaggaaaattatattccgtgaaggtccttattacctagcacgatttgctttaagcctccattcttaacctaggtctgcaaacgggattcacaaaattcatgaattccctgaaattgtatgcaaaactctatgtacctgctctacattttctttttcttttttctttttttttttttttgagatggagtctcactctgtcaccccggctgaagtgcagtggcrcaatctaggctcactgcaagctccgcctcccaggttcacgccattctcctgcctcagcctcccgagcagctgggactacaggcgcccgccaccacacccggctaattttgttactgtatttttagtagagtcggggtttcaccatgttagccaggatggtc

SEQ ID NO: 131084 - DNA, 400 bp, Homo sapiens
gtaatgctccttaacctagcattttattttgtaatttaagtgaaatttacatttgaataaagcaatcataaactttcaaacaaactctcaacatcaagtttttttagaaggcrctacaatttcccaacagacctaagaaacttctcttattaagctgcagttgaaatgattgcataaaaattaaggccataccacatttctaattttttccatcagcaatagtccttgtatgtatgtgttgcagttgaaatgactgcataaaaattaaggccataccacatttctaaatttttccatcagcaatagtccttgtatatgtatatatatacacacacacacaattttaatgaacctatgaaatcttaatagaaacaaaaaataatctgtggcaattgatctt

SEQ ID NO: 131085 - DNA, 461 bp, Homo sapiens
ctattccctctaacctgtatcccccttttaagagatgagatttcrttctgtcacccaggctggagtgccatgatgccatcacagctcactgcatcctccacctcccaggctcgctagtagctgggactacaagtgtgccacaacatccagctaatttttaaattttttgtagggatggagtctccctgtgttggcaaggttggtcttaaactcttgagctcaggtgatccgtccttcttggcctcccaaaatgctgggattataggcctgagctgctgtgcctggcctaaccagtacccgttggtccatgcatcatgaactccttagagttcctgtaaaagggctgtgcgcactctgcctaggtcccctggcttcccatattctttttgcttgaaatacttgcattgttctctcttctcattcttttaccttccagcatctattaaatcttcaatacttcc

SEQ ID NO: 131086 - DNA, 461 bp, Homo sapiens
ctattccctctaacctgtatcccccttttaagagatgagatttcattctgtcacccaggctggagtgccatgatgccatcacagctcactgcatcctccacctcccaggctcgctagtagctgggactacargtgtgccacaacatccagctaatttttaaattttttgtagggatggagtctccctgtgttggcaaggttggtcttaaactcttgagctcaggtgatccgtccttcttggcctcccaaaatgctgggattataggcctgagctgctgtgcctggcctaaccagtacccgttggtccatgcatcatgaactccttagagttcctgtaaaagggctgtgcgcactctgcctaggtcccctggcttcccatattctttttgcttgaaatacttgcattgttctctcttctcattcttttaccttccagcatctattaaatcttcaatacttcc

SEQ ID NO: 131087 - DNA, 467 bp, Homo sapiens
ctctaacctgtatcccccttttaagagatgagatttcattctgtcacccaggctggagtgccatgatgccatcacagctcactgcatcctccacctcccaggctcgctagtagctgggactacaagtgtgccacaacatccagctaawttttaaattttttgtagggatggagtctccctgtgttggcaaggttggtcttaaactcttgagctcaggtgatccgtccttcttggcctcccaaaatgctgggattataggcctgagctgctgtgcctggcctaaccagtacccgttggtccatgcatcatgaactccttagagttcctgtaaaagggctgtgcgcactctgcctaggtcccctggcttcccatattctttttgcttgaaatacttgcattgttctctcttctcattcttttaccttccagcatctattaaatcttcaatacttccatctgatttcctc

SEQ ID NO: 131088 - DNA, 467 bp, Homo sapiens
ctctaacctgtatcccccttttaagagatgagatttcattctgtcacccaggctggagtgccatgatgccatcacagctcactgcatcctccacctcccaggctcgctagtagctgggactacaagtgtgccacaacatccagctaatttttaaattttttgtagggwtggagtctccctgtgttggcaaggttggtcttaaactcttgagctcaggtgatccgtccttcttggcctcccaaaatgctgggattataggcctgagctgctgtgcctggcctaaccagtacccgttggtccatgcatcatgaactccttagagttcctgtaaaagggctgtgcgcactctgcctaggtcccctggcttcccatattctttttgcttgaaatacttgcattgttctctcttctcattcttttaccttccagcatctattaaatcttcaatacttccatctgatttcctc

SEQ ID NO: 131089 - DNA, 428 bp, Homo sapiens
atcccccttttaagagatgagatttcattctgtcacccaggctggagtgccatgatgccatcacagctcactgcatcctccacctcccaggctcgctagtagctgggactacaagtgtgccacaacatccagctaatttttaaattttttgtagggatggagtctccctrtgttggcaaggttggtcttaaactcttgagctcaggtgatccgtccttcttggcctcccaaaatgctgggattataggcctgagctgctgtgcctggcctaaccagtacccgttggtccatgcatcatgaactccttagagttcctgtaaaagggctgtgcgcactctgcctaggtcccctggcttcccatattctttttgcttgaaatacttgcattgttctctcttctcattcttttaccttccagcatctattaa

SEQ ID NO: 131090 - DNA, 366 bp, Homo sapiens
atcccccttttaagagatgagatttcattctgtcacccaggctggagtgccatgatgccatcacagctcactgcatcctccacctcccaggctcgctagtagctgggactacaagtgtgccacaacatccagctaatttttaaattttttgtagggatggagtctccctgtgttggcaaggttggtcttaaactcttgagctcaggtgatcygtccttcttggcctcccaaaatgctgggattataggcctgagctgctgtgcctggcctaaccagtacccgttggtccatgcatcatgaactccttagagttcctgtaaaagggctgtgcgcactctgcctaggtcccctggcttcccatattct

SEQ ID NO: 131091 - DNA, 461 bp, Homo sapiens
ctattccctctaacctgtatcccccttttaagagatgagatttcattctgtcacccaggctggagtgccatgatgccatcacagctcactgcatcctccacctcccaggctcgctagtagctgggactacaagtgtgccacaacatccagctaatttttaaattttttgtagggatggagtctccctgtgttggcaaggttggtcttaaactcttgagctcaggtgatccgtccttcttggcctcccaaaatgctgggattataggcctgagctgctgtgcytggcctaaccagtacccgttggtccatgcatcatgaactccttagagttcctgtaaaagggctgtgcgcactctgcctaggtcccctggcttcccatattctttttgcttgaaatacttgcattgttctctcttctcattcttttaccttccagcatctattaaatcttcaatacttcc

SEQ ID NO: 131092 - DNA, 607 bp, Homo sapiens
cacaagtctatagagatcatttagagatrtgtgttcaactatatttgttcattgtaatgaatcgccctgggatgtcagcaagagggcttgtgcatctggacaggagggagaagtcaagggaaggtctagtcatctatttttagtaagattgccatttcagggatggaattaaagactgggtgcctacaggccagatgtgctaaagattagttacaatctctcttggtttttggaaagagttccaaatgagacatggaattcagactggagctgtattcagttcaccctgtattcagttcactctggagctggaacttgaaagataaacttcagtatgaaaaagaaacagcaagaaaacatacaaaaatgctattagcagccactccatagttctatattatttaattttgcctttctatataactttctgtatttctacgttctacttgttttatatctttcttagaagatgcaactagagatttcaaactaagttttgcatgttaaatctagagttgtaatatctttttcttcaggaaaaaaaaaatctttggaaacttcaagaggcttataaaaactttctataaagaattagatgattagttgc

SEQ ID NO: 131093 - DNA, 607 bp, Homo sapiens
cacaagtctatagagatcatttagagatgtgtgttcaactatatttgttcattgtaatgaatcgccctgggatgtcagcaagagggcttgtgcatctggacaggagggagaagtcaagggaaggtctagtcatctatttttagtaagattgccatttcagggatggaattaaagactgggtgcctacaggccagatgtgctaaagattagttacaatctctcttggtttttggaaagagttccaaatgagacatggaattcagactggagctgtattcagttcaccctgtattcagttcactctggagctggaacttgaaagataaacttcagtatgaaaaagaaacagcaagaaaacatayaaaaatgctattagcagccactccatagttctatattatttaattttgcctttctatataactttctgtatttctacgttctacttgttttatatctttcttagaagatgcaactagagatttcaaactaagttttgcatgttaaatctagagttgtaatatctttttcttcaggaaaaaaaaaatctttggaaacttcaagaggcttataaaaactttctataaagaattagatgattagttgc

SEQ ID NO: 131094 - DNA, 440 bp, Homo sapiens
  misc_feature (1)...(440): n = A,T,C or G
tcatctctgctgcttactagcctagaaagttccaggagttgacacagcctcttttgtgcctcactttcttcatctgtaaaatgtgtgntatatttcttaccccatagaatggcttgaggataaaatgttctactagatgccaagtgttataaacagtcactgaaacattgtcctttgtgtataagtgtttgcttttactcacagaatctaagaagccgattttaaggaatgtctagattttaggagacattaaaatgttaaaagaatttcttagattttatgaaatacactgtttttaagttataaactgctaagactagtccgcatacaatatctcttctctgccttaagacttagaactctaagtccatatgtcttgtttgtaaaaaagtctacttttatttattatgtytgttttaaatatcttaacaatattcatc

SEQ ID NO: 131095 - DNA, 487 bp, Homo sapiens
tagggggttgaaatattctctttttttttaatggtgatattttaaaggtttttaatggagagaaatgagaatttgcccatctatatcagtccctaacatttatttagaaatttgattgatgcatgaagtcccagtcttgaatggcataaagtatgcacaggaaagggttttcaactatttcagagttcctactacgccctagtcatagcagaggaacacagagataactcaactgcagcttcagaggcacatgccaagaggcctggaatccaatcaaagctctgyctctagtactaactgggtcaccttaggcaagggaggtaacccctctgagcctcagtttcctcatctgtaaaatgggggtaatcatagtgcctacctcatgtaacacacctcatctagagcttggcacatagaatagactcaatacatgtgagtcgctattatcattattatttagatgggggtagaaggagtcacattcatc

SEQ ID NO: 131096 - DNA, 288 bp, Homo sapiens
cataggagaccatcttctaagctttgcaacccccttctcttttcatagggcatgaaaccagcagccayttgacctaagggcagctggtctatgtgctaagcagttgtctgcaaggaaggctggtgcaaaactctgagcaagggggaaaaataatgaccaggccagcgagataatatcaggaaatgaaacttgaaatgtggaaaaagtattgagcaaatgactcagaagtcagagagaagtacattagcagaagtcattagcaaaagtacaaagagacaaagagtgaaa

SEQ ID NO: 131097 - DNA, 288 bp, Homo sapiens
cataggagaccatcttctaagctttgcaacccccttctcttttcatagggcatgaaaccagcagccatttgaccyaagggcagctggtctatgtgctaagcagttgtctgcaaggaaggctggtgcaaaactctgagcaagggggaaaaataatgaccaggccagcgagataatatcaggaaatgaaacttgaaatgtggaaaaagtattgagcaaatgactcagaagtcagagagaagtacattagcagaagtcattagcaaaagtacaaagagacaaagagtgaaa

SEQ ID NO: 131098 - DNA, 574 bp, Homo sapiens
ctgcttcaaaatatcaaggagtagacacagtcatcagaaaatgtctgcccttttgtttacttcttggtccttataaatgatagttttgtttacttataaatttttacctcagttgcaatatttactggtttttagtaggttttaataaatatttctctgagtaattcactggtttataataaatgtaatactctttttataactatgttttactgtatatttaaaattataaattaatgttttcgtggcatgtaaatttttatggtacagatagttatcatcagtctttgtatcaagtgctgtaatttgacattttcagaaattattctaccctagtcatcttcactcgtgtattaagtcattcactttatatagggtttgctataaatccctagaaaaaaattgttcttattgttgaatwaaaaagtgcacagtgtgattgtttacaaaatgatattataaataaataaaatacttcttctgtcagtttgcatactacttttttaagtatataagattattaaagatttctttcagatttttaatttcacccttctgtcctgccgtaacactt

SEQ ID NO: 131099 - DNA, 593 bp, Homo sapiens
agcagagtggagtatggatggtgctgggggagcagaggtggatgcaaacaggtagacgagagcatggaaacacagactatagccaggaaatcatcacamtaacccagagaaatggtaaaatctgaaatataggtgaacataggtgaggaagaattccacagaaattaactcagggtctgctagtttaaatgcttgtctataagacagactctcactaactgtgcagataatacatcatgggagacacaagagctacatactgagtggtcctagcagtggcacacctagtgcatctgatgctgtctataagacagactctcactaactgtgcagataatacatcatgggagacacaagagctacatactgagtggtcctagcagtggcacacctagtgcatctgatgctgtctataagacagactctcactaactgtgcagataatacatcatgggagacacaagagctacatactgagtggtcctagcagtggcacacctagtgcatctgatgctcaaataggcaggtcatttaacattccccacatctagatgacaaagatatttccagtgataatctcaaaataaaatgca

SEQ ID NO: 131100 - DNA, 564 bp, Homo sapiens
ggtaatttaggctctgttcagtaccatcctagccatgcccaagtggtgaggcttttccaacatttatatcatgaatctttttttcttggaattcagtccttggtcataaactggcaggacttgttggagcttgggtaccaatatagtggtgtacagaatgtttaatatagaagtaatagtatatgctgcaatttgttttaatacctacttagaacacatagtcttttctcacggggcatactaaaggaggtcatgtatcagagctcacctgaaattcctgcccaatttaagtcttagccacaagtgtagtttcttataagaacacaataagaaaacattccaaactcttctgcagtactcacataattaaaaaaaaaaagtatgaaacccacccaagtgaggcttctgagacatttcatagaaacttagttattaactactatttttcttctttacctttaagtgtttataaactgcttaaaggacagttgggtacttcagaggaaagtctaatgacacgcctgctayacaacctgttcttagttggccagattgtgtggtttt

SEQ ID NO: 131101 - DNA, 626 bp, Homo sapiens
tcaggggattcactctgaaaagaggaaaatataataaagagattccattttataggaaacaccaattctattcagttcctaaatactgagatgtggccatttgtagctaaaggacatcaccattgtcactgttcaaygcagtaaccccaacaaaaattactgactctttcactatccactatggtaactattagcctcatgtggcatttaaatttattaaaattaagtaaaatgaaaaattcatttcctcattgcagtagccacatactgagtgctcaatagccacatgttcccattggacagcacagatcaagaatatttccatcatcagagaaagttctgttgcacagtcctgtttcaaagggctttgggtagagagggaaccacccttcctgaacatcctgaaacacaagggtagtttgggaagtatttagactctagcccagacacatttttttctttccacctgtcaaccgatccacagctacatagacaatcagttactctgctcctttctaaaccttccaaaccaaaatttctaggaaatcaccttttggctatatctcctggcctttcagagagccagacctttttgacttgtgaagggctagtaactgcagaggttt

SEQ ID NO: 131102 - DNA, 566 bp, Homo sapiens
ttttaaattctgagattcaaaacacctaacaattgttgctttttttttttccatgtttcatagtttaataaataggttttatattaatgaagatacctttagttatgctgtggcaagagtgcttgttttagagcgtttcctgccaaacacccacatgggacattccctcccagtaccagatgtggagatgcgttcaggcctggccagtcccatctcaygtcccttcctcctgggagcccatttgcagctaaccatgttactcagtgtcttccatgggtggttgtgatgcaagatgcacaaagcctgctgcaaattcttcctcagaccatctcttgcttttccgaagtcaaatttctaagcccaggtcattccaccctactatcccctttggtggcaaactcttctgttgctcctatcattttcccttttgtctctccctatctcttgacatttgcacattgaagcattaaattgcagggtggaaaggaagacaatttcttctgtgtatttaaaaaaactacagagcagcatattgttctcagcacacatctatgttaaatgaattc

SEQ ID NO: 131103 - DNA, 602 bp, Homo sapiens
taggaaagaactatacaaagaggtagacagccctcagccacccctttgatggtgtatccaygcatttgcattgtcctattatcttttcttagagaatcaaaagacctttctaagatcttggagaaagagtaacaaatagtatgtaagatattatatcagagtcagtctggaatgggaaaaatcagatgtgagtccctactggaaagtggagccttaaatcaatcacttgatctctttgagtttcaatttccttagcagtcaaatggatttaattcattcatttaacaaatatttaataagttcccattatgtgctaattctactgtttctaccaaccttacaaattttatgaaagaattacatgaaatgacaaaaatgctttacaaagtgtaagtcataaaaataattcatgttattgttaaaaatagaagattttctcttgttattaaataagactaaagcccagaacaaaataagaaatgtttgccagattgtagaacaaccagaaggaggaatccccattgcagttcaaaaattgcccaaaagctggcttttagggaccacacccaagactatagattgctgacagccacagaaaacaa

SEQ ID NO: 131104 - DNA, 592 bp, Homo sapiens
gaagggtttggggcaaaatcaaagcagaaccagggcacacaaataaaataaaggacactgcactttgggaggccgaagcgggcggatcacctgaggtcaggagttcaagaccagcctggccaacgtggcgaaaccctgtctctactaaaaatacaaaaattagccaggcattgtggcgcgcatctgtaatcccagctactctcgaggctgaggcacaagaattgcttggacccaggaggcggaggttgcrgtgagccgagatcttaccactgccctccagcccgggcgacaggccgggagcaagactccatctcaaaaagaaaaagaaaaaaaagaaagaaaggacactgaatgtgaaggtctcaaatgacaagaaaataccgtaatacaataattaaacccattgaggcatcaagaaagaaaagtgacactgtttgccaattagtatacaagtcaggttcagtatgtaaaagattctttttaaaaaaatagaaaatttaaaaaaaattcttactatccaaagacaagattgaaattgagaataggaacacaataaacaaaaagtaatagccatagtcttccaaccctgaaa

SEQ ID NO: 131105 - DNA, 533 bp, Homo sapiens
tttctcctattttgaacttatgaaaatgctggagtattagcactcttgcatatacttctttgctctcatggtaagtgatctgtacctcttgcgtgtaaatgtggactcttgtgaggtagctccgggcaactgctcatggaggtttttagaatttttttcgaacaaagtgttggagggaggatgtcaaaatcttgcacattttcagaacagggtcagattgggaggttataaatatggaaagattatggtgctttctccmataagcaaaacccataaatttagtataaggaaattttaaaacatcggttgtttccccacaggaaaccaccttggtatttttgttgaagtccttattgcttttgaaacattactttttggcatccctgcttttctgggagcctcagcacaggcttaccctgtctcctgcactggatggaagggagaaatgaagcagtgcaaagatcagtgggtcccaggctccagaactagccaggattagtgctcggaaaggaactgagtatgaattcacacag

SEQ ID NO: 131106 - DNA, 435 bp, Homo sapiens
gagtgtagttgggattcatccagtaaagctccatgaggcttaakatgtgatgataaatcataaccctcctaggtgctcagaatcaatttcacatctcatctgttatcatgagcagaaggtgtgagaaagtccccttacagcggtaatacatcagctcacaaaaatcaaaaatgcctgaagattagagaagggaacactgttatagtccatggtgcttaatcagctacccagacattgatggatttcaggggatatttacatctgaatcatggcatccagaatgtcccaagcagaacccatagtttatgggcagcatagaagcaatttataaaattcatttcttactatctatagtcagaaactaggtctctctttgtagaaatattctctaactagaaaaataagaacagaactggagatgaagcactctctaga

SEQ ID NO: 131107 - DNA, 562 bp, Homo sapiens
agcttgtgcaccatttctcacatcaaacctagaatatgagttgtacctcatagtaccttacttagtccaatatagaaatggcctgtttgcctgaatcagtatcccagagtttccacccactctgtcatggtcttgaagtagaatgcctttgcctttttctagactagcacaaagtggcaaagtgccttacagataactctgtcaagtttttcttagccatgaagcaatagagaaaggggctcagaaatggtagagagaaccagactttaatctcccttgaaaacaataaggaacaatatcaaagtttcctgaatggattcrtaactgagaacaagataaaatgatgtatatccaaagaatgttagttttgatacctgaagaccaatcattacggatacccattaactaatgaaagctatgtcattatatcactccaaaggatcttcactgcaactacaaggaagtaaacttagaccttaatcaactgaaatttaatattgccatagcataatgatacctcaaaaacacatattgtttaattattacaaaataaaagagttat

SEQ ID NO: 131108 - DNA, 562 bp, Homo sapiens
agcttgtgcaccatttctcacatcaaacctagaatatgagttgtacctcatagtaccttacttagtccaatatagaaatggcctgtttgcctgaatcagtatcccagagtttccacccactctgtcatggtcttgaagtagaatgcctttgcctttttctagactagcacaaagtggcaaagtgccttacagataactctgtcaagtttttcttagccatgaagcaatagagaaaggggctcagaaatggtagagagaaccagactttaatctcccttgaaaacaataaggaacaatatcaaagtttcctgaatggattcataactgagaacaagataaaatgatgtatatccaaagaatgttagttttgatacctgaagaccaatcattacrgatacccattaactaatgaaagctatgtcattatatcactccaaaggatcttcactgcaactacaaggaagtaaacttagaccttaatcaactgaaatttaatattgccatagcataatgatacctcaaaaacacatattgtttaattattacaaaataaaagagttat

SEQ ID NO: 131109 - DNA, 589 bp, Homo sapiens
cttgcaattatcatactatatatctcctactggttctgcttctctggttgaatcttgataacaagcattagttaacaattagctcaatgagtgtcaacaatgagatgtagttatttcaaaagttaattcgctcttgtgttgctgatgatagagtcagtgagagctcagtgatgcattatcagatcacactggagtgtagattattagcctgcagacttaatttcccatgcttctggagagacaagttaaaataaaacatgcattcttaaagaaggattgctgaaccactgatctgaaagaagtgtggattccaaggctttacacagatatcttagtgaggtaaaatttaggactaatcattatccctagcagatattcaatatgataagtttattcatgtaacaagtgcagattgaattataatcttacttatctgtgcaaggcagctttaattagaagcaccatcaggagaaagattgttgtagttgtagagagtraggtttctggatttacactaagtgggtgagaaattgtgtttcatcaactactagctctgtaattggaaaaatttattttgtttattttattt

SEQ ID NO: 131110 - DNA, 602 bp, Homo sapiens
gttctttctctccagcaatcatgcaatgttattaaactacaagcaaatctcaaattacaaatacaaattatccagctacaagcattctctctcacagtattcagttcaggttggcacatttccacacataatagaaagaatgttggaagaaaatcaaaagagcttggcaaaagtcccagtgctagcactttccagttctgtgaccttgggcaagtcatttggtctcactggtttacagtttccacatctttaaaacagaagatgataatcccctctgtggcyggtgtgaggatcaagtacaatatctgtgtttaagcaatttggaacttaattccatataaaacagaggtatcatttcagttggcttccttcctcctttagtttcaaaacccaagaaagcacagtaaaattttagagtatacaatgaatgaatatatgaagggatgatttggggttaaattttgttgttgttgtttttgtaggttaattaactgatctatatatttaaccaataactattgagcacctactgtgtcatccctacaataatactggacccagagaaggcagaaagtctcagaaataagtaagttaaccatgcc

SEQ ID NO: 131111 - DNA, 602 bp, Homo sapiens
gttctttctctccagcaatcatgcaatgttattaaactacaagcaaatctcaaattacaaatacaaattatccagctacaagcattctctctcacagtattcagttcaggttggcacatttccacacataatagaaagaatgttggaagaaaatcaaaagagcttggcaaaagtcccagtgctagcactttccagttctgtgaccttgggcaagtcatttggtctcactggtttacagtttccacatctttaaaacagaagatgataatcccctctgtggctggtgtgaggatcaagtacaatatctgtgtttaagcaatttggaacttaattccatataaaacagaggtatcatttcagttggcttccttcctcctttagtttcaaaacccaagaaagcacagtaaaattttagagtatacaatgaatgaatatatgaagggatgatttggggttaaattttgttgttgttgtttttgtaggttaattaactgatctatatatttaaccaataactattgagcacctactgtgtcatccctacaataatactggacccagagaaggcagaargtctcagaaataagtaagttaaccatgcc

SEQ ID NO: 131112 - DNA, 619 bp, Homo sapiens
gcaggctattgggaaacacaaaccactagaattactataatcaaaaagacagacaatagtaagtgttgacatggatgtggaaaaattggaatgaaaaatggtacagtcattttacagtcctttcaagttggtagtccttcaagatgttatcaatagtaataccacattaccccaaaattcaactcatagatatatgcccaagaaaactgaaaacacaggtacacacaaaaacgtgtacactaatgttgacagctaaattattcataatataaaagaagaaaactgcccaaatgcccataaactggtaagtgaataaacacattgtgatatattattcagcaatttaaaaaaatacagttctcaaacatacctcaatgtggatgaaccttaaataccttatgctaaatgaaatracccaactaagaagaggatgtgttctttaattccatttatgtggcatgtccagaatagtcatatctatagagacagagaggaaatatttggctggggtgtgcattagaagagagaatgactgctattgatttcagggtttctttttgaagtgataaaaattttctaaacagattttgccaaaggttgcacaactctgtgagtatac

SEQ ID NO: 131113 - DNA, 647 bp, Homo sapiens
ttataattgaagctgagcatgagtattagacatcaagaagcgtaattttttaaaaatccatagccttgtatgttaattgcctaaaaacaagtatatatgytcactttgtctgaacaagggcctggaggaagagatggttagtttaaacaaaaaaaaaaatgactttataaatctcaataggaatgatgaaataaatgcaataaggtctatgtgacctcacaatttacatgttgaatggaagagaaaggggtatcattatattttatttgccacgtctactagaaagatctgataatttaccagatttttctatagctggagacgtttgcataatgagaagatctagaatagtacacaaacatgaagttacttttcctataatcacttgaaattattaagacgttgtgttatttgttattccactaaaagaagataactttctagttgaagccaattgatttgttataaaaatgttagaataaaatggcaatgtcatgttttaaaattgtgcatggatgatttcttggggggtgtttaatggagaaattatatttctgaaagatagaaaataaacttgaatgatggtatgaattatattttgaaacatatcaagtaagtgtaagtacagaatatacttgccaagcatg

SEQ ID NO: 131114 - DNA, 558 bp, Homo sapiens
aggtctaggaagttactcttagaattaacttctctggattttattttctttactcataaggtcaaaaggttgtgtttagaagatttataaaagtttagccatataacagtagaaataagatgtgaggcttggtaatttgggggatgtggtagtggaaaggcatagacattgcaaytggattatagttttagaatattatcacctattctctttgaaatattgagtagaaaattgacataaaaagtttttcaatgaattcagttttaaatctttagaaaatttaacatgagagtaactagcacagttagttaatactaagagaaagttctagtttttcaggacttggtgaaaactctagctgtgagtttcatgattacctagatttccttaaatgtcaacttagaattagacattctagaatgaaggttctattggaacatgggtaaaaaacatagtccttgaataataactaagttggcaaatcgtaattttaaatagtataacaaaattcagtaattactgatcatggatgtttccttaaagtaataaatatcattg

SEQ ID NO: 131115 - DNA, 454 bp, Homo sapiens
aaattctaaaactgccagcgcaagcataacaataatatctgttagggtgttgcatattgatatgaaaaggagatggtcagctcttgggtgggagacctcacaatctgctagccagaataaaggccacataggaagataggaattgatctatttaacttacaacagaaagtaactatctcttggtgcaataagaaatctcggaaaatgaagttggttagcacaacctggagcaggttaatcttcctggtttaagaaaggcagagaaaaaaataatagaggcttcccagttcatgtaaattggcagccaccttggaaaggagattaaaagaagccctaacattggctttgagcttgagaatcttttcaatgacaattcacrtctcagggttggagtttttataattcttctgcaagaaataataacaagaaaagcacttaaaaataagcttctaga

SEQ ID NO: 131116 - DNA, 591 bp, Homo sapiens
ggacaccaattcacaaaaatccttttctaatgttatttaccctatattaaatatcacaagaaagtacttctctggggaaaaaattaagatgtgtttttctaacttactgatgtttactcatatcgaaactgaaaaaagtttcaaaatgtgtctttaggagaaaaaagatatatttacaagtatataatggtattaaattgaaatttacaatttagaacatgaaattatataaawgtaccatatattatatatcaaatacaatttatatgatagaatatttgtaaattgttactctcttattaatacacaaaaaaggttaatactaagtattcaaaaatgttaaatattaaaccataaaggatgtttaaggacacgtatttttcctcttacattttctgggtacataattcattataaaaaatggaaaagaaaaatataacaaggcatctctaaatatttgctatatccaggttctttctgtaacaacctcagtattgctataatgtgctgtagcatatttggccacatattttcctccatgcagatgataatgtgaaattaatgtgcttttattttagttgacaatatgtt

SEQ ID NO: 131117 - DNA, 590 bp, Homo sapiens
aggaaaggactttatgtgtagcaaattgagacagcatctcctttaagaaatccctttgtttatcatttctaaggaatggagatttagccctatgactaatttaaagaaatcagatttactgcttctcaatatgtgcctttccatttatagacatctctaattggcagttctttctcactcggaataagatagctaataaggaaactaaaatctttttccttatgtaatctatctactagtaaagataggtatttttagtccaggctctgtccctcgttctgcttacttactggagcttaaggtacaactgtctmtatgccagttgctgtgtgtaatttatgaagtgatctatgcattgttcagtttaataccacctctctcctcgtacttttcacactatttattttggggcctggataagggagaattggtgtgtgtgtgtgtctgtgtgcacacaagcacatgcatagatagatatttaggttgcctccaatcttggctattgtaaacaacactgcaacaaacataggagtgcagatatctcctcaatatactgatttcctttctttggggcatctacccagcagtag

SEQ ID NO: 131118 - DNA, 644 bp, Homo sapiens
tgttacaaacataatatagaatagtactcagcattaacacaagtaatgagctattaaatccagcaaatatatcgatgaatcttaagtgtatatatttgtaggtaaaaaaataaaaataaaaacaaaaaacaaaagaagagccagcctgaaaagcctacatattgtttgaggccatttatacaacattctagaaaaaacaaagcttatacagatgataattggatcagtggttgctaggaatttggggtagggggcttggggtagggggtagatcaagtacaagatttmtttggctggtaaaactattctgtatgatcatgtaatgttgaatatgtaaaacgataaatttgtcaaaacgcgtgaagctttacaacagaaaaagagtgaattaaatataaatgtttgcaaactaacataggcaagtcagaggattccatcataaaatgcagaatgtgattagtctaacaaactatcacaaatgcagtaaacctcattgaagggcactgggaaaagagctctaacttaagtaacttcggaagtgaatggagtttactaaaggtgaaaatgactctatagaaatttagaccctagttataaaattattcctatgggtttatggtttagaaaatctaaagctactacac

SEQ ID NO: 131119 - DNA, 644 bp, Homo sapiens
tgttacaaacataatatagaatagtactcagcattaacacaagtaatgagctattaaatccagcaaatatatcgatgaatcttaagtgtatatatttgtaggtaaaaaaataaaaataaaaacaaaaaacaaaagaagagccagcctgaaaagcctacatattgtttgaggccatttatacaacattctagaaaaaacaaagcttatacagatgataattggatcagtggttgctaggaatttggggtagggggcttggggtagggggtagatcaagtacaagatttctttggctggtaaaactattctgtatgatcrtgtaatgttgaatatgtaaaacgataaatttgtcaaaacgcgtgaagctttacaacagaaaaagagtgaattaaatataaatgtttgcaaactaacataggcaagtcagaggattccatcataaaatgcagaatgtgattagtctaacaaactatcacaaatgcagtaaacctcattgaagggcactgggaaaagagctctaacttaagtaacttcggaagtgaatggagtttactaaaggtgaaaatgactctatagaaatttagaccctagttataaaattattcctatgggtttatggtttagaaaatctaaagctactacac

SEQ ID NO: 131120 - DNA, 644 bp, Homo sapiens
tgttacaaacataatatagaatagtactcagcattaacacaagtaatgagctattaaatccagcaaatatatcgatgaatcttaagtgtatatatttgtaggtaaaaaaataaaaataaaaacaaaaaacaaaagaagagccagcctgaaaagcctacatattgtttgaggccatttatacaacattctagaaaaaacaaagcttatacagatgataattggatcagtggttgctaggaatttggggtagggggcttggggtagggggtagatcaagtacaagatttctttggctggtaaaactattctgtatgatcatgtaatgttgaatatgtaaaacgataaatttgtcaaaacscgtgaagctttacaacagaaaaagagtgaattaaatataaatgtttgcaaactaacataggcaagtcagaggattccatcataaaatgcagaatgtgattagtctaacaaactatcacaaatgcagtaaacctcattgaagggcactgggaaaagagctctaacttaagtaacttcggaagtgaatggagtttactaaaggtgaaaatgactctatagaaatttagaccctagttataaaattattcctatgggtttatggtttagaaaatctaaagctactacac

SEQ ID NO: 131121 - DNA, 644 bp, Homo sapiens
tgttacaaacataatatagaatagtactcagcattaacacaagtaatgagctattaaatccagcaaatatatcgatgaatcttaagtgtatatatttgtaggtaaaaaaataaaaataaaaacaaaaaacaaaagaagagccagcctgaaaagcctacatattgtttgaggccatttatacaacattctagaaaaaacaaagcttatacagatgataattggatcagtggttgctaggaatttggggtagggggcttggggtagggggtagatcaagtacaagatttctttggctggtaaaactattctgtatgatcatgtaatgttgaatatgtaaaacgataaatttgtcaaaacgcgtgaarctttacaacagaaaaagagtgaattaaatataaatgtttgcaaactaacataggcaagtcagaggattccatcataaaatgcagaatgtgattagtctaacaaactatcacaaatgcagtaaacctcattgaagggcactgggaaaagagctctaacttaagtaacttcggaagtgaatggagtttactaaaggtgaaaatgactctatagaaatttagaccctagttataaaattattcctatgggtttatggtttagaaaatctaaagctactacac

SEQ ID NO: 131122 - DNA, 578 bp, Homo sapiens
tgtttgtcatgtttgagatctctgagaaatatcaggagtgactagaatcagttttaagatttaatagagtgtgcctgtgaatatttctttccaggatttatgaatatttctgatgcatcttttggaggagtcagaggtcagtgtgttgttgaataacaccctctttgcccgaagtctctagtaagagataccacatggaaacaatttcctacaattcaacaaggggagagagaaaaaggaaaaaaaaaagttctctaccaaagaactatctggacctgagtaaagattgttactggagtgcctgatggatgtaaacatattaaatgctaagggaagatgttaaagaggatacctcaggaagttcttatagatgattaagtttgccaaaactttataaawtcaatcaattatctaacattgcctaagatcaaaaggaaaatgagggtttttttgtttgatttttaaataaatagggagttatgtgttttatatatcatactgtttagcattatcaatttataagtttaactaaaatacattcatcaaacaatactgtctttttgcacagaaagtaatac

SEQ ID NO: 131123 - DNA, 607 bp, Homo sapiens
ctggtcctgggatcacactgacccagaatctccagactctggtgctgtatgcagattgtggtaaaagcaatgcaatgtctgaacacaattttgtgcttggaaacctgaggacgtatagtttttcaatgtaagagatattactggggtctgagtaaagaataggcatgtaaaaattcatgcgtgagtcaccttttcagatgattacactatatattttctgatgattcattcttttcccctcatgcctttccaggttgctaacctgaccagtcctgcagtggaggtagttatacccaaggtgtgatttgggatcactaaaaggaatktctctaactactgaagtgtctaaaatacctaggttagctctgagctcagatcccagtccatcagactcgctgttttcaagaggaggaagcaagggagaacaaaagctagcctgtccatggaacaggcttaacagatgaatttcttcttgtattgtttcctttctgttatctcctatgtttcaaacacaaacttgtattgaatctttttttttaaattaacaactttatttaccataaaattaacttactgtaagtatacaattcaactattttttgtatgt

SEQ ID NO: 131124 - DNA, 486 bp, Homo sapiens
gattatatatgaatatcattaatcattagtttgtagcaattaccctttattccaatgttataataatcctcgctctacaatcataacctaggaaaaaccaggccatacagagataggagctgaaggggcacggtgagaagtgactagaagacgagagtgcgagccttctgtcacacccagacatggccactagagggctccytggtctagcggtaatgccggcgtctgggaaggcacctgttacttagcggaccttggtctagcggtagcgtcagtgcctagaaaaggcacccgttacttagtgggccaggaaagggagtctctctttccccgggggagttagagaagactctgctccaccgtctcttgtggaaggcctgacatcagtcaggcccgcccgcagttatccggaggcctaaccggctccctgtgatgctgtgcttcagcggtcacgctcctgtttcactttcatgttccactctgtac

SEQ ID NO: 131125 - DNA, 471 bp, Homo sapiens
gaattcaaagccagactgggcaacactgcaagaccctgtctctacagaaaataaaaataaaaaaaatcagccaggcatgtggcacatgcttgtagtccagctactcaggaggctgagggctggaggatcactcgagcccaggagttcgagactgcagtaagctatgatgacaccaccacattccagcctgggcagcagagcaagactctgtctcaaaagaaaaaaaaaaaaaaaaaggagatagctgttgctatatggkggtggcccagggtgaggacagtggaaggaaaggagaactctggtgaagatttgtttaggctcaggaacaaacaggccttgctggtggactggccatgggtgtgtggtagaaaaggaagatttaagaatgaccttcagagggtctcatcggtttttccaaactgattttctgctggattcaaattgagtaagacacaatatcaagaacagttc

SEQ ID NO: 131126 - DNA, 471 bp, Homo sapiens
gaattcaaagccagactgggcaacactgcaagaccctgtctctacagaaaataaaaataaaaaaaatcagccaggcatgtggcacatgcttgtagtccagctactcaggaggctgagggctggaggatcactcgagcccaggagttcgagactgcagtaagctatgatgacaccaccacattccagcctgggcagcagagcaagactctgtctcaaaagaaaaaaaaaaaaaaaaaggagatagctgttgctatatggtggkggcccagggtgaggacagtggaaggaaaggagaactctggtgaagatttgtttaggctcaggaacaaacaggccttgctggtggactggccatgggtgtgtggtagaaaaggaagatttaagaatgaccttcagagggtctcatcggtttttccaaactgattttctgctggattcaaattgagtaagacacaatatcaagaacagttc

SEQ ID NO: 131127 - DNA, 537 bp, Homo sapiens
acaacattttaaacattaagcatacaaagttcactattagaaaaaaattgtaaatcaagttgcctgattacaaaataaattcttccytaaattaccttttgaagcaagattgaagtaacctaagaatgacctcaagttaaatgaaaaagtttggttttattgatttacctctcatatgcctccaactagagaccaataaaatcctaaagagtagcacacaggtgattttcacccacagattatgggtttagttctgaaataaactgtgaaggacgattttttttttccttaaagaacctgtattaaaatagacgcaaccaattctgatggtgttatatgggctgagttgcaaagatcgttatgttttaagtcaacaacacaattaaaaaacaacatgcttctttcatcttttaaactctccatttactttaattaagctcacacagtgaaatcttatttttttctttttaaagatataattaaaaaggtgaattgagaattaggatccaccttcactcttctatattttttggagtg

SEQ ID NO: 131128 - DNA, 537 bp, Homo sapiens
acaacattttaaacattaagcatacaaagttcactattagaaaaaaattgtaaatcaagttgcctgattacaaaataaattcttccctaaattaccttttgaagcaagattgaagtaacctaagaatgacctcaagttaaatgaaaaagtttggttttattgatttacctctcatatgcctccaactagagaccaataaaatcctaaagagtagcacacaggtgattttcacccacagattatgggtttagttctgaaataaactgtgaaggacgattttttttttccttaawgaacctgtattaaaatagacgcaaccaattctgatggtgttatatgggctgagttgcaaagatcgttatgttttaagtcaacaacacaattaaaaaacaacatgcttctttcatcttttaaactctccatttactttaattaagctcacacagtgaaatcttatttttttctttttaaagatataattaaaaaggtgaattgagaattaggatccaccttcactcttctatattttttggagtg

SEQ ID NO: 131129 - DNA, 537 bp, Homo sapiens
acaacattttaaacattaagcatacaaagttcactattagaaaaaaattgtaaatcaagttgcctgattacaaaataaattcttccctaaattaccttttgaagcaagattgaagtaacctaagaatgacctcaagttaaatgaaaaagtttggttttattgatttacctctcatatgcctccaactagagaccaataaaatcctaaagagtagcacacaggtgattttcacccacagattatgggtttagttctgaaataaactgtgaaggacgattttttttttccttaaagaacctgtattaaaatagaygcaaccaattctgatggtgttatatgggctgagttgcaaagatcgttatgttttaagtcaacaacacaattaaaaaacaacatgcttctttcatcttttaaactctccatttactttaattaagctcacacagtgaaatcttatttttttctttttaaagatataattaaaaaggtgaattgagaattaggatccaccttcactcttctatattttttggagtg

SEQ ID NO: 131130 - DNA, 537 bp, Homo sapiens
acaacattttaaacattaagcatacaaagttcactattagaaaaaaattgtaaatcaagttgcctgattacaaaataaattcttccctaaattaccttttgaagcaagattgaagtaacctaagaatgacctcaagttaaatgaaaaagtttggttttattgatttacctctcatatgcctccaactagagaccaataaaatcctaaagagtagcacacaggtgattttcacccacagattatgggtttagttctgaaataaactgtgaaggacgattttttttttccttaaagaacctgtattaaaatagacgcaaccaattctgatggtgttatatgggctgagttgcaaagatcgttatgttttaagtcaacaacacaattaaaaaacaacatgcttctttcatcttttaaactctccatttactttaattaagctcacacagtgaaawcttatttttttctttttaaagatataattaaaaaggtgaattgagaattaggatccaccttcactcttctatattttttggagtg

SEQ ID NO: 131131 - DNA, 564 bp, Homo sapiens
ggcagagcttttccaaatgacttacatccctgggcttttccccttctgcttttgattcagaaaattttggatgggcttaatgagagatattttgagaaaataattatgacattttccttcctccttcaatttaagtaataaccactgatccagatgatgataatgatgatgataatagtaataataataaaataataaaatctgattgatataaataattcttctgcccttatttattcagatgaatttgcaataacacttttcaagttagcatatcataaaataatatcccaagggatgtaaatacaactacctcaaaaatagatatggagataaagtatcatatttaaagcarttttttgtaatgtacattaaattaactagtttctttttagtactaattctcagagcttttaatatgccaatgcatattgtgattctaacagagaaataacaatatgcaccaatattacttgatcagaacatatattttattttcccttacccccaccagtattgtgtttcaaaataatgtacattgtgatagtttggacatgtacttaa

SEQ ID NO: 131132 - DNA, 670 bp, Homo sapiens
gccttactcatcagtgaaatgcaaattaaaatcacaatgagacactgctacatatgcaacagagtacgtaaaattatagagactgatagtgccaaatgtttctatgaatatgaaacagtggggattctcattcaatactggtatgtgcataacagaaataacttctttggaaaatattttctgggtttcttatgtagtaaaacgtagacctctactgtgactcagcaatttttattcctaggaacatatccatgattaatgaaaataaatattcacaaaaatgcttatacaaaaacgttccaggcatttttactcctaatagccaaatctgcagtaaagcaaatgttagtaaacagaagaatggataagaaaaatgtgatacatgatacagtggagtattacttagcaataaattataaatacaacaacatggatggatcacacaaaaaattakgctgagtaaacaaagtcagattctacatattatagtatgattccattacaggaaattgaagaataggaagactgatctctatgttgacaataagaagaatagtgttctctgagtgtcaaaaccttgtttgtaaaaggcacaaagtaaccgtctagaataataggaatgttggctatctttattgggcataggacaaaattgtgtagacttgtcaaa

SEQ ID NO: 131133 - DNA, 597 bp, Homo sapiens
attgaagaaaaacagttggcccataatattagacatatgaacacaaatatagcatataacaagtagcttcaataaaacaaatgtccattttcttttaatgtgtctccaaacaattgcctatactttaaactgcaagaaacaataattataatagcatctggtagaatttctatctcaayagagttgttttttttctttaataatgatatgtaattattcatgacatttgggattactgaagacaaacagaagaaagagaatgaaatgttaagccttcctgagcatcaaagagagtatatttttattataacttctaatttaattaatgtattcttaatgccatctggtcagattatcttaaaagttaacagaagagattgacacttcacaaataataaacctgaaaatgtataatactgaatttatacaatcatcatagccagaacaacacacaaaaaaaagaatgaataagaggaaaaaaccatttcagtcaactctagtgcacatttagtattatcatggaatgaagaaaggagactcattatgccctcaaccatgatttaagtcatcactataatattatatttaagtgtattt

SEQ ID NO: 131134 - DNA, 597 bp, Homo sapiens
attgaagaaaaacagttggcccataatattagacatatgaacacaaatatagcatataacaagtagcttcaataaaacaaatgtccattttcttttaatgtgtctccaaacaattgcctatactttaaactgcaagaaacaataattataatagcatctggtagaatttctatctcaatagagttgttttttttctttaataatgatatgtaattattcatgacatttgggattactgaagacaaacagaagaaagagaatgaaatgttaagccttcctgagcatcaaagagagtatatttttattataacttctaatttaattaatgtattcttaatgccatctggtcagattatcttaaaagttaacagaagagattgacacttcacaaataataaayctgaaaatgtataatactgaatttatacaatcatcatagccagaacaacacacaaaaaaaagaatgaataagaggaaaaaaccatttcagtcaactctagtgcacatttagtattatcatggaatgaagaaaggagactcattatgccctcaaccatgatttaagtcatcactataatattatatttaagtgtattt

SEQ ID NO: 131135 - DNA, 555 bp, Homo sapiens
tgtaaattgtgacaggagactttcggaaagcgtgtgtgggagagtggcatcacttgacttacactgatcattggtggttaaaagtacagtttctaaagccaggatacctgaacctgggttaatgtgcctccacattctggctatgaccatggcaaattaccttacctttctgggcttcgattttcccactgataacataaggattatgcayatcccttcctcatagtttggatataaatgaggaaataaatccacacagaaagatgagcacagtctgtagcatatagtgaatgcttgagaaatgttagctatcattcctgtcgttcgttttttgaaagttgcaatccaggattgtaaaggccttaaggttgggctataatggcttccacattatggccaggactctggtgcagctgcacacctaagaaagtagaccaccatacacctgtgcctatgaaagtgaggactctgatattaggtggggaggggctctacactctctttaattgctttccatcaaaggaagaataaattgagaatgattaagtgaactgg

SEQ ID NO: 131136 - DNA, 555 bp, Homo sapiens
tgtaaattgtgacaggagactttcggaaagcgtgtgtgggagagtggcatcacttgacttacactgatcattggtggttaaaagtacagtttctaaagccaggatacctgaacctgggttaatgtgcctccacattctggctatgaccatggcaaattaccttacctttctgggcttcgattttcccactgataacataaggattatgcatatcccttcctcatagtttggatataaatgaggaaataaatccacacagaaagatgagcacagtctgtagcatatagtgaatgcttgagaaatgttagctatcattcctgtcrttcgttttttgaaagttgcaatccaggattgtaaaggccttaaggttgggctataatggcttccacattatggccaggactctggtgcagctgcacacctaagaaagtagaccaccatacacctgtgcctatgaaagtgaggactctgatattaggtggggaggggctctacactctctttaattgctttccatcaaaggaagaataaattgagaatgattaagtgaactgg

SEQ ID NO: 131137 - DNA, 547 bp, Homo sapiens
agtaaagcagtggcaaggtttgaaagaattgactcctattttgaaagaaattctactgtgagtaaaatgctatctaacagcattacatgctacagagaaatctttcataagaggaagagtcaattgatgtggcaaacatcactgttgtcttattttaagaaattgccacagccacccaactgtcagcaaccaccaccctgattactcaatagccatctgcatcgagccaaggtcttctaccagcagaaagatatgacttgctgaacgtctcagatgattgttagcatttttttagcaatacaatattttaaattatgacctgattttttgacataatgctcgtgcacatttactagactacattatagtctaagcataacttttatatgcattgggaaactaaaaaatttgcctgtgactagctttattgtgatactcactttattgcaatgatctgaaacaaaaccagcaacatctttgaagtatacttgtactataatgayggatcctgtggcaaaaatcagttcagtaacttattgaagattgt

SEQ ID NO: 131138 - DNA, 523 bp, Homo sapiens
taaaatcagaaccattttgaactctgaaacacatctggccccaaaaattccaaatgagggattttatatgtgatgaaaccatttttttctatcatccagcaccattacctcccatcaccccaagcacacacacaagctcatgtttccatttgcatatgttgtctgagaatcattttgtttagggacagtttttgagactggtaagggaatagagacattgtagaatatatttttgcatctttccctactcgtatgacaattaatcctatatatttagaagggtatgaagcagaagttgaaaaacctttctttttcctgagttattgagaatttgacccaaagcacatctctttcatgattttcatgacaaaggatggcataggcctgaagagaaggcaratgtcctcagaattccactctggctgacaccatgaaagctgtcagatttggaagcacaaggttccatgaatcctgacacagccactggtgttcaattgcataacacctatgagcagtggcagca

SEQ ID NO: 131139 - DNA, 632 bp, Homo sapiens
ccattcataatggatatatgatcatgaagcatgtaacaagaaacatgtgtaatactggtgttaatagagtggaaagttcaatgagaaaacaaaataaaacctaaaagtgcatgagaccaaactaaacaaaaaaggtgcaccagatgacatctaagaaaattatgaaattttccatgacactgagtgacaagctttgggatgcataaaaagaatgggagaaaaagaagacagatatacaataactaggaaaaataagactctctgaattgacaagggaatataattttttcaaatgaccgtttgtcttaagggaaccaaatattttagtcatgggctaccaactaagcatgcagtgttcttatgatttatctcatcacatcatctgcattcggtttaacaygtgcaatctcagcaaataaactctttttcagcattcctgtgtggtcaggtgacttaagttaaatgtcaggggagatagcaagaagctacagcttagcatattcatcagtgtctaatgagggtcttaagatgagacagaactgaagttaattcaccaaatttgtttgtattatagacgtaaaaggtggcaaatatgaacttaggaaaggtgactcataaaaattttaagtgat

SEQ ID NO: 131140 - DNA, 548 bp, Homo sapiens
gtgccaaggtggagaaaccttggtctatgccattaatgatttctttaagaatgctgaagtggaccaggtgtctgattgatgtttgatttgaaagcactttactttgcccagatgcccatttaaaccttaagtcaggcaaaactatcaatagccttgcactgactcaaatcacattttacatgaattattgagcgcctcacagagtactctgaggagcacaatcactgatcattggttggtggagaaatattcagagttctgggtgctcctaatcctgaattcaagttggtttaaccgatcgtatctcagaataagcaagtatacatgagagactatatatcttttcaagtggaaagactgcaaacagaaggaacaagtggtgtttcagaaggtccctgatgttgatgtatcargatgatcaatacaatacttaactacactttcaggactaaatgacatgacaagaggttgagagaaggtggtcatttggggttgtgtatcagcaggtcaatctcatgccagagagaattccctagaatgctgcttct

SEQ ID NO: 131141 - DNA, 371 bp, Homo sapiens
atttaaaaaatgcagcttgttttgcaaaccaacatccagcttggcaggttttgctctatttagcrtttttttgtttgtttggtttttttttagataggtattgctctgttgctctggctggtctcacactcctggcctcaagcaatcctcccacctcaccttcccaaagcgctgggattacagcaggggtccccaacccctgggctaaggactggtaccagtctgtggcctgttaggaaccaggccgcacagcagtaggtgagcagcgggcaaaccagtgaagcttcatctgtatttacagccagtacccatcactccccagtatctcctgagctccgccttctgccagaccagcagcagcagcattagat

SEQ ID NO: 131142 - DNA, 344 bp, Homo sapiens
ttccaccagttgaagccccttgtcccctatgtcacggccagggagagtaggggtgggaatgtgaacccaggcgggcttctctggagcggagggccttgaagaacacaaatggacatgttcattccctacgcctgtcctcagcaggaatgaagacaccctggtctctggctctctgagaataaacttttgacaccaaagggacttggacaacagttaggaagatgtcctggagcaagtggaccccgtgggttgggggaacttcttggastcacagaggactgagggttcttgcacccccagtggaggtattcatatctgggtggtctttcccatagggtcgactc

SEQ ID NO: 131143 - DNA, 461 bp, Homo sapiens
gacaattccttaaaagatacaaactaccaaactcatacaaagaaaaagataacctgaatatccctatatttatttaaaaatcaaatyaataatgttgctcttaaccttccaaaaaaagaaaacaccaggcttagagagtttcacaagtgaattctaccaaacatttaaggatttaaggaagaaacagtatcaactccctacaatctcttccaggaaacaatttctaactcattctattagcatgaggccagtaccataaccagataaaggcatcacaagacattacgaaaaagaaacactgtagatcaaaatctctcatgaacataagcacaagaatcctcaacaaaatattattaaatcaaatccagcagtgtttagaaagaaatttacatgatgaccatattggatttattccagatatgcaaggctatttcaacattcaaaaatcaatcaatggtctg

SEQ ID NO: 131144 - DNA, 536 bp, Homo sapiens
aaatgatactggaataattggatgtctagatgtaaaccaatgcacctagacacagacctcataccttacacaaaaattaactcaaagttgaccatagagcagtgcgacatggaaacctttaaaatatctagaagaggacctggcgtggtggctcaagcctgtaatctcagaactttgggagaccaaggcaggaggattgcttgagctcaggaactcaagaccagcctgggcaacataatgagatctcatctctactaaaaataaaaaaaaaaattagctgagcctagtggtgcgtacctgtagtccccgctactcaggaggctgaggcaggaggattgcttgagcctaggagtttaaggctgcagtaagctatacrcatgccactgcactccagcctgggagtacagagaccctgtctcaaaaaaaattaaaataaaataaaatacttatgagaaaacacaggagaaaatctctataccattgggttttgtgatatatttctagatacaacagcaaaagcacagtccacaaaagaa

SEQ ID NO: 131145 - DNA, 554 bp, Homo sapiens
ggcaccaatttttccagaattcattagtctctttcctggataaacttaccagagcaagattaggagagtgggccaaagcccctggtattgtagctgatctcaaagccatacagatactcgtttcttccctccctcctttcattttcagatagtatcctttttgctttaggtggctaaccagtgagatgactcagaccctcttttctggttagtctgagcctatggtcaccattttaagccatggcagctttacttgtccatttgccttcaaaactggcaagggagtaccaagagattctagaggggatcatctkgatgtcaaatatgtgtcctgctatatttacagcttctagaatggtgatatttttccttgcatattgctttgttggcataagaggcctaaagtgatagtgcggcagtcaaaacttaaaggttagtagaactcttgctatatattttgatagaagcattgctcccttggaaccaggacttctagatctgcagagtgtagagttttgaaaatggcaagcacaaattctccaagttggtctctg

SEQ ID NO: 131146 - DNA, 608 bp, Homo sapiens
catgggccatttagtatcttttaattctatcacaatgtaatgacaaatcaatgctgcattataccattcatggtgtcttataattgaggaaataaggtaccaaaatagggtacttttgattagggctggagtcattaataactagggctagtggtggaggtttttctaatataaaaagtgtcatctactggtcctcatagaatagttgaacatttgtcagatggagactgatacagaaaggtattctkggaagagagaacagcatgagaagaagacccaaatagagagagtgaagttgagaggtttgaagttttataggatgtttaaaccaagaaaatgggttttacagatgaaatggggaataaatttgaaaacctaattgtctttttctatattgcctaagaattgaaatataagaaatttgtatccttcacccactttttgatggagttgtttgtttttttcttgtaaatttgttgaagttctttgtagattctggatattagccctttgtcatatggatagattgcaaacattttctcccattttgtaggttgcctgttcattatgatgatagtttcttttgctgtgcagaagctctttagtta

SEQ ID NO: 131147 - DNA, 608 bp, Homo sapiens
catgggccatttagtatcttttaattctatcacaatgtaatgacaaatcaatgctgcattataccattcatggtgtcttataattgaggaaataaggtaccaaaatagggtacttttgattagggctggagtcattaataactagggctagtggtggaggtttttctaatataaaaagtgtcatctactggtcctcatagaatagttgaacatttgtcagatggagactgatacagaaaggtattctgggaagagagaacagcatgagaagaagacccaaatagagagagtgaagttgagaggtttgaagttttataggatgtttaaaccaagaaaatgrgttttacagatgaaatggggaataaatttgaaaacctaattgtctttttctatattgcctaagaattgaaatataagaaatttgtatccttcacccactttttgatggagttgtttgtttttttcttgtaaatttgttgaagttctttgtagattctggatattagccctttgtcatatggatagattgcaaacattttctcccattttgtaggttgcctgttcattatgatgatagtttcttttgctgtgcagaagctctttagtta

SEQ ID NO: 131148 - DNA, 633 bp, Homo sapiens
ctgtcaattctggcgaatttactaatcatttaggtcaatattcctatttgctaaaatttttggtttaatttttctattgattactgagatggttatattttaacctcaaatatacatatayacacacacacacacacacacacacacacacacacacatagatttatgaattctgatttttattttgtcaattttccttttacatattttgaaatagtgataataggtacatatacatttagttttcatgtatctttttgatggattgttcttttcatcataaatcccactttatctttagtagttattctaattttaaagttaattttgctgctctttattttttttttctttcttttggtcatggtttcttggaataccttctacatcttttctctttctattcaagttgcttttaaaacagtgttcataaaactatttgcctttcaaaaggatcatcatatatttaacctttaatgcaattgctgatatatttgggtttatatttgccttattttcattacacttgttttatggttttcttcttctttcttttctttatttaagtactgaagcattttaaaaattattcaatttttcttttctattagcctgttatatattatgagtttt

SEQ ID NO: 131149 - DNA, 633 bp, Homo sapiens
ctgtcaattctggcgaatttactaatcatttaggtcaatattcctatttgctaaaatttttggtttaatttttctattgattactgagatggttatattttaacctcaaatatacatatacayacacacacacacacacacacacacacacacacacatagatttatgaattctgatttttattttgtcaattttccttttacatattttgaaatagtgataataggtacatatacatttagttttcatgtatctttttgatggattgttcttttcatcataaatcccactttatctttagtagttattctaattttaaagttaattttgctgctctttattttttttttctttcttttggtcatggtttcttggaataccttctacatcttttctctttctattcaagttgcttttaaaacagtgttcataaaactatttgcctttcaaaaggatcatcatatatttaacctttaatgcaattgctgatatatttgggtttatatttgccttattttcattacacttgttttatggttttcttcttctttcttttctttatttaagtactgaagcattttaaaaattattcaatttttcttttctattagcctgttatatattatgagtttt

SEQ ID NO: 131150 - DNA, 509 bp, Homo sapiens
taccattatctacacatttctttttttacaaggaattctgtgtttttcttacggatttcaattattgtttggtgtcacttactttcagtctgtaaaatttcctttagtatttgttgtaaggcagatgtctagttcattttgtgttgctataccagaatactacagaccagataatttataaagaatagaaattcatttggctyatgactccggaggctgagaagtccaagagcttgacaccaaaatttggtgagggcctttgtgctgtatcatctcatggcaaaaggcagaaagtgaagagagtgctggagagcaaaaggttgttgaacttgcttttatagcaacctattctcacagtaaggaactcactcctgtgatgatgacattgatccattcgtaggggcacagcccttatggaataatcaccttttaatagccatgatgatagtaatacatttcaaaataagtttgggaggaaacattcaaaccattgcagcaagtctcctatt

SEQ ID NO: 131151 - DNA, 350 bp, Homo sapiens
caggtttttattctggtcattgtagttttcacctccaaaattccctatatatacatttttaaaatcctgttcctttgtttgtggttcctttaatttaatttaatttaattttttattatactttaagttctgggatacatgtgcagagcgtgcaggtttgttacataggtatacatgtgccatggtggtttgctgcacccatcaacccattatctacattaggtatttctcctaatgctatccctcgccttatccccaacccccgagaggcccccttatccctccccttacccctaacccccttcctgtgtccmtgtgttctcattgttctactcccacttatgagtgaa

SEQ ID NO: 131152 - DNA, 603 bp, Homo sapiens
gtacttagatattccaaaaggcagtgtgttcaaaatcaaattcagcctactccccagcctgctcctcaacagactcccccctctccatgactgctgccaccttccactctctggcccaagctcttggagcagcataccgggttctccctctagacatctcccatctctcaccatcccacccattatggcttccgtgtctatcctcattacctctttccaaaggagagccaatatctgcccccaaccaggtttgctgcagtagctaaccttggcccatgctctccaatcctctctccacattgctcccagtctgtttctataatataaatctgactatatctaaaatcacctgatggctaccaactgctcttggcaatgcctacctccttacccttatttctggacaactttctgttccaagaaatgcccttattccttttcaagggactaaatataatacccttctccttgatrttctcacctctattcctatggacacttcatatttccacttacatttcatttcttctgagagacctccccacctactctcaggctcaattaggggctattcccagatgttgtcacaaagatgcatattta

SEQ ID NO: 131153 - DNA, 599 bp, Homo sapiens
tttattacacatgtacatgacaattgaccacctcttattcttttaaattttaccaatttttgtctttctgtgttttattctggctaytttatttatttatttttacctaccttctggtatatcaattttttttctggtttttttacttatgcttttatcctttcagtcttttatttcacattatttattctctgtttttgaaattttttttagtttccagttctcagtcaaaactgtccatttttaatcttttttgcatcaatttctttaaatgtaaatgttatttaaatgtctgtacttcaagacactcatgactgaagactctgtgtctgtttatattgtccaatgtcatcaatgttgcatagtctgctatgtaccttgttattttataatgtgtgctaggcattttgtctgaaaaaatattttataaatgatttgaactccaggaagatgttatctttctttaggaaagacttacatttggcctatgaggactaatactatagaatgccttgaagcattggcactctgtgatcacctcaatctaatttcagggattgggagtattctattctgagctgaaatatctataaaggctg

SEQ ID NO: 131154 - DNA, 500 bp, Homo sapiens
taactctttgagtttgctagtgtcacagtgttatyaggtttgagatgacccccaatgaagatgtgaccaaagctttagatcacagcagtcaactctcttttgatacctggaaggccttcctaagaaggatgggtgcaaataagcccagactgaagactataaaaaatacctaagtcttcaatgcccagacatcaacagacattcacaagcatcaatattgtccatgaaaccatgaccttatcaaatcaatattgtctatgaaaccatgacctcatcaaatgaactaaggaaccactgacaatcccagagtgacagagatgtgtgacctacagacagagaatttaaaatagctgttttgacaaagctcaacaaaattcaagataacacagagaaggaattaagaatcctatcagataaattacaaagagattgaaataattttaaaaaaatcaagcagatattctggagctgaaaaattgaactgacatactgaagaattc

SEQ ID NO: 131155 - DNA, 500 bp, Homo sapiens
taactctttgagtttgctagtgtcacagtgttattaggtttgagatgacccccaatgaagatgtgaccaaagctttagatcacagcagtcaactctcttttgatacctggaaggccttcctaagaakgatgggtgcaaataagcccagactgaagactataaaaaatacctaagtcttcaatgcccagacatcaacagacattcacaagcatcaatattgtccatgaaaccatgaccttatcaaatcaatattgtctatgaaaccatgacctcatcaaatgaactaaggaaccactgacaatcccagagtgacagagatgtgtgacctacagacagagaatttaaaatagctgttttgacaaagctcaacaaaattcaagataacacagagaaggaattaagaatcctatcagataaattacaaagagattgaaataattttaaaaaaatcaagcagatattctggagctgaaaaattgaactgacatactgaagaattc

SEQ ID NO: 131156 - DNA, 515 bp, Homo sapiens
tggctgtaatttcctacctgccttcacctgcatagctcargactgaatctgggagttatttggggctggttttccctaaatgcacaagcccttccgagatgccgtctgcccaagccaagcctggttccctaggctctgacagggcatctgctggcccaggctttctcagccctaaagaaagcagcaggatgagggagaggtttgcttttgcctctagggtgtctggaaggacctcgatgtaggccctggctcaaagactaggtcgttcagacaaagaggacgcagtcgccactggcaagggccagacatcagaccctggggatgctaatagctgtggatatacctttgtcttctacctcctggtgcttgcagaaagtagagccagggagagcacgtgggaagaaaaggctgcctcacaatccaagccccacgtctctctcgctcctttcttgtgggaccacaggccagccccatccctttcagggtcccagatgccccctcagcaaaataagaag

SEQ ID NO: 131157 - DNA, 544 bp, Homo sapiens
ctctgttctccattttgatttgatattttttttgctttatgctatgtacttaagaaaaggycatctcaaagccttttgggaggaagtgggtctaaatatgtaaacataattaaatcataaacacaaaccacttaaaaaaagacattttggagaaatgtgaatagtttaaaaatggggcagatgctcggcttcctgacaggtacctgagtttttatagcagttttatttgtgatggcccaaagctggaaacaactaaaatgtcctacaatagatgaatggttaaacaaactggtacgtccatactatggaacactacccagaaataaaatggaatgaacagttgattccttttggccaagtctcaagggcattatgttgagtgaaaaaaagccaatctcaaaagggcacatactgtccgacttcatttatgtaacaccctcaaaatgatggacatttcaatgtggaaaacagattgggccaggagctgggacgggtgggaagagagggggtgagtgtgtctgtcaggagagcagtggggagatct

SEQ ID NO: 131158 - DNA, 413 bp, Homo sapiens
gttatgctaccacagaggcacaaccacgtgaggaggcagcagggaaggtggctatctgcaagccaaggagagaggcaccaggaggaactaatccagccagcatcttgatcttggacttctatcctccagaactgtgagaaaatayatttctgtagtttaagccactcggtgtgtggtattttgtgatggtagctgagcaagctattataggagctatgattagcattcctattgtgtagctaaccaacacaagactgaaaaaggtgaggtcacttgcccagggtcaccagaaggtggaattccaacccaggtctgtctggttcccaagtttctgatccttgctctaatattggactgcctcaaagaaacatgagataatggttctgaatgcagctcccaatttgtgtgggctt

SEQ ID NO: 131159 - DNA, 413 bp, Homo sapiens
gttatgctaccacagaggcacaaccacgtgaggaggcagcagggaaggtggctatctgcaagccaaggagagaggcaccaggaggaactaatccagccagcatcttgatcttggacttctatcctccagaactgtgagaaaatatatttctgtagtttaagccactcggtgtgtggtattttgtgatggtagctgagcaagctattataggagctatgattagcattcctattgtgtagctaaccaacacaagactgaaaaaggtgaggtcacttgcccagggtcaccagaaggtggaattcmaacccaggtctgtctggttcccaagtttctgatccttgctctaatattggactgcctcaaagaaacatgagataatggttctgaatgcagctcccaatttgtgtgggctt

SEQ ID NO: 131160 - DNA, 492 bp, Homo sapiens
ccatgataccatgataacagcgccagtgacttggggctaagttggttggccacattgcatatagttgtcgggtgcctggggattaactttccaagtcacttgcaactccactgcccaagtgaatgacagcaggtttagcctcagtggcattttttttttttaaagctgtcaaatacctcgtataactgaatggagaataaataagtcctccatctggctgtgagtacaactgcttatgcagctataggtttttttttttttttttttttgagacggagtctcactttgtcagcaggctggagtgmagtggcatgatctcagcttacttcaacctctgcctcctgggttcaagcgattctcctgcctcagcctctgagtagctgggactacatgcacgcaccaccacaccctgctaatttttgtgtttttagtagagacagggtttcaccatgttggccaggatggtctctatctcttgacctcgtcatccgc

SEQ ID NO: 131161 - DNA, 578 bp, Homo sapiens
tgcccctgcctcttacaagctgagcaaccctattcaatcattctgccttagtttcccacctatgaaatgaggatgatcagagcacctgtctcaaggtgttgtttgaaaagcaaatagaataaagcttgtgcaacacttagcacaaaatgagatctcaatacttgctgttgacatcctcatcattattagttttgttattatggctgaaaggttagtagatgaatgtttccttgaccaggcaacactggacccagagaggtcatgtgattatggtacaaagagccccaggtttgaagtcagggggccttggctcaaatgcttgctctgtaacttccaggaaaaccacagcacacacaaatttaaattgagcaaattcaactatgtgcatttctcacaaagaagaaagagaaagtcaacaactgaaatggtcacytgccacatcactcagaaagcaaatacctgcagtgagcgtggaaggggagactcgaacctgctgatccctcagcttctgcaggtgtcccgcgtgcatgcatctcagcaggctgagtattaagaaacttgacctctaaatgtaagtc

SEQ ID NO: 131162 - DNA, 617 bp, Homo sapiens
ccacaactttctttctccttgtaatcttcacacaccagggagcaaaacttgaatacttaggaaggacaactacatttgttcttggtttgcaaatatttttaccagrtcctcaaatacaaggcctttgagataggaacaggtcactgtgacccaaagcagaaattgttaagcaggctgtgacgggcagtgagaaatcctggttcctccttcctctgaggacaagctgtttcagtgaagaatacacacggtccaatctaactacctgggctggaatcccagctcataatctaaaagtcaaattcatagaagcagagtcgaatgtaggttaccaggggctgagggtgaaaaggggagatgttggtcaaaggatacaaaatttaaattagacaggaggaatgagctcaaaatatcaattgtacaacacggtggctatagttaataacaatgtaatgtctacttgaaaacccctgagggtaaattttaagggtcctcaccacaaaatatgataagtataggagattctatatgtgctaatcagctcgatttagccattcctcaatgtacacatatttcgaaatatcatgttgtacactaaaaatacatacaatttttgtcaa

SEQ ID NO: 131163 - DNA, 617 bp, Homo sapiens
ccacaactttctttctccttgtaatcttcacacaccagggagcaaaacttgaatacttaggaaggacaactacatttgttcttggtttgcaaatatttttaccagatcctcaaatacaaggcctttgagataggaacaggtcactgtgacccaaagcagaaattgttaagcaggctgtgacgggcagtgagaaatcctggttcctccttcctctgaggacaagctgtttcagtgaagaatacacackgtccaatctaactacctgggctggaatcccagctcataatctaaaagtcaaattcatagaagcagagtcgaatgtaggttaccaggggctgagggtgaaaaggggagatgttggtcaaaggatacaaaatttaaattagacaggaggaatgagctcaaaatatcaattgtacaacacggtggctatagttaataacaatgtaatgtctacttgaaaacccctgagggtaaattttaagggtcctcaccacaaaatatgataagtataggagattctatatgtgctaatcagctcgatttagccattcctcaatgtacacatatttcgaaatatcatgttgtacactaaaaatacatacaatttttgtcaa

SEQ ID NO: 131164 - DNA, 617 bp, Homo sapiens
ccacaactttctttctccttgtaatcttcacacaccagggagcaaaacttgaatacttaggaaggacaactacatttgttcttggtttgcaaatatttttaccagatcctcaaatacaaggcctttgagataggaacaggtcactgtgacccaaagcagaaattgttaagcaggctgtgacgggcagtgagaaatcctggttcctccttcctctgaggacaagctgtttcagtgaagaatacacacggtccaatctaactacctgggctggaatcccagctcataatctaaaagtcaaattcatagaagcagagtcgaatgtaggttaccaggggctgagggtgaaaaggggagatgttggtcaaaggatacaaaatttaaattagacaggaggaatgagctcaaaatatcaattgtacaacacggtggctatagttaataacaatgtaatgtctacttgaaaacccctgagggtaaattttaagggycctcaccacaaaatatgataagtataggagattctatatgtgctaatcagctcgatttagccattcctcaatgtacacatatttcgaaatatcatgttgtacactaaaaatacatacaatttttgtcaa

SEQ ID NO: 131165 - DNA, 617 bp, Homo sapiens
ccacaactttctttctccttgtaatcttcacacaccagggagcaaaacttgaatacttaggaaggacaactacatttgttcttggtttgcaaatatttttaccagatcctcaaatacaaggcctttgagataggaacaggtcactgtgacccaaagcagaaattgttaagcaggctgtgacgggcagtgagaaatcctggttcctccttcctctgaggacaagctgtttcagtgaagaatacacacggtccaatctaactacctgggctggaatcccagctcataatctaaaagtcaaattcatagaagcagagtcgaatgtaggttaccaggggctgagggtgaaaaggggagatgttggtcaaaggatacaaaatttaaattagacaggaggaatgagctcaaaatatcaattgtacaacacggtggctatagttaataacaatgtaatgtctacttgaaaacccctgagggtaaattttaagggtcctcaccacaaaatatgataagtataggagattctatatgtgctaatyagctcgatttagccattcctcaatgtacacatatttcgaaatatcatgttgtacactaaaaatacatacaatttttgtcaa

SEQ ID NO: 131166 - DNA, 375 bp, Homo sapiens
tagcatgacattgtttttgacaggattactccatgctttattaaaagttatgaatcaatttaccattgaaaatgacagcagggagcagaacaagatggcagaatataagtgtacactttccaccttcccagctagaagatcaaattttaacaactatctgcacacagaaaaatatcatcacaagaacaaaaaatcaggtgagcaattacrgtatgtgtttttaacttcttatagtggaaagagacattgataggcggcaggggagacagtcttgaatcattgatgccacccctcccccattccccagcagtggtgttgcagcacagtgagagaatctgtgcacttggaaagggagagcacagagactggaggact

SEQ ID NO: 131167 - DNA, 409 bp, Homo sapiens
  misc_feature (1)...(409): n = A,T,C or G
ttcagccataaaaagaatgagattctgtcatttgcacagcatggatggaactggagttcattatgtaagctaaattagccagatacagaaagacaaacatcacngtagttgtcacttatttgnnntgggatctaaaaattaagacaattgaagtcatggaacatagagagtagaaggaaatggttaccagaggctgtgatgngcgtagtgtgaaggtgaagaaggggtggctgtgggggagtggggtgaaatggggatggttaatgagtaaamcaaaaaaaaaaaaaatagaaagaatgaataagacctagtatttgatagaacaacaggcgggggacaataattttaaaatgttcaataaaaattgtacattttaaagtaactaaaagaatataattggattgtttgt

SEQ ID NO: 131168 - DNA, 533 bp, Homo sapiens
tgaaattcagcatcaccttttaaacttgggcgtttggtttaaatacgagtatatattttctttattaaattaaaatgcaccctgtgtgatacaggaagaatgaggtggtagcctttgctgaaggaacaagtagaactaaaggaagcttaaaacaatctgcctttaccctacctgctgtgtaatcaggtatgttgaaaggtaatgaagcagcttaattattatcttttaaatatctgtttaaaatactattatttctttgaaattgctctgattaaacatttctttgatctcagtaaataaggaggtttgtaaaattccctttggggcaggagcctacaaattcctctatcaactggcaratgattgtgcgaaaggagcagagagaagagtctgtctcaatatgaagagataaaatttccatagttatctattagtggaaatggacatctctgaaaggagctctttgtcctcagaggagttcaaatggaagacatgtgtgctctgcagggaacactggagaaaagaaaggtaat

SEQ ID NO: 131169 - DNA, 537 bp, Homo sapiens
ttctctgcagccttgtaccagggccagggtgtagggctgtatttgtaccctcagtgaccatgctggctggaagctttttatagagcagagtacacccagctatgatgtggcagttgaggattacaggtgggtcccagcaggaagagatgatatgccagacagagaggaagagtgagaaaatgagtatacactgggcactcaaacttgtttcagaccttatgggcccttgtagagtgtggtatatacatggttggtaggagatatgagaggcttatgacatgtttgtttgagctaaagataattctaaaccaaagtttttctcaaaaatgaggaaatagttccatcattttattttgtagcagaatgatttggaccaaaagccattgttccataagcaaatratttttagtacattcatttatgtacctgttattaaacaatttgaacaacatcaatgaatatgacacggttctagtctcggggatactttggaaaataagttaaacattctttttgccttctctgagcttatattcc

SEQ ID NO: 131170 - DNA, 426 bp, Homo sapiens
gatcaaaggtgactctccctacaacctgcccactccaccaagtctcagatggaaagggagagtgccttggattggctgcggaccaagcatggccatcccttcatctgcatagggcgccaattcaccgcaggctttaattagccatggaccaaatccttcatccagataaggrgtaagaaatagaaacctcaaaaagagtacttaaaatccagaaaattttgtaactgggcccttgagccacttgcttgcgtccactcccactctgtggagtgctttctcactttaataaatccctgcttttgctgccttgttcctgtgtttcgttcctttattactttgtgcattttgttcaattgtttattcaaaacgccaagaacctgaacaacttacactcaaggccctctttccagtaacacctgtgtaaaa

SEQ ID NO: 131171 - DNA, 472 bp, Homo sapiens
ttgttactaggggtgattcctccgcctgcctatcaacttcagggctgtgtcctacatggggtgatcatgtctcatgacactccctacccagaattatgggaacttttggacacataagaatttatccaatctctttatgtttatgggtaagaaaatcaaagcagagagagtgaggaagtaacgtgtcaaagatcatctcagagcctgaacctgaagtaataacttcctgacctaaaatcctaaaatcaattattgccaattttctgttcagtttcttttacttatgctacttttcttatacttttccttttggcttggtaaaaaccaaatgaaaagtaagcccaatcttgaaagatgccttttatgacsccaatgatagtcatataaacctgtggaaatttgtctgaggaagtcagcagaaagaactaaagaaaacagtttgatttgttttatttttcctgagagcaaaagg

SEQ ID NO: 131172 - DNA, 352 bp, Homo sapiens
atttgggccttgtacattattcagactgttaaaaaaaaaaatccatgttgagtctaaaagtatctggaccagctgtctgtatagattaaataatccagatggcttcatgaaacactatagcagaaaagaaagtagtttcaccatagaacgagtcaatccagaaagcacaggggacaatagatttctttacctcgtataacccaatttcttctcttcttagctcggctggcttaaatgtagagtgctgtcgccaaatcttcagtctacytgggctatttaagtagagtcacaatgtttcctttttctagaaaagattaaaaaataaacaaccaaaatttggtggtagagaatg

SEQ ID NO: 131173 - DNA, 544 bp, Homo sapiens
tgaattaactcatgtaggactgacatttataaacttgtataatggaggtgaaagggggcaaattgcaaacatgattcccatacaatcaattatttctgtgatgaaaacaccctctcctagatgatctatgtcatggacaagttcccttagttctggggaggctgggctggttatttctctgctgctcaaaaaacagctctgagcctctggcctgctggtggtgagtcaccactgtcagctttgygcacaaaagttcaacttttcctttcccatgaccatatcttaatgtgcagaagaacattatctaaatgtaaatgctctattaaaacagagacaaaactgcttcaatattgcaggggaaggaaacagaattcttttaaacaaatagaaaagcaaaactcaataaagaaaagtaattcatagacacagaataatcagcagtctactatttcatgaacttactgttttgggcctttcttttttttaatgtaaaattagtcaaagtttaataacaagggacaaaacatgcttttctgagcactag

SEQ ID NO: 131174 - DNA, 469 bp, Homo sapiens
taaaagttaaaagttaattttgtgtcaaactcttatagaaaataaacaagaaagaaagaaaaattaaaataaataaaaactgtttttaaatgctctctttaataatggagtttagtagaaacactctttatatagatggttcccgacttacaatggctcaacttatgatttttctactgtaaaatggtgtaaaagcaataagatttcagtagatttcagattttggactttgatcttttcccaggctagcgatgtaggtacagtactctagcaatgcttcacagyatcgtgagtatgagagatattcaccatgagaggacatgagatgttcaacactttcttataaaataggctttgtgtgagatggttttgctcagctgtaggctaatggaagcgttctgtaggctaagctatgatgctcggtactgtaggtgtatggaacgcattttacttaacaatatttccaatc

SEQ ID NO: 131175 - DNA, 565 bp, Homo sapiens
ctaagtatctgtgtgagtccgttttgcattactataaaggaatacgcgagactgggtactttataaagaaacgagttttatttggctcacagttcgacctgctgtacaggaagcatggagcaggcattgcttctgatgaggcctcaggaagcttccactcataacaaaaggtgaagrggaaacaggtgtatcacatggcaaggagggggcagtggagcgggttccagatactttttttttttttttttttgtgaggcagagtcttgctctgtcgcccaggctggagtgcagtggtgtgatctcagctcactacaacctccgcctcccaggttcaagcgattcttgtgcctcagcctcccaagtagctgagattacaggtgtgcaccaccatacctggctaatttttgtatttttagcagagacggggtttcaccatgttggccaggctggtcttgaactcctgccctgaggggatctgcctgccttggcctcccaaagtggtgggattacaggcatgagccaccgcgcctgacctctctttttaaccagatctctcatgaactca

SEQ ID NO: 131176 - DNA, 565 bp, Homo sapiens
ctaagtatctgtgtgagtccgttttgcattactataaaggaatacgcgagactgggtactttataaagaaacgagttttatttggctcacagttcgacctgctgtacaggaagcatggagcaggcattgcttctgatgaggcctcaggaagcttccactcataacaaaaggtgaaggggaaacaggtgtatcacatggcaaggagggggcrgtggagcgggttccagatactttttttttttttttttttgtgaggcagagtcttgctctgtcgcccaggctggagtgcagtggtgtgatctcagctcactacaacctccgcctcccaggttcaagcgattcttgtgcctcagcctcccaagtagctgagattacaggtgtgcaccaccatacctggctaatttttgtatttttagcagagacggggtttcaccatgttggccaggctggtcttgaactcctgccctgaggggatctgcctgccttggcctcccaaagtggtgggattacaggcatgagccaccgcgcctgacctctctttttaaccagatctctcatgaactca

SEQ ID NO: 131177 - DNA, 593 bp, Homo sapiens
tactgcagtaaggaatagtgaaagaggcaaactggtgtgctcatggcccatgcaaagggctggcagacatttcttagctaagttgatttttatctcgcaggatatggaaactatgttgttggaccttccaatattgtaaggaaaagtcacacatctgaatttttatgttacatcttctaatttttaagtattggccatctttaaaaatattctgggctgggcgtggtggctcgcacctgtaatcccagcactttgggagcccgaggtgggtggatcatgaggtcaggagttccaaaccagcctacccaacatagtgaaactctgtctctactaaaaatacaaaagttagccaggcatggtggcgcacacctgtagtaccagttacttgggaggctgaggcaggagaatcgcttgaacctgggaggcggaggctgtgttgagcccagatcgtgccactgcactccagcctggacaacagagcgagactcygtctcaaaaaaataaaaaataaaaaaaaatattttggtggccaaatgtaactgtggccaacattttaccaggggctattaatttgcaatctctaataatatagt

SEQ ID NO: 131178 - DNA, 653 bp, Homo sapiens
tgtttgggtacttaatgtgagtattttattgcagaggttttcaatcagtgtttccagaagccttagagtaatagttctgaaaccatagggcatgcatcagatcacttggagagcttattaaaatacagattgctaggctccaccctcagcattcctgattcagtgaggacaatttgaatttccaacaaattctcaggagatccagatgtttctagtccaaggatccagaggttctagacagaaggaagggaggtggtgcaatgggcctcttggtcttgttacatgacttcttatcttatagttgtatttggggattctagactagattttattaaataaaaagattatttttwaaaaagcttgaatactgctgttttgttgcctttgcttttgtttcatagaaatcaattgaaggtgaaaataaataaaaatgctaatactagtgatatggggagatatcatcagtttaaaacaaatgaaatactgaatttatttagtatatgaaaagagagccttattttcttcccttgggacactctttatgatgaaaaaacgtaaaggaaatacaatgtacgctggaaataaattactaaagactgtgtctaaatgaggaggtgcatttgggaattttattgtttttaggtttgcgggtg

SEQ ID NO: 131179 - DNA, 517 bp, Homo sapiens
agaagcacaaacgactggccattaactttccagtcactgtgcagagggctgggkgggaacttcacctctctctggtctctcccacacttgccagagctaagcaccacctggaggacgtgctagaaatactgattcccaggtaccaccctaaatcttcagaatcggaacatccaggaatgggctagtaacctgtttggggttagaaataagctttaggacatactcttttgataagaaaattcatgtgggtgatcctatgaaaaaatccagcaatgacatctctcaaatccctgtatgttaaaatgtaaatatatctgaaaagcacttcaaatacaaatgtcttaaaggtttcacagtccaattaaaagcattataaaattttaaaagaaatattataaaatgaaagagcacaccatttcatttcctctgataaattataaaccacttccctttgccttaatatcaactcacaaaagtatcctctctcacaaacaccttctacactgaatacaatgaa

SEQ ID NO: 131180 - DNA, 517 bp, Homo sapiens
agaagcacaaacgactggccattaactttccagtcactgtgcagagggctgggtgggaacttcacctctctctggtstctcccacacttgccagagctaagcaccacctggaggacgtgctagaaatactgattcccaggtaccaccctaaatcttcagaatcggaacatccaggaatgggctagtaacctgtttggggttagaaataagctttaggacatactcttttgataagaaaattcatgtgggtgatcctatgaaaaaatccagcaatgacatctctcaaatccctgtatgttaaaatgtaaatatatctgaaaagcacttcaaatacaaatgtcttaaaggtttcacagtccaattaaaagcattataaaattttaaaagaaatattataaaatgaaagagcacaccatttcatttcctctgataaattataaaccacttccctttgccttaatatcaactcacaaaagtatcctctctcacaaacaccttctacactgaatacaatgaa

SEQ ID NO: 131181 - DNA, 509 bp, Homo sapiens
gaaataaatgcgtatatccacaaaaaagacttgtataagaagatccttwgcattttactgcatgtttaaaattattgttttctctatgttatgcaagcttcattatatggttcatgcaaaatacaaaaagtcacaaactatacaaaactaaataaaagaagaagttagtacattataaagttgtatgaggattaggtggaatcatggatgtaaaatgcttaatacatagctttcaataaatgatagttattattttgtcagtatgatcatcaactctgaagggacaaatataaatattttcaaattttttatgatggccaaaatcactgtaaatactatatttaaaattttgttttctgttaataattggccccaaactgactatacttgagaataatatataatacatacacacacacatgcatacctctgattcattcattcattctccatctgtttatatatattcattcattatttccaaaatttgtagaatcaaaatctcacgg

SEQ ID NO: 131182 - DNA, 469 bp, Homo sapiens
gtctctgctatttgtctctatatattcagtaaatttctatgtcccaagtggctgtgtatgtgtgcatcaatgtggggttcttagagcagagtgaggcttagatcatctgaaccaactataaaaacaaggcttggaaattacacatggcccaaaaccaggtaaaatgtaggcaattgtgrtgtctggaggtttagtctggtgtgtgaaaactggcaatgaattttttcagtttttatctccattgtgacacagaaagattagtaggccatgtagaaccacttaatctggttccaccaataaagaaaaggaaagtagtctttagtgaataagagcgaatgtaagttagatagtacagcagggtctccagctaccttagaggttcagagaagggcaatgtttgggaaaggatcttagagaagagtaatcaggtgaaactacagagttacagagtcaaggcaagtggacaaga

SEQ ID NO: 131183 - DNA, 469 bp, Homo sapiens
gtctctgctatttgtctctatatattcagtaaatttctatgtcccaagtggctgtgtatgtgtgcatcaatgtggggttcttagagcagagtgaggcttagatcatctgaaccaactataaaaacaaggcttggaaattacacatggcccaaaaccaggtaaaatgtaggcaattgtgatgtctggaggtttagtctggtgtgtgaaaactggcaatgaattttttcagtwtttatctccattgtgacacagaaagattagtaggccatgtagaaccacttaatctggttccaccaataaagaaaaggaaagtagtctttagtgaataagagcgaatgtaagttagatagtacagcagggtctccagctaccttagaggttcagagaagggcaatgtttgggaaaggatcttagagaagagtaatcaggtgaaactacagagttacagagtcaaggcaagtggacaaga

SEQ ID NO: 131184 - DNA, 469 bp, Homo sapiens
gtctctgctatttgtctctatatattcagtaaatttctatgtcccaagtggctgtgtatgtgtgcatcaatgtggggttcttagagcagagtgaggcttagatcatctgaaccaactataaaaacaaggcttggaaattacacatggcccaaaaccaggtaaaatgtaggcaattgtgatgtctggaggtttagtctggtgtgtgaaaactggcaatgaattttttcagtttttatctccattgtgacacagaaagattagtaggccatgtagaaccacttaatctggttccaccaataaagaaaaggaaagtagtcttyagtgaataagagcgaatgtaagttagatagtacagcagggtctccagctaccttagaggttcagagaagggcaatgtttgggaaaggatcttagagaagagtaatcaggtgaaactacagagttacagagtcaaggcaagtggacaaga

SEQ ID NO: 131185 - DNA, 551 bp, Homo sapiens
aatagtaacagtaaattactagaaggcaacttaatatattaatatataatgtatccaaatacagaagttgagaaagttgatgacggatatcattctttttgggttatagcttaacttcattgctctgatatttgcaagctaagtgcataccaaagaagaatgataacgttaggtatattcatataaaataaatatcatgtctcaaatgtgcacaggctacatttttaagaataccttctgctgatgtctctttgttcccataacccaaaataagtgtgtgataatcaaataccaccaacaacggtacttggaaataaaatatagtagttatctcctaaatgttaagaggaagattgtccttaagccataaaacagtccttattttgaatgtgaatggaaattggatacaatgtataaccatttgaagcatgcatctatgatggtattgtcgggggcagagggccaagattaacttctatcctcttagaattttcagctgggtctgtgaattaaawtgtcatgagacagaataccaggagaaaagcatacac

SEQ ID NO: 131186 - DNA, 635 bp, Homo sapiens
cattacacattaagatggttatgcaaagcagagaatatgaaaaaccactggtcttacatttctacttttctggtcacaaatgtgcaatgattcctcaagcaacattttggaaatacctcactgctgaatgcagtaaaatgatcagcactcctctggtcatgaataatttatagacaaagtgccatagaccaaatatgttgcatgatatgattcctagagcctttaaaaacttgacctatggacttattattactgcatttttttaaccatatctttgtgggagaacrgttactatgatgaacatgaaatctgagactatttaaatgatactacgaaatgctccataatgtttaagtacaacatggaacaatttctgcatttctccaagtgtgatgaccaaccttgagattcatgaaaacatcagacttctggtttaaatacagatgttttctaagcatgggaatattaactctgtaactatggatgacatattatgattttaaaagttgttgactttgtccttatatctggctctcattggtatttgcttttaatcatctattagtctcctaaaataaataattcatatttggtgtaacaaatttcaaactaattggaaatatctgattgccttt

SEQ ID NO: 131187 - DNA, 583 bp, Homo sapiens
aaggtggagttgaaatcattgcttgagatctgacatcaaggaggagggagcagggaagggagtgaagggagacaaaaagagggagagagagagagagaggaataaaatgaaatattgtcctaaaccagatataagagattcaaatgtttcytgatctttggaatgtgtgaagtgtatttgtatcagaatggaaatgcctttcaatgtgagctttctgcattggaaagaaggaaattggctttccattcctgcttcagccttttatcatcaaagatgctgctattttggtatctgaaatgtgatgacaacatatgaccttcagagattctgagtggaatccagtgggtggtatatgcactccacacctgtgtttctctcagacacaattacttagactcaggataactttatatcagctgtgttaatgatgttgtatcatcaagcgataacatgatcacagcttttgacactgattttcttaggtatggcatcagttttctcataaacttattaccttcctcttttcttccattagcttcattttattttgactgtgaggttaattttcattaagcctgagtga

SEQ ID NO: 131188 - DNA, 610 bp, Homo sapiens
cagtgtggaagccccaaaaggtgacagttatacactgcaggggacaccagtgagcttccactatggttgctttagggaactcctgggctgactcakatgcttggaaagctgcatccaccctccaccaggtgtcagtaacagccccccttctctcacaggcccctgaccttgtacctacttattctaagaaaaggaatttttccagacaaaagggggacaaataatagaagaggggtagatccagttaccagatggaaggatagccgtgccacaactgtaggagctgcagttgtactggctgtgcatgagaccacccacctaggccaaaagtcacttaaaaagttgttacaccagtacttctacatctcacatttatcagcccttgccaaaatggtggcacagtgatgtattacctgctggcagcacaatgcgaggcagggtccagcctggcatacaagcttatggagcagccccctttaaagacctccaggtagacttcacagaaatgccaaagtgtagtaacaagtatttactagttattgtgtgtacctactctgggtgggtggaggcttatccaacacagagaaagctcgtgaagtaatctgtgtgc

SEQ ID NO: 131189 - DNA, 610 bp, Homo sapiens
cagtgtggaagccccaaaaggtgacagttatacactgcaggggacaccagtgagcttccactatggttgctttagggaactcctgggctgactcagatgcttggaaagctgcatccaccctccaccaggtgtcagtaacagccccccttctctcacaggcccctgaccttgtacctacttattctaagaaaaggaatttttccagacaaaagggggacaaataatagaaraggggtagatccagttaccagatggaaggatagccgtgccacaactgtaggagctgcagttgtactggctgtgcatgagaccacccacctaggccaaaagtcacttaaaaagttgttacaccagtacttctacatctcacatttatcagcccttgccaaaatggtggcacagtgatgtattacctgctggcagcacaatgcgaggcagggtccagcctggcatacaagcttatggagcagccccctttaaagacctccaggtagacttcacagaaatgccaaagtgtagtaacaagtatttactagttattgtgtgtacctactctgggtgggtggaggcttatccaacacagagaaagctcgtgaagtaatctgtgtgc

SEQ ID NO: 131190 - DNA, 610 bp, Homo sapiens
cagtgtggaagccccaaaaggtgacagttatacactgcaggggacaccagtgagcttccactatggttgctttagggaactcctgggctgactcagatgcttggaaagctgcatccaccctccaccaggtgtcagtaacagccccccttctctcacaggcccctgaccttgtacctacttattctaagaaaaggaatttttccagacaaaagggggacaaataatagaagaggggtagatccagttaccagatggaaggatagccrtgccacaactgtaggagctgcagttgtactggctgtgcatgagaccacccacctaggccaaaagtcacttaaaaagttgttacaccagtacttctacatctcacatttatcagcccttgccaaaatggtggcacagtgatgtattacctgctggcagcacaatgcgaggcagggtccagcctggcatacaagcttatggagcagccccctttaaagacctccaggtagacttcacagaaatgccaaagtgtagtaacaagtatttactagttattgtgtgtacctactctgggtgggtggaggcttatccaacacagagaaagctcgtgaagtaatctgtgtgc

SEQ ID NO: 131191 - DNA, 589 bp, Homo sapiens
gccccaaaaggtgacagttatacactgcaggggacaccagtgagcttccactatggttgctttagggaactcctgggctgactcagatgcttggaaagctgcatccaccctccaccaggtgtcagtaacagccccccttctctcacaggcccctgaccttgtacctacttattctaagaaaaggaatttttccagacaaaagggggacaaataatagaagaggggtagatccagttaccagatggaaggatagccgtgccacaactgtaggagctgcagttgtactggctgtgcatgagaccacccacctaggccaaaagtcacttaaaaagttgttacaccagtacttctacatctcacatttatcagcccttgccaaaatrgtggcacagtgatgtattacctgctggcagcacaatgcgaggcagggtccagcctggcatacaagcttatggagcagccccctttaaagacctccaggtagacttcacagaaatgccaaagtgtagtaacaagtatttactagttattgtgtgtacctactctgggtgggtggaggcttatccaacacagagaaagctcgtgaagt

SEQ ID NO: 131192 - DNA, 545 bp, Homo sapiens
tcatagatatatatttgtatttcaagtaaatgaggaaaaaggaaccaaactaaaatgcatttttgtttctctttgtctactttatgtaccttattttactacaaatctggagacctagaattcactacccaaagaatttgctatgacctcattcttaccagattaagctaagaatggtaagagcatgtgaaaattcaataaagatagtgatcatttctttaattatgtaaacatttgaggattttcttttacatttgggatcaacaagctgataatatttgtgtactattttttaaaaataagtatttgtgtgtgtatgcgtttaattaattttacttataaaatgtttctatcagtcccttagctcaggggttccccaaccatcaggccrcagactggtaccctccatggtctgttataaaccaggccacacagcaggagatgagtggtgggcgagccagcattaccacctaagctcctccttctgtcagattagatcagcagcagcatgagattctcaatagtagcttctaccctgtattcca

SEQ ID NO: 131193 - DNA, 545 bp, Homo sapiens
tcatagatatatatttgtatttcaagtaaatgaggaaaaaggaaccaaactaaaatgcatttttgtttctctttgtctactttatgtaccttattttactacaaatctggagacctagaattcactacccaaagaatttgctatgacctcattcttaccagattaagctaagaatggtaagagcatgtgaaaattcaataaagatagtgatcatttctttaattatgtaaacatttgaggattttcttttacatttgggatcaacaagctgataatatttgtgtactattttttaaaaataagtatttgtgtgtgtatgcgtttaattaattttacttataaaatgtttctatcagtcccttagctcaggggttccccaaccatcaggccgcagactggtaccctccatggtctrttataaaccaggccacacagcaggagatgagtggtgggcgagccagcattaccacctaagctcctccttctgtcagattagatcagcagcagcatgagattctcaatagtagcttctaccctgtattcca

SEQ ID NO: 131194 - DNA, 413 bp, Homo sapiens
gcgcattttattgacagtgggcagaaccatagctgccctggtaagatactgccagtaagcactggcaattaaattgggcagtgcaatatgtcccccacaagagttctgaaagcctgttgtaaagatatctaagatggtagartgtgtttaggaaagatcacctttcctggttctcttctttctcctatgagaaagactctgtcagcggaggagccagacacacaggccaaggagaggttttttttatttaaatcggtgcaatatgttctgagcctctcaccttgtgccttgcacagagattttgccctaaggaatcttgcttcctgagtgagcagatctcagaaaagcaaacaacagagttctgttacaaataaattattatgaaaccatttctgtgtttgaacatctgaagg

SEQ ID NO: 131195 - DNA, 574 bp, Homo sapiens
attccactatgtgattatatacacttgtgtgttattaattgtatatataattatatataattaataagtgacacagaatgaaacaagagatgttgatgtcatttattgaccatamgttattcacagagagtcatggatagaagctttgcttaatacgtttctttgtattgatgttaaattcaaaacccatatgaagacaatcattgccaggtttctattttatcaatttattaaacttccactgtgttcatgtataacagcacccatgctaagggctatgggatctttctgagtttaaaacaacaacaaaaaggtttcttaactttttttcatccagtataagctacaaactatacaaacatcttaatggagataaagggttgtgattgggctctggaacttgaaaagttgtgtcttgtcttcattcctttccatctttgttgctaacattactttatagcatacagtctagtgatcatgtgcacaccttgtcttttcaacctctttcctctcctcctaagctctcaacccattacctttctcctctctctaccatatcccatccccatagtca

SEQ ID NO: 131196 - DNA, 366 bp, Homo sapiens
gaaaatgatctatgggcacatgggtaaaaatagtcataatgatctagtaaaacagatccatttaaagtaaaagggaggagtaaggattgtagcaaatgcaaactgaagagcccagacccaactaaaagggatagctttgtgacctgaggaaatgtggtctgttgaggctagaacttggagttgtttttcaagagaacctggaaatgtggaattttatctcctgaattacaaatgttggtacctatattaaaaataaaaragactcgagatgaaacatctgtaagtggtctatcagtttgcaaactttgatatactgcctatccccaaaatactcttcgagcaactagggggcagcataagggtgta

SEQ ID NO: 131197 - DNA, 293 bp, Homo sapiens
agatcttggcaataaataatgaagaggccaccctgtttccaaatctgaatttgcctcttttttagccatctctgtccaactattatgcaccgtgacagctttgttctcctagcaaataagaaatattttggtagcctatgttgtgatttacacttggtaagtaggccctttattccttgtgcatagaaatttaggtctttaaacatgartcaaagcaatgcagcatttttgctaacacttaattctgcttgttcaaatctctcccctatgaatcatctcccactgatatatca

SEQ ID NO: 131198 - DNA, 578 bp, Homo sapiens
aagggttttaaaaaaatcagcattatctaaaatgtttggcagagaaagtgaaaatgaaacagtaagaactacataggcacagaagcaaataaaaaactaaggcaattagtaaggccagagaaacaaaaagctatactggaaaggatatgtaattgtagaatactatatggttctactataaatatttatatggtcataataataaaagctctgaatttttttagcttttcttcacattttattttatgaatgtatttttaaccagaaactatgttataaagtattaggaaggtagaaggaaaaggaagaactggcagagaaagagtacataaaagagctagctaaatctttttccactttaggaagtcaagagataatatcaaaatttttactatcaaaaacagcaatatggataatcaattttagaaatgtggagagaaacagcagaaaagcagataaaacattaatgatgattgtctctagggaaatgggagttagaagtagagaatggcagaaaagaagattcatgtttatctrtaactctttagtactatgaatgtatttttaattcattatat

SEQ ID NO: 131199 - DNA, 344 bp, Homo sapiens
agcatggcaggaaagagtgagggtcatcagctcatgttccactagtgyggacgaaaaaataatatctgaaaaacacaagtctggtgtcagcattgtatagacagcagaatcccaacctcaatagtggtggaggcaactggactgctcatgattgtagcattacatatgacagtcagcatgtttctgttaccaagacagcaatgtctgcggttcattttaggagcatttccaatcaaaggtctttagattatataaaaagttttgatacttagagaaatgacattaaggaacctggaaaatttgcttatttgtaacatctctttttcctaatgagactgggtaaa

SEQ ID NO: 131200 - DNA, 544 bp, Homo sapiens
atatgagagcaacccaggtgttcattgtcagataaataggtaaagaaaatgtggtatatgtatacaatgaaatactcttcatcctttacaaagatggaaattctgtcatttgtgacaatatggataaacttgaaatggctattatactaagtaatgtaaggcaacacaaaacacaaataatgtgtaatcacttttatatggaatctaaagaaggttaactcatagacagagtgtagaatagtgattattggaggaagatggggaaagagaagatatgggtcaaagtatacaaaatttcagttagataggaggaataagctttagtgatctattgcatgaaacaatgaatataataataatgcacagtatatttcaaaattacttaaaatgtagattttaaatgttttacagaaaaatcatatatttgtattggtcaattagcttgattaaattatttcacaatttaaaaaatttgtgaaaacatgacattgtatcctrtaaatacatagagttattatttgtcaattaagataaaattttacat

SEQ ID NO: 131201 - DNA, 606 bp, Homo sapiens
tttatatgaatccctaggtgttaagtgagtcttttgaagacaacagatatttgrtttgtgtttttttttaatccactctgtcaatctgcatcttttaagtgaagcatttaggccatttgcgttcaacattaatattgagatatgagatattgttccagttgttatgttgatttttatctttacatgttgttttttcattgttatagttttatagaacctaagagttttatgattttaagaggttgtattctggtgcatattaaccttttgtttcaagatttagcactccttttatcatttcttatagggctggtctggtactgacaagttgtctcagcatttgtttgtctgaaaaatgctttatttcttcttcatttataaaacttaatttacaggatacaaaaatcttgactgacaattgttgtgtttaaagaggttaaatatagtacccaaatctcttctgacttgtaacatttctgctgagaagcctactgttagtctgataggatttcctttagaggtttcctgatgtttttgtctcactgctcttagaattcttttctacactttgattttagatagcctgatgactacatgagttggtga

SEQ ID NO: 131202 - DNA, 606 bp, Homo sapiens
tttatatgaatccctaggtgttaagtgagtcttttgaagacaacagatatttggtttgtgtttttttttaatccactctgtcaatctgcatcttttaagtgaagcatttaggccatttgcgttcaacattaatattgagatatgagatattgttccagttgttatgttgatttttatctttacatgttgttttttcattgttatagttttatagaacctaagagttttatgattttaagaggttgtattctggtgcatattaaccttttgtttcaagatttagcactccttttatcatttcttatagggctggtctggtactgacaagttgtctcagcatttgtttgtctgaaaaatgctttatttcttcttcatttataaaacttaatttacaggatacaaaaatcttgactgacaattgttgtgtttaaagaggttaaatatagtacccaaatctcttctgacttgtaacatttctgctgagaagcctactgttagtctgataggatttcctttagaggtttcctgatgtttttgtctcactgytcttagaattcttttctacactttgattttagatagcctgatgactacatgagttggtga

SEQ ID NO: 131203 - DNA, 658 bp, Homo sapiens
atgtatacatatgtagcaaacctgcacgttgtgcacgtgtaccctagaacttaaagtataataaaaagaatttaagcaaaaaataaaattaaattaaatttaaaaaataaagtaaaataaaataaaataaagatgatcaacttaaaaaaaaaaagaatgcaaaaataacacaaaagcatacccgagaaaaaggaaggcttctgtgattccgggttaagagtatgtatggaagaaaagctaatgaaaatatgtcttgtaaaagataaatgagtcctttaagaccaggctcacaagttgtcctctgacgctgaaggatgagcatgakgcttgagatactgtattacatcaaatcagagttcggtttgtcttatccaggttgagggcctgaatcatttcaacaatcatcctcataagctccaagagcaacttctataccagagagccaccagtctactaagtaatgcttaattttgctggatgggatctcaaaattcaacccataagacacaaagcttgaatctaaaaatattaattgtggaaaatggggaactagtgcttctactttgactttgcatttaaagataagattgactaaatcagaatttcaatgaagtcataaataaaattaaaagtggatgcctggatagaaaagcttcta

SEQ ID NO: 131204 - DNA, 572 bp, Homo sapiens
aaacaaattcaataaagctgcaggtaaaaaatcaacatgcaaaaactagtagcatttctttacactcacaacaaactttctgagaaagaatcaagacagcaatcctacttatgatagctaaaaaaaaatttaggaataaatttaacttaaggaagtgaccaagacctgtacatagaaaataataaaaccttaatgaaagaaattaaagagacacaaataaatggraaaatatccagtgttcatcgcatgaaagaattaataaagttaaaatatccgtactacctagcatgatctatagattcaatgaaacacctaccaaaattccagtgtcatttttcatatggaaaaaaattcctaaaattgattcaaaaccacaaaacaactccaagccccccaaatagccaagataatcatgagcaaaaacaacaaaaacaacaacaaaattttaaaaagccaacaaaacaaaacaatagaacaaacctgaagttatcataccatctgatttcaagctatactatgaagtggtaataacccaaacagtatggtattggcataaaaattagcacattgac

SEQ ID NO: 131205 - DNA, 529 bp, Homo sapiens
gaattacatgcagaaagataacttgacaaaattcggcagtcatttatgatcaaaactgtcaacaaactaggaatagacataactatctctatctgttaatggacatttacaaaaaacccatggttaacatcattcttaattttgaaaagccacttacttccccctattatgagaaataagacaaggatgtccattctaaccacttctattcaacattgcaatgaasattctagccacaacaataagcaaaataaataaataaataaataaataaatacagtaaaataaattaaaaatcagaagcaggaggataagaaaagaagtaaaattgtgcttatttgcagacaacatgatcatgtacatagaaaatattaagtaatctaaaatagcaactagagctaacaagtttagcaaggtcacaggatgcaatgccggttcatcagaaataaccactgagtgtgcatgcacatgcatttatcacagtccttctctcctttatttctggcatcctcttacccccttcctgtca

SEQ ID NO: 131206 - DNA, 553 bp, Homo sapiens
agatatatatatatatatatatatagtaggcatgattgttacatgtaaatgttgacctacttgggccaagwacttgcatgtaaggagtgctaagctatcatcagctaaatgatttactgagcttacctattttcagatgctttttgagggctcagaattttaaaaatcatttaaaaattaggaatctgtgaaataaaatatttatttacgggtactgacatgtccaattgtagcctttctcttcttacttcaggctgttacagtaacaaattaataacatggtccaaattttgataatgttgcagtatttgactctggaaaatgagattattaagtttgcttgtcttcaacttggtctttgtactctcttagtgttttcaaggttttaggtagattatgtttatatgtattgcttacatgaatatttttttccaaacagggattttcctgttttaaaatgactttgttgtgttattgtactagaacataatgtaaaggaggggaaagcacatgagttttagagtcagaggcctcaggttcaaggcccagcttt

SEQ ID NO: 131207 - DNA, 553 bp, Homo sapiens
agatatatatatatatatatatatagtaggcatgattgttacatgtaaatgttgacctacttgggccaagaacttgcatgtaaggagtgctaagctatcatcagctaaatgatttactgagcttacctattttcagatgctttttgagggctcagaattttaaaaatcatttaaaaattaggaatctgtgaaataaaatatttatttacgggtactgacatgtccarttgtagcctttctcttcttacttcaggctgttacagtaacaaattaataacatggtccaaattttgataatgttgcagtatttgactctggaaaatgagattattaagtttgcttgtcttcaacttggtctttgtactctcttagtgttttcaaggttttaggtagattatgtttatatgtattgcttacatgaatatttttttccaaacagggattttcctgttttaaaatgactttgttgtgttattgtactagaacataatgtaaaggaggggaaagcacatgagttttagagtcagaggcctcaggttcaaggcccagcttt

SEQ ID NO: 131208 - DNA, 605 bp, Homo sapiens
ttttttacaataatttataagtaaaataatccccacttgttgaaagacatttttgaaaaactattaaatatcaactgaacatcttattgagacagctctgcagtcttttaaagcatttggtgaaagtagctgcatgatataaaatgtaataataaaaaaggcctatggcttgtttctatatatatttagacctaatgctaacaataaactaatgtatcattttactgcacttcattcctatatggtaggtcacagattaagtccagttcttttaattatgtgagaatctggctgtctagataatcagaaaatgttcccattatgaacatctataaaccatagcaaaaaatacaataagcgcactttcacttgcacagatgagccaaaaacaaagcaagttctggcaacaagtttagtaagcaactaaggtaatgtggtagcttccctgagggagttttttgaactaaaaaaatctaggtttttatgttttaatgagtctgtgcmaagtggggaagtggaactgaaatgattacacacaactagaatttgcagatacttagatccttaataaaagtatgaactggtaaaagttctgccagcaagca

SEQ ID NO: 131209 - DNA, 571 bp, Homo sapiens
gctttagacattctaaggatatgtggtaggcaggaaaagtaacatcccctgcaaagatgtttatgctctaatttccagaacctgaaaatatgttatcccatatggaagaaatgactgtgcagatgtgattgtattaaggatcttgagggggcgagattatcctggtgtgaggaaaagagagagagtggaragtcagagagggtcatatgaggatggaagcagggggcagagtgatgcaatcattgaccttgaaaatagaaggaggccctcagtcaagaaacctgggtagcctctggaagctagtgaaggcaaggaaacatattctcatctagagctttcagagggaacatgatactgctgacacattgattttagtgcagtaaagcccatttcaaaattcgggccttcagactgtaagttaaagttttgtgttgttttaagtcaccatatttatggaatttttacagcagcaatagagaacaaatatatcatactttagaaagtaaaaggaatcatacatcaaccacaatttaattgttactttcaaagtagccaaaaaaagtgagtgaaa

SEQ ID NO: 131210 - DNA, 571 bp, Homo sapiens
gctttagacattctaaggatatgtggtaggcaggaaaagtaacatcccctgcaaagatgtttatgctctaatttccagaacctgaaaatatgttatcccatatggaagaaatgactgtgcagatgtgattgtattaaggatcttgagggggcgagattatcctggtgtgaggaaaagagagagagtggaaagtcagagagggtcatatgaggatggaagcagggggcagagtgatgcaatcrttgaccttgaaaatagaaggaggccctcagtcaagaaacctgggtagcctctggaagctagtgaaggcaaggaaacatattctcatctagagctttcagagggaacatgatactgctgacacattgattttagtgcagtaaagcccatttcaaaattcgggccttcagactgtaagttaaagttttgtgttgttttaagtcaccatatttatggaatttttacagcagcaatagagaacaaatatatcatactttagaaagtaaaaggaatcatacatcaaccacaatttaattgttactttcaaagtagccaaaaaaagtgagtgaaa

SEQ ID NO: 131211 - DNA, 506 bp, Homo sapiens
ctacacatatgatattcaagctgctgaaaacaaaagataaagagaaaatcctgaagacaaagaaaaaacatatattacttatacagaaacaaaaataagaattatagcagacttcttattggaaatcatggaggccagaacatgatggagtggtatctttgtatcaaagaaatatatatcttttatagaaatagggtcttgccctgttgcccaggctgaagtgcagtgacatgcaattatggctcaccatggcctcgaactcctgggctcaagtgattctcccacctcagcctcctgagtagygaggattacaggtgtgcacgaccaagcctggctcattttttaattttttttgtagagacaaggtcttgctactaagctccccaggctggttcccaaactcttggcctcaagtgatcctcccaccctggcctcccaaagtgctaggattacaggtgtgagccaccacatctgaccccagaaatataacttttaacatagaattc

SEQ ID NO: 131212 - DNA, 483 bp, Homo sapiens
ccattctgagccaataaaagccctgggctcagccacacttagagactgctcacctttgggcacctgamttcagagaggaggctgccctcttggatcccctccccactgagagctgtcactcaataaaaactcccttcatacttcagttgtcagtgtaccctaattattcttggatgtgggacaagaactcgggacctgctgaatgtgggtacaaagaaagactggaacactgtagccctctgcccttcactggcagagggcagctgccccacatgatgggaagcagcactgaggtggaagcagcagcagggccagtccccagagccacaggccggagtgggacaatgggactaaaagagcttggcatgctgtaacaacccctatagggatttggggtcactggcatccctgttcaggtgccactgtgttctcctcatccagacaccactgcccaaggcaaaaacaggtcatgtacacccagcc

SEQ ID NO: 131213 - DNA, 563 bp, Homo sapiens
agaactttagtgaagagttataaatctgatatccctgacgctatgactccaakcagctttttccataggtcagtgtacagttttggcagaattatatggtccatagctacttattcattggccaatctgatcatgaaattcaattgtttctccaataggtagcaagaaagcaggatgcagtgaaggcagttaccaattggccctcagcctggaaagtctggactttgttgccattccaacctccttgggagtcactaacaggcacagaaataaaattgggttcagggttattgcatcattcaaaaaacaagggttctaggagaagcctatggtcctgttcttgcctctgttatctttttgttacaaaatgtagctgtttgtcaattgcagaagctcactgaagaatgcaaagagcatggtacatgtgccaacctatgcattcaaaatggcaaatgccaaattgtattgtataggtagatggtatggagagcatttggaaaaggcattgaggtgcatgtgttctcagcagaaataaaagttcaaagcttcaggaatcttttaaa

SEQ ID NO: 131214 - DNA, 517 bp, Homo sapiens
catctttactaaaaatacaaaaattagctgggcatgctggcgtgtgcctgtaatcccagctactacggaggctgaggcaggagaatcacttgaacccgggaggtggaggttgcagtgagccgagatcatgccactgcacttcagcctgagtgacagagcaagactccgtctcaaaaaaaaaaaaaaaaaagaaaaagaaaaagaaaaagcaaatactttttgagcaatttctatttgatagacattatgccttatgaaaatgaagcacagaaatgttaagctgcctaagatatcagagcaacttcacaaaagttggaactagaagtcatcckctgaatatcgaccctaaagagcaagcagaaagattcaaagtgaacaggctctggaatcagaaatgtctgcattcaaatcccagctccaccacagccagctgtgtaacctaggtcgagttacccaacattattattcctcaattttctcttcagttagttgaaaagaacaacagcatgccaaattt

SEQ ID NO: 131215 - DNA, 550 bp, Homo sapiens
tccttcatctgcctaaaagcagatcttctcaaaagaactaaaaagaactttattgtccataagtcccctccctggaaccctaatcttctcttcttggagagatatgtcagcaccacacccagacactgtcagaagttattacatcttcctttctctctctctctctctgttgcttacatacacacacacacacacacacacacacacacacacacacacacacacatccacacacacacatatatttttaaatgcatgcaatattcataaacaaatgcggcccggcacagtggctcacgcctgtaatcctagcactttgtgaggccaaggtgggcggatcacttgaggtcagtagttctaaaccagcctgcccaacatggtagaaccctgtctctactaaaaatacaaaaaaaaaaaatgcataagaacacagcaagagtgctgtctcctaggagggaaaggaagatggggtggggagagaaagacttacctttwatggatatccttttgaatctttttaattttgaaccatgtagccattcacaaggta

SEQ ID NO: 131216 - DNA, 582 bp, Homo sapiens
ctgaagtccacgcagactttcaccgacacactcagaagycactgttgtttccaccacacctgtcagattcagcatttctactccaaaatatctagttgttggtgcacttgaatatgctgaattcgtgctgatttaggaatcctttttaaaggactgctgagttttagctgcctctagtcagagaaaggatatgagaaagccaaattctgcaaatagttttcactctgcattaaccattccaccaagagtagaagaaacaagacaaaggccagtatgggcttaaattcatgtgcctggtcttcctccagcctacattttgtccagcctttcagcttaaaaaaagaaaagaaaagaaaagaaatccactttggtcttcaggggtataaaccaagtccattaaaaaactctcatgcatgttgggtctttttttttttttttttttcagagcgctctgaaatttctcagccctggaaatatatgtaaaaataatttcacaaaacacttagtgtgattcctaatataaacactctgaaatgcagattcttaaatgagttggtgcagtaagggatgagcaaaccatgt

SEQ ID NO: 131217 - DNA, 603 bp, Homo sapiens
tgcagaacgagaggctccaaattagatgcgtacaaaaatagacatagacaggtgatctttcccagctctttctttctccccttccacaaacagggcttagtgataccctagccacctaccgagaagccatgggccctgtgggagaaagatggggcactgcggggtttatactaaaacagtagttgcaatctagyttcagaatctcatcaaagtccttctcttgccctttttaaggctctgtttctaaacagaaaccaagtggaggaaaagagattgtagagtttcaggactttgcaaaggctccaagcattagagcattctctaagctcttctcccagttcttgcctttcttctcagttttcttcttgcagccctgtgccaagcattcaattaaccaccctgctcctgcccccatctcagccaaatgggtaccagatgtaccatgtagacgtcggacaaagtgggatagaaaaactttactcagacaaattggcagagaaaacacaattagtcaaagcaaacagagctgaagcagcaggcaagccaagtgtccaggagctcacctgcaacacatttccaggagcccctcaaaaaccattcatt

SEQ ID NO: 131218 - DNA, 603 bp, Homo sapiens
tgcagaacgagaggctccaaattagatgcgtacaaaaatagacatagacaggtgatctttcccagctctttctttctccccttccacaaacagggcttagtgataccctagccacctaccgagaagccatgggccctgtgggagaaagatggggcactgcggggtttatactaaaacagtagttgcaatctagtttcagaatctcatcaaagtccttctcttgccctttttaaggctctgtttctaaacagaaaccaagtggargaaaagagattgtagagtttcaggactttgcaaaggctccaagcattagagcattctctaagctcttctcccagttcttgcctttcttctcagttttcttcttgcagccctgtgccaagcattcaattaaccaccctgctcctgcccccatctcagccaaatgggtaccagatgtaccatgtagacgtcggacaaagtgggatagaaaaactttactcagacaaattggcagagaaaacacaattagtcaaagcaaacagagctgaagcagcaggcaagccaagtgtccaggagctcacctgcaacacatttccaggagcccctcaaaaaccattcatt

SEQ ID NO: 131219 - DNA, 487 bp, Homo sapiens
agccatcaccttggggggctccctaatggcctgcctacttggagcatcaggcagaccaggagaagcttctgccaacagcaaacacccagagccctgggtggtttggtcctgccactacctgcgagcagcagctgagatgcaatactcattcaccctccaccaacattacagacactaaagtgagaattgcaagaattgcctcttatctcacagaacagcacagtgccaagaagcagtgctgcaagcttggccttatatcagacagatataacctcaaattccagttycacctcttatgagctgtgcaatcttgagcaagttactgaacctctctgggcttatttcctcatttgtaaactggagataatacacataatacacttaaagttgcaaggaagattaagagaaatatgcacatgtatggtgttgaacacatctggcacacagtcagcactcaataagtggcagcagctgttgtgctgggctc

SEQ ID NO: 131220 - DNA, 523 bp, Homo sapiens
agtgttttttatttttaccatttctactttttacattagagccctcagcatattataattgatttaaattccaataattctgacatccttgccatatttaagtctggttatgatgctggttctgtctcctcgaactgtttttgccttttagtatgtctcaaaattttttgttgaaagccaaacatgccatactgggtagaagaaattctggtaaataggcctttwattatgtgacaataaggcatgagaaaaggggaaacattctatagttctatgattaggtctcagtctcttagtgagcctttgggctgtgaacttgacaagagcttctcagttttatctccaagctcaggtgggatagaacatctagaatatgctgaagtcggtttcccttcccccaggttacttaggctccgagtaaactgtttcccatctcaaacttgtgcacaccaagcttccggcaatttgttaattatagcttaggttctcctaccctggtactggttccagcagagggttctgc

SEQ ID NO: 131221 - DNA, 542 bp, Homo sapiens
atctatacagtacctctaggagtctgcaagaaccacagcattattgggcttggggtgccccctaaagtaggaatagcatagatcacaacatccaagtcctttcaaatatccggaaagccttcccaagaaggaaagctacaaataagcacagacagtgaagaccacaataaatacctaactcttcaatgcccagacaccaaacaatatctactagcatcaaaaccatccaggaaaatactacctcatcaaatgaactaaataaggcaccagggaccaatcctggagaaacagagaaatacraccttttagaaatggctgtgttgaggaaactcaaagaaattcaagataacacagagaaggaattcagaattctatcagataaatttaacaaagacatgaaagtaattttaaataatcaagcagaaattctggagctgaaaactgctattgtcctactaaagaatgcatcagagtgttttaatagcagaatggatcaagcagaagaaagaatcagtgagcttgaagacaggctatttgaaaat

SEQ ID NO: 131222 - DNA, 542 bp, Homo sapiens
atctatacagtacctctaggagtctgcaagaaccacagcattattgggcttggggtgccccctaaagtaggaatagcatagatcacaacatccaagtcctttcaaatatccggaaagccttcccaagaaggaaagctacaaataagcacagacagtgaagaccacaataaatacctaactcttcaatgcccagacaccaaacaatatctactagcatcaaaaccatccaggaaaatactacctcatcaaatgaactaaataaggcaccagggaccaatcctggagaaacagagaaatacaaccttttagaaatggctgtgttgaggaaactcaaagaaattcaagataacacagagaaggaattcagaattctatcagataaatttaacaaagacatgaaagtaattttaaataatcaagcagaaattctggagctgaaaactrctattgtcctactaaagaatgcatcagagtgttttaatagcagaatggatcaagcagaagaaagaatcagtgagcttgaagacaggctatttgaaaat

SEQ ID NO: 131223 - DNA, 523 bp, Homo sapiens
agctgagcttccagggaaaccagaaaagtagaacttgaatgacacagtatcaaggaagagaaagctgcacaaaatgcaaactccaaagatatgcagatggttcttctcaaatattcaacagagtgctgatcatcacatgcatgtgaggaaactaaggccaaggaaaaagaacaatataaaaggcagaaggtgttcagtaatcacgtaagaccaggaatgatgcatactctcaccagcctgacttaaaaatatcgtaattatgggataccggatagwgtgatcagaaataccttgcctgagtagtggagagtaattaggcctagattaacattgcctggctctcaataatgtctttaaagaaagacacaaaaggatcaacatgtttccaataatttaattacatcccagaaagaaaacttagtaacatttgtaggaatacaaaaatatccagcacctagtaagataaaattcataatgtctgccattttattaaaaattaccagatatacaagaaagcagaaaa

SEQ ID NO: 131224 - DNA, 543 bp, Homo sapiens
tcaaaattagtatgaaaattaaggctttctcagtcatacagtagttgaaagaatgcatcatcagtaaattttaactagaagaaatgttgaaaaaaattattcaggtagaaatattggtaagtgctaccagataaaaatatagatctgtagaaataaatctaaaataccataaattttcttattacttaaatctacataaaagataattgattgtttaaacaaaaataataattatcaaggcaatgtgggatccatagcatacttaaaagtatgataacaatatcacaaaggccaggagtaaggaaatgaaaatacaccattgtaaatttcctaggtttctatacagtatgtgaaataacacactatcatctgaaggtagactgtgataaattaaaaacatatgccataaatcctaaagcaatctttaaaataacagagaaaatgaarccatgaaaatgtgaaaagacaatccacacaatgggagaaaatatttgactattatggatctagtaagggacttacattagaatatataaagaattc

SEQ ID NO: 131225 - DNA, 603 bp, Homo sapiens
aaactaaaataagtagctcattctgctccagcaatgatgttacccaaaactaggagaaaaatcagtcaagaaaaaaaaaaaaaaaaacctttcagcagtgacacagataatggagytagtagacacagatttgtcagctagtataactatgttcaaacagttaaaagaagccataaacatactgagaagagatacagatgatatacggtcaaatggaacttctagcatgaaaaataaaatacctgaagtgaaaaattcattggaaagacttaacagcagattcactttgcagaacaaagtgaacttgaaaatatagcaaaaaatacacaaaaataaagcacagaggaaaaagtaataactaaaacagtcacaatagattataggaaactattaagcagaagaatggtgtcagggacagaaaaagtatttgaagaaacaatggtcaaaattgtgccaaatttgatgaaaactcggacccacagatcgaaaaggtccagaaacctcaaggaaaatacaaataaaactataccaatgcatatgataatcaaactgctgaaaaacagtgataaagagaaaatatttaaagcagccagagaaaaataa

SEQ ID NO: 131226 - DNA, 603 bp, Homo sapiens
aaactaaaataagtagctcattctgctccagcaatgatgttacccaaaactaggagaaaaatcagtcaagaaaaaaaaaaaaaaaaacctttcagcagtgacacagataatggagttagtagacacagatttgtcagctagtataactatgttcaaacagttaaaagaagccataaacatactgagaagagatacagatgatatamggtcaaatggaacttctagcatgaaaaataaaatacctgaagtgaaaaattcattggaaagacttaacagcagattcactttgcagaacaaagtgaacttgaaaatatagcaaaaaatacacaaaaataaagcacagaggaaaaagtaataactaaaacagtcacaatagattataggaaactattaagcagaagaatggtgtcagggacagaaaaagtatttgaagaaacaatggtcaaaattgtgccaaatttgatgaaaactcggacccacagatcgaaaaggtccagaaacctcaaggaaaatacaaataaaactataccaatgcatatgataatcaaactgctgaaaaacagtgataaagagaaaatatttaaagcagccagagaaaaataa

SEQ ID NO: 131227 - DNA, 400 bp, Homo sapiens
atatctcctgctgatatgcaggagatactgtatgctttcaaaaaatttcccaaatctctgactttctgagtgtcagttacagaattggagcagaggatttccaggaagcattttgctttaccwcaacacccaagatattattttcactatgcctaaaatatcttatcctgttagaaggagaaggaaaaaaagaaaacttttccatttaattgcttgtttgatttgtatcaaacaagcaatttgatctgctttagttttgttgctgatgccaagcatagttagaagagacggaaggtgacagataacagaatagttgcttctgtgtggcttacacatgcaaagcaaagcatcgttattgatatcctttttaaagagttcactgaggtgcagctcacagttg

SEQ ID NO: 131228 - DNA, 514 bp, Homo sapiens
gaaatcctatgaaggtaaggaatgtggaaagcatttaattttcacagtttccttcaaagacatgaaaggaataaaactggaaaaaagcctgtgaatgtaaaaaatgtggaaaagccatctggtttttcagttctttcagaaacrttgaaaggaccacactgaagggaaccctaatgaatgcacaaaatgtgatagggtctttagttatgccagttacatttggtgacataaaataacttattctgcagagaaaaacattaatgcatgggatgtggaaatgcctttatttctctcatattcattcaaaggctcatgaaaatgcaccatggagatggaccctataaatacaggaaagcacacgagattaaaatcccagtagtttgggaaatacagaaaagttctgaattttaaaaattactttaaaagtcatttgaaaacccttgctggaaagaaatcctataaacataagtaatgtggaaagcctgattcaaattaattattcaacaatgcattg

SEQ ID NO: 131229 - DNA, 514 bp, Homo sapiens
gaaatcctatgaaggtaaggaatgtggaaagcatttaattttcacagtttccttcaaagacatgaaaggaataaaactggaaaaaagcctgtgaatgtaaaaaatgtggaaaagccatctggtttttcagttctttcagaaacattgaaaggaccacactgaagggaaccctaatgaatgcacaaaatgtgatagggtctttagttatgccagttacatttgrtgacataaaataacttattctgcagagaaaaacattaatgcatgggatgtggaaatgcctttatttctctcatattcattcaaaggctcatgaaaatgcaccatggagatggaccctataaatacaggaaagcacacgagattaaaatcccagtagtttgggaaatacagaaaagttctgaattttaaaaattactttaaaagtcatttgaaaacccttgctggaaagaaatcctataaacataagtaatgtggaaagcctgattcaaattaattattcaacaatgcattg

SEQ ID NO: 131230 - DNA, 514 bp, Homo sapiens
gaaatcctatgaaggtaaggaatgtggaaagcatttaattttcacagtttccttcaaagacatgaaaggaataaaactggaaaaaagcctgtgaatgtaaaaaatgtggaaaagccatctggtttttcagttctttcagaaacattgaaaggaccacactgaagggaaccctaatgaatgcacaaaatgtgatagggtctttagttatgccagttacatttggtgacataaaataacttattctgcagagaaaaacattaatgyatgggatgtggaaatgcctttatttctctcatattcattcaaaggctcatgaaaatgcaccatggagatggaccctataaatacaggaaagcacacgagattaaaatcccagtagtttgggaaatacagaaaagttctgaattttaaaaattactttaaaagtcatttgaaaacccttgctggaaagaaatcctataaacataagtaatgtggaaagcctgattcaaattaattattcaacaatgcattg

SEQ ID NO: 131231 - DNA, 542 bp, Homo sapiens
atgactagttaataagtgcagattaaacttagcttttataatgattggtttgtaaataatctctcaatgcccccccttacctggagaaatggctttacattctcaaaagcacttgtgccagtaactttactatttttttattaagtactcttgaagtgtgtggtcaaagcttttaactggaattttaaccatggctgaataaaattacctgagaattttaatattttacaaaaattgatttctcataacttccttccatgtgggacaccattaaacccagtgttgtgtcaaccagcaaagcaaatggccccttgaactagcttttgaatcagaattctgctatgtgtccatccactgctaaattcaatctgatctaaaatgctgtttctctcttcttggatttcagaattcattcttrcatattccttagatttttgtttatgtacattaccaaaattgtgcaattcttttgctttggtagtctttaacatctccccagatttgattttacaattggccctgtgggtcctgttgagatctga

SEQ ID NO: 131232 - DNA, 546 bp, Homo sapiens
tttacactgttggtgggagtgtaaattagttcaaccattgtggaagagtgtggtgattcctcaagatctagaaccagaaataccatttgacccagcaatcccattactgggtatatacccaaaggattataaatcaatctactataaatacatatacacatgtatgttgcaggaagtcagggaccccgaacggagggaccagctggagctgcagcggaggaacataaattgtgaagatttcattttaatrtggacatatatcagctcccagataatacttttataatttcttatgcctgtctttacttcaatctctgaacataaattgtgaagatttcattttaatatggacatttatcagttcccaaaattaatacttttataatttcttatgcctgtctttactttaatctcttaatcctgttatctttgtaagctgaagatgtacgtcacctcagaaccactatgatatttgtgttaactgtacaaattgattgtaaaacgtgtgtttgaacaatatgaaatcagtgcaccttgaaaaagaac

SEQ ID NO: 131233 - DNA, 530 bp, Homo sapiens
ttgaattatccagtctatctttaatggaaatataatgggggagcagatctgtaaaggctggctagtgcctgtctccaaagagaaaaatttccagctgcttgctctctgcttcaaagcccatcagaagtcagctctgagcccaccggagccctctggtgcaacaaagaaagcaaattgcctgaggtcctgcagtcctgtggttttatatcacatagccaggcaaaataaaacttgcatgagtcttgtacactcttagccattacattctcactctgttgccaacatcccaagcytgtggaatgtgaggaaagcacctggtggctaagataaaacaacaaaaccatgctctgcagacctgagctgtagctcaggcaaagcaagtacctacttttgcactgccttgtaatatagactgtgcatttgtatgatagttcctcaatttttttcaaatgtcggctgcactagctttcaaaatttagcatgtatgagagttttaggagagcttgttacagcacagattgctgactata

SEQ ID NO: 131234 - DNA, 603 bp, Homo sapiens
gtcccaaaataacagacatgcaaacgctttgcctgattagctgctacttattaaaacatatggtttaaggactgagttgccaattttatgtttccataaagtactgcatggtcttgaataatgaggcaaattgcagaatactgatgtttatgagcagtcaaatctgtgggtttcagaggcacagaccgtgacttctaacttatagtttcaakttaatacaaactttttgcattatgtatttttttggttgttgttttttgacacagagtcttgctctgtcgcccaggctggagtgcagtggcacgatctcggctcactgcaagctccgcctcccgggtaaacgccattctcctgcctcagcctcccgattagctgggactacaggcgccctccaccacgcccggctaattttttgtacttttagtagagacggggtttcaccctgttagccaggatggtcttgatttcctgaccttgtgatccgcccgcctcggcctcccaaagtgctgggattacaggcgtgagccacagtgccctgcctgtattatgtatttttaacatcttttgctcttacaaggattgggctctacttgttttctttgt

SEQ ID NO: 131235 - DNA, 585 bp, Homo sapiens
cagggctggaatcaacctgttctttaatcaagctaatgcagacccactgagccagctgactgctaagttactgaaagatcaaaagaaatgaacccctagggcgatcacatttttctttcctcagaggtggaatggtaatctcctggaaaacaggtcctgaagctattgagtgcactggagaagcaaccaaacgagaatgaaccatccaccagcttttcaatctcagaacacagtcactgcttggtttgggattactggtatttggggtttggcctgaatccccaggctgattgcagaaacttgggaaacttaatccacatgaatgaaggattgaatccatgcaaggggctacgatctgggactcctgaaaagggtgacagagaaatctacctagcacttgaactaggcctttattagtacagaggattcaaagaccgaactggagatgcrgagctgggaatgggaaggaggcaggaggatgggaaggaagaacacctttcaggcagtgcacatggtatgaagatgaagaggcaaaaaggagtcctggtactcggtcatcagaaaagccatttctttcctccaacc

SEQ ID NO: 131236 - DNA, 594 bp, Homo sapiens
aaaccctagcctctgaccttttagggaagctgttctgagtaatagactcccatccttctggtttggctaggtctgcatttattaagctctttctccactgcaatagcactgtctcagtgaataggctctatctgtacagcaggcaagaagaactcattgggcaattacactatcccttcctgaatatcctrctacaaactgggactcagatagccatagagaactttctctaaatctttgcactgaaaacctggtctgtgcagtgcagcactgcatcactagggaccttgttagaaatgtagaatttcaggccctagcccagacctcctgcctcacagtgcatttttccattagagtttgaaagcagtgctcttctcctgggaacctaggctgcctccaagagtctagtgaacactttcaggctctgccaagatgttcctactgtcaggatttcaaaatcgagttaaaactgagagaaaaaccaaggtgagtgtagagtgattccctttggtgcctgctttcaaacgagaagctaacaatgaacagttagaaaggaaagtaatgttttcatggtcagggtgacaagccttgtct

SEQ ID NO: 131237 - DNA, 587 bp, Homo sapiens
ttctttggaaagtggccattgttaagatggaggttcttccatacttccaagtttatgtttgtcagatgctctagaataaatgattattcaaaacatatttgaataatttttcttttcttctatagcttaagtttagtatccaaaaaaaatcaacaaattaaaacatagttttcttcttacatatttaaaaaatagtcacatgcataaatgcaaggctctttttttttgtatctgtagacagcrctattggcattaactctacaactccaactgggtccccagtatgctgatgaggaactggtgtgtcatcaaagtgcctgagggaaagagaaggaatataggggaatttccaagccacaggagggcatcgtaagagtctgtttctgtcatcagcacagcaaggctaacgtctaaacctatactttaggattttgtctgccatcaccaatggtcaacccaatgtccaatgtcaaacaaatgtcactgttttatagaaaaaaggacttgtttaccttgtaaatgtgtttaaaaggagaattttgggctactaaagcactgtctctagcaaacataaatgtaggctgtag

SEQ ID NO: 131238 - DNA, 547 bp, Homo sapiens
atctggggctcttcctcagacctctgtttccttcctctcacttctttttagtttttttctatctcttgttctcctccccatgttttcttcctctttttctctatttcttcctccaccttctccatttcctcatcccctgacacttcttttgtcatagcttcctttctctctattcctcttgttcctctcatctgcttgaagtagtcttttgggattctttgggatggagactttggggatggatgtgtctccaagcatattctttgcagagcctatttcagcagctcttcacaggggtcccatcctttgccccaccacaggcttcawctttggttcatgctgaccctttgtagcccaaacacatcattccctttgaggaggtagagtggttagagagataaacatgttattagaaatcaaaatcctatttatttattgccatcagcaatacatttaggccagattttcaaaagccctcccttttcagagcctaccatttttaaggttcctgcttaatttatgcttaaagccaattaattgtttcctg

SEQ ID NO: 131239 - DNA, 587 bp, Homo sapiens
acaattaaacctaaatcagtgttcctgaggaagaagagaattctaaaagcttggaaaacatatttgggggaataatcgaggaaaccttccgcagcctttctagagacctagacatccaaatacaagaagcacaaagaacacccaggaaattcatcacaaaaagatctttgcttagaacattgtcatcaggttatccaaagttaagaygaaggaaagaatcttaagagctgtgagacagaagcaccaggtgacctataaaggaaaacctatcagattaatagcagatttctcagcagaaaccctacaagctagaagggactggggtcctatcttcagcctcctcaaacaaaacaattatcagccaggaattttgtatgcagtgaaaataagcatcatacatgaaggaaagatctagtctttttcagacaaacaaatgctaagagaattcgccattaccaagccaccactgcaagaactgctaaaaggagctctaaatcttgaaacaaatcctggaaacacatcaaaagagaacctctttaaagcacagatcacacaggacctataaaacaaaaatacaagttaaaaag

SEQ ID NO: 131240 - DNA, 395 bp, Homo sapiens
tctacaagcatcaacaccatccaggaaaacatgatctcactaaacaaactacataaggcatcagggaccaatcctggagaaacatagatatgtgacctttcagacagagaattcaaaatagctgtgttgaggaaactcaaagaaattcaagataacatagagaaagaattcagaactcartaaaataaatttaacaaagaggttgaaataattacaaagaataaagcagaaattctgaagttgaaaaaatacaatggacatactgaagaacacactggagtcttttaatagcagaattggtcaagcagaaggtagaattagtgagcttgaagataggctctttgaaaatatgcaatcagaggagacaagagaaaaatgaataaaaaaacaatgaa

SEQ ID NO: 131241 - DNA, 395 bp, Homo sapiens
tctacaagcatcaacaccatccaggaaaacatgatctcactaaacaaactacataaggcatcagggaccaatcctggagaaacatagatatgtgacctttcagacagagaattcaaaatagctgtgttgaggaaactcaaagaaattcaagataacatagagaaagaattcagaactcagtaaaataaatttaacaaagaggttgaaataattacaaagaataaagcagaaattctgaagttgaaaaaatacaatggacatactgaagaacacactggagtcttttaatagcagaattggtcaagcagaaggtagaattagtgagcttgaagataggctstttgaaaatatgcaatcagaggagacaagagaaaaatgaataaaaaaacaatgaa

SEQ ID NO: 131242 - DNA, 574 bp, Homo sapiens
cccactacccttctcagcctctggtaactgtccttctattctttatttccatgagttcaattgttctaatttttaggtcccacaggtaagtgaaaaygtatgatgtttgtctttccatgcctggcttacttcacttaacataatgacctccagttccatccatgtaattgcaaatgacaggatctcattcttgtttatggctgaatagtattctgttgtgtatatgtaccacattttctttatttgttcatttgttgatagacaattaggttgcttcaagtcttgtctattgtgaatagtgctgcaataaacacaggactgcagatatctcttcaatatgctgatttcctttttggggtgtatgtacctaggagtggtattgcttaatcatatgttagcacaacttttagttttttgaagaacctccaaactgttctctgtagcagttgtactaatttacattcccatcaacaatgtaggattcccttttctccacatcctcaccagcttttgttattgcttgtcttttggataaaagctattttactagggtgagataacccataattttgat

SEQ ID NO: 131243 - DNA, 289 bp, Homo sapiens
aatatatgtattagtgactcccaattcattctcacagtcctggccattctttctggttccctgtagatagacctcctttgctggttactcktcttttctctgactgttcaatattggagaaccacagggcttagtcattggactttctttccagttatattccctcccttggttatctaattagtctaatggctttaaaccatgtgatgatttccaaattcatatctccagtcaagactttctccctccactctagacctcaatgccccctcaatattgctatttgaag

SEQ ID NO: 131244 - DNA, 289 bp, Homo sapiens
aatatatgtattagtgactcccaattcattctcacagtcctggccattctttctggttccctgtagatagacctcctttgctggttactcttcttttctctgactgttcaatattggagaaccacagggcttagtcattggactttctttccagttatattccctcccttggttatctaattagtctaatggctttaaaccatgtgatgatttccaaattcatatctccagtcaagactttctccctccactctagacctcaatgmcccctcaatattgctatttgaag

SEQ ID NO: 131245 - DNA, 494 bp, Homo sapiens
acagatatcttactgccacttaacattctctctttggtatctcaagggctcacaatctcaacatatctaaaaccaaaatatatttctctttacactgggatctcttcccaagaatgccatctcaaccatcttattacatatcacccttactcagtttcctgcaatagattcttaaccagtcatctgtattcctctccaatccattctacacactacagccarcacaaattttgctaaaacatatctgcttaaaatattttattggcttcccatttcttcctctttaattaatgaagaaatcctgaactgggcctaatgctctgaaattggtttgctccctgcctgctccttcattttaaaccactctgcccctctcctctttatatagctggcacactcaccatttcttatttcttagaatacaccttgtttgctcctgtcattttgttcctgcttcctggctctcactgtctcttattctatctccacataca

SEQ ID NO: 131246 - DNA, 505 bp, Homo sapiens
gatatcttactgccacttaacattctctctttggtatctcaagggctcacaatctcaacatatctaaaaccaaaatatatttctctttacactgggatctcttcccaagaatgccatctcaaccatcttattacatatcacccttactcagtttcctgcaatagattcttaaccagtcatctgtattcctctccaatccattctacacactacagccagmacaaattttgctaaaacatatctgcttaaaatattttattggcttcccatttcttcctctttaattaatgaagaaatcctgaactgggcctaatgctctgaaattggtttgctccctgcctgctccttcattttaaaccactctgcccctctcctctttatatagctggcacactcaccatttcttatttcttagaatacaccttgtttgctcctgtcattttgttcctgcttcctggctctcactgtctcttattctatctccacatacatatcttcttctctc

SEQ ID NO: 131247 - DNA, 509 bp, Homo sapiens
actgagctcaaaatacagatatcttactgccacttaacattctctctttggtatctcaagggctcacaatctcaacatatctaaaaccaaaatatatttctctttacactgggatctcttcccaagaatgccatctcaaccatcttattacatatcacccttactcagtttcctgcaatagattcttaaccagtcatctgtattcctctccaatccattctacacactacagccagcacaaattttgctaaaacatatctgcttaaaatattttattggcttcccatttcttcctctttaattaatgaagaaatcctgaactgggcctaatgctctgaaattggtttgctccctgcctgctccttcattttaaaccactctgcccytctcctctttatatagctggcacactcaccatttcttatttcttagaatacaccttgtttgctcctgtcattttgttcctgcttcctggctctcactgtctcttattctatctccacatacat

SEQ ID NO: 131248 - DNA, 323 bp, Homo sapiens
gaaaatgcaattaggaaaaagttgtgcaagtagcaattagaaagtgaataacttgccttatttcttttattcagattacccttggctacttagctgaaataaagctcagttggaaatcgcttgcagaccatcacagtagcctctggaatgcattgtctgcataaacagtgggaagagaaggcaagggttttctttggtgcttgcctgcttcctctttctgacaatctgttaccttttyctggaccctgcctagtggctgtattggccattaagcccatacctccctccttggccacaggctaataccagtgcagggagaggaa

SEQ ID NO: 131249 - DNA, 510 bp, Homo sapiens
gagatttcaggcatttcaccaccctagatagggtcatgacagaagagaaggtagtagttccggtcctagagatgatagaacaatgggaaaaaaaggagtgggttccagctctagaaatgggaaggggcaagtttccacccttggaggtgagggtggaaataagggcgattccagcttttggctgtgttgctctggatcattgatggtgtggtctgacagcttgaagatagggacagcagcatcactgggggtcaaggcttccctggccttcaggtgaggggatctgggtggccaggatccrgggctttagccggcgggggaggtggtggacgcatctgtagggaacacacagttagtgctccagagttctcccttaagggtatccctgtctattccctcagccctgcagacaaaacaggactggttggaataacccctctacatacaatctcctccaaggcaagggcccttaccggcctgagtcgaggtgccatcatgtccaggaaccca

SEQ ID NO: 131250 - DNA, 492 bp, Homo sapiens
tttccctcatattttattggccaaagcaaatcgcatggcaggcctctcatcaatgggaagtatgttccactttcagaaagggcacccaagggaggaacagcaaatattttgaccaataacacaactttccatacacattgtaactgaactaggttatttgaacctcggagtggcttagaggaaggacctytggaggaagaggtggtagctcaagtaatttagcttctctctgtgtctgcctcttctcctctcaccacccattttctatgtattgtggcttttgcttttgtgtccctctttttttttttttttttttttttctgaggtgaagtcttactctgttgtccaggctggggtgcagtggtgtgatcttagctcactgcaatctctgcctcctgtgctcaaattctcctccctcctcaccctcctgagtagctgggactacaggaatgtgccatcacacccaactaatttctttcttttttttttgga

SEQ ID NO: 131251 - DNA, 617 bp, Homo sapiens
attcttctctgcccttggtaaataacctactggttttcttaagtatatatttcttatttctaaatgccccattcttttttgtttttctagcattgtagcaattgctaacgctgtaccaagggggattattgctaaaccttgtcagtgcaagaaccagagtaatttgtgtacagtacagttaaaattayaccattacacttgaagctaacattatcctaatgagttgaaatggagggaaggagcttgcttagaaaagaatgtaagtgacttagcactggtttctcacttccagtaataacgttcttcacaactgtgttttgaacacattattatagatttaaatattttaatattcatttattctaatttccctcttgataggtaccatctctgtgctcgcatttcatcaactctgactggtgacaccactctatttaatatcttccttggccaaatttcttgtgaagtgagaactagattttagctgcttatggaggtttcaacaactcctttgtggttcagcatttaaaactccgattctaatctaaaatcctttaacaaggaattattcaaccaagggcttatatataggtatattgggataaaatctattggag

SEQ ID NO: 131252 - DNA, 617 bp, Homo sapiens
attcttctctgcccttggtaaataacctactggttttcttaagtatatatttcttatttctaaatgccccattcttttttgtttttctagcattgtagcaattgctaacgctgtaccaagggggattattgctaaaccttgtcagtgcaagaaccagagtaatttgtgtacagtacagttaaaattataccattacacttgaagctaacattatcctaatgagttgaaatggagggaaggagcttgcttagaaaagaatgtaagtgacttagcactggtttctcacttccagtaataacgttcttcasaactgtgttttgaacacattattatagatttaaatattttaatattcatttattctaatttccctcttgataggtaccatctctgtgctcgcatttcatcaactctgactggtgacaccactctatttaatatcttccttggccaaatttcttgtgaagtgagaactagattttagctgcttatggaggtttcaacaactcctttgtggttcagcatttaaaactccgattctaatctaaaatcctttaacaaggaattattcaaccaagggcttatatataggtatattgggataaaatctattggag

SEQ ID NO: 131253 - DNA, 519 bp, Homo sapiens
tgaaaaaatcatactgtttaaactggcaactagtattttcttaactagagaatctatagctttctggtctaggttcctggtcatttatgaaaacatttctaagatctgaaataaccctgggactgggtcttttcaagaatcaagcatacaactatgtaattygaaggctttagttgtttataacacaggctgtgcagtcagatcagtggggaaatcccagctctgtcactaagagctgtgtaactttgggcaagtaacctgacctctgagagcatagctgtctgcacctgtaaaagagagatcagaaaaatgtctatcacacataacccttaaggagacaagttatatgaaggcaaggtgcccagcacatagtgtcagtcaatagtattcatcattaatgtgtgtgctaatttgcaaaaagactcccttctcagctcagtgtttgggaaagccacagcataaatgagaaatccagggactggggtggggaaaggaagtgctggatggagggtgggaggg

SEQ ID NO: 131254 - DNA, 528 bp, Homo sapiens
taaattggagcactctggagaaatccagttcttctttgtttcacttgtaagtcatggtcaaatggagtaacaaaatcagttatgatgtctgccaaaaatatgtagttattaatctcgtattatggtatgaggtgtttagaatattggacaggtgctcagaatattggataggtgctcatatgctctgagttgagacaggtgttggaaaaaagacaaaaatatgtaagacaggattcctgtcctcaggggaagataagactaacacaaacagttgcttgatacataagatggtatattgttaacaacaaaactgaatacagagtaggctgttgacattcaaaagggacaagttcagagaccacttgatcccccagtatgtacaattttatcacaaaatgcatgggatgaaaacaacaacactgagttgaaatgtgaatgctgatgagaasgttcagctcattcatcaggtaaaatattcattcacaggagccctactgatctccagctcaaagtttctgccttggtcaa

SEQ ID NO: 131255 - DNA, 605 bp, Homo sapiens
gagttctagaccagcctggtcaacatggtgaaacaccatctctactaaaaatacaaaaaattagccaggcatggtggcgcatgcctgtaaatccagctactaaggaggctgaggcaggagaattgcttgaacctggaaggcagagaatgtggtgacctgagatcacgtcattgccctcaagccacggcaatgagaacaaaattcggtaaaaacaaaacaaaacaaaacaaaactaccataaaataactcagacttaattaaatacaaccctagtggtgaatgactaaagmtggattactcataacagaggtaacagtccaataagaatccaggaatcttaccttttaataacaaaaaaatcctttccttctaaagtaacatcctctcaaggccaggaattccattagtagaaagccttcctaaaaaacaaaattcctggccaggcatgggttcacgtctgtaatctcagcactctgggaggccgaggcgggaagatcacttgatatcaggagtcgaggcgggaagatcacttgacgtcaggagtttgagactggcccggccaacatggtgaaaccgcatctccactaaaaatacaaaaattagcc

SEQ ID NO: 131256 - DNA, 605 bp, Homo sapiens
gagttctagaccagcctggtcaacatggtgaaacaccatctctactaaaaatacaaaaaattagccaggcatggtggcgcatgcctgtaaatccagctactaaggaggctgaggcaggagaattgcttgaacctggaaggcagagaatgtggtgacctgagatcacgtcattgccctcaagccacggcaatgagaacaaaattcggtaaaaacaaaacaaaacaaaacaaaactaccataaaataactcagacttaattaaatacaaccctagtggtgaatgactaaagctggattactcataacagagrtaacagtccaataagaatccaggaatcttaccttttaataacaaaaaaatcctttccttctaaagtaacatcctctcaaggccaggaattccattagtagaaagccttcctaaaaaacaaaattcctggccaggcatgggttcacgtctgtaatctcagcactctgggaggccgaggcgggaagatcacttgatatcaggagtcgaggcgggaagatcacttgacgtcaggagtttgagactggcccggccaacatggtgaaaccgcatctccactaaaaatacaaaaattagcc

SEQ ID NO: 131257 - DNA, 605 bp, Homo sapiens
gagttctagaccagcctggtcaacatggtgaaacaccatctctactaaaaatacaaaaaattagccaggcatggtggcgcatgcctgtaaatccagctactaaggaggctgaggcaggagaattgcttgaacctggaaggcagagaatgtggtgacctgagatcacgtcattgccctcaagccacggcaatgagaacaaaattcggtaaaaacaaaacaaaacaaaacaaaactaccataaaataactcagacttaattaaatacaaccctagtggtgaatgactaaagctggattactcataacagaggyaacagtccaataagaatccaggaatcttaccttttaataacaaaaaaatcctttccttctaaagtaacatcctctcaaggccaggaattccattagtagaaagccttcctaaaaaacaaaattcctggccaggcatgggttcacgtctgtaatctcagcactctgggaggccgaggcgggaagatcacttgatatcaggagtcgaggcgggaagatcacttgacgtcaggagtttgagactggcccggccaacatggtgaaaccgcatctccactaaaaatacaaaaattagcc

SEQ ID NO: 131258 - DNA, 605 bp, Homo sapiens
gagttctagaccagcctggtcaacatggtgaaacaccatctctactaaaaatacaaaaaattagccaggcatggtggcgcatgcctgtaaatccagctactaaggaggctgaggcaggagaattgcttgaacctggaaggcagagaatgtggtgacctgagatcacgtcattgccctcaagccacggcaatgagaacaaaattcggtaaaaacaaaacaaaacaaaacaaaactaccataaaataactcagacttaattaaatacaaccctagtggtgaatgactaaagctggattactcataacagaggtaacagtccaataagaatccaggaatcttaccttttaataacaaaaaaatcctttccttctaaagtaacatcctctcaaggccaggaattccattagtagaaagccttcctaaaaaacaaaattcctggccaggcatgggttcacgtctgtaatctcagcactctgggaggccgaggcgggaagatcacttgatatcaggagtcgaggcgggaagatcacttgacgtcaggagttygagactggcccggccaacatggtgaaaccgcatctccactaaaaatacaaaaattagcc

SEQ ID NO: 131259 - DNA, 541 bp, Homo sapiens
aatggaatgctggtagaacacagggcccaaaggagcaaaagttaacctaagcccaggtagaaccttgtttactagagtattaggcatgggtttgggcaactattctaaccagagaaactggcttcagtgagggcaagttggcaatccaaggtatagcatgcatagggctggcaaaattcagggtgactgaagcaaaagcttcagaaccagaaagaccacatctgggggtagagcacaaaactctcaagagatgaatctttgtaagagtgaggcagaactatatagcagttttaggagatctgttggtgcccagcaagagctccaaacgggctatatgcagggatgcaggctgtagtctcaggagaggaggttcacaaaagtcattcagtccaagacctcaaactgtgttctctactaaaaggaatcaaggttccctagagaaayggctgactccatgtatggtgcagtatattgatcctggaacatcttttttgccagaaagcaaggaagccatcaaagtccaacaggatcacgtcaaaaa

SEQ ID NO: 131260 - DNA, 578 bp, Homo sapiens
aaagcacatgccctgatcattactccggtttccccgataaggagtggggcacatctggcgaattatctggaccatgttggcyagctgcaagttgggacgaaagctgcgacgtgtaaagctctttcggcactgggggcaggtgaactgccctggaaggggcaaggaaggaggcgggtggatgtcaggatacagctcttcatcttcgtcctcatcgtatgcttccagtatttcttcttctcggtagacatcaattctcaggtcaggtctcaagcctcctaggtaatagtcctgatcttcctcttcttcttcttcctcctcgtcccacatatagtctacgttgtcccaattagttataccactgtcaccgagccagagttcatcgtcatcttggtcttggaacaactcttcgtcagcattcccccgatacaacacctctcgaatggagccgtcccatccatccatggcccccaccgcttcctcgtcctcctcctcctcccattcatcttcctcctcgttctggtcctcctcgtcctccttactccacagctgggtcacacaccctcggcagaagttgtgcc

SEQ ID NO: 131261 - DNA, 550 bp, Homo sapiens
ttgtttagagtaaatttaagagagaatgggcmgatatgaaatggaagcagaaaatgtagccattcctttgaggagttgtatataaagtcatagcaatcttctataaggcaagcactacagtcaatgtatgcggtgcttagaaaaaatacacattgaaatacctaacttttctttaatgagctaactcattaagatatgggtggtgcattattttaccaacatcatgatactggactttcagagggaaaaaatagataaacatatggaggaatcaacattattatttatttttactaccccacatcctatttctgactttagtatcattcattacctttttgagtttgtgtgtatgtgtatgtgtgtgtgtgtgtgtgtgtgtgtgtgtgtttaagcaagttttttgaacatggcttctctgatgtctttactttttaaatcacctagacttgtgtaaagagcggtctcattgctacacagtacaactttgaaatattttgacaggaatttttactacaatacaaagagaacaatagaaaaatacaaaaat

SEQ ID NO: 131262 - DNA, 555 bp, Homo sapiens
tcatgttagttaacaatatttgtgcagttgaaaaacatctccattttcagtttcccaatctctcagttgtatgtatgtatgtatgtattattttaaattttcatttaattcacttacaaggaatgagatgaatcaccatggtgtaaaacaaacaaaaaaaattatatagtctctaactcatatgagattgtaatcatttggaaatatgagcaagaaatatttacactttgaaagagccacagatggtgatgtatccaacgtatgagacacacaccaagtgctatgagtattcagggtagtgagatattactgtgtactagagcagcaaagacagatttggggaaggacatagacttgagatgagtcttaaaaataatctgtacctgaatagatgaagaggtgtggagagagcatgccragtacagctgctcagcatttttgcatataaggtatgtttggtgagtttggggatatgtaaagttattatcaccaagcataaattgtatatagtgttttgttttgttttaaataccatacagattcttattcttaaaa

SEQ ID NO: 131263 - DNA, 580 bp, Homo sapiens
taagcatatgatgatagtccaaacatttccatatgtccattctttttcagtgtcaaaacctgtgaaaatgctagagaacccaaaacactactcacatgtgtatcgcctggccctacctaaaccactaagtcagatcctcttttgcagtgtgtgtgtgtgtgtgtgtgtgtgtgtgtgtgwgtgtgtgtgtagacctcaatgctctcagtataataaaaactaaataacttgaggatctgaaataaagattataaatttgatttgtatttagtatgttgagaatagttgctgtctcatcgctagttgaaaggcacttgagaccaatattcagtcttttttgttgtttatatccaagaataaaaaaaggaagttctttggcatcagcctttatttaatttttatcttgctgttgcacaacatattgctgaactattaatcttcaaaagtactgagaacatgttttatttgtggatgactagaagagtcctagaaactatattttaaaaaatgaaatggctttactgccttgcactaattcttacaaagaagtattcatctcagtttacagttcaagtgccag

SEQ ID NO: 131264 - DNA, 621 bp, Homo sapiens
attgaagtctcccatgattgttttgctgtcattccattggtctagtagcaattgttttatgaatctaggagctccactgttaggtgaatataaatttagatttgtaatatcttcttgttgaattggtccttttattattacattgtgatcatctttgtctttttttaatgttgttgtttgaagcctattgtctgatataagattagctacccctgctagcttttggtttccatttgcatggaatacctttttctacccttttacctcgagtttgtatgaatccttctgtgttgagtctcttgaagacagcagatatttggattgtgattttttaaatccattttgccattctgtatcttttaagtgaagcatttagaccatttactttcaatgttaatattgagttgtgaggtactattcactattttactttttgttaattgttacctagtattttgttgttgttggtaattgttacctagtgttacctgtttttttttkttgttgttgttgttgttaattgttacctggttttttttctcacattgtgttacggttttgtaggtcttgtgaattctaagctttcaaaaggttctattttagtgtataatatatataaat

SEQ ID NO: 131265 - DNA, 529 bp, Homo sapiens
cattggggtgtctgttagtattaccatgccctgtgattaatgtcaatgggtaactaaaacagcccaatccagacaggactgcaaatggcccagaaccttcagaaatgaagttttgggtcactccaccaggaaaaaactatgaccttggaggggccaagatagccaaatagaaacaggtccggtctgtagctcccagygagaccaacgtagaaggtgggtgatttctgcatttccaactgaggtacccagttcctcttactgggactggttaggcaattgttgcaacccacagagagtgagcagaagcagggtggggtattgcttcacctgggaagtgtacggagccaggggacttccctcccccagccaagggaagcagcgagggactgtgctgtccatcctgggtactatgctttgctcatggatttttgtaatccatggatcagaagattccctcataagcctataccaccagggccctgggtttcaagcacaagactgacaactgtttgggtaaccactgagctgc

SEQ ID NO: 131266 - DNA, 580 bp, Homo sapiens
tgaagtatattccactaatagcaggaaaaaaaatccctctgaagttgaaaggcatataagaacatttatcatcacttcataattaaaattatagaccttctttggaaattgggctaatggtatctatcaaaaatacaaagtatttctaagttcatatttattaaagcttccctgcagagtccataaaatcattaaagacatcattataaaaatcaggacaataagaactcacatttatgtgtaagcaacaggggggctatgccttttacctgaatttcctgatttaatctgtataaccatccaggagtgtgtgttattattggtctcaattttgcaggtaagaaacctatcctcagakaaatttaataacatacccagagtcacagagctagtattatcagacaatcagacaggaccccccccttcagaattaagcaagctagaaaaaatcatttaatttactaccagttgagtgatgtaccactaatagttacagggagtattgtcattgaattttatagccatttttgtattggcactaccaatataaaagcctgagatgagtgtccctgtaaaattg

SEQ ID NO: 131267 - DNA, 480 bp, Homo sapiens
gatattatacagtgtttcttctgtcaggattacttagtagtttatcttatgatgtcttctatctatccatcatttctataagctgatgtggtattgtttttgacaagagtacaaagccctgaagtttttagtaagatatatagaacattttttcagtaaaaaatgaaaayattattaaatgtttctgcttatgcaaacatatgcttttagcagttttcaaataatcataattattttgtgtgccaaataagtctacggtgccatgtttctatgagcaatagctcttaagactaaagtactgcaaaagtcacaataaaagcagaatagctatgataaaataactatagtagcatcctgtttaatgagaataatgcatgattattcaactaatacaatttaaaagtcattaatctatctaattgcattaaagatttaagacagaagacaagtaagaattctaataaaatttgatatacaaga

SEQ ID NO: 131268 - DNA, 393 bp, Homo sapiens
aaacttatttgtttataactaagtgttatttaatgggctccttacatcaccttttgatagtagagggcagagtatataagaagaaaggccaagaagtacaaaaagactttgaaaaaatatacaattaacctgtttctaaaataaatgggtattttcttccacccagtaaaccagagtaagtctttaaacaagtttggtctcctaagagcagtcagtatccacattmataaatgcatttaccttacaaaagaaaagggtagggattggggaagtcatttcatagagaaatgcagatgaccaataaaataataatgatagtaataataatctgtcttgcctatcatattggcaaagtgttttcttcgtttctgttttaaactggtaataaagtgt

SEQ ID NO: 131269 - DNA, 500 bp, Homo sapiens
ggaaaatactcagggtgtcatgtgctttcccttcacttatgtcttacataaagaagaaacgatatacatggatccaaagctttctcaagcaagataygtactgtcagtagaaagagtaaagctgaaggcaaatatccctaaattgtcataaccaaagatggaaaaattttataaattattaataacatttcctgattaaaaaaatagctatgatttattgagcatttactgtatatctataggtagtgttctaaatgtgtcacatgcagtgtctgatctcagccttacagacagggattctccttgacctttcttttgtcagaggagaaaactgaagctcagagaagtaatttatcaagactgcacagccagtaagagacacgggcaggagtcaaacccagcttgggccctttatgtatgtctcagaaatataccgcctttcttaaaaattagaattgcatacagacaagagccaggccttgctttatcatttaccagtt

SEQ ID NO: 131270 - DNA, 500 bp, Homo sapiens
ggaaaatactcagggtgtcatgtgctttcccttcacttatgtcttacataaagaagaaacgatatacatggatccaaagctttctcaagcaagatacgtactgtcagtagaaagagtaaagctgaaggcaaatatccctaaattgtcataaccaaagatggaaaaattttataaattattaataacatttcctgattaaaaaaatagctatgatttattgagcatttactgtatatctataggtagtgttctaaatgtgtcacatgcagtgtctgatctcagccttacagacagggattctccttgacctttcttttrtcagaggagaaaactgaagctcagagaagtaatttatcaagactgcacagccagtaagagacacgggcaggagtcaaacccagcttgggccctttatgtatgtctcagaaatataccgcctttcttaaaaattagaattgcatacagacaagagccaggccttgctttatcatttaccagtt

SEQ ID NO: 131271 - DNA, 433 bp, Homo sapiens
acagtgccaataccttgattttagcccagtaagatctatgttgaacttctaaccttcagaattgtaatataataaatgtgtgttgttttaaaccattaaatctgtagtaatttgttacagcaacaagaggaaacttatacaataatgaaaatggtttcacaaatggggctttcaactgtgaagggaaatcaggctaaaaccttgggtgaggcagatccaaatctatcacaaacaaaakaaattcaaaactgtgcaaaatctatgtcagattattttttcctttcaaagaggagcattatgattacaaaaagacactatggtattttaagatttcttggtctaaatagtctgaaaaagcgcttggcaatgaactagacaaaaaaacaaacaggcctgcttaaaatagcaatgaaaaatattgtatacctagtac

SEQ ID NO: 131272 - DNA, 433 bp, Homo sapiens
acagtgccaataccttgattttagcccagtaagatctatgttgaacttctaaccttcagaattgtaatataataaatgtgtgttgttttaaaccattaaatctgtagtaatttgttacagcaacaagaggaaacttatacaataatgaaaatggtttcacaaatggggctttcaactgtgaagggaaatcaggctaaaaccttgggtgaggcagatccaaatctatcacaaacaaaataaattcaaaastgtgcaaaatctatgtcagattattttttcctttcaaagaggagcattatgattacaaaaagacactatggtattttaagatttcttggtctaaatagtctgaaaaagcgcttggcaatgaactagacaaaaaaacaaacaggcctgcttaaaatagcaatgaaaaatattgtatacctagtac

SEQ ID NO: 131273 - DNA, 418 bp, Homo sapiens
acaaagtgagttattatacaataaaataagtttcaggagaaaaatagttttaaactctttcaatatgggactcttcagaactaattcagatttgtatccataaaggatgtttaagataaaattttctttctgaagccaggaaagccaactttgttgctttattcctggaagtgttatcgatttgatatagtgaatgaagatattcaaaagaccttaagcaattagaaatccagggtgatatttgcatattcgatcccacctacatgactacctgtgaccaggtacttaagttacattacataacagaaatccacacatatatattaatgatgaatgacacatgtgatatatgcaagcctgtcactatatgctatatgcagcatgtgagactccmaaaaatcaacctgagtatattaaa

SEQ ID NO: 131274 - DNA, 620 bp, Homo sapiens
gtagtatcctggatgggatgttggaacaaagacaggcattaggcaaaactgaggaaataccaagtatgaaatttaattaacaatgatgtatcagtattgttttgttgttgttgttgttgttgtttgttttttcagagacagagagactctattgtccaggatggagtgcagtggcacagtcatagctcactgtaacctcaaattcctgsgctcaaacaatcctcttgcctgagcccactgagtagctgggactacaagcatgtgccaccatgctcagctaatttttttaaaattactttttatagtaatgggggtctcattaagttgcccaggctggtcatgaactcctggtctcacacaatcctcccacttcagcctcccaaattgctgggattacaggcatgaacccttgcacttggcctgtgttggttattaattgtaacaaatgtaccatactaatgtaaaatgttaataaaaggaaaaactggctttgggggcatatcaaatttctgtgtgctatctttgcaattttttcataaatttaaaaccattctaaaaaatagtctattattatagtagttttgagagtggcaagactatggaaagcaagccaattatct

SEQ ID NO: 131275 - DNA, 533 bp, Homo sapiens
aatcaaaactcattcttttatttttatttttccctgcccatttctgtatagtagctaggaagtatacatgattagcacatttcagaacaaggccacttagaatgaacgattagaaaaacagaacaaaaactagcccaaaatactaattatacaccttatagcacttacaggttgtatagyactttgtactgtgtgacaagccatatagaatgtagtatccatttcacacatggaactatcctcaaaactattatgtatattttataaattaaaactattgtcaaaatcatcatgtatattgtatgaatttaatttaaacaaatgagcctaatatggggccactggaaatacatatgtattcaatgaaagacaaaagtttaaaactctataatagaaatttatttggaaaagcaaagacagaatacaaaattttacaatttacaattacacactatttttgtggtacagaaaaaccagttaacaactttccactgccatttggacaccaaaatggactgacccaggcaaggaga

SEQ ID NO: 131276 - DNA, 533 bp, Homo sapiens
aatcaaaactcattcttttatttttatttttccctgcccatttctgtatagtagctaggaagtatacatgattagcacatttcagaacaaggccacttagaatgaacgattagaaaaacagaacaaaaactagcccaaaatactaattatacaccttatagcacttacaggttgtatagcactttgtactgtgtgacaagccatatagaatgtagtakccatttcacacatggaactatcctcaaaactattatgtatattttataaattaaaactattgtcaaaatcatcatgtatattgtatgaatttaatttaaacaaatgagcctaatatggggccactggaaatacatatgtattcaatgaaagacaaaagtttaaaactctataatagaaatttatttggaaaagcaaagacagaatacaaaattttacaatttacaattacacactatttttgtggtacagaaaaaccagttaacaactttccactgccatttggacaccaaaatggactgacccaggcaaggaga

SEQ ID NO: 131277 - DNA, 533 bp, Homo sapiens
aatcaaaactcattcttttatttttatttttccctgcccatttctgtatagtagctaggaagtatacatgattagcacatttcagaacaaggccacttagaatgaacgattagaaaaacagaacaaaaactagcccaaaatactaattatacaccttatagcacttacaggttgtatagcactttgtactgtgtgacaagccatatagaatgtagtatccatttcacacatggaactatcctcaaaactattatgtatattttataaattaaaactattgtcaaaatcatcatgtatattgtatgaatttaatttaaacaaatgagcctaatatggggmcactggaaatacatatgtattcaatgaaagacaaaagtttaaaactctataatagaaatttatttggaaaagcaaagacagaatacaaaattttacaatttacaattacacactatttttgtggtacagaaaaaccagttaacaactttccactgccatttggacaccaaaatggactgacccaggcaaggaga

SEQ ID NO: 131278 - DNA, 593 bp, Homo sapiens
agtaatgcatttaaacaccatctcccaacaagtcaaagaagccagtagaaaataggaccaaacagtactttactgccagggagtttccttggcaatgagcttgttctattcccagggtgtttttggagaaagaggaggggaggtgaattataaacaggttctagggagcttctatatagttctagccatagatcaggctgataaataaaactcaggcagagtggaattgaagtgaaacaactttctgtacaaagagaaagattatctctactcttgggatgagtagagccgaatagtttccatcaggaactgcaaagctctataaacttcaatagcacattccgactccgctagaacactaatgaaattgtgaaagtatagtygtcctttaaatgtttgtgcctgaagttatgacctgtttcaaatgacaggaaactagagacaacactttaatggttatgaatgcatttagaaagaaggcttgctgtctaatgagtgtggagaaggcactacaattgaggaacaatttactaccaagaaatcaatttgaaaattctatacaaaattatcacccattaaattgtctttcttca

SEQ ID NO: 131279 - DNA, 411 bp, Homo sapiens
gaaatatttttcagtttttccaccaccaagagcttctttgcggctctccctctccccactgacttggtgtattgaaagatagtgggcaacaactctacacattaagtcataattagcttattttatcattttgttcatccaaagcatgtaatactgctaatcgaagcttctaattagaagtagtgcatgaaggagwcaatactcttaatattacagcccaaaggagagagactcgacatttaggtttgctttgtaaatgtacagcttgcctaagctttaagatgttgaaatcactccagaagatctgtttggccaataaggtccttcatgccatgcctcctgccagccagtcttctcctgacatttgccactatctcgcccagccacgataattaagtttatgtggaagga

SEQ ID NO: 131280 - DNA, 338 bp, Homo sapiens
aagcttgatgtctcttggcctgacctcatttactcccagctcagggccagagctagtgtgtgtggctggtgtaactcaacccagtaccaacttgtcagatggctgtggtcccctgggactttccaggcactgtgcagggagaagcagactgggagcwtgcaggtgcctctgcctctggattccagggggcacagcagggcagggaggaagagggtggcaggaggagacaaggggcatcagctaattaccaattaccaggccctttgcaaacacaaagcctccacctgaatgataaacgttattaatccagctccattttgccaaccgcaatgtttcta

SEQ ID NO: 131281 - DNA, 428 bp, Homo sapiens
catcttggtcacataaacggtccataaatgtgaactgttaataccgacagtgcattctgyggaggggatgcttccgctccccacccccagtcttgtcttccactcaatccagttattctgcaacaacccttactctcggcatctaatcatgacataaagctaacagtaataacacttgcatattgagaaaaagaatgatggtttgtgtggaaataaaagtagacagtaaacatctttcattcatttagcaggtgttcattgacactgtcctgcaggccaaggacaaccgtaagaggtggttgtggctagactcaggctagcgatctcaatgggaaggatagcattagagttgaaaggtctttagggaccaagatgaaccgtgcctggagatgagctaaaggcagaaggagaaggagaaggacactttg

SEQ ID NO: 131282 - DNA, 460 bp, Homo sapiens
gattgcactattgcactccagcctaggcaacagagcagtctcaaaaaaaaaaaaaaaaaaaccaggcatttcactctttcctcccactgtcccatgaggcacatgcatccttcccatttctcctccctcccatacacttacggtataattttgctttgatcaatatttattacttaaaatattttgaatatgcaaatgccattctcatccaagttgtaaactatgatggattcccatttcttgcacactcctcatttcmtgccacccccccaccaaaaaaaaagcaatttggaaaaatccaagattccttttcattctctgaatgtttagtttttttaagtactatctcccaatttacaatggtctcttctgctatttttctaagttctctctgcctcttttctaaagtttgctttgcctcacagagtctgtgtcctccaagtagatttgcttctgtttg

SEQ ID NO: 131283 - DNA, 506 bp, Homo sapiens
atactcatccgtgcatccatatatccatccatgaatccatatatccaaccgtgcttccatataactatccatgaatccacatatacatacatgcatctacatacacatccatgcatccacatatccatccatgcatccatgtatacatctacccatccacatccactcaagcatccattcaacttgttctactaatatttctcaggtttttactatattccagggcctgaggatagtctggtgaacatgatcgacacaactgctaccttttcagggcttgcagttagaaggggcacaatatcaatcaaataattccacaaatgaatatataataacaaacyaaagttctgcccagacatcatccatccatccatccatccatccatccatccatccatccttccatccacccgtccatgtatccatctgtctatttatccacctacctacccagcataggaaaagcctcagtttttgaagtgctattctggagtttgaccatatct

SEQ ID NO: 131284 - DNA, 578 bp, Homo sapiens
atctcttctaataatagtaaaattctcttctaattcttctcccactttcagtttttttttcccktctctaaaaatagtctaaattggtgtgtggaaggaagtggtgttgaggtgacgtccagagtcgggttctgtttcctcctatcttgaacctccccagacatcggcccagcactcaccagcaccatgatgagtgtgagcccctactgaagagccttctcacggcctcctggacctccttgttcatcagactgtagatgaaggggtttagcatagaggtcaccacagtgtacatgatggttgctatggtgtcctgggctgagaaggagtctgggggtcatatgcagatccccaggacagttccatagaacagggtgaccagagacaggtgggagctacatatggaacatgccttgcgccttcttgtaggagagggaatccggaggatggctgcagcaatgcggatgtaggagaccaagatgagcgcacagggagccaggaacaggaccacggcccccaggaacacatgctgattgacatgtatgtgagcaggcaatcttcatgagcaggtaggcgtc

SEQ ID NO: 131285 - DNA, 578 bp, Homo sapiens
atctcttctaataatagtaaaattctcttctaattcttctcccactttcagtttttttttcccttctctaaaaatrgtctaaattggtgtgtggaaggaagtggtgttgaggtgacgtccagagtcgggttctgtttcctcctatcttgaacctccccagacatcggcccagcactcaccagcaccatgatgagtgtgagcccctactgaagagccttctcacggcctcctggacctccttgttcatcagactgtagatgaaggggtttagcatagaggtcaccacagtgtacatgatggttgctatggtgtcctgggctgagaaggagtctgggggtcatatgcagatccccaggacagttccatagaacagggtgaccagagacaggtgggagctacatatggaacatgccttgcgccttcttgtaggagagggaatccggaggatggctgcagcaatgcggatgtaggagaccaagatgagcgcacagggagccaggaacaggaccacggcccccaggaacacatgctgattgacatgtatgtgagcaggcaatcttcatgagcaggtaggcgtc

SEQ ID NO: 131286 - DNA, 470 bp, Homo sapiens
tgcccaggctggtctcaaattccagagcacaatgtgatcctcccaccttggcctcccaaagtgctgggattacagccaggagtcactgcacccagccaggatgtttattttttaaccttctatttgtctgatgtctgggctctatggggagtggcaagggaaagtggtatacayttaatgacacagaggagactttgacctaaatggtgagaccctgaagtgtgaatgctttggaggagaatatagatcagaagtttatgatcaaagtaattatttacaaatagatattttccattactttatttttaatttaaagttctatataacattggaagtaatattctttatgtacaactacaatagattttatcctttttctaatacttctgttctagttacagaaccatgaatgacctctttgataactggaatgaaaatgttgtagctgcttataagattttttaaagata

SEQ ID NO: 131287 - DNA, 470 bp, Homo sapiens
tgcccaggctggtctcaaattccagagcacaatgtgatcctcccaccttggcctcccaaagtgctgggattacagccaggagtcactgcacccagccaggatgtttattttttaaccttctatttgtctgatgtctgggctctatggggagtggcaagggaaagtggtatacacttaatgacacagaggagactttgacctaaatggtgagaccctgaartgtgaatgctttggaggagaatatagatcagaagtttatgatcaaagtaattatttacaaatagatattttccattactttatttttaatttaaagttctatataacattggaagtaatattctttatgtacaactacaatagattttatcctttttctaatacttctgttctagttacagaaccatgaatgacctctttgataactggaatgaaaatgttgtagctgcttataagattttttaaagata

SEQ ID NO: 131288 - DNA, 380 bp, Homo sapiens
agggagggatatagcgttgtaaagaagatactgtagccttgaaaagaggatgggatttggagaaaatgaatatttgacaattattttttatcacccatttstagagctaaggccatttaactttcaggaacactaaactggaaactattcagccaatatttatacagatttactaacagtttacatgtttgggatggttagtgatgcagagccataagttgttgaattttaagacatccggcaagaggcataagtcgttcaattttaagacatctagcatctcactcttttacgacttacaagaagcagacctgcttgtgaaaacatgcccacctgaccagcagcgtcagtgacagagtcaccgggtacaacttgcccgc

SEQ ID NO: 131289 - DNA, 612 bp, Homo sapiens
ggtgcatctaagtatctggaggagctgttaaagcacgtgttgctagaacccactctgagagttttatttttgtttgtttgttttttgagacggagtcttgctcttgttgcttagtcaggagtgcaatggtgcgatctcggttcactgcgacctcagccttcctgggttcaagcaattctcctgcttcagcctccccagtagctgggattacaggtgcctgccaccatgtccggctaatttttattttttctttttgtatttttagtagagatggggtttcaccatgttggccaggctggtctcatactcctggcctcrtgatctgcccacctcggcctcccaaagtgctgggattacaggtgtgagcccagccgagagtttgattttctaacattctcaggggtcgctgttgctgctgccgctaatgttggtaaagtggttagtcagacagatacagggcccttgcccagggtttaaacccttgctgggtttaaactttagatcttctacttgtagctagctatgtggccttggccaggtcctctaacctgtgtgagccttagtttcctcatctgtaaattggaatgctacctgcttcctaggatgttgtaa

SEQ ID NO: 131290 - DNA, 533 bp, Homo sapiens
tctttctacttgtttgtctttgagagcttctttcagcaaggtttcatagtttagagtgtactagtcttctgcatcttttgtcaaatgtctgtttcacatttttaatgttttataaatgatattttaaaaagttgtaatttctgattgtttctgacatacaaaaatataatctgccctggtctacacatcttgtatcctgcaatcttgcccaaagtcatttattcgtactagtagcttttttttttgcatttctttggattttctacatagacaaatacagttttgcttcttcctttctaatcaggatgccttttatgtatctttttccttttattactggctacgaactccagaacaatgtttaataggagtggtgagagcttgtcttgtcttatttctgatctcaggaggaaggcattcmgtctttcatcagtaagttgattttttgttgtaagtggtttgcagattttttttttaatcgggttaggttcctttctgttcctagttttctaagagattttttctaaaaaatc

SEQ ID NO: 131291 - DNA, 607 bp, Homo sapiens
atgttttcaaaactcatgttgcacttacctctcttttttgattgctgctacttaaaaccagagatgcattttcactccgaagttctccccttatagtaagatttaagctggaaaaatatgactgaaaagcaaataggatttgttcttaatatatgatgctaatcaaaatgagagctagtcatgtttgagtaggacatttataaaagctaagatttttctgagagattaaaaattccagttttgttaacttccaaatggaactggtagtatcaaataataaccgtgcacttgtcctccctcatttgccactgaaaatccttacttagatcctcgttatggaatgaaaaaaaattttaaaaatattttgtattgatttatcattagaaaaaacaaacctcaaacwctgcctacctttaatgtagcaagacatgaaacaactacattctggtgatgaagtttatctaggcacttatttaggattaaaaatgaaattgatgatctagggggacaagatggctaactagacacagccatctctcccactaagagatcccaaattatcaagtaaataatataatttgggcagatctgatctctagggagaaaa

SEQ ID NO: 131292 - DNA, 607 bp, Homo sapiens
atgttttcaaaactcatgttgcacttacctctcttttttgattgctgctacttaaaaccagagatgcattttcactccgaagttctccccttatagtaagatttaagctggaaaaatatgactgaaaagcaaataggatttgttcttaatatatgatgctaatcaaaatgagagctagtcatgtttgagtaggacatttataaaagctaagatttttctgagagattaaaaattccagttttgttaacttccaaatggaactggtagtatcaaataataaccgtgcacttgtcctccctcatttgccactgaaaatccttacttagatcctcgttatggaatgaaaaaaaattttaaaaatattttgtattgatttatcattagaaaaaacaaacctcaaactctgcctacctttaaygtagcaagacatgaaacaactacattctggtgatgaagtttatctaggcacttatttaggattaaaaatgaaattgatgatctagggggacaagatggctaactagacacagccatctctcccactaagagatcccaaattatcaagtaaataatataatttgggcagatctgatctctagggagaaaa

SEQ ID NO: 131293 - DNA, 597 bp, Homo sapiens
aattgatgatctagggggacaagatggctaactagacacagccatctctcccactaagagatcccaaattatcaagtaaataatataatttgggcagatctgatctctagggagaaaacaccgcaagtgtgtggagaggcaacacagatgctgaggctgaagagggagaagctgggaaccctgcgtagggtacctgaatgcttgggctacttcctggccctaaatggctcctggagaaggggtgagggaggggactgagggacagctcactcttgccacagacatctgggatctaagctacagagtacccaacatctccaatggatgtgtgagctggcaggtggattttcccagggagcaggtagagacagggcttcagctagcatggagcccaggagcttttgtgagcagagcacagacataggtgcccatcccctcrgactccccatctccttcagagaggctctagccccaggtgaccacaagccaggagaaagcaggcattccccatgggactggggcatgtctgttctgcagcctctcccgcctgccagaccctcccagagtccctgcctaactgccccacaggagcatgtg

SEQ ID NO: 131294 - DNA, 597 bp, Homo sapiens
aattgatgatctagggggacaagatggctaactagacacagccatctctcccactaagagatcccaaattatcaagtaaataatataatttgggcagatctgatctctagggagaaaacaccgcaagtgtgtggagaggcaacacagatgctgaggctgaagagggagaagctgggaaccctgcgtagggtacctgaatgcttgggctacttcctggccctaaatggctcctggagaaggggtgagggaggggactgagggacagctcactcttgccacagacatctgggatctaagctacagagtacccaacatctccaatggatgtgtgagctggcaggtggattttcccagggagcaggtagagacagggcttcagctagcatggagcccaggagcttttgtgagcagagcacagacataggtgcccatcccctcggactccccatctccttcasagaggctctagccccaggtgaccacaagccaggagaaagcaggcattccccatgggactggggcatgtctgttctgcagcctctcccgcctgccagaccctcccagagtccctgcctaactgccccacaggagcatgtg

SEQ ID NO: 131295 - DNA, 597 bp, Homo sapiens
tgtctacccttgaacctttagtaaatttttggcattaataggaggcatctgagatggggataattaaaacagcaaataattccaaattgtggatttgttttattagaatgccatcatttagacataacaagaaacacagagtgtttttggtgcctccaaactcagcccttgtactgatgtttccaaacttaatggtttattttgcaaagaggagagaaagaaatatggatagcctcggattcaaggatagccttgattctgcaagtaatcatcaaaattattctaaatgttgatggaaaccagtccatggtctrtaggtaaatggtccaggagatagcacattttccacgcatcttgttaagtcaagtctccaaactgttttggaaatttggatatgattgtgccccatattactaaagacataagggcaaaaaaaagctgtctgtatttctttaagacagaacaatgattgttctgatgttatttttcagttgagtctaagacaaatcacatgccttgcaagtaaatttaaacttactttgcaaatttagtttttcacatgtggcagtggataggtcaacaggacatttatacaca

SEQ ID NO: 131296 - DNA, 597 bp, Homo sapiens
tgtctacccttgaacctttagtaaatttttggcattaataggaggcatctgagatggggataattaaaacagcaaataattccaaattgtggatttgttttattagaatgccatcatttagacataacaagaaacacagagtgtttttggtgcctccaaactcagcccttgtactgatgtttccaaacttaatggtttattttgcaaagaggagagaaagaaatatggatagcctcggattcaaggatagccttgattctgcaagtaatcatcaaaattattctaaatgttgatggaaaccagtccatggtctataggtaaatggtccaggagatagcacattttccacgcatcttgttaagtcaagtctccaaactgttttggaaatttggatatgattgtgccccatattactaaagacataagggcaaaaaaaagctgtctgtatttctttaagacagaacaatgattgttctgatgttatttttcagttgagtctaagacaamtcacatgccttgcaagtaaatttaaacttactttgcaaatttagtttttcacatgtggcagtggataggtcaacaggacatttatacaca

SEQ ID NO: 131297 - DNA, 609 bp, Homo sapiens
ccaacttcaaactatactacaaggctacagtaatgaaaacaacatggtactggtacaaaaatggacacatagatgaatggcacagaatagagagccccagaaataaagttttacactgacaaccatctgatcttcgacaaagttgacaaaaaaaaaaaaaagaaagaaatagggaaaggactgcccatttactaaatggtgttgggataactggctagtcacaggcagaagattgataatggaccccttccttacaccatacacaaaaatcaactcaagatagatttaaggacttaaatgcaaaacctgaaagtataaaacctggaaaataatcaaggaaataccattccraacattggctctggcaaggatttcatgataaagatgccaaaagcagttataacaaaacaaaattgacaagtgagacctaattaaactaaaaagcttctgtacagcaaaataaactatcaacagagtaaacagacaacctatggagtgggagagaatattcgaaaactatgcatctgaaaaagattaaatgtccagaatcggtatggaacttaagcaaatttaccagcaaaaaaccaaacaaccccattaaaaagtggg

SEQ ID NO: 131298 - DNA, 365 bp, Homo sapiens
aagacttgtctgagattctccagagggcctccaggaggggaggaagacaccaaaaccctcttcctcctcagggacttttgtgatgtcaaaggagaaaactggaattctattcacaactctttctctgtggaagagtagatgtgtcatgcccagtgcagctcagattccagcagaaacagaaacaagaacatgcccagaggggctcagcatcagtgaagaagcccagcaaaggaaagcttgcttctcccrgtctggctgccttcagaggcacccagcttcaagccagctgggctcagttagaaagaccacatgtgggatattagtttggtttcaaatcccacacttaaagcgggacatttccaaat

SEQ ID NO: 131299 - DNA, 365 bp, Homo sapiens
aagacttgtctgagattctccagagggcctccaggaggggaggaagacaccaaaaccctcttcctcctcagggacttttgtgatgtcaaaggagaaaactggaattctattcacaactctttctctgtggaagagtagatgtgtcatgcccagtgcagctcagattccagcagaaacagaaacaagaacatgcccagaggggctcagcatcagtgaagaagcccagcaaaggaaagcttgcttctcccggtctggctgccttcagaggcacccagcttcaagccagctgggctcagttagaaagaccacatgtgggatattagtttggtttcamatcccacacttaaagcgggacatttccaaat

SEQ ID NO: 131300 - DNA, 395 bp, Homo sapiens
tgtagattatgcctagctattctagagagattatgaggtggtcattcaggggtaaggtagaatacaaggcaatctcatgacaggctgacttggtggatagttaggtgctggtgggaccttcctctattctttcattagtgttctgaggaaacttaaagctcactcacaccctgtctttctctcacccaagaaaagagcagacctatgtgcagaagtgctggaaggatgtgcgygtgggagacttcatccaaatgaaatgcaatgagattgtcccagcagacatactcctccttttttcctctgaccccaatgggatatgccatctggaaactgccagcttggatggagagacaaacctcaagcaaagatgtgtcgtgaagggcttctcacagcag

SEQ ID NO: 131301 - DNA, 604 bp, Homo sapiens
ttttgctatccttatccccaggttgtggtggctctccttggtattcctttagcctgggaatcatgtagaaacagacaccaagagtttcacagaagcatggcagtcactaatccaactcgtctttttggtaaacattcttgactcttggtaaaaactaaatacataaatgatttctatgtttgaggaaagagttttgttggtttccctttcttcaatcgacagaatctttcgtgaatgatatttcctaatggacacggagggatttcaaagtggtctaagatgttcttctaaccctgtaagaactttatgcctatgggttccatttaaaaaaaaaagaccctttgtgactataaaaaaaagaggttgtcctttcaatgtccattatttaagaatatatattaaaaccaaaagctacagtgaatctagtgawgtggtaaatgaaattttaatttattaatctcaataattcctttggaaatctgaaagatagtggtacatgcatgtgtgagacttatttttactctgtctatagacagcatttgggagcatacaggggatttgtagacaagatgcagtagcttaatctaccaatcaggaaccacta

SEQ ID NO: 131302 - DNA, 604 bp, Homo sapiens
ttttgctatccttatccccaggttgtggtggctctccttggtattcctttagcctgggaatcatgtagaaacagacaccaagagtttcacagaagcatggcagtcactaatccaactcgtctttttggtaaacattcttgactcttggtaaaaactaaatacataaatgatttctatgtttgaggaaagagttttgttggtttccctttcttcaatcgacagaatctttcgtgaatgatatttcctaatggacacggagggatttcaaagtggtctaagatgttcttctaaccctgtaagaactttatgcctatgggttccatttaaaaaaaaaagaccctttgtgactataaaaaaaagaggttgtcctttcaatgtccattatttaagaatatatattaaaaccaaaagctacagtgaatctagtgaagtggtaaatgaaattttaatttattaatctcaataattcctttggaaatctgaaagatagtggtacatgcatgtgtgagacttatttttactctgtctayagacagcatttgggagcatacaggggatttgtagacaagatgcagtagcttaatctaccaatcaggaaccacta

SEQ ID NO: 131303 - DNA, 512 bp, Homo sapiens
ttctcacctttggcaccattgacattttggcccatattattctttgtgacgggggctgtcctgtagggtatttagcagcatctctggcctctacccacaagatgcattarcaccccccaccaagtgagataacccaaatttctcaagacgttgccaaatgtcctctggggagtaaaatcactcctggtgagagcaatggtccagaattctcatttcacccttgacattatcaacgggtaaaacagggcctcagagtcaaaggcccaaaaaggccaaggtgagatttacagaagaaagaggtccaatgtagaggtgtgtgctcctcacagcaaacactgagtcccaacttaccagaaactaatttagtactttgtgtgtattgatttattttcccacttcatacaccacaatcatctcccattttttagatgaggaattgaagtacaaagaggatcactcacccaaagtcacatgcctcctgagttgaactctatgcaacccaaggtcaagta

SEQ ID NO: 131304 - DNA, 499 bp, Homo sapiens
ttggcccatattattctttgtgacgggggctgtcctgtagggtatttagcagcatctctggcctctacccacaagatgcattagcaccccccaccaagtgagataacccaaatttctcaagacgttgccaaatgtcctctggggagtaaaatcactcctggtgagagcaatggtccagaattctcatttcacccttgacattatcaacgggtaaaacagggcctcagagtcaaaggcccaaaaaggccaaggtgagatttacagaagaaagaggtccaatgtagaggtgtgtgctcctcacagcamacactgagtcccaacttaccagaaactaatttagtactttgtgtgtattgatttattttcccacttcatacaccacaatcatctcccattttttagatgaggaattgaagtacaaagaggatcactcacccaaagtcacatgcctcctgagttgaactctatgcaacccaaggtcaagtatccacagagctga

SEQ ID NO: 131305 - DNA, 516 bp, Homo sapiens
cacctttggcaccattgacattttggcccatattattctttgtgacgggggctgtcctgtagggtatttagcagcatctctggcctctacccacaagatgcattagcaccccccaccaagtgagataacccaaatttctcaagacgttgccaaatgtcctctggggagtaaaatcactcctggtgagagcaatggtccagaattctcatttcacccttgacattatcaacgggtaaaacagggcctcagagtcaaaggcccaaaaaggccaaggtgagatttacagaagaaagaggtccaatgtagaggtgtgtgctcctcacagcaaacactgagtcccaacttaccagaaactaatttagtactttgtgtgtattgatttattttcccacttcatacaccacaatcatctcccattttttagatgaggaattgaagtacaaagaggrtcactcacccaaagtcacatgcctcctgagttgaactctatgcaacccaaggtcaagtatccacaga

SEQ ID NO: 131306 - DNA, 578 bp, Homo sapiens
tgtatgtggcctcatgcgggaaaatggctatttgacagtacctgacattaatatggaaaagaagctgagaaaaatccgagcccggacccaaaagcatctagacttgtatgcaagagatggcctgcgcacactatgcattgccaagaaggtaagaacaattcctycaagcgtgctttgaatatcattaaatagctgaatggccttgaccctgcttctttttctttataaaagacccttagaggtggttgttttaacattttcaagattagctgttctgacttgccacaaaaacccaagacactgacaattttgtggaagccaaaatctgaagagctaggtcccatatcagtgtggctttgccatgccctgcttttcattatatgtgtaatgggtaacacacaactcatgacattttttcagttataattttgttttccaattatattttttaggtatgcattattttcctttaaatttggggaccttttatatggtcacataaaaatctagatttccggtttcttttaaaaatgtagaggatctggccaactgtgttttcattctagaatggcagcaat

SEQ ID NO: 131307 - DNA, 545 bp, Homo sapiens
cttattttaaaaagatgattaatgaactgggcatttaaactcaagaataagaaatggaagacagaaagccagtgatggtaaaggataaaagggtaaactaatcggaaactatctcacgtgttttttttttttttgcctctgcttaacactaaggcagagatagacttttcccagttttaggccatcagaaacctcatgggcaactttcccctttcactgtctttctagtttgttttccttgttggtcagacctgtttgagtaaattctcatagtaagttcttctcttccataacaaatagaacttaagctaaacactttttcagaattaaaaaaaaaaactgtactgttttcatttttgctttattttgtttggggttggtggtggttgaatgctgcaagtggcakttatctcatttaccatggattttaatggtatattaaataaaaagataatcacagaaaattttcctgtatattttaatgtaaattagagtaacaggtcaagtaatttaatatcttgaaggatttcttccttccagtttta

SEQ ID NO: 131308 - DNA, 403 bp, Homo sapiens
gaattctgggaaattgtcagctcttagaactacttttagatgtatgtagagtcttctcaatctagcctttatgccttttcattactcgatttcatattttttatgcccttatctctcttgctatgttctgggtaattttataagattcctcttccacttcaccagttttctcttcagctttgtctaattggttgtttaactgaaccagagttcttgatttcagtcactgtattttttctttgagatggagtttcgctcttgttgcccaggctggagtgcaatggcrtgatcttggctcactgcaacctctgcctcccggattcaagtgattctcctgcttcagcctctggagtatctgggattacaagcacctgttaccatgcccagttaatttttatatttt

SEQ ID NO: 131309 - DNA, 524 bp, Homo sapiens
gttgacttcattgtgattagtgtgactactaagcagccaaagaagaaaaggaaggaaagatcatctgaggactaaaatagtttgttaaagggaacatctttatactagtccttgaaaaagattttatccacattctgtttaaaagaggtttgcaacataaagcatccccagctctcttctattggtccctggcttctatttaacagttgtccagaacattttacagccattcagcttggttgccattgatttctttgactgaactgagaaaatatcacaaaatgttctcatgccactggggtactaaasagaaagtacaataatgttcttgaaaatttttttaaaacctttatttgtcttatagccatggccagatagaaaacattttgtaaaggagaaataaacaaatatcttctgtagtctttcttcttaattaaatggataagaaacagataatgttctccttatgggtaatataagtaaataattatgtatcagtggcagatttctcacagtggcttcat

SEQ ID NO: 131310 - DNA, 615 bp, Homo sapiens
actacagtcaccacactgtacattagatcctcagaacttgttcaccttctaaatggaagtktgtaccctttgacccaatttctccctccacgcagcccctggcaaccaccattctaattctgacagtagactttaatgttctgacaacatacacacagaaaatgataactatgtgaggtgatgtatatgttaattggcttgattgtgggaatcttttcacaatgtatacctatatgaagacaccacattgtacactgaaaatatatacctcaataaagaaaaaagtaacaagaaatgaaaaaaataataaagcaacgaaaaaaccctcaaagacctcatgctgtttgaaagagacaagaaactaggcaggcctctgtgtgcaagcccaggctctgcccttttccctgttagttttcaccccttccttcctttaaatccttcttttccccaacgctctggactcaaataactattaggaggaaagaagtgaaaataaactaacatgtgtagagcatgtactgtacaccagatgttagactttattctccattgtttatgttctccaacccatcatcgaatcctgtccctttaaccttcacagtatctccagaatcc

SEQ ID NO: 131311 - DNA, 615 bp, Homo sapiens
actacagtcaccacactgtacattagatcctcagaacttgttcaccttctaaatggaagtgtgtaccctttgacccaatttctccctccacgcagcccctggcaaccaccattctaattctgacagtagactttaatgttctgacaacatacacacagaaaatgataactatgtgaggtgatgtatatgttaattggcttgattgtgggaatcttttcacaatgtatacctatatgaagacaccacattgtacactgaaaatayatacctcaataaagaaaaaagtaacaagaaatgaaaaaaataataaagcaacgaaaaaaccctcaaagacctcatgctgtttgaaagagacaagaaactaggcaggcctctgtgtgcaagcccaggctctgcccttttccctgttagttttcaccccttccttcctttaaatccttcttttccccaacgctctggactcaaataactattaggaggaaagaagtgaaaataaactaacatgtgtagagcatgtactgtacaccagatgttagactttattctccattgtttatgttctccaacccatcatcgaatcctgtccctttaaccttcacagtatctccagaatcc

SEQ ID NO: 131312 - DNA, 615 bp, Homo sapiens
actacagtcaccacactgtacattagatcctcagaacttgttcaccttctaaatggaagtgtgtaccctttgacccaatttctccctccacgcagcccctggcaaccaccattctaattctgacagtagactttaatgttctgacaacatacacacagaaaatgataactatgtgaggtgatgtatatgttaattggcttgattgtgggaatcttttcacaatgtatacctatatgaagacaccacattgtacactgaaaatatatacctcaataaagaaaaaagtaacaagaaatgaaaaaaataataaagcaacgaaaaaaccctcaaagacctcatgctgtttgaaagagacaagaaactaggcaggcctctgtgtgcaagcccaggctctgcccttttccctgttagttttcaccccttccttcctttaaatccttcttttccccaacgctytggactcaaataactattaggaggaaagaagtgaaaataaactaacatgtgtagagcatgtactgtacaccagatgttagactttattctccattgtttatgttctccaacccatcatcgaatcctgtccctttaaccttcacagtatctccagaatcc

SEQ ID NO: 131313 - DNA, 517 bp, Homo sapiens
agactgccccatcaaatatatgcatgaacaggtagaggtcattgctaatcaccttctataaaaaatgcaatgctctaccgcacttaccatcaggcaaccatttatttatttgctgttgtctgtctccttgaaccctatcttgcctctattgtcttttccaagagggctgggatgttttgtgcactgctgtggccccagctcctggaaaagtggttggcatcaagtaggtctgaatacatgtttatggaatgaatcagtgaattggcacaacaattggtgaagataaatactttctcctgtttctacaaatgggktcaatgctgctcagaatgacaaagtaatttatgaatactcagcttctaagaggtggaaacagaaacagaccccaggaaggttttctagtcaacatagaaagaaaccaggagaatagttataaagtggtcttgcagataaataatttattattaaactatctttcctaacattgagattagtttaaagaggttacttagaaaca

SEQ ID NO: 131314 - DNA, 305 bp, Homo sapiens
ctctctttaaaatcaggaacatatggaataaaaatttgggtgtgctatatttaattcttattaaaatgtctaataaggttttttccactctgcctttatgcttacttttgtaattattcatgagatgacaaacatatacaaaataaaaaggggctattgtgcccagatggtagttatatctattttcctggtatattgtgggttaaatggggtagaaaaaacaakacttactcagtgtacattaagagctcctggactttattgtctacttttcttatttaaacatgcatttgatataaattttg

SEQ ID NO: 131315 - DNA, 573 bp, Homo sapiens
gtccatccatatttctaccagaaatttcttttgttcttcacttttatctggttagaactgtgccctgcatatttttttttctctctgatatttcagtgggtagccaggcacaaggaccaaagggctatctgaaatatgaacatgggtttactgtagtggttttttttaaaaaaacaaggctccttttaagaactttcttaaatttgtctatcaaaatggccatgaatacaattttctgagagttcgcatgaaaccataatacaacacaaaggatttcaattaatatttggtcaaaaggttacatgttatattttaagtactgtgcatttcaaatgcatgagatttgcttttatattgaatagggatgtaatcaaatgaagcaaatttcagtggtccagggaaggtaacagaacagctgtgtaaattcaatcactctcctccatttccatccttctgggtggyttcactacgagcatgatgagctaacaagttacttgattgactagcaggagaagtcctacccatcacaactggtaagctttataatcttttgttgaaagttaacagagccct

SEQ ID NO: 131316 - DNA, 535 bp, Homo sapiens
tctactgcctttcatctcaacccttctcacacattttcccttcaccaatatccccaatatcttcttcccttctattttatcctrtgatgttgctctgtcttttatgtgcctcatacccttgggcctggattggattgtgtctccctaaattatttttctacttccaggtcaatacatcctcatttctgtgtaaaagtgtttattctttgaggtcagtttcactgttaagtgatcatccatttcttgccccaatttctgcatatgaggtcttatatttaggtcttatatctattttgagttttgtttttgtgtatggcataacataaatgtccagtttcattcttttgcatgtggaaattgagttttctcagcaccatttattgaagacaccatccttcccctgctgtatcctcttggtgcccttggcaccaaaaactggttgaccctatatgtttgcatttatttctgaaacactctattctgctccactggtctataagtctgtttttatgccagtatcatattgttttgatta

SEQ ID NO: 131317 - DNA, 562 bp, Homo sapiens
ggacactcatgggggccacattttccattgcgagaagtcccacttgtgaatatggctctccctggctgcttcctccatctaaacaatgactagaataagaacttggcggagacctgtttttttcttccccttcttgatggcgaggtagccaggctcttctcaaaaacacatttttgtatttgggagttctcatcacatttaacttggtggctgaaaggaaaagaccacactgaggtcttaagctcatgtcaaggactcttgtccaatttactgggaaactctggtttgcaggtgatgtgcttctggcaaatggtaaagtggagtcttatttcccagttctcattgtcctatgtgtgtgtgtgtgtatatatatatatatcccatagatccatagagagagatatatatatatcccatagatatatatgtgtatatatatatcccacatatatatatcccatatatatcccacatatatatatcccatatatatatctcatatatatatcccatatatatatcccatakatatatcccatagatatatcccatagatatatcc

SEQ ID NO: 131318 - DNA, 575 bp, Homo sapiens
tgctgtaaatttaacttctattgctgtttgtgcactaaagggcactcatcatcccgaaagaattaatgcaacttctaaaaagtaggccagctaatttacaggcaatagcttacataccagaaaaaaactggatcagtaagtaatgcgatatttatttccaagaaatctggcaatgtttttctcactgaaaaatgagtaggaatgaagtcaatctgaaagtgatttttttcagaggcgggtgagcacaaggaaacacctttcgctgatgaaggaggaatatgaagcagcagttgcagaggtgaagaggaagaggagtatttgccaggaaaactaggatggacccttcccagtatacatacagggaggatgtaaaagtcaaaaacttccgtcaaaattaaggccaacaccaagaaagaaaaaccagtcctctcaggtaatagaattactagactcccattcagcctttcttttaytcattcatttctcaatcttcctttttgtttggctcgtgtttatggagcatgtaccatattccagagcttgatcttggtgctgaggttatgacaggaataact

SEQ ID NO: 131319 - DNA, 620 bp, Homo sapiens
cttccacaagtgatagagtcacgatccctctctacatggaacatcagcattcctacagatgtagagaggtgcctgtctgatctaaatagctggaacactgggtcaggagtgtgactgggaggcagactgctttcctgctggcctgcaggagagctgaggtggctacstcccttgtgaaaacacctcagtgtgtttcactgagagctccctcagccatctctgtcaagactgggacctcagcccaccattgggtattgcatttacccacttgctttagccacagctgattcatacccatggaccccatttctactggcctgaatcctgaactgtttaacccagtaaataaactactgggggaaaaataataaataaataactgcacacactgaggaatgagataaacttcaagagatctctgccattctaccccacaggagacagcgaatctgctcacacactgagcatattgttactacaaccaacatttgataaagccatcataaagactctctataaacaggaaactcatgcagagtcttcacccttgaaagcacccagagctgaattaggttacaataaactataatcattaaagtcacatccttaaggggaaaaaa

SEQ ID NO: 131320 - DNA, 545 bp, Homo sapiens
gatgccattcctttctgtttgttagttttccttctaacagtcaagtccctcagctgcaggtctgttggagttttctggaggtccgctccagatcctgtttgcctgggtatcaccagcagaggctgccgaacagcaaatatttcagaacagcaaatattgctgtctaatccttcctctggaagcttcatctcagaggggcacccggctgtatgaggtgtcagtcagcccctactgggagctgtctccaagttaggctacataggggtcagggacccacttgaggcattctatccattctgagatctcaaacactgtgctgggagaaccactgctctcttcagagctgtcagacagagacgtttaagtctgcagaaatttctgctcccttttgttcagctatkccctgcccccagaggtggagtctacataggcaggttggcctcagtgtcccgtggtgggctccaaccagtttgagcttccaggctgctttgtttatgtacttaagcatcagcaatggcagacactactcccccagccatgcttgc

SEQ ID NO: 131321 - DNA, 561 bp, Homo sapiens
atttttgttctttcccttacacaagagctagcaaaccaggacaggtgatccaggttctggagctcaaccaaggcagtttcattttccttttttctttttttttttagacagagtttcagtcttcttccccaggctggaatgcaatggcccaatctcggctcactgcaacctccacttcctgggttcaactgattctcctgcctcagcctcccgagtagctgagattacaggcatgtgctaccacgcctggctaattttgtatttttagtagagayggagtttctccctgttagtcaggctggtctcaagcttcttacctcaagtgatctacccaccttggcctcccaaagttctgggattacaggcagaagccaccgcactcagccaggcagttccattttttatttagaatcagcctgagtctctccagcctggcttattattgggccatcagccctgggtcactgggaattctctcacaatcacctaggtgtgtttgaggcatttcaggatggccagagtagaattgtttcaggctgacaagagtggttaattctgctt

SEQ ID NO: 131322 - DNA, 561 bp, Homo sapiens
atttttgttctttcccttacacaagagctagcaaaccaggacaggtgatccaggttctggagctcaaccaaggcagtttcattttccttttttctttttttttttagacagagtttcagtcttcttccccaggctggaatgcaatggcccaatctcggctcactgcaacctccacttcctgggttcaactgattctcctgcctcagcctcccgagtagctgagattacaggcatgtgctaccacgcctggctaattttgtatttttagtagagatrgagtttctccctgttagtcaggctggtctcaagcttcttacctcaagtgatctacccaccttggcctcccaaagttctgggattacaggcagaagccaccgcactcagccaggcagttccattttttatttagaatcagcctgagtctctccagcctggcttattattgggccatcagccctgggtcactgggaattctctcacaatcacctaggtgtgtttgaggcatttcaggatggccagagtagaattgtttcaggctgacaagagtggttaattctgctt

SEQ ID NO: 131323 - DNA, 561 bp, Homo sapiens
atttttgttctttcccttacacaagagctagcaaaccaggacaggtgatccaggttctggagctcaaccaaggcagtttcattttccttttttctttttttttttagacagagtttcagtcttcttccccaggctggaatgcaatggcccaatctcggctcactgcaacctccacttcctgggttcaactgattctcctgcctcagcctcccgagtagctgagattacaggcatgtgctaccacgcctggctaattttgtatttttagtagagatggagtttctccctgttagtcaggctggtctcaagcttctkacctcaagtgatctacccaccttggcctcccaaagttctgggattacaggcagaagccaccgcactcagccaggcagttccattttttatttagaatcagcctgagtctctccagcctggcttattattgggccatcagccctgggtcactgggaattctctcacaatcacctaggtgtgtttgaggcatttcaggatggccagagtagaattgtttcaggctgacaagagtggttaattctgctt

SEQ ID NO: 131324 - DNA, 201 bp, Homo sapiens
catttcaggatggccagagtagaattgtttcaggctgacaagagtggttaattctgcttctgtctcagtgtaagagaagtgagtcatcctgtrtttgttcatcccctcatacaagaggtgtctttggttgatacacagatgacagtttctccagtttcctggtacttggataataaacaaggaaaagatctggagacccaa

SEQ ID NO: 131325 - DNA, 607 bp, Homo sapiens
agcaataacatcccacatgaacagtggaatcagcactcttccccacagaactcagaacctttgtcctgattarctcattatgactgacattaactctgagattttgctggcggcaatgtggagggagagtattaccttttggctaggtatcttcttgtcctgaggtctttttattcttcatcggcacctcctgtaagtaactgggtttgggctgctcagaaattcctgtctgtgataaataagggaaatttcagacaggatggtaactccatagctattcaggccaaagagttggtagaccattaaaaacaattcacatccttcatgttctgggtttaaatatgcatatttccatggtcttactccctccaaaattggtcagaccagttcaaggttggatgacagatgtgagcaaatcagcgtcagacaagttgagcagactttaacttcctatattgtagtagaaaattcctctcataaaacaacgaggcgcacgtatcaagacccctgctgtgtccaattagacttctttaaaaaggaacaacctctttaactctgtgagtttctgggggctgtttatcttttccttttggcttatcacaactct

SEQ ID NO: 131326 - DNA, 607 bp, Homo sapiens
agcaataacatcccacatgaacagtggaatcagcactcttccccacagaactcagaacctttgtcctgattaactcattatgactgacattaactctgagattttgctggcggcaatgtggagggagagtattaccttttggctaggtwtcttcttgtcctgaggtctttttattcttcatcggcacctcctgtaagtaactgggtttgggctgctcagaaattcctgtctgtgataaataagggaaatttcagacaggatggtaactccatagctattcaggccaaagagttggtagaccattaaaaacaattcacatccttcatgttctgggtttaaatatgcatatttccatggtcttactccctccaaaattggtcagaccagttcaaggttggatgacagatgtgagcaaatcagcgtcagacaagttgagcagactttaacttcctatattgtagtagaaaattcctctcataaaacaacgaggcgcacgtatcaagacccctgctgtgtccaattagacttctttaaaaaggaacaacctctttaactctgtgagtttctgggggctgtttatcttttccttttggcttatcacaactct

SEQ ID NO: 131327 - DNA, 498 bp, Homo sapiens
ctcccttctggctccccttgtgtgtcttctccctcatagcaatgagttaatcaactgtgtttggccacagtgtgctcctgcctggtggtgttttggctagaggacatggacaccattaagctgtgaattgggattattatccctgttgtacaggtggraaaactgtggcacagtgaggttaagtaatttgccataggatacatagttattaagcagtacaagaacttgacccaaagaaactggtctccagagtgatatatagaaatttaagtgaatttttaaaagacaattccagaaaaaatatatatattcaagaaataaaatgtagtcatcatttaccgcatggcccagctctgaatagcatttacatggccacagtaatgtaaacattgaataatgacttagctattaaatcagaaggatgagaggatatgtgggctgggcagatagaggaaaaagccaagacctgcatcttttatagtaagaagttacaagata

SEQ ID NO: 131328 - DNA, 598 bp, Homo sapiens
gagtgtgaaatgttgctaaatgtgtcaggaaacaattagataacataagaggcatgttttctcagtgcacagagaaatatattatgcaggcaggagataaacacaaagttttctgagctccagcatattcagcactctcccttgctctctctttttaatccaacagagaaattgtttggcaagagtaagccctgtttcaaatacttggagaaggcagaaaggcctgctttgcttctgactgctgtcgcttgagccctgtgctatcaggctcagcgagatacaaatagtcttccactcaaattaaatgtgtgcccttctaattagcattataaatataggtttctctgagccagagttgataaaattayagtgttgagctggaaaggaaccggcagctcttccatgctgacacaatggccacagcgtttgcatggctagaacaatgcccccagagcctgccccatcttcataggtcagcctgggaaaggaaggtaaatgccaagcaggctgacattaggacgggcacccgggcccagatgcaatctgttcttcgcatgtgacgatgtaaggcttggctcttaggctctggggagagtgg

SEQ ID NO: 131329 - DNA, 639 bp, Homo sapiens
ttctaattttcaggatgaatacttagaaccttttaagacaataaatggttcacttacattttagaatttctgttactatattttaagggtaatttagatgttttgaacaattgggtggtctggggatttatgaaagtraataatgttgagattctactctagtgttgtaatagaggattttaatataaatagtttgaaattgtataaatattttctgattgtgatacttgtgctatttggaatatcagaataccaggaaatgtggatgtataaatttcaaaatatgtataaattacattactatgattttcagtttcttgtaacaataaaaatatcaaaaatacatgtttgtcctgtccctttggaatgcactccactcacagtctggtgtcttcacatacttttgctttgttagtgtgtcaaagcaggggtaattttaaaaagtggagaaacactaaatcaaacaaaacagtgtgttccttcactttacctagaccatactatgttcaaacacaaaatctaactgaaaataacgttattgaaatgcagatcatttgaaaaataatgcaatttgaccatagcataaaactgtaagtaatgtaaccaattttacctttgtgtcccaggtcaaaactctgg

SEQ ID NO: 131330 - DNA, 639 bp, Homo sapiens
ttctaattttcaggatgaatacttagaaccttttaagacaataaatggttcacttacattttagaatttctgttactatattttaagggtaatttagatgttttgaacaattgggtggtctggggatttatgaaagtgaataatgttgagattctactctagtgttgtaatagaggattttaatataaatagtttgaaattgtataaatattttctgrttgtgatacttgtgctatttggaatatcagaataccaggaaatgtggatgtataaatttcaaaatatgtataaattacattactatgattttcagtttcttgtaacaataaaaatatcaaaaatacatgtttgtcctgtccctttggaatgcactccactcacagtctggtgtcttcacatacttttgctttgttagtgtgtcaaagcaggggtaattttaaaaagtggagaaacactaaatcaaacaaaacagtgtgttccttcactttacctagaccatactatgttcaaacacaaaatctaactgaaaataacgttattgaaatgcagatcatttgaaaaataatgcaatttgaccatagcataaaactgtaagtaatgtaaccaattttacctttgtgtcccaggtcaaaactctgg

SEQ ID NO: 131331 - DNA, 556 bp, Homo sapiens
gaaataacacaatgaagtaacagtaaaccacccaaagaagagaataatctggacaaaaatatgccttgttaatgaggtattcattcaaggaatccatcgctactaaaacaacagagcctggcttacaacccagatctcatgtaaaggcgccacagtcagccggtgccctctgaagytactccagtgtcagccagcacaacgtagggctcagcctggagactggggggtctcctgaagagtttctcaacctcaacactgttgatattttggaccagagaattttttattgtggaagactttcctgtacgttgtagaatgtttagcagtagcccaggtctctacctgctggaggcaagtatcctcccagttttgatcaaccagtaatgcctttaggcattgccaatattccctggagaacaaaatagcccttagttgagaacatctggtctaattcatcttgaaaagtgctagaatattctagctgccccagtgcatgggatctggtaaagcatgtgtgtgcgtgtgtgtgtaggcactagggagcagtgagggtaac

SEQ ID NO: 131332 - DNA, 639 bp, Homo sapiens
ttctaattttcaggatgaatacttagaaccttttaagacaataaatggttcacttacattttagaatttctgttactatattttaagggtaatttagatgttttgaacaattgggtggtctggggatttatgaaagtgaataatgttgagattctactctagtgttgtaatagaggattttaatataaatagtttgaaattgtataaatattttctgattgtgatacttgtgctatttggaatatcagaataccaggaaatgtggatgtataaatttcaaaatatgtataaattacattactatgattttcagtttcttgtaacaataaaaatatcaaaaatacatgtttgtcctgtccctttggaatgcactccactcacagtctggtgtcttcacatacttttgctttgttagtgtgtcaaagcrggggtaattttaaaaagtggagaaacactaaatcaaacaaaacagtgtgttccttcactttacctagaccatactatgttcaaacacaaaatctaactgaaaataacgttattgaaatgcagatcatttgaaaaataatgcaatttgaccatagcataaaactgtaagtaatgtaaccaattttacctttgtgtcccaggtcaaaactctgg

SEQ ID NO: 131333 - DNA, 509 bp, Homo sapiens
cactgcatgaaactaaatttgaatactagaccagcaaacaagttaatgtcccagtgcccagctctacacatgtggcaactgggcttctggcctcttcactccaaccacagtaaaatttctgagttttctgttctaactccccaaacatttgccagttacaggcacctcatctatgtaacagagatgtcaatttcttttatttctctcattcttaatatgaataaatcaataaaaccagacttttgaggagagcatggggaatgaaagaaacaataaagacaatgattaaccacaaaaaatgactccagaggaaaaagtaataacaaaaagagcagaagagacctttaaaggttatatatatatttctgtaaagagaagtggaggataatrcacgtttgggatatatatgaatgaaaggtctgggattttaccctgcttgttttgactagtctgccatatttttgtgaatgctgagcagagatatgagacctctgggagacagagtactg

SEQ ID NO: 131334 - DNA, 596 bp, Homo sapiens
tttgacagagcatgttaggggacaacatcaagtcagggtatttcttaaatgtctggtctgactgmtaaaaatattgtgatattatcctataactacccccaatagacatttctacagcagcacctaatcctcatgtaggagcaatgttggctgtttctcaaagggattgccacttggactcaagacgaactagagaaagcaaatgaatctgtgaaatcttgaggtaattacagggacaaaataaacattgaatggtataagggataaatgcagctgggcatagtcctcggaacccacagcaaagcaaatgttaaataaaacatgatactttgaggcattaggccactaattgctatggatgattaatggggaattttttcagagtcaacattaaaaattgatcttaatttttagcatatttaggaatacaaagatgaaatctagatctttttgtatcagggaaatattgtgagagatgtttttacttattatgtgtaacctcttaaaaatctctaaactgtgaacttttcatattccaaaatttcacagtaagaatactcaggtcagaccctaagctcaaatgtcatatagatatt

SEQ ID NO: 131335 - DNA, 417 bp, Homo sapiens
cttagaaatggaattcctggagcaaaggggcagttccttaacacgtataacaattccatttgttgcagaacaaaacagatgagaacataaatatcaccaaaatataactatgggaaataatgctcccattgtaaatttaataaatttcctgagaatcagtgtgatagggtaataatcttatagaaatcttaaaaacaatttgtcctcaagcactcatgttgttgatatttgacaaaccatattgtgaaaacaaatttaattgaaatggaactgtagactgcaagtcattcatacagyggaatcacttaccctgtccttggggattaaataatgaagctaaaacctttctaatcaccaagggaaaaaaaatctgttatctacgtcatcagctttcacctcagccttgcaaaaggagaa

SEQ ID NO: 131336 - DNA, 417 bp, Homo sapiens
cttagaaatggaattcctggagcaaaggggcagttccttaacacgtataacaattccatttgttgcagaacaaaacagatgagaacataaatatcaccaaaatataactatgggaaataatgctcccattgtaaatttaataaatttcctgagaatcagtgtgatagggtaataatcttatagaaatcttaaaaacaatttgtcctcaagcactcatgttgttgatatttgacaaaccatattgtgaaaacaaatttaattgaaatggaactgtagactgcaagtcattcatacagtggaatcacttaccctgtccttggggattaaataatgaagctaaaacctttctaatcaccaagggaaaaaaaatctgttatctaygtcatcagctttcacctcagccttgcaaaaggagaa

SEQ ID NO: 131337 - DNA, 642 bp, Homo sapiens
tattccactctctccatctagtttccaatgccattaatcttctagacttcttgtgttttttgtgagggagggataacacctcaaatagtgttttcaaattactgcatgggggaaggggtagacttcacaagtgctttcatgttaaaacatgcacaccttcccatccagctcatatacacacactcttgattgatactttggccgggcataaaactctaggactaaattcatttttcctcaggactctaaagacagtcttgtaaagacacatctaacattggtgctgaaaactgacctaacagtctgactcttttttcttaagatccaagagactcacttgacagcagagtttcttaagcttagcattattgacattttgggcccaatggttctttgttgtgggagtctgtcccacacattgtgggatgtttaccaccaccctgtcctcagcccaytagaggccaagagcacctcttccactgtgacaaccaaaatgtctccagacgttgtcagatcatccctggggggtaaaattgccctcagttgagaaccactgctgtatagcaaagggaaaccagctggggctatggtaggctcaataatggtcccccaaacatggccacaccctaatccctggggcct

SEQ ID NO: 131338 - DNA, 629 bp, Homo sapiens
tcctctcaaaattgaattcccctaggtcatggtgccctaaagtctacctgtcaggtatgatggagtacycccattcctagcctgtctgcttgccacctctggcctgggtcagacgtggcacagcaagtgtccttgctctgagacctgagttctcgcaggagcctggttgcctgtgagagcaggtggtgggagcaggtggtgggtgcaggtgagccccagccccagggggcagcactagaaatgcccaggcttgggagactttagtcttaatgcagcctcaactcactggatgaccttggtgtgtcccagcacctgtttccaggggacaaggagtaggaggagcaaggaccaatctactgtgggttctccccctttatgaaaaagtagctgatgccttctggagacctatggcattgccttcatggcactggctggcagagtttggatatctgtcctccacccaaatatcatattgaattgtaattcccgacttgttttgattttacaggcttataggtgtaaggaactcatctccagatgtggcttgggattgaggtaatgctggaacgagttaagacttttggggttattgggaaggcatgattgcattttgcaatgtgagaaggata

SEQ ID NO: 131339 - DNA, 629 bp, Homo sapiens
tcctctcaaaattgaattcccctaggtcatggtgccctaaagtctacctgtcaggtatgatggagtactcccattcctagcctgtctgcttgccacctctggcctgggtcagacgtggcacagcaagtgtccttgctctgagacctgagttctcgcaggagcctggttgcctgtgagagcaggtggtgggagcaggtggtgggtgcaggtgagccccagccccagrgggcagcactagaaatgcccaggcttgggagactttagtcttaatgcagcctcaactcactggatgaccttggtgtgtcccagcacctgtttccaggggacaaggagtaggaggagcaaggaccaatctactgtgggttctccccctttatgaaaaagtagctgatgccttctggagacctatggcattgccttcatggcactggctggcagagtttggatatctgtcctccacccaaatatcatattgaattgtaattcccgacttgttttgattttacaggcttataggtgtaaggaactcatctccagatgtggcttgggattgaggtaatgctggaacgagttaagacttttggggttattgggaaggcatgattgcattttgcaatgtgagaaggata

SEQ ID NO: 131340 - DNA, 568 bp, Homo sapiens
ttgctcaacaacttgatttaagccttgtgacaccctgagcagagaacccaggcacaccgtgctagacatcagatcaacagaactgtgaactggcaaaagagtgttgttttcagctgttaaagtgtggtcaaccttatgtggcaatagaaaactattacaactggtcattccagtatccggcatttacaagggactcattatatattgcttgaattacaggaattatcaaatgacttggaatgtttgtgtcttgtttgatattgcctgtaaataggaacaataaccctttctgaatgacaatgttaggattaaatgagataatatattgtagcgtgtataaaatttagtccacagacaatttttatttcaagccctcattttgccagtttgcagaaacttaaactcagccagttttgggggaggcgggtaggagtggttatggagaagcacctttgtgttggggtagacacaggagcacktggccctcccctgccacattggtgcctgctgcgccatacattacctggctgtgcctgctggccaggccacactggaatgttaccacgtt

SEQ ID NO: 131341 - DNA, 378 bp, Homo sapiens
tcatacttgatggggaatgtgtctggatgcagaattccagttggacaatcattttccttcagaattctgaaggctttcctccactgttttcctgcatcgaatgctgcttttgagaactctgagtcattctgattccaattctttgtctatgacctctcctgtaacctgattttcccccttcttattctccgggagactttgtagaatgtggctgtcttcatggccagcctgggattcagctttcttgatgtaccaagtctgttaccacttgcccatctgtttccagcctcccacagttcccttgttrtttcttcccctcctgctctccctatccttagaggcttgtgactttaaatttttttttaatttctttactga

SEQ ID NO: 131342 - DNA, 425 bp, Homo sapiens
tccaaatttcaccccaaaattatcacgattaaaataatgatggcaacaataataattccatttcaggtgaaattcagattctaaatctttagaaacctttgctgtttttaatgggcttgcaacacacagtttagttaaaaactctgcctgctcggcagaagcagcctcaagacgtgccccagcccagctctgtcccgatgcggcacccatgccctcctacggggaatgtctggaggggtccctgcatggggactctggggttagggccaggaggacatactgtgataccttctggtgccagaatgacattgacagtggcaggcaggtggcctggtgagccaagccctgtgtgttttgtctccaggtgtggcccctcaattcacagaccmgggctacccctggggtggccccatctcttaattcct

SEQ ID NO: 131343 - DNA, 516 bp, Homo sapiens
gctcaggtgccaccgattcttgctgttcttactgggatttttcttcccaagatttggttgattttcttgaatagatgatgttgcttagtttgttgtgtgctcttaggataatttctagagactttaaattgttgttgatggtgacttttcaatacttttcaccagttatggttgttctgaggggaatgtgtccatggggctcctctcaccaccattccagaagtggaattctcatggcagatgattcctaatctttttttaaagggccacagcataaggaaggtagaagacactgatatgtcagggtcattcaaggtataattagagatccaaatccaattaagccaagaaaaggaratttgctggcacacgcgagcaagacagcaggcaccgctggcccacacgaggctgccaaggctcagcgtctctcctcctcctaggacttggctctcttctgcagagacttccttctcagattggctcttcacatacgcagccccaggcctacgctgtgag

SEQ ID NO: 131344 - DNA, 478 bp, Homo sapiens
tgatgaaaaaaattaaagagttggtgaaagggaggagtgaagcgacygcaaaagaatctgcaggcctttctaggatgatggaaatataaagacatcttgattaaggtggtggttacatacgacacacatttatcaaaacttatcaaagcatatcctttaaatctgtgctttttattgtgtatgcaaattatacctcaacaactcaataagttatttttaagtgtcggtatggttgtaagacagagaggagtctaggatattgaagatggaggcaaggaaatgtctggggagtttctaatgcaggcatctttgatcctggtcagatggccttaaagggaagggtataccagtcaaggaaatagggcacattgaataggaatccaggaaatctgggagtagtaaagcctcttttctctattacaacacctctatacaccacagagggtgtgaggaatgagaaacctaaggtctatatttc

SEQ ID NO: 131345 - DNA, 478 bp, Homo sapiens
tgatgaaaaaaattaaagagttggtgaaagggaggagtgaagcgactgcaaaagaatctgcaggcctttctaggatgatggaaatataaagacatcttgattaaggtggtggttacatacgacacacatttatcaaaacttatcaaagcatatcctttaaatctgtgctttttattgtgtatgcaaattatacctcaacaactcaayaagttatttttaagtgtcggtatggttgtaagacagagaggagtctaggatattgaagatggaggcaaggaaatgtctggggagtttctaatgcaggcatctttgatcctggtcagatggccttaaagggaagggtataccagtcaaggaaatagggcacattgaataggaatccaggaaatctgggagtagtaaagcctcttttctctattacaacacctctatacaccacagagggtgtgaggaatgagaaacctaaggtctatatttc

SEQ ID NO: 131346 - DNA, 480 bp, Homo sapiens
agatctactctttttgctgtttgagacagggtctcactatgttgtccaggctggtcttgaactcctgggcttargcaaccctcctacctcagcctcccgagtagctgggatttctggcacatgccaccatgcccagttagagatccactttcatctctctgatttgttcttttgccctagcagtggaaccttgaactcactactgaatctctgagcctcagacagcccatccacaaaacaggagaacaacaatgtctgcagtggaagccccagcttggaggctggagccctaaccaccccaacacaatcccatccaccttcctccaaagcataattcactcatttgacaaaatatatatttggggacatctttagaaaatcaccgtaagttgtgcctatgatacaaacactccatgacaatcccctactgctctccttccaatgagatcatgcctttaagcactctatatatctccacag
